United States Patent Application Publication US 2007/0083945 A1 - sequence listing, part 28

SEQ ID NO: 189528 - DNA, 103 bp, Glycine max
tggtggggaggtggttaatgaagtcatgcatgtgataaactcatcttcagttcagtgacgcttatagtcagaaattgctcttattaaattataaaataataac

SEQ ID NO: 189529 - DNA, 369 bp, Glycine max
  unsure (1)..(369): unsure at all n locations
tcaatgcttggaaacatgcttatggctagggaatccaaaattggttttagaattagaaaaaaacatgaaaattaggatttgcttgtgagagtttttgctcgaatttgggctgccccatgtttgatactttacatagaggtagtgtggaaaacaccttgcaatagtgtgtatacataggtaaatataaggagcatgaaaattcctagcaaagtgtgaatgattgtcttcctaaatgaatgtatgatagtgtggaatgcctttttgaatgcaaatatgtgcaggatgtaattagctttccaatatgcatataaataaatatgagtgaaacagtaaaaatttgtatggtgtacttcanatgtatgtaagtag

SEQ ID NO: 189530 - DNA, 455 bp, Glycine max
  unsure (1)..(455): unsure at all n locations
ggttgttgtcggctagagaggcangggatcttctttttttttcttctctcttcctccattggcgaggtgcttgaaggttattgaaggagtctatgtgagtttgctagctttttttacatgctcatctccattcttacatcttcagctcactagaatccttacatctctcttttgctccattttcatgaccaaggtctaggaggagctcaagattccaactcaacccacactcatctctttgcttccttgtgtcaaaaaagaggtaagggaggagcaattgatctcttaggacccatgctatgttgttatgaagttaaacttcatttatgttgtgggtttggtatgaaactngtaatatgtaattgtgctagtatgatttctgggaagttgaattttgaattctgggttcaaaaaagagtttctcgatcctaaagaaatcatacatgatatgtctc

SEQ ID NO: 189531 - DNA, 311 bp, Glycine max
aaacatgctctattttcatctcccactccaagtaggcctccggatcattctttcctttaaagggaggaatgttgagtttaataccatcaattcggttttgtctaggaacaccatcattccctcttctcctcctttcttcttcattatgatctctgttctccatttgatccaacctctcatggagcgcatcatctcgttggttcattaacctctccatatgttgcatcaaagcttgcatttggaattgcgaaagcccccctccatcattaggatttgttcctgccatctcaaacaaacaaatcaaacgtaac

SEQ ID NO: 189532 - DNA, 391 bp, Glycine max
  unsure (1)..(391): unsure at all n locations
acacttgatactcagcttagcatgatatctttgtacttgcagttatgtatagaagtttttcaatcatacctctatatcttgattcatccactaatttacctttctcatctaaatcaaggtatattgatgtagccataagagtagatgcttctttgcatttttccataccaaatatctttattagttctatgcaaaatttggtttgactgaggaaggttccatgttccatttgcttgacttggagtcctagaaaaaagtttagttctcctatcatagacatctcaaattctttctgcatacaacatgaaaattccttgcatatggtttcattagtagagccaaatataatatcatcaacatatattngaacaattaacaaatcaattgttac

SEQ ID NO: 189533 - DNA, 300 bp, Glycine max
  unsure (1)..(300): unsure at all n locations
atgggtgagtcccgtctaggtagtcccgaagaaaaccggccttaccgtgataaaaaatgagaaggaggagctggttcctactcgggtgcagaacagttggagagtctgcattgactataggagactgaaccaggttacaaaaaaggaccattttcccatgccattcattgaccagatgcttgaacgcttggcaagtgaatctcactattgtttccttgatgggttttctggttacatgcaaatcactattgctcttgaggatcaggaanagaccacattcacctgccctttcgacacttt

SEQ ID NO: 189534 - DNA, 391 bp, Glycine max
  unsure (1)..(391): unsure at all n locations
tcttagtctcgcctgtttatgatgaatatgtgtgctcttcatgcactcatctaaatgcaataacatcacttctggcactaaattgctgggagttggaagccatcttctcaattaaatctttggcttcagcaggggtcatgttttcaagggctccaccactggcaacatttatcatacttctctccatgttgctcagtccttcataaanatattgtaggagaagctgctcagaaatctggtggtgagggcaactagcacataatttattaaatctctcccagtattcatataggctttctccactgagctgcctaatgcctgaaatatcctttctgatggtcgtggtcctggaagcatggtaaatattttctaaaatactctcttatgtcat

SEQ ID NO: 189535 - DNA, 308 bp, Glycine max
tgattatcaattaaactctttcaatgcgatatacttattaacgttgggtatggtgtgattattctaaaagacaacttttttattataatattattttctgaacaacaaactgattatattaaaacacaagaattatgtgaaacgaagcaccagatgtgcctaaccccatacccccaaaattacaagagaagcacactgtctcaacaccaccaatatactgacgcagctctaatataagacggagcttcaaagataattgatcatgattctatttttattatcaactttacaaagaaaaactcctttct

SEQ ID NO: 189536 - DNA, 455 bp, Glycine max
  unsure (1)..(455): unsure at all n locations
ttatagactcacgaatttgtcttgcaataatgttttagcacntattgaaaaatattaaaatcgactaaaattaaaacagtagaatttaaccggaataaaatgatttaagaaaaggtgaggcacttatatgagattaagagaagtcaccatcctcaatcaaagggtgcagattataaaactcttcactcttaagaatgaaaattcaaaatacgcaatagttgctaatcaaatatgtggtgttaattggaacaatgatggatgatctgatcagaatattttaaaaatttactttcatttaaagaattcagaccaataatacactgtcataagttctgctcagacaaacagctacatatctgacatatacccggtaacagctcaataggggggaatattaatgtcactctgcgaaaattacaggaaatgccacaaaactgagcacctaaccacaacaa

SEQ ID NO: 189537 - DNA, 343 bp, Glycine max
  unsure (1)..(343): unsure at all n locations
gagttcattaaggattgaagaatttttttgatgctgtatttgataagactaatccccaaaagaagggaactgtgnttgttttttatgatgttgtaggaagtctaagagaagcttctccaaggagtgaagaggtgacgagcaataattctcaagaaggaccctcataacaaaactttcttcccaaggaatggagagcatcaagggacctctcaatagacaacatcatcagagacatggaaaaaaagtatctactagacactcattgaatcttatttgtgagcattattcttttgtatctcttgtaaaaccccaatctattgaagaggcacttagtgatgagttt

SEQ ID NO: 189538 - DNA, 481 bp, Glycine max
gctggcgaaaggattgaagtgggtttgataagaggcatttttgattatcctgctttgatgaataagaagattggggaaaatggagagaataagaaggagggaggaacccatgctgtgattgccatccccacatggcccaaattcccaccaactcaacaatgtcaatacttagccaatattagcccttctcattacctaccaccctatcagccaagaacacctaatcatccacaaaggccacccctatatcagccacaaaaccggcctgctgcacatccgataccaaacaccacccttaacacgaaccaaaacaccaaccagggaaggaagtttccagaaaagaagcctgtagaattcaccccaattccggtgtcatacgctaacttactcccatatctactcaataatgcaatggtagccataatcccaacaaagattcctcaaccttctttttcccgaggatacaactcgaatgcaacat

SEQ ID NO: 189539 - DNA, 456 bp, Glycine max
  unsure (1)..(456): unsure at all n locations
gacccttaggtgctttgctgatggcttcttctcgttccaagcttcaattggagtcttgtcttttacaaacttagttggacatctgttgagtatgtaaacagcagtgtagactgcttcagcccagaatgtgttaggtagtcccttctccttgagcatctctagccatctccataactatgtgattctttctctcggacactccattttgttgaggagaatatacgactgtaagtngtcgcttaatgccttcatccttacaaaatctttcaaactcgcgagaggtgtactctntgtcgcgatcacttcttaatacttttatccgttctccactttgattttcaggaagggccttgaactttttgaatactccaaagacttctgattttcttttagataatatacccatgtcattctagagagtcatcaatgaacagtatgaagtacctgtggtcttat

SEQ ID NO: 189540 - DNA, 467 bp, Glycine max
  unsure (1)..(467): unsure at all n locations
tatgctgcanacatctacaatagacctcctcaacctcagcattataatcagctaaatcaaaacaattatgacctctccaacaactggtacaatcccaggtggaggaatcatcccaaccttagatggtcgagtccttcacaacagaagcaacaacaacagccttattttcataatgttgctggcctaagcagaccatatgttcctccaccaatccagcagcaacagcaacaacaacaaccctagaaacagcaaacagttaaggctcctccacaaccttcccttgaagaacttgtgaagcanatgactatgcaaaacatgcagtttcaacaagagaccagagcctccattcagagcttaactaatcagaatggggaagtggctacacagttaaatcaacaacaatcctagaattctgagatattaccttctcaatctgtccagaatcccanaaatgtgagtgtcattgc

SEQ ID NO: 189541 - DNA, 459 bp, Glycine max
  unsure (1)..(459): unsure at all n locations
ataacctaatgccgttaacctatggaattaaaannaactaactggcctgagtgtaactgaaattgtggcaaccaaaagtcacccccaacagccaacaagtcagccaccattcggtctcccaaaaggctgatgcctaggttgtcaattgggcccttattacaactagaactaaacctaactaaagcttttttagttgattaacccaaaacatcattttggtcacccaactttacaaggattgggccattatttagacaaactaaacactcttaattcgatacaaagtggtgtcatttattcctcctccatttgggcatgatacaactccaaccttggactctcttcttgaacttggcttgattcaacagtatgacacatttgtgaaagctccttggtttcttgcttagcctagtaaagccccaaatcttcaaggatcctgccttgtctagtatgtctata

SEQ ID NO: 189542 - DNA, 372 bp, Glycine max
  unsure (1)..(372): unsure at all n locations
tctatctagtttgcaccctgcaaaatcagaatctgaaaagccaattagatttaaggagatacctttgggataccacaagccaacattggttgggcccttaaggaacttaatgatccttttaacagctgtcaagtgagattcattaagattagcctgataccttgcacaatggcgaacactaagcataatatttggtcaacttgcagttaagtaaagaagtgaaccaatcatacctctatatcttgactcatcaactgatttacatctttcatctaagtcaaaataggttgatgatgccattggagttgatgtctctttgccttttccatgtggatatcttaattatttngtacatatctggtttgacataag

SEQ ID NO: 189543 - DNA, 394 bp, Glycine max
  unsure (1)..(394): unsure at all n locations
tcgttcttcgacgttcttcattcgttcttcatcgttcttctatcttcaacgggtaagtacctcgaaccaagcttttcgattcattctatgtacccgtagtggtccacattgtgtttcgtgcattnttattctcgttntgtttactttntataccccctgttgacgtgcttaagccattttacttaagtcatttcttgcttaacttanaaataaaataaatttccaccgaacgtttgaattgtattatcccttaacttcggttaaaataaattccgaccgttcggtcgtgccgtaaccacgttggaaatcaaataaaggtaaaaaataatataataattcaaaagacatcttttagtacaataaagctgaaaatcaatcggacgctctctctttg

SEQ ID NO: 189544 - DNA, 300 bp, Glycine max
  unsure (1)..(300): unsure at all n locations
tctcnggcaccanaatgagatgcccttatgtgagtggcatagcaactttggtcaagtctaggcaccctgagtggtgtcctactgctgtaaaacctgttttgatgacaacaacttatgttcttgataacaccaagaaaacttcttagagatgcctcaattgctaaaccattcagtccttatgatcatggtctaagacacattgaccctattagagctcttgaccctagtttggtctatgacattatgccacaagactactttgaatttctgggcacaataaaattgactccaacataacta

SEQ ID NO: 189545 - DNA, 321 bp, Glycine max
acttcatatgtgtgtttgaatttgctggtagaaatttctaatagaacattcttgattgatcttatttgtttacctttgaggaaaattgatattattttgggtatggactgggtatcttccaaacatgccttgttaaactgttttgataaaatcgtggtgtttgatgattctggagtgagtaaggataggatgtttatctctgccaaccaagtcatgacatctttgaaggaagatgcccaagtgtacatgttagtcgtcttatacgactaacttttgttaagaaacattttgtaaaaactgtatagttccccaatttatagt

SEQ ID NO: 189546 - DNA, 402 bp, Glycine max
  unsure (1)..(402): unsure at all n locations
tgccacccagctcacccaggcgagctttgttgcttcccctataatgcactgccttctggagaacttcctagaaggcccaagtgggcctagttgctatctgcaccccttgtttactaaatacaccccttgcctttttattgctgattctttnttcgtaacgttacggaaacttatgaattacgtaacgatacttgttttctttccgtattgtgttggaaccttacggattacgtaagcatcccttttttgcctttcagaatattacaaaacttcacggattgtgctacaatgcnttcttttgacttctggcacgtctcggaaattcatgaattgcctaacgatgggtgccaagtaccttgaagtggtcaaacgaggatcgcatcccaacaacggatggtcccc

SEQ ID NO: 189547 - DNA, 302 bp, Glycine max
tgtgcttggatcgttcatgatgagcacggtttgaaacaagacttatagcatatttattatcacaaaatagcatcacagagagcacatcaacttttaagtaaagaagtaacttgcttaaccaaacaattccactagtaacaaaagacaagacacgatattctgcttcagtggatgattttgaaacaatgggttgtttcttagaacgctaagaaagaaggttgtttcccagaaatacacaaaagccagaagtggatcttctagtatcaacacagttggcccaatcagcatcagcaaaggcaatg

SEQ ID NO: 189548 - DNA, 442 bp, Glycine max
  unsure (1)..(442): unsure at all n locations
actaagctgcctgccctgataattaagggttaatggtcactatgaatganaaattccttgcgataaaggtagtgttgccatgttttcaaagcccgtactaaggcatacaactccttatcataagttgaatagttaagggtagaaccacttatcttttcactaaaataagcaattggatggccttcttgcatcaacacagccccaatcccaacatttgaagcatcacactcaatttcaaaagatttttgaaagtttggcaacgcaagtatgggggcattagttagcttttgcttaagaacattgaaagcttcttcttgtttctctccccatttgaaaccaacatatttcttgagcacttcatttagaggtgctgccaatgtgctaaaattcttcacaaatcgtctataanaacttgctaaccatgatactcctcacctcagca

SEQ ID NO: 189549 - DNA, 337 bp, Glycine max
  unsure (1)..(337): unsure at all n locations
cacttacttgttggtgtttaacaaaaacgcaaaacggaatcaaaaaatgcaaaaaaggatgaccctagggctgcaaactcgtcaatcccgtgggtatggctttcgaaaggggggaaaggaagtttttgaatgcaaaaacgtcccccctttcgtcattcttataatttggtgcaggggtggctcgcccaggcgagctaacctgcactttttttttttttttttgaggggaacattaaccatgtcccctcccttctcatggattagcatcttgcctaacttgaacttacttaggttagaattaggcgttgattacttatttttttttactttntaaaac

SEQ ID NO: 189550 - DNA, 478 bp, Glycine max
  unsure (1)..(478): unsure at all n locations
tcaagaataatggcctcaacaaacttcttattcccagaaagttattcaataaataggcctnctatttttaatggagagggttaccactattggaaaacccaaatgcaaaatttcattgaggcaatagacttaaacatttgggaagccatagaagttggaccttatgtacccaccatggtggctggtaatacaacaatagagaaacctagagaagagtggtctgaagaagaaaaaagattagtgcagtacaatttaaaggctaaaaatatcattacttctgccctangaatggatgaaatatttagggtgtcaaattgacagagtgctaatgatatgtgggacactctacaagttacacatgaaggaacaactgatgtcaaaagatctaggataaatactctaactcatgagtatgaaaatattangatgaagacaaatgaaagtatacatgatatgcataaaagaatcacacatatag

SEQ ID NO: 189551 - DNA, 517 bp, Glycine max
  unsure (1)..(517): unsure at all n locations
acctcccattactactganacccatcacagttcctcctccgccactgatgttcatgttttccactggtgtctacttgcgctactcttagtcctattaataacacgacactcttgtggggtatcgaaatcaaacatagttagagccgaaacatgagatcacactcggatcgagctttgtcggaaggaaccatttggatttgggtttgctttgcttgtgatgctccaactaattaatacttaaagtaaacttgcattcaagtcaaaactcatccttaatatttacagcttctaaccaaattcctgcctgaaagtattatgggggataaattagttctttcatcaaaaatttacatttaatctttaaatatgaaaaatacaatctaaataatgtaactataaattaatcttttaaatttataatttatgttaataaatataaaaatataatttnttttattaaagtatctctgacatcataattaaaaataaatagctcataataatatagataattata

SEQ ID NO: 189552 - DNA, 458 bp, Glycine max
  unsure (1)..(458): unsure at all n locations
cctgaatagtttgggctgagtcacaagttagccctaaagcatattcagttgggccaaacagctgatccacattgagtagttaatttttagagatgggtcaaattatcagactattnttcggattttaaaaaataacagactgattttttctttccttcctatagtactcattttcaaattgaagaaaaatggattgttttcttcttttctattgttcaggggttcttcattntatctttttaccaagaaaagtgctagcatctcgtttcataacacattatttctgatacacaatctcctattagttgatatttgttcaaaactacatatttntttatttntttatntggtnaaaataatatacagtanttgaataatatatcaaaatactactntatcaatagggtnntatgtgtatttatnnntataatataaatattaaaaattaatatatcaaa

SEQ ID NO: 189553 - DNA, 416 bp, Glycine max
  unsure (1)..(416): unsure at all n locations
ctcaaagaaacanaattcatacacactatgtaaatggttaattatatagattaaaaaaattgagaattttagatgagaagttaaaaacaatatattgagtccttctattttagatgaaaagtaatgaatgagttaaaagtaaaactataaatccttcttattttgagtgagntcctttattttggatggaagatagtgttaggcaatccaacgaacaattgatagctcccacattctttaatttatttaaagaataactaaattattttctaanaattactagttgatgtttttttataaaaaagaaagaataccaataaaataagtattattaatcttgtcattttttcccctttacgaaaacccgttaatattttattgttgtcacttcatagatgatggaatctttaatggaa

SEQ ID NO: 189554 - DNA, 389 bp, Glycine max
  unsure (1)..(389): unsure at all n locations
ttgagctatctctntgtgcgtttagagagaaagaataattttacgttttgcaagtccagnttttactatttatgtagcaataaaatctcgtttcctacttcaatctacaatttcgtttctactgattaatggaaggctaagtctccagcgtttttttctcttgaggatcaagcacaactctctttgaggttatattatttctattgaattctgatcagtttttcctcttcaccaattactctatatttgttgctattaatccatgcatgcttagtgcttgatcaattgcctctacactataattacgttcatgcttaacgatcaaattgttcatgaataatcggtgtatgtgttgctaatcacataatgaatgccttaatgtaaatttc

SEQ ID NO: 189555 - DNA, 415 bp, Glycine max
  unsure (1)..(415): unsure at all n locations
actcactntctcacatcgaagtaccctttgagccaacatttcttgttctcttggtcccacaatatgaattcatggaccagctataggcaaccctgcaagcaagtccgattttccaacataatttgtcttcaatttcctctaatcctgagctnttccggatttccagatgcaaagtggtatgcttttacacaagggcaacatatggctcaatgatgacaatccattttgccctgtattgttaatggaatatcatgccaccccactatgcggacaccttggagtttccataactatccaccacctttaagctaatttcacctgtgaccatccccggcgggatgtcaaggaattcattaagaattgcccacctatcaataacccaacacacacccgcaattgactgatatacaaccct

SEQ ID NO: 189556 - DNA, 266 bp, Glycine max
  unsure (1)..(266): unsure at all n locations
cacttggtgggcgcatgtttaggcatgaatagcagaaaatgggggcaatgtggcatgccccattgcttccgaatgcaccctaggcctaaggccatcccttacgacctctcaattcaacaaaaacaagcaacaatttgaggataaatccctcacgtgtttgagcaaatacatgcaanttagagcacccaaatacatcaatggaaagctagagagcccaagaatgaggtacttacttgttggagacgaataatagcgcaaaacggaat

SEQ ID NO: 189557 - DNA, 284 bp, Glycine max
acgtagggcaaactctgaattcaaattataatagctgttgtcaatcacatctggccactgcgcatcgattaccagagagtaaatctctagtaaaacactttctaacttaattttctcggacaaaccttttgctaattcaactggaatctccctcctatttaatatattctgtctagcactctatagactgtctcgatcatccatcttgaatatatttaattgctttgtcttgaataaagctttgacacgcatgtgatcgtttggcatatctaaatcatcgcttg

SEQ ID NO: 189558 - DNA, 459 bp, Glycine max
  unsure (1)..(459): unsure at all n locations
cacatggattngatggggcctatgcaggttgaaagccctggaggaaagaggtatgcctatgttgttggggatgatttctccagatttacctgggtcaactttatcagagagaaatcagaaatctttgaagtattcaaagagttgagtctaagacttcaaagagaaaaagactgtgtcatcaagagaatcaggagtgaccatggcagagaatttgaaaacagcaggttcactgaattctgcacatctgaaggcatcactcatgagttctctgcagccattacaccacaacagaatgggatagttgagaggaaaaacaggactctgcaagaggctgctagggtcatgcttcatgccaaagaacttccctataatctctgggctgaagccatgaacacagcatgctacatccacaacagagtcacacttagaagagggactcaaccactctgtatgaaatct

SEQ ID NO: 189559 - DNA, 446 bp, Glycine max
  unsure (1)..(446): unsure at all n locations
cttctcgcatctaactctctagttcccacgttgcgtcctctccttatgtcctcccttttataccttgaccaacgaaatctcttcctcttaagtgctttgttcgcatatcctcgatcctcaaaagcaatatttcatatgttaagttcttcttgttggaccttgtggcctcaataacttaagagggataggcttagaatgcagaagaagcagcaatcaatttaatagtgttctttaaataagataagggaagagagaatgctaatacagttttatactggttcgaccacaacccgtgcctacgtccagtactcaagcaacccacttgagatntctaatatctttgtaaaaatccatttacaacttctgaaccacacaaggacaacccatcccttgtgttcatgaatccttacaactcaagagaccctcggtcccttattcaatttcat

SEQ ID NO: 189560 - DNA, 199 bp, Glycine max
ttccctaatgtgatcatattttggaaaagagagaccgttttgttctctataaagaaatacattgaactttcgaaccctctaaattagtgggcgtgatctatatcgtactctgaagtctgagcccttcatactttgacggaatattatacatatagagaagtattagcgacttgcgcccaaggcattcccaccataattt

SEQ ID NO: 189561 - DNA, 487 bp, Glycine max
  unsure (1)..(487): unsure at all n locations
tctcacatattatttcacataatattgtgttaatcactttattatctcgtttatgtaaaaatcggttcttaccattaaaaatcatgtcagtcatttctgatggtaaaaatgaataanaacgagtttttaaccagaacttcctctagacacaagttaaagaatcaattatagaaattcttattagaaaccatattgcgtacatcttggaagttatagggaaatacattctttaatagttcattttaatttcttaactaatttcctcatgacattagcgtatcattntgtcattgttttaaagggcattaactctagaatgctattgttgaaaatgacatatggatngaaaattacagtgaaagtgtttaatgataattttatccagcaaagaaaaaaaatcataaaagctttctctttattacatttacatatataactatacattggacatccgtcaatttttcatgggctcaaatcaatctgctaa

SEQ ID NO: 189562 - DNA, 428 bp, Glycine max
  unsure (1)..(428): unsure at all n locations
tatctgcnacnancacgaggggaagttggcgactcgaagactttcgccgaactctggttagtgagggttgtagttagttntanaacatgtatagaaacccaatccttttgccatggcaagcatcatctgatttgtttcgttgttgaattcttccagatcaatcgtgtcattgaagtcgacgagcgcctctatgccgccatgacggctcctccgcaatgccgaaactgtgacgagggcgggcactgcctcaacgactacaaaatcaagaaacagagcagccatagccccaaccctgtacgacaaccacaccaatgcctctacaccaccactactttcccggcgcgccgtaattctttaataatgactatgggcaagacgacaaagacgaggattaactgtctgaaccctaaagtaatgcattgtactat

SEQ ID NO: 189563 - DNA, 412 bp, Glycine max
aaggggaggtgcgttggcacttatgaatttattggccatgaattgcactttgggctccaattattctgggatgggttcctaatcttctgtacatccttttttaaacatcagtattatcatggtttaacctttttctttccaggtattacttatggaatcccaaatttgtgatgccatattctcaacattatctggtggtatttatggtgcctttcttcgcttggggaggttagtagatcgtccacactcctattggagcttataactgagaattctatcgatatggtattgttattcttaatcatggttctacctattttatataatgggcaaaattatacaatttcaaagtattattgaaatactatcaagcaatctggatttgatgatgtattatcctaccaaaaaaaaa

SEQ ID NO: 189564 - DNA, 468 bp, Glycine max
  unsure (1)..(468): unsure at all n locations
cttcatagttacaagctcttataatgtgnatttaagcttataatcgcgagcatatttcataagattagcgagaggcatattaaatgacaggcagtcacagagcactctatctcatgattgatttgtggactttcctagtgaattcaatgctccttcaatgctccatataatgaatgcggctatagtaaccaatacgagaaaaagaaaaagcaccattcaagatgatcatgcaaaagaaagaagggttgatcttacgctctatgccttaattcccaccatacctctatatcagaaagaggtggagatttaccaatctcaacctcaagttcaaatcgtccactctcagttcttagttcctcacatatttgaagctttggatatcttcttacatcaagcatttgtgctgcaagtggtacagtcttcacatatctatcaatagcaataaggtttatctgtataagatatttc

SEQ ID NO: 189565 - DNA, 360 bp, Glycine max
  unsure (1)..(360): unsure at all n locations
accgatcaaattatggagatcgtggtatggtattgtaagtgacatccttggccagagtggatttgattgggatggcactaagcacatgatcacagttgagaatgaaaatgcttggaatgaatattgcactgtaagtattctttaatatgttgttatttgttattcaaagtagatcggatttgactttttctttgtttttcagtcgcataaatcggctaaaccgtttcgatacaaggtgcttcaaaattgggatgatatagtggatntgtgtgctaaagatagagccaccggtcatggagctgaaactgctatagatgctgatgaagcgatgagtagagaaacaaatgaagtggaattcat

SEQ ID NO: 189566 - DNA, 449 bp, Glycine max
  unsure (1)..(449): unsure at all n locations
tgtaccaattggtcctttggtgagaagttatgatgatacaattgctactgcaaaaacaatcggacaatattgggaagaagatctatcctgcatgaagtggctngatcaacaacctcatggttctgtcttgtatgttgcctttggtagtttcactcattttgaccaaaaccaattcaatgaactagctcttggacttgacctcaccaatagaccttttctttgggttgtgcgtcaagacaacaagagggtataccctaatgaattcttggggtgtaaaggtaagattgtgagttgggctcctcaacanaaggtgctaagccaccctgctatagcatgttttgtcacccattgtggttggaattctaccatataaggtgtgtccaatggggtgcctctcttgtgttggccatatttggagaccaaatatgtaacacaacgtacatttgtga

SEQ ID NO: 189567 - DNA, 312 bp, Glycine max
acagttactttggatattcgtgaaacttgttgtgggatttctccatagatatagggctgtgaaaggttcatataccttaactgtgatagctcaccaatcctacatggaattctagagtaatagaagtgattatcaactaaatcaacgcttcgaaggtgtctgaggcgaaagaagctgctattagcgatcattgtaccatatagatggttgctactgagatccacgtctatgacatgactcgtttggtgatacattgaatgcttcccataacatcaactatggttgcatctcaaatgctattttggatactgc

SEQ ID NO: 189568 - DNA, 387 bp, Glycine max
  unsure (1)..(387): unsure at all n locations
gtgattctagagatataaaggtccaaattccagagagttntgagagaatttgctgtgtgaagatctgcagagaccagagcttgaagaggaagccgttttgagagcttgagatgagtttgtgagtggttatgaaatcctagaggtgaaggagacatcctcaccacttgtatttttggaatctttcatcttgttcttctctttgttgtaaaagaggcttcctggttatggaaagctaaaatcctctgttggatcttcctcgtaggtacttgatgtaaatatctttctatctatttaatgatgttttgtgtgttctctgtgctatcagcttttcattctagtatgcctttaccttgatcatgtagatgcatgctttgttagggtcattca

SEQ ID NO: 189569 - DNA, 451 bp, Glycine max
  unsure (1)..(451): unsure at all n locations
cttgggaaatgttgtttntcaccttctcgctaagccaatatgttggcttaatgagcgtccgctaagcgcaacactgctaggctatgcgcgaggaagaatccaaaagacgatgagctatacaggttcgctgagcgcatcgctccaggtcatcaagcgcaccgcttcagctcatccgctaagcgagagaagtgcgctaagccaaaatccagtaatgtgcactaagcgaacgagcacgaacaaggccacctatttaagcctaaaattagattttgtgaatagagtttggactgggattcagagctntgcatgtctagggtttctagagagagaaaggtccaagttccagagagttttgagagattttgctgtgtgaagatctgcagagaccagagcttgaagcagaagccggtttaagaagcctgagatgagttgtgagtgattgtgagatcct

SEQ ID NO: 189570 - DNA, 434 bp, Glycine max
  unsure (1)..(434): unsure at all n locations
gtttttgccggtgaatgtatcgaaatgggtctgagaagaggcaaagttgattatcctgctttgatgaataggaagcctgnggaaaatggagagaataagaaggagggaggaacccatgttgtgacttccattcctacatggccaaatttcccaccagttcaacaataccaatactcagttaatatcaacccttctcattacccaccaccatattagccaagaacacccatccataaaggccacccctaaatcagccacaaaacccgcctattgcacattcgataccaaacaccacccttaacatgaacataaacaccaactagggaaggaattntccagaaaaggagcatgtagaattcaccccatgatgtgccatcattttcttctatttgctaaatcctttntgcacnncatttaatactgattggtcttaa

SEQ ID NO: 189571 - DNA, 438 bp, Glycine max
  unsure (1)..(438): unsure at all n locations
ngagatgaggaagtgttgaagggtgaaacttcctgctnttattgttgaccacagagtggtacctggagatatgtcgcggnggtcaggagaccttgtggacgtcaggtggggtgctattgcccaaaaccaagcttgaccaatcccgacccaacccgggcatagtcggtcagtgagaacctgtgatgtacctaagcaggcgagctcctgcagtcaacagataaaaggataacaagaccacaaagcaaggaggcttgtggtggctggccagctatgaattttgtgtaatatgtggatggtggcctctggtaatcgattaccaagggtgggtaatcgattacaagggcttaaattgaggacaggaggctaagatggtctctggtaatcgattaccaaggggtgtaatcgattaccaggcttgataacgaagtcaggaaactt

SEQ ID NO: 189572 - DNA, 546 bp, Glycine max
  unsure (1)..(546): unsure at all n locations
tgcactctatgttatttaaaatgaagataagttaacggttggactaaattgtcggtacatttggatatttgtggactaaattgttcatttccatggtacaggaatgaaattgtcaccaagcaaaaattataagaacgaaattgattatttatccattttaaaaatatccttactatttttgagtttgaggattttttaaacttttttacaagatttaaaaaggtgaggtttttttaatgacctaatctgataaccaactcaattcaatccaattaaagttggatttgagttggattaaattggaaaataaaaaagtaaactcaactcaatctaatccaattaagttttaattagattagggttaaaaatagacaaagttcaataaaacccaaaccacttacaccccacacttttatagtagtaataattaaataatacaataattnttacaactaacagagcaagagagnaaaatcacttaatgatattagaaaaatagcacaaaaattggttataatggtattatgngtgctatgtttttataat

SEQ ID NO: 189573 - DNA, 415 bp, Glycine max
  unsure (1)..(415): unsure at all n locations
agcttgagtgttttactgcactttacacacactcgaagatgaagagagagagagagatgttgcttcaactgaatcacaaaataaatgaatcattgcgcgcccatttattcattacttatatactcagtacatgtgtcactcatgtatgagtctgccataaggaaagtcaaaaaatacaaatggaagaaaaagcaaactagcttatacacctttatttaacattcnttgataacaaaagtgggtgttgtcaactttgctatatctatgcatgaagaagaacctgaattcatgagcacttactcgaacctatcttaactgtaatgaaaaatagtctttttgatcatgtacaccgtataattaaatttcttaaacgagaacgcaacagggatgagtatcaaagtatctcatacctata

SEQ ID NO: 189574 - DNA, 517 bp, Glycine max
acagttttcttctaacaatttgatgagcaatgtgtcctcccaaggagcacacaacccttcgtaaatagaatcatcaatgaaaaccatgggtttcattggattgcctccctcgtacttaatccttgccagtttttgctgaataagatccacattaggatgtggactaagaagttgtctctgacttaccaccaccacctccatcgtccgaaggatctttacctgagcctaaaccattcaaatagtcactggagaaagagaaatcctgagtggcttccattttttagatactttttatacatgataagatgtgattaaatgataatttaaaaaaattatatattggcaatgtatcttaattaaatttcagataacattaattggtcaagggtaaagaagtacatgactaaatataatgaaaataatctaaatctttgttgaaaatagaactcattcatataacgacatacttgatttgggatatgtacatgaattgtttcacctctgagctactactcta

SEQ ID NO: 189575 - DNA, 408 bp, Glycine max
  unsure (1)..(408): unsure at all n locations
ctaagtacagaacaattcttatcccagtaagacttaaggaaataactattcaattgctggagttttcagcattcttactttctcatggatcagtccaataataaccctacgcaatgaaaagacattagagcatgaggacctcccacttcttgctactgatgacagtgcctatggagtntttccaacttttagaaacaaactanagtcagagtgcggtagtgttaggaatgtgaccactcttaaactcgtgaaagtgttattcttgtcaacatggcaaggaattcttttgtcatggttatttgcattactatacacgtgtgcttcttatgttggaccctttcttatttgaatctttgttcctacctcaatgggaacacaagttaaaatgaggctatgtcttgctatgca

SEQ ID NO: 189576 - DNA, 345 bp, Glycine max
acatacctctctaatagctaagctcacctccttgagatgaaaagctagagcttagctacacaccgcctataatagctaagctcacccccatgacaaaaaaacatgaaaatacaaaaaaaaaagtccttactacaaagactactcaaaatgccccggaatacaaggctaaaaccctatactactagaatggccaaaatacaaggcccaaacgaaggaaaaacctattctaatatttacaaagataagcgggctcatacttagcccatgggctcaaaatataccctaaggctcatgagaaccctagggccttcccttggatctctagcccaatctacttggagtctt

SEQ ID NO: 189577 - DNA, 350 bp, Glycine max
  unsure (1)..(350): unsure at all n locations
aaagacaaggcggccgaaggaactagttccgccccttattacgacagtcaccgctttaggagcgttgtacaccagcagcgtttcgaagccatcaagggatggtcgtttctccgagagcgacgcgtccagctcagggaggacgagtatactgattttcaggaggaaatatggcgccggcggtgggcaccactggttactcccatggccaagtttgatccagaaatagtccttgagttttacgccaatgcttggccaacagaggaaggtgtgcgtgacatgagatcctgngttatgggtcagtggatcccgttcgatgccgacgctatcatccagctcctgtgatatccgat

SEQ ID NO: 189578 - DNA, 243 bp, Glycine max
tgcttcgcctactgtcaaacatatttaggattattgatgtccttgttacttccagtttcaccttgacaaagatgtcatggaccatgttgaaaatctaaattgattcaacctcatatcctgcgtaaaaattcgcaatacttcgactgtacatcattcgcatgcatccatgcttttcattggttgcattgctcattgcatttcttccttgaagaataaaatacaatagaataaaatgaacttatc

SEQ ID NO: 189579 - DNA, 273 bp, Glycine max
tggacatcttctagcgtctagtatatgagatgcgcctgaatcggacatcccagtgaaaagatatgaccattagaatttctcgagagcttctgatggttaattttgagcgtctcgatataagataagcctgaatcggacatccgagtgaggacttatgaccattttgacatctggagagcatccgttggcatcttctagcgtctctatatgtgatgcgcatgaattggacatccgggttaaaagctatgaccatatgaatttgtcagagcattc

SEQ ID NO: 189580 - DNA, 400 bp, Glycine max
gatggtattattgaagagctctgctacgcaactcatcatctacttcttgttttgtttgttctctttatcatcatgagtagcaatcaatcacaacaagatcaatccttaaatatacacagtcccttctattttcatccaagagaaaatcttgtgatcgcattggtctctctggtgcttgattcatcaaactacaactcatagagttgttcaatggtcactgcattgagtacaaagaacaaggttgagtttgttgatagctcgattaagagatatgaatcaaatcatgcactttagcaacttggaagaggtcaataacatggtggtctcttgggatcgtttcattcagtttcacctttaattagacagagcatattctggatggatgatgctcgagacatat

SEQ ID NO: 189581 - DNA, 429 bp, Glycine max
  unsure (1)..(429): unsure at all n locations
tactcagcttaatntacaaccagattgttgaagctgttaataaagatgaatgtgatatgtnttttctctatggatatggaggtacaggaaaaacatacanttggaaaacactngcaagttcactgagagctgacaataaaattgtaataatgatagcctctagcggcatagcttctctgctattgcctggaggtagaactgcacattcaaaatttaaaattccagttccagtttttgaagactcaacttgcaatatccatcaaggaactcaattagctgaactattaaatcagacaagtctaatcatttgggatgaagcacccacgactcacaaattctgttttgaggcacttgatcacagtcttagagatatcatcaaacacaactcanaggacagtaaaatctttggaggtnaagtcatggtctttt

SEQ ID NO: 189582 - DNA, 107 bp, Glycine max
ccttattttgtgcaaatggcaaaattcatgtgtgcctctgcctcctttgaatatattggcgttgtatgcctaatgtgggtcactgaattatagcgtcctttattatg

SEQ ID NO: 189583 - DNA, 472 bp, Glycine max
  unsure (1)..(472): unsure at all n locations
tatgtctccttattcattcgttaaccaatagtcaaaaatgattattgagttcaaacaagttatgcgaaagggccatattaaatacaagcctatctacaatacacagtatatgtgtcctatctccacgacgcatatgaatagattgcacatgtgcagaaatttcatcatatataataacaaccttgagtgtccttgcctagtntactgggatacacattttccgacttatgcaataattgtatctctgacacgaatttatcaaagcacgagtactgcctaactcagaagtgcgtatatacttttatttttaagtcgtacaatttccttggtgtcttcttaagcaccccgcactcagcatcaaatctatatggagactgctaaaattgatgtaacacttcatatgctaacttgngagaataacattctgaacaatggtgcatccaaatccacttatccatctttcactttgaca

SEQ ID NO: 189584 - DNA, 291 bp, Glycine max
  unsure (1)..(291): unsure at all n locations
atttggtctcccaaaaggctgatgcctaggttgccaattgggcccttattacaacttgaactaaacctaactaaagcccttttagttgattaacccaaaacatanttttggtcagccaactttacaaggactgggccattatttagacaaactaaacactctaaaattgagacaaagtggtgtcatttagtcctcctacatgtgggccatgatacaactcacaaccttggactttctccttgaaacttgtgcttgtatccaaatatatggacaacactattgagacttcct

SEQ ID NO: 189585 - DNA, 486 bp, Glycine max
  unsure (1)..(486): unsure at all n locations
cctataaaactaagcttacaagcntttttatgattngagcttgtgccttttatcttttaagactctntaaaaagcttgagcttgccctttatagtaaataagtcaagccgagccgagccttacataggccgagccgaaggccctcgacaagctgctcgactcatttccacccctaattacgagcatcagtcttccaaatgattaagtataactagtaaaaaaaaaggtgcagaacaaaagccatgtgtgacaaacctggcaaataaatgttgtcattccaacacccattctttgtgataatgtccacaattgcttcctgatagctgcaaaattaatcattgccaacatttaatttgtttgtcatagaatgcacatccataactctaattacatatataaatctcaatgatagtactattatttggtagagcaattaaatacactgcatcagactaactttgaagaaaacatgatgcttaatgcaat

SEQ ID NO: 189586 - DNA, 382 bp, Glycine max
  unsure (1)..(382): unsure at all n locations
agttgaagatttgctggtaagacctgcaaagaatctagctttaagaggaagccgtcctcaaaacttgagatgagtttgtgagtgattgtgaggttttaaaggtggagaatacatccccaccacttgtatttcttcaatccttcatctttctcttctctttgttgtaaaggaagcttcccagttatggagagctaaatcctctgttggttattccttgtaggtacctgatgtaaatacctgtatatctatctaatgatgttttgtgtgttcattgtgctatcagaacttcattctaccatgantttgccttgatcacgtagatgcatgtgtttttaggatcattcaacaatggaaactggtctgattctagaacttgatagga

SEQ ID NO: 189587 - DNA, 390 bp, Glycine max
  unsure (1)..(390): unsure at all n locations
cgaaggcaaactggatgcatcggttaacttggtaacccagcttgcctngaatcanaacattgtacctgccgcaagggtttgtggtttgtgctcctctaccgaccaccatacagacctttgccctttcatgcagcaacctggagcaattgagcagcctaaagcttatgctgcaaatatttacaatagacctcctcaaactcagcagcaaaatcaaccacaacagagcaattatgtcctctccagcaacagatacaaccctggatggaggaatcaccctaacctcatatggtccagccctaagcaacaacaacagcagcctgctccttccttccaaaatgctgttggcccaagcagaccatacattccttcaccaatccaacaacagcaaca

SEQ ID NO: 189588 - DNA, 273 bp, Glycine max
tgctcaagtgtatgcggaaaaagaggctataggaagggtgatcgactctttacaccaagaggcaaccatgtggatggatcggtttgctcttaccttgaacgggagtcaagaacttccccgattgttagccaaggccaaggcgatggcagacacctactccgcccccgaagagattcatgggcttctcggctattgtcagcatatgatagacttaatggcccacataattagaaatcgttaggaaacttgtatggtctctcagaccttgactgg

SEQ ID NO: 189589 - DNA, 444 bp, Glycine max
  unsure (1)..(444): unsure at all n locations
agcttctctctagcttttatncagacactctcatggtggtgtatctcctncttccatggcttatttcctagaggatgacgcctcctctcaactcttctcctttatcttccgctgcaactccatggttgaaaatcaccattgcaggatctcaatgaagctcaaagatccagcttccatagaagcttctcaagtaaacttccatcaagtggtatcagagcacaagagcttcaagtaggtgctccttaaacctccattaatcttcaactataccttctcctccattgttgttcttcatttgtctccatgtatctcctcacatgttttgtgttgaatgtcgtaacatgatttttagaattccactgattaacttgcttagaactatattgatttcttggtcaaattcttgtcttgttctgtcctgaacatgattgtgtgatctaattc

SEQ ID NO: 189590 - DNA, 408 bp, Glycine max
atccggcaaaatataatcgtcgtaaaaattaatataactgtcgttaaaaaagtattttctagtagtggtaaagctcactttattgattgagtcataacttaataattcaatcttatgcagccacaaagaaagttgaaatttgaacacaaaaaagaaataaagatgaagatttactagattgtcatatttttttttaaaaaaaaacattattatacatgtatatattattataatcatgttaatgttacatatatcatcatatttaaaactaaaattgtctcgatcgtgaggagggtttattaaaaaataagaagaatgtttactaaatcatttatatccatcatatataatagttaacattcttaagatagaaatcctcaccataaaacacccttaagagagcggaca

SEQ ID NO: 189591 - DNA, 408 bp, Glycine max
  unsure (1)..(408): unsure at all n locations
taagacaactatccaaactgatcacgatcacatattnatgttaacctgngattatatcttctgagggatgccttgtcctttatttcaattttgacagcaacatgctcttggttgccctaatgaataagaaaaatgaacaaattaaatgtctaagatttggtgattggaacatggaatgccaccgatgtaattatgtggctattatagtattcaattctactattgtgttgagtttcttcttactcgggggcccttgacttgcaaaactgacccttgaacaatcactgaacgaagtctgaccagcaataaatagataattaatgcacttgcttctcaaagaggtgcatttcaatgcatgcagacttggaagttgatatacacaatgctaaggatgcactgggcaatact

SEQ ID NO: 189592 - DNA, 320 bp, Glycine max
cttgaattatagtcgcgcattacctaacaaggtgtatatctttacagcattggggagaaatggtaatcaggggcatgatcatcctattgtcagaataataattgataccgctgctatgaatcactagtcattagtcagagggggccagaactaaatacgattgactgaccgagggaggacaataatgcatgtaagaggagttgccctctcaaagagctaaattaggattgatgcagctcttgctacttcttgtttgtagatgaagaaccctccaagcgaaaaaagttcgacttatgagagctcatattggatggactaat

SEQ ID NO: 189593 - DNA, 354 bp, Glycine max
  unsure (1)..(354): unsure at all n locations
tgctctanaccacatctgttgttgcgatctatgggaggatgttgtatgccattgtaactntaatagtagagccccactggcataactaactctcccaatgttcgcctcttcatgaaatggcccagacgaaccttgcctcaaatatgttcacgacggacatgtgccccgaacgaactatttccgccccggagtactacagtcacctctttacgagcggtgtacaccacctacactttttagccatccttggatggtcggttcttctgtagcgacacacacatctcatggactacgagtatactgattctcactaggaaatatggcgcctgccgtggacaccactggttactccca

SEQ ID NO: 189594 - DNA, 292 bp, Glycine max
  unsure (1)..(292): unsure at all n locations
tgcccatgacaatttgaattacccataaaatctgatgcgagggatcaatcccaccaaacgggaagtatatactagaaggaagaagcttcacaccgccagcgcggcagttagttaagtgatgacaattctgttaggactgctggattttagggtaaagaggggagagagagagaaggcttgcgaattgtgacttcagagagggggagtagggtctttctctggtaggagcagaggctctggngacatgcaatcagtagtgaactggatgtaattttcttttcataatgaaaga

SEQ ID NO: 189595 - DNA, 117 bp, Glycine max
gtgcatgaattattgcgcaatctgtgttcgatctaatgcatgcatgcctctggggtggacaatttatatcgcggaactagttatgctatgggataagcagtgattctcaactgaatg

SEQ ID NO: 189596 - DNA, 404 bp, Glycine max
  unsure (1)..(404): unsure at all n locations
aggcacataatgacaatcctgggataaggagtgttgccatgtttcaaacccgcactaaggcatacaactccttatcataagttgaatagttaagggtaggaccacttaacttttcactaaaataagcaattggatggccttcttgcatcaacacagccccaatcccaacatttgaagcatcacactcaatttcaaaagatttttgaaagtttggcaacgcaagtatgggggcattnagttagctttgcttaagaacattgaaagcttcttcttgtntctcttcccatttgaaaccacacattttcttgagcacttcatngagaggtgctgtcaaatgtgctaaaatccttcacaaatcgtctattaaaacttgctaagccatgaaaactcctcacctcggtcac

SEQ ID NO: 189597 - DNA, 431 bp, Glycine max
tgagaatgaacaactgaggctctcgagatattcacatggtcttaacttatcacacggaagtccgattcaggcgcataatatatcggtacgctcgaaattgaacaacggaagctctcgagaaattcaaatggtcataacttgtcacacggaggtccgattccggcggatagtatatcgagaaggtcggaattgaacaacggaagctctcgagaaattcaaaaagtcataacttttcaaacggtagtccgattaaggtgcataatatatcgagaagattgaaattgaacaacggaagatgttgagaaattcaaatggtgataacttatcacacggaagtccgattcaggcacataatatatcgagaagctcgaaattggacaacggaagctctcgagaaattcaaatggtcataagttttgaaacggaagttc

SEQ ID NO: 189598 - DNA, 324 bp, Glycine max
gctgaacacaccaaaggatcatgatgatggatgacccagaatctcaccaagggtaactcatcacttacgaagagagcttgcataaccatcacgacatgttgaggagaatcaaagatccaagtcacaaaatgtcaaaaacttttatttcaagacatacccattcttgaaataactatatcaaaaaaattggcaagtcgacatgcacacaaaatgacccaaaattaaacagaagccgcgactacacattacaaatacacactacattatacaaagcacaaactacaaaaccaataaaccccgccccccctcatattaacaaacatg

SEQ ID NO: 189599 - DNA, 460 bp, Glycine max
  unsure (1)..(460): unsure at all n locations
cgacctgaggcatcaagcttataagaaaangangactgaggcaatttaactanctttttgaaaagctgtcgaagaagagtaattatttatatgtgaaacctgtttctactccttatgactcatccatcaagctaaagaaaatatcgggttaaggaatttcttcacataaatattctcaaaatatcggttctttgttgcatttgacacacttttctacgcctgacattgcatatgcagttggtagattaagaaggagtactaataatcctgatcattctcatgggattgcattagaaagagtttttagatacttaaaaggaaccatcatttatggctttcattatacatgttttcccgcagaaatagaggggattactgatgcaaattggatctctgattctgatgaaccacaatcaacaagtcggtatgtttttactttacctagtgggcagtatcatgg

SEQ ID NO: 189600 - DNA, 386 bp, Glycine max
aggctgataggactatatgtcaaaggattcatactcaagtgctattggcagtctcatgtatgccatggtctgcaccatacctgaccttgcttatgctgttagcatggataataggatcttaaaccaacctcagaaggaacattggagtgctgtgaagaaaatcttcagatatcttaaagggacttcagatgtaggtttgatctatggatctcacccagattgctgcctcactggctattctgatgcagattttgctgctgatcttgccaagagaatgtcattaacagggtatgcttacaccctttgtggctgcttggtgagttggaaggcatcacttcaccttctgtttccttctcactactgaggttaatatatggctttacctg

SEQ ID NO: 189601 - DNA, 428 bp, Glycine max
  unsure (1)..(428): unsure at all n locations
acctgcggcatgcagcttatgcacggaaaatgtaataggagaaggttatgtttttataaacaccatncctaganaaccatgcattatgtaccatgttcaatgattttgtttttaagtgaaacgggtttatgatcccaacatggttggctcgtggtgcctaacacatgaaactaagaatgtagtgtgaagtttcacacttccccctttttgtttttggtttgtataggaaaacgccaggatgagcaaacatgaaaacaaatggtatgcaatcttgcagatcataaaagttgttgaacgcatatgcatgacgatgccatgactgatgcaaaagtgaggctgtattttgtatcacacaaatggctgaacgatatgttcattatgatgttatgaagagatgctattgcgatgcatgaaatgaatgcatttta

SEQ ID NO: 189602 - DNA, 68 bp, Glycine max
  unsure (1)..(68): unsure at all n locations
gcgtggaagagtcagtacttctacttttgtttgttgaccattgattggnacctcgtagatatgtcccg

SEQ ID NO: 189603 - DNA, 275 bp, Glycine max
  unsure (1)..(275): unsure at all n locations
gacctgaggcatggcagctaggagggctaaagactcacgagggccacgtgtttttttctttatngnaagtgcgggctatacaagacatcttgccatacaaagtccggttaacgataactcgcctgtgctctttcttccatgctatatgtggcaaatgtcattgatccagtaatcgttgatgagtcggaataagacgccgcaattatactgtgccaattggagatgtattttccccctggttttttggaactatgatacacttgactgcgcatctg

SEQ ID NO: 189604 - DNA, 395 bp, Glycine max
  unsure (1)..(395): unsure at all n locations
atactcaagcttgcagccattagaagagaagaganagaacatgcgattagatgtctctactgtgtttgctantcattttcgcagatcgattgtgaatgaatgcattgaccgtattccactgagcgtgagatccttaaatttaagagaaatgactatcatttaatactgatttttgcaagaatctctgaagtatggactgaatgcatgaattaaagatgatgaacgccatgtctgattgtgattgccacttagccaaaaatctgaccacgtgcttgaatgaattatcccttgcacccacattgagctgaatgaattacttattgactgaacctgtagcctatacaatgttatctcctgctacctcgtgttaggatgtattagagcatcatacactg

SEQ ID NO: 189605 - DNA, 405 bp, Glycine max
  unsure (1)..(405): unsure at all n locations
aagctanaaataactctgaccacgaagtattatttttttaactattcccagagataattattacatgacaactgtctgagggcatatatacaactgtgtatcatcatgaaataacctataatcatctgtatatactaactgaaacacttgttcttgtcggatacataattgataaaaatataaatttttatatattttagcaaattacctataaattgtaatattcttctatatatcagctagaggcaatatgaaaaacattacttgagtgatgtcatctagtaacaaatcctcaatcttttatttatttcatccaaagatgcgaatccttcttttataatcacaaacttttcctctattttatgatcatcaattatatgagcgcttctttaaaatactttattt

SEQ ID NO: 189606 - DNA, 448 bp, Glycine max
agcttgagatgaggaagtgttgaagggtttaacatctgtttttattgttgaccacagagtggtacctggagatatgtcgcgggggtcaggagaccttggggacgtcaggtggggtgctattgcccaaaaccaagcttgaccaatcccgacccaacccgggcatagtcggtcagtgagaacctgtgatgtacctaaacaggcgagctcctggcagtcaacagataaaaggaacaaagaccacaaagcaaggaggcttgtggtagctggccagctgtgaaacttgattgatatgtgagatatggtctctggtaatcgattaccaagggtgggtaatcgattacaaggcttaaaaatgaagacagggggctaagatggtctctggtaatcgattaccaggggatgtaatcgattaccaggcttgaaaacggagtcaggaagctaagggagc

SEQ ID NO: 189607 - DNA, 463 bp, Glycine max
  unsure (1)..(463): unsure at all n locations
tagctacacatacctctctaatagctaagctctatctncttgtatatgagaagctaagagctcatgctacacacaccnctataatagcttagctcacccccatgagaaaaaacatgataataacaaaaaaagtccttattacaaagacaactcaaaatgccccgaaatacatggcttaaaccctatactactagaatggccaaaatacaaggcctagacgaaggaaaaacctattctaatatttacaaagataagcgggctcatacttagcccatgggctcgaaatctaccctaaggctcatgagaaccctaaggcctttccttggatctctagcccaatctacttggagtcttctagccaatgcccttgcgggctaggattgcatcattccctccaccttggaaaggatttgacctcacatcccgaagttcttcatactctgggctccttccttcaacacct

SEQ ID NO: 189608 - DNA, 407 bp, Glycine max
  unsure (1)..(407): unsure at all n locations
agcttgcacacaagattcgcctggcctgttacnataaatatcttcgnggggggccatatagatgncttcctctaattccccatgcaagaatgcaatnttaacatctaactgctccaagtgaagattctctgcagctacaatactcagaataactctgatggtagtcatctttacaactggagagaagatctctgtgaaatcaattcgttgtttctgctgacaagtctcgccttgtatcttcttttaccgtcagattcttcccttagcctatagacccacttattctgaaagctttcttccttctgaaatttaataaagacgacgtcttattctttgaaggatgcctctcattttcattgtagctccactcatagagcattccttgcgtacctactgaacatttgcta

SEQ ID NO: 189609 - DNA, 345 bp, Glycine max
ctcaactagtcgcaatattatctatagaggcttcttatataactcatcttcagcgaataataaaataatagtttcaatcgaccaaataatgaactgaatataaatataaataacataaagtatattggcgatataatatttctttcaatcaaagcattttttcggtaccgccatcttatgttgccttcttaattaatttccatcaatattctgtaaattagatatcaataggtctgtagattttactttgatagtacatatactaattgctcattgaactatttaaaattcattatactaaattgtaaactaaacctaaacggacgctaaggcctgtttccaaac

SEQ ID NO: 189610 - DNA, 287 bp, Glycine max
  unsure (1)..(287): unsure at all n locations
agcttagctttaacgcgctgggaacgcgagatattcttttttttttatcctgngcagaacgaaagcgtcatccatatattcctgtttcaactgtgttctgcacaaccatctttgaaacattgagttaaaatgtacttgtaaggaatcttcattaacccgtccgattctattcccatacacggatccatgcgatccgaattcgctatcggacgttatatataatcctccccatgatcttgaaaaaaagaacgctctgatgtgcgtctgcacctatatgttacctatca

SEQ ID NO: 189611 - DNA, 287 bp, Glycine max
  unsure (1)..(287): unsure at all n locations
accttgcttgtggagctactatggaggcgggatcttngagttttttttaggcnccttaangggggntctccaccatggagatgcaacggaagacaaaggagaagaggggagaggaggcgccatccactatggaataagccatggaagaaggagcttccccaccaagatgagccttggataagaagcttggaaggatgccttaatggaggaaaagaaagagggagagaaagaaagaggggggaccacgaaattgaaggaagaaaaatagggagagaagttgaactttg

SEQ ID NO: 189612 - DNA, 421 bp, Glycine max
tagaagaagagcaagatagaagactcttggtacttttcgtctttcgatatatcaaagacaaggaatacccacttgaggcctctgacaatgacaagagaacattgcggatatcggcagccgacattttcctaagtggaaatatctcgtacacgatgaaccatgatatggttttgctccgacctgtggatgccagtgaggctgagcatatgctagttgaagtgcatgagggatcctctggaacacatgccaatgaacatgccatggtccggaagatcctgatggctgggtactattggctcacaataggaaatgattggtcgatccatgttaggaagtgccacaagtgccacgccttcgccaataattgcaacgctttgctacgaccttagaaccgcttgtcagcaccttgatcattctctat

SEQ ID NO: 189613 - DNA, 448 bp, Glycine max
  unsure (1)..(448): unsure at all n locations
agcttgatgtacgctaagccaagcatctcatgcttattcttattgcagaaaagactttggtgttgcagaaagcgctaagtgtgcctacacgctaagccccgaatgcttactggaagttacaacttcaagttgggcttagcgtgaggctaggctaagagccagtgttttaaaatcaaacgtcacattggcacgctaagcgcgccatacgaatttcagtttttaaaaagtaaaggtagaggcacttgggttgctaccttggcactcaaacctctgcattctctcatccttaagcatttttgtttctgctatgtgcttatctgttctctgcatcccttgcttcttcacactctgcattacacaatccaagaaagacttntgatttcattntttgctttgcagttcatgcttcacaccttaggatataagattatgttttttttagttagca

SEQ ID NO: 189614 - DNA, 384 bp, Glycine max
  unsure (1)..(384): unsure at all n locations
aagctctaaagntgcacacttttattgtggccattcatggatggcttgatttctcaaggccacttggacccatctctaccactcaaaccctaagaaactatatatctctcaaaatgtacacttctctatatttgcatatagagtgattgtcctaatgactgaaagaacttgcctgagatgtcctaagtgatcatctaagctcctactgtacactaaaatatcatcaaaatgaacaactacaaatctacctatgaaatcccttaagacatgatgcataagcctcataaaggtgattggtgcattagtgagcccacacgcatcactagccattcatacaaaccaaacttggtcttgaaaagcggtntccactcatcacccttttca

SEQ ID NO: 189615 - DNA, 439 bp, Glycine max
  unsure (1)..(439): unsure at all n locations
agcttcccccaaaccctacactactanggggcattgtcttctgggtcatagaggacggagaaaaactccttcaccaaagtcacatctatctatttctttggcaggcatgggaggcgtctatgccattgtcttcgctggagctcgtcataaaactcattgtacatggtgggggcgagctccataatcctctctggaagaatgttccaaaggtgaacgttgccctggtagaggagctaggcaaccttatatacaaaatgggaggagtcccaagcaagatccccccttgaggttgattgggtcctgctctacacttcctcgaagccatctgcaaaagaatatcataataggaccaatattagtaaattgattaatgaattgaataaacaaaagaaattatatatccatttgcgctaaccgcctggggccttagcgccatgca

SEQ ID NO: 189616 - DNA, 454 bp, Glycine max
  unsure (1)..(454): unsure at all n locations
cagctgcaacttggactgctaggaacggaaataagatanntttaactataanaacgaagggatatgaattattaatagtactactgccacttattggtaggagggtaaaatgggatctcaatttcctcataaccaaatacacaagaaaacatacaattttttatgttgatttccacctaagattgcttataataatttctataataaaaaagagataaataaaaaatagtgtgataagatagatgatataattaaaaaatatattattttgttaataaaaataacaatatcacaaactaccaaatatgtttcatatatatttattgcgaatcctgtgacagacatttaatctttaaatgaatttctaatgtcttaaaagattaaatttttactttccatttagatatacttaatatatatattgttagtggaagcacaagtgaatgttttatca

SEQ ID NO: 189617 - DNA, 405 bp, Glycine max
  unsure (1)..(405): unsure at all n locations
gctatagacatattngaagaccaactataanatgngttctggaagngcctttcccaacccctcagccaggtccataaaatgaacagagtgctatctgtcagcctagtgatatcaaacgtttgattcagaaaaatgatatcatttctgagcctccaaattgaacttgtagctgctatccaccacattggtcctcttgtgttagaatcctttgaagctgctgaggagtagtgctggagaaaattatccaatggtctgcagtgaaacaccttgtcttcctttacccaagataggaattcccaccataaaggcatagttttgccacaagtgaaaaacaagtgggatgcggtttcacgttgactatggcagaagggacataaatcattatccacctgaatctgcctcttg

SEQ ID NO: 189618 - DNA, 424 bp, Glycine max
  unsure (1)..(424): unsure at all n locations
agctttatagataatatgaattcacagatatgaattatttaaaaacgagagcngcgtataaaaaatatgaatgtccatgtatcatcactctaaatcttttgtaataacacaaaattaattccttttattcgataaataaaattggatgaactattccagaattttttattagatctctaaattatttattttttagtttggtatctgaatttgtacttattttttttaattaagttcatgtcagacttaattaaaataaataaatacaggttcaggatcctattaaataaacaatttaataatctatattaaaaaataaatagtttaaggacttaaaaactattaagatatgcaagttaatattctcacctctttagcttctaaatnggatataccggcctgaaaaggaaggatccattaacag

SEQ ID NO: 189619 - DNA, 299 bp, Glycine max
gcatggaatcttcttatgtatttcacggaagaggctgattctatgtgactatcacacaatagattgctataatgattctttctatgatgagaacgagtgtgacaatttatggacggttcgtcgaacctcctctgaagaaggaggctttgtaacaaattctctctggcattccaatgccagaatcactactataagatgcatgatctacatcgggcacaatctatgttctacaacggtgcatgacccgctttgattataacgatgttgaaacctataaacttcaacttagtccatatgcg

SEQ ID NO: 189620 - DNA, 427 bp, Glycine max
  unsure (1)..(427): unsure at all n locations
agcttgtagaatggctagacatgatacatgtcattgttnggntnggnncaaggataaaagggatgccccacattatttccatgacacaaatgcaaaaaatgatgatttggaaactttatgcaaaactggtcatgcatgcgcctatgcggacgctcaagtgtcaaattttatggtcatgtgatgctagggctcaggattcatttcctctattttaaatcaacccaatgtttccaaaatatgttcttttatcgatttgtgcattcctccaagtccacttcgggcgtccggggaaattttcacagcattcacccttcaggtgtagacacgttttttttcttcacaaatcggttatgatcaatgaatttttntccagaaaagttggaaatattctttttcaaagcatgtcggtttagctaacacttatttt

SEQ ID NO: 189621 - DNA, 275 bp, Glycine max
  unsure (1)..(275): unsure at all n locations
tactcacatttgagttacgctgaccggcggaaaatcctcgtgtggttagccatataaacattcttcttgctatctgtagaagaaaagcctgatatcatgcgaagactgacatgtcttctgccccttcgtaatcgcggncgacaagcccattgacacgcggagatttacgtcatcttcggcgctcacaagatctgtcatactgacatttgagtcacgctgacgggcggagatacccgagtggttatccgtataaacattctttnttgcttgctgta

SEQ ID NO: 189622 - DNA, 372 bp, Glycine max
  unsure (1)..(372): unsure at all n locations
gctttatatggcggacgagcaccaagaatttatttngtttattctccaccctccggccgaagtattacaagattgtgcaacaggaagaccaagcacataatatttgctatccacattccttgatttaactaaatcaaggaaatccttttcatggtctgcccaatgaagaccctaatgcacacctttgcacttacatagaaatctgcaatacagtgaagatcgcaggggtgtcggaatatgcaatatagctaagacttgtttcatttcctttagctagtgaagcaaagagaaggttggcttctttctatgggaacaactttaagacatgggaagatgactaaacatattatgataaatacttccctaaataaa

SEQ ID NO: 189623 - DNA, 377 bp, Glycine max
  unsure (1)..(377): unsure at all n locations
agctcgntgccatngaactcatgtgctacaacttttccattgtttggtttgcaccctatggtccttatgggcgccaactaagaaagattgtaaacttagaaatcctctgcaatcgccgagtagagcaactacagcacgttcatgtctcacaagttcaaagttcaatcaaagagctcttcaatgtttgagcaagcaaaaagaatgagtctggctatgcgttggaggagtcgaatcaatggttttctcattagacattcaacacggttcttcgaggggtccgtggaaagcgactattcggtgctacaactatgaatgatgaggaggctcacagatgtctgaaggctgtggaacactcatgcgtctgttgtgggtgttca

SEQ ID NO: 189624 - DNA, 471 bp, Glycine max
ccattttgtaagtgtaaagacgtctcatatttataatgtctctattaatatatacagctccgcactaatgacgcgtattaaataacaaaatctcctttcgaaataatggaaagagtgcattgataataatgtcagcatgcatcttgttaattaatttaagttgcagaattaataactcctgcactcagatctatttggtaaaaatattgatataagcaaaacggacattggtcgattttatgcaaattgactctagcgagttcctttcataaacttatttggtaaaagagttatcttgagactttttctagagagagttattgtttttggaggctttcaccactatgtgggtgggggggagaattatacttaatttgagtatttgactactataatcttaacgaatttgtataaaaataacctattttagtacaaatttcttataaaacatttttatacaacgataatcgt

SEQ ID NO: 189625 - DNA, 426 bp, Glycine max
  unsure (1)..(426): unsure at all n locations
agcttatgaaacccaataatattaatgaagctcttttttttttttttaatagnaaagaagccaaactaaccgtttcacgcagggcagatgggttagaagaacttaaggcagtttgaaagtgttcattggccacagccatggaattcaacacctcagcatcaattggttcatcctctaagccaatcacatccattttctcccggatacactgtagtgcagcctctgtgcaaagagcaccaagatctgatccaacataaccatgagtatctctgccaactttttcaagatcaacctgaaatacaccataaaattggaattgggaagtgcaagatatattgccttcataatatgataacaagtttatggctacacacatgaatagaatcttacattgtctganagtttcatgttctttgtatgaattct

SEQ ID NO: 189626 - DNA, 445 bp, Glycine max
  unsure (1)..(445): unsure at all n locations
agcttgatgggnnntttttgtttacttgagttgtgttggtgttgtctggagaccgaagagaggaaccagaaagggtgcaaggcttctgagccagagtttttcttgcagtgggggaacaggaagaggctgatatgtgtgagggtgaaggaccctctgatttcatcgagactcaacggtggaatcagaaggaaacttggttctgcactggatcatcatcgctctgggttcactgtgcccgagaaagaaatctctcatcaccaccaccaccatcaacaacctaatctgcttacaaggtgctgaaaataaacaacatcaactaaaggggtttcttcatgatattctttcccctctttggttacccccccttatttctggggtatggtctttcctccagagaaaatgtgatttgggnttatggagtgtaatgatgctgctcctcctctag

SEQ ID NO: 189627 - DNA, 468 bp, Glycine max
  unsure (1)..(468): unsure at all n locations
gtgagactcacttttgntataaaacagcgaaacatattattatgagttgtgattatccagcgattaatactggaatactacatttcattcctttctacctctccatgagattcgtcaagattcacttgtttagttgtgtgtatcggccttaatttgttgaacaaataaaacgaatattcaataatatgacagtcttatctcatagatgatatcttttatgctaatctaatattatcataggaggcgttaaaacttaaaagctgtcaaaaaaaaaaaacaagatgcgttaaaacgtgtgtgtgggagacacgacaacatagtaaatagaggtgttggccagtaagtaatattattgtaaacaaattcaacagaattgatcaataacagatacttatatatttatacgcatcgtctcttataatattcattggagaataagttcatttatttgtcttgtaagcgaacatt

SEQ ID NO: 189628 - DNA, 445 bp, Glycine max
  unsure (1)..(445): unsure at all n locations
agcttccatcagtttcttggcttcaccatggacttcttcttattatcaataagtgtnttttcagctttagtcaatcgccccgcatatgaatgtccaactaatgacttgaccaattcatgattatgcactccacaaatcaacttcaccatccagccttctcctccaaccactggcttgcaacaaagcttgaagggacacccacatttcctagtcccagtgtctcttctgataaattcttttttcctacacctatactcgtcactcctttcacagccaattaacacaaacgtagtccttcctctactacctgtgtttgtgtccgaccataaaatcaccgccacaaatctgttntcatgagccacggatcgagcccaccacgaaacatcctctcggcactcaaacacctacaaaatccacataatttaagttttctactagtattcat

SEQ ID NO: 189629 - DNA, 463 bp, Glycine max
  unsure (1)..(463): unsure at all n locations
ctatggtggttagctgtttcttgactcatcttctccttgaagaggcatctctaatcacctttcctcctactccattctgcttccattgatcttcaagatgcacaggactccattgatgaagaagatccaaggcctacaatctccacatggagctacatcatgtggtatcaagagcatcttcatttaagtgatgttctgttgcttcctctatcttgttcttcgggtaattcactttaatcttcattttcttctccatgtatctcctccattgtcttatggattggtgttgcttatagtacattcaaaaaaataaatcgattaaatcttagatctacactcgttcttgcatttctatgtgtcanattatatagatcaactcttgaatcatgtttttgtgttgatattaagctggatctttgtcttatccataatattcttgtgctggaccttagatcttaattta

SEQ ID NO: 189630 - DNA, 450 bp, Glycine max
  unsure (1)..(450): unsure at all n locations
agctntctaagttctattcaagccatatttcttttgatgtgggactacacacctctcttgaggccgcagttaaggtagccactaaataagcagcaactaagggaagctaggaatgaccacaattaagacgacttttcaaccttcaccgccacagctaccggcctagagcgtgttaatgcaaatggcccatctactggcctagagcatggtaatgcaaatggcccaacattggaactaggatagactttgataccattttagagcgtaatcaaccccacaaaatcgatttctaaggtgagaactatccaaactttataagttctatttatttaagttgtatatgtcaccaactgatatgagactgaatacaacccttgaggctacaattaaggagagctaagagtgaccttaattaagggacctttctaacaatagtattaatcaattcca

SEQ ID NO: 189631 - DNA, 436 bp, Glycine max
tctcactcccctgacattcataggaggaggaatgttctcaatttcatcaatctttgccttgtgcacctctattcccttactaaaatcttatgccccagcattattccttcctgaaccatgaaatggcatttctcccaattgagaactatattggactctgcacatccctgtaatactctttcaaggtttgataggcacccctcataagatggcccaaaaatagagaaatcatccatgagaacttcaatgcatttgtccacctaatcagaaagaattgcaatcatacactgctgaaatgtagctggggcattgcacagaccataaggcatgcgccgatatgcgaatacaccacaagggaatgtgaaagctgtcttttcttgatctttgggatctacaacaatctaattatagccagaatacccatctagataacaat

SEQ ID NO: 189632 - DNA, 462 bp, Glycine max
accttaagcaccgcggctgcagctgcacaaagattctcttgctgatcttttttatcctttggggggtcatatagatgtcttcctctaaatccctatgcaagaatgcagttttaacatctaactgctccaagtgaagattctctgtagctacaatactcaaaataattctgatggtagtcatctttacaactggagagaagatctctatgaaatcaattccttgtttctgcttaaaccctttcaccacaagtcttgccttgtatcttcttctaccgtcagattcttcctttagcctatagacccacctattatgtaacactttctttccttctggcaatttagttaaagaccacgtcttattcttctgaagggatgtcatctcatctttcatcactagctcccactcaatagtgtcattcccctgcatagcctcactaaaacattctggctcaccagcataag

SEQ ID NO: 189633 - DNA, 462 bp, Glycine max
  unsure (1)..(462): unsure at all n locations
actcaacttatgggagttttatgcatgacagccatgtaatattgatcttgattttctttttcaactncaaatgaaatcaagcagaaacttgtaataatttggcgaatgatctgattactgaatacgccgttccacgacattcaatgggttatttgtttaactctgaagtcctattgcgttcggaataatctttggggatgtgaatattaaaatcatgttcaagaatattaatatcagaaacgcgtgcctgccacgttcctttatatattataacgacgtacattgcttctgttcaatgcttctagtcaagtggaagtataggtattcatggtgctgtcacctgtcatatgaaatatactaagttgaacaccagtctctcatataataagatcaataccttgtattcgtactaaatggtgttgatgaagtaatattctgtggcgggtacataacctactgttt

SEQ ID NO: 189634 - DNA, 449 bp, Glycine max
  unsure (1)..(449): unsure at all n locations
agcttccatagctccttaaatgctccattctgtttgtgttcaactatttcccccctcaacacataattagcagattttgccgtgtattgcccactcggttctgccttccactcccacttatcacctatgtgcggctgaattgggtgatgtgcaacctccgataggaatgaaaccgccatctctatttcattatcaaacaatggtcttctccacctaaaatcctattcccaccccacgtctttgaaggcccccatgtgttgaatactctggttttgctgtgtagagatactaaacagcctagggtatcttgcaagtaacgtgtcctcttcatccatccatctatcctcccagaatttaaacttgtccccacttccaaccctccatgatgtggnagaatacattatgtgttcgtattgggggtgattaaacataagctttaaatccctccc

SEQ ID NO: 189635 - DNA, 405 bp, Glycine max
  unsure (1)..(405): unsure at all n locations
ggctgggcgggggccactgacgagagcctgcacgccaaaatgactacgctcttcggacgaatcacgggggtgcgacagagatgcaagcaaatgtgaaaggtcactgcgaggtcactcgttatcgaaatctcatataaacagggaagcgagagctcgagcgcgagtgttcatgaattatcgcacaaaaccttataaacctcaatgttaattagggtggctcaagaacaacgtcattgacattcaaaatgtcaacgatggngttttcaaaagcaccgctctaacttacctgctgcgcaacctacatagacaggcacccctgtcaacgttgtttatgtgtacgcgccatcacatggccataatatgtgacatattacaaaattgcactactctcctatacgacgggat

SEQ ID NO: 189636 - DNA, 398 bp, Glycine max
agcttccataaggcttccgtaacttttctttttatatgtatagagggggtgaaattatcaaaattgggggggtgcaaatcttcaacttctaacattcgaattgggcctcccacaatgttttttctgaactggattgcttctggaggaaacaacccaggttgggcaaactgggcggcaacctcctccccctttttcctataaataagctacagggggttgtcctaaggatcccggatgcccctggatttcagtctgttctggcgaaaaacattgttattttgaacaaaatccaattcgaggtgcttcctcaacctttcgagatgtgtccataagcaaaaccgtgaaggcttttctccctattcaccgttcgtcattcgttctctcgctcttaacgggta

SEQ ID NO: 189637 - DNA, 450 bp, Glycine max
  unsure (1)..(450): unsure at all n locations
tttaaactaagcttccacttgagatatctatgcagtgttgaagattttcccatcccataaatcagcgcatctatgtcgangccaatgatatggagtcttttggttaaattgtggcgtactacaagccccccataaaacttctagtaacttcttggcccatcttcctttacacatagattgagtttcttttttagctttactaatatcaccttattngctacctcaacctgctcgttggtttaacgatgttctattgatgagaccatgttgatgcccagtgacttcataaaattgttcaaccttctatttgtaaactaaaggccattgtcgtgtttgattgtatatggaatgccaaacctcgtaactacattcatacatagatactctcgagtgttatgagcctgtcatacactaagatttgtcaaagactatcggttgttgatactttga

SEQ ID NO: 189638 - DNA, 453 bp, Glycine max
  unsure (1)..(453): unsure at all n locations
agcttatatgtgcaacaagactagtaattgttttttgtgttgtgaagtctctaagggaaaataaagaggggaaattgttagactgagttttttcttatgacttaatcaacataacatgtaaggttaatcgttctgggtttacaaaaactgtctgtttcattgactccatacttgaagagttttcaaagtacagttntagattcaaaatgttatgccggctacacttttttnttaatagaatagtttatactagtctctttcaatgcaacaaaggacggggaagaaacaacctccatggcgggtgttttctttgaaggaattacactccgctacaaataatttcaactatgataacaagctcagcgaatggggattnggcagtgtgtactggttcacaagtagtactatactttgataacaagctctgggatggatcacaagtagtactatact

SEQ ID NO: 189639 - DNA, 434 bp, Glycine max
  unsure (1)..(434): unsure at all n locations
tacgtacactatagaatctaagcgttccaagttgtcttagtgtgtaaatgaatcattgacatctaaagggatgaaagtatgatgtgttgggttgtcaaaccctcccataattcatatggagcctttttcaaaatgggtcttatgtaaattttattttgtaaataatatacaatattcactactttatcccagaagtgcttaagagtataattatcattaagcatggttctagccatatcctgtaatgatatgttcttctttcaaccacatcattctgttgaggtgttcttggggttgaaaagttgtgaaggataccattttcttcatagaaaaattgaaaattgttcatttcaaattctcttccatggtcacttctgattgaagcaatgcatactcctttttcattttgaactctcttacagnaattaaagaag

SEQ ID NO: 189640 - DNA, 434 bp, Glycine max
tcaagcttgagaaaaatctaacgactttattttttatctcggatgcctaatcgagccctgtaatatatcgagacgctcgtaattgaaaacggaagctctaagataagtcaaacgacaataacttttaactcggatgtctgatcgagccctataatatatcaagacgctcaaaattgaaaacggaagctctaagaaaagtcaaacgacaataacttttaacttggatgtcctattgagccctgtaatatatcgagacgctcgaaattgaaaacggaagctctaagaaacgtcaaacgacaataacatttaactcggatgtccgattgagtgccgtaatatatggagacgctcttaattgaaaactgaagctttaagtaaagtcaaacaactataacttctaactcggattgtctattgagccctgtaatatatcg

SEQ ID NO: 189641 - DNA, 347 bp, Glycine max
  unsure (1)..(347): unsure at all n locations
tctcaattacgagcgtctcgatatatacgggactcaatcggttatccgaggnanaagcgatgggcagtcgaatcttctcagagcttcagtgttcaattacgagcgtctcgatatactacaggacacaatcggacattcgagtcaaaagatagtgtcgttgaatttgctgagagcttatgttttcaatattgagcgtctcgatattattactgtgctctatcaaacatncgagttagaagttattgtcgtttgatttatcttagagcttcccttttcaattaccacgcgtctcgatatactaccagacacaatcggacactcgagtcaaaagttattggcgcttgaat

SEQ ID NO: 189642 - DNA, 426 bp, Glycine max
  unsure (1)..(426): unsure at all n locations
agcttgagaattatcaaaantcatttcaattcttttaactngagtagtggtcctaggattctcacattccttgtttttcatgtttagaacaggaaagaagttacactttcagataaattgggtttaatgcgttttgttatgatttgggtgactaaaaaaatatccattgtttatatgcatttgctagctactttcaatttcatgcacttacactacatgtcacaatatgttcactgtaaagtgttcatatgcattacgctagccacattgttaatatcgcaagggaattgagtaaagggttattcattaaattatattcatttcaatcttcttccaatcaccaacctgtattcctacaacctataatatttataatttaaccaagtgttgtaacttatgcaagggacaatgtgccgtttataatgt

SEQ ID NO: 189643 - DNA, 471 bp, Glycine max
  unsure (1)..(471): unsure at all n locations
caacacatgcaacatcatctttcctcacgaactactaactgtaaatatagcagtgacacattcagaatgaaccactaatgaaatgtgtcatggacaaagacctccggtaaaatcagaactactattggcaagaatttaagaaatgaatctgtttgtaggagaaactaatgaaaccaatgtcatgtacttatgctaaagccggtagtggtgtttttctagtacttttaacaaatccattgcagtcacctattgagaagatatcctctactgtaggaacacgaagccactcatcaatgccaatattgtgaataagaaactttaanaatttgcttcatggaaatgcagctatttatagctaaaagataccatactacaaagcatacatgggagcataagagaagacaagtgcacatcaactatgttcaatacaatgaaacttatacatctatctgagctacgatggacaatgat

SEQ ID NO: 189644 - DNA, 422 bp, Glycine max
  unsure (1)..(422): unsure at all n locations
agcttcgcttagaagaccctcctgctctctcgctttatggtaaggttggaaacttccatcctaggttaaggttgtggaaacaagtcgatgtttgactcaaaaggcttgcaaatcgcaggacataattggccagacggcttataaagatggggatgcccaaatcatttccacgaaacgcatatcatgatgattagaaattcatgcaaaatttaatcatagcacacatccatgtggacacccaaatataaggttttgtggccatgtaaacactaaggcttagggttcatttccatattcaagctgaaccagtgtttcacaatttctctttatcaagtcacacaaaacatccgagtccattttggcattcgggaaagtctttcgttgttntcaccctctcggtgcacattatatttttaaaaacc

SEQ ID NO: 189645 - DNA, 385 bp, Glycine max
  unsure (1)..(385): unsure at all n locations
tttcacacatagatccaaacacactaaaatagcacccaatacctatccagacttcttagatgacattagtcaagcagttgacaggttcaaaaccccatttcactaatgccacaaaacccatccaaaaacaacatatatgaactcaatcctatattntaacacaaaaaggcactagatctggnggaaaaagaaatattacctggttgttggtgacaatgtcattgacattaatagcagggaagagaaaagtgccattcggttgcatttgatagagcctcttaactccagtggtgggttccacagaaaccctacaagacgctcttcatcttgcggtacctggtgggattggtcttcaacccatctctgatgatgtgtagcacgatct

SEQ ID NO: 189646 - DNA, 456 bp, Glycine max
  unsure (1)..(456): unsure at all n locations
agctntagccttagggtgatccatgtggctcgtgttgttattccctctatctctaanatccatcgtatanttccttttacatgtctaaccgccatattgagttatgaatgacaattatgaaaaggtttgatcctatcaaacaaagatgcaaaatatctacttattccaggaaacaagatcaagatcaacaatgattatattatttaatactgaagacactttccttaattatgagactctctatattagacatcaacgatntgaagaaatttgatgaacaagtgtagaaaagaaaaagtcgtgaatcaagatatgaaagaaaagagaaacaatcgtagagaaacacactaacctttagagagtctatcctttgttatatacaaagttttcattgagagattaagaactntattgcataatcactatttgagtgttgaaagtatctccgattctaaa

SEQ ID NO: 189647 - DNA, 405 bp, Glycine max
  unsure (1)..(405): unsure at all n locations
gcttgtgcaaatanatcactcctacatctcatctctagcatgcatgttctntctttacccactcctcacgttaggggttttaggggaaacactataactaaacgcgccgcaagggatccctatcgcaccagatccaaatcttaaacgatgggtgatcaagaagagacacaagaacagatgaaagccgacatgtcggttctgaaagaacaaatggcctccatgatggaggccatgttatgtatgaagcagctcatagagaataacgcggccaccgtcgtcgctgtcagctcggctgccgaagcagacccgactctcttggcaactacgcaccatccttcctcaaacatagtatgacggggaatggacgcactgtgacacgatggcatgcctcacctgtgatacaac

SEQ ID NO: 189648 - DNA, 366 bp, Glycine max
  unsure (1)..(366): unsure at all n locations
agcttatcatatttgtgattggatgataaggtaataatnttatctctgatgagatgctaacgatttatgacttgaatagtgtgccattaataccttctctcccatggcctcttgaataaaaaccgtgtcacctgacatccttccaacaacctctccactgttggtgtccttgtcaaagaaactgatatcttgcctcaaaattgctttgaggtataagcctcttattcttgcagcttgtctctccccggtgatcacccagcaagccacctctggaagattgcacgtatgtgtaaatcttgctatttgtatataaagaaaaattgtatttctagttatacagtaagcataataatcggagttggtatg

SEQ ID NO: 189649 - DNA, 493 bp, Glycine max
  unsure (1)..(493): unsure at all n locations
tctagcctgttgttcatatacaacanaagatctgagttctatactctatcaatctcccttctattgtctccaatgtgaataggggccattatatggaatatcatgctgtctaataataaaatcccagtgtcttgttagggaagtctaatgtagaatatttatattatatagtgtgccctttgcccttggttcttggaagaatacatacatattatgtatatttgttgcgtaatcggatttcataacgacattgaactctggactcatggtaataattaagctgtaacataatacctaagaatactatccaaaattctattagtgacagtaagcttacgtgctaccttatgtggcgggcactggaccaataaaaaaaataatatagtgctatggggggcacgagattctcattaataagaagtaaaacaacttggcttatgtgatttacttggtacgatacatatcgcttatcaatatagagtatctgaactcc

SEQ ID NO: 189650 - DNA, 419 bp, Glycine max
  unsure (1)..(419): unsure at all n locations
cctagagngacctgcggcatgcaagcttcctaagtgtagacatagggggacgaatgttctatttatttcatcactccaatcagctgcgtcaataagtagtttctccaacagtggcatcttcattatcaaggaacacagagtcttttttgggtttcccctaaattctatcaccgacagttctcttaactgctntagctttccaacctttccaatgaccactccatcatcatctataatcactggaggtatcttttgtagggatgtcatgcctccaatatccttccattgaatttgagatatatactcactcagaagaagatgacgtaagcttttaagcttactaaatttctctggcatctcagacacacatgtgttttttatttcaaggtctccaattcttgagcttaccaatggatttg

SEQ ID NO: 189651 - DNA, 486 bp, Glycine max
  unsure (1)..(486): unsure at all n locations
tctggcttcagactgctngaataatccttatgtcttactcgcataagtaaatttgttccattcactgttgtagcttgctacgtatattcccccttctccaatctctctctgttgctgctgtaactattacgggtacatatcttatatctgatatgttttatagatgagtcttttatatcttctgttgcaatatatatagtgagtggctctagtgtgaattacttacataggtgatatacagatgaatcatcaattattactatcatatatatgtataaaatatataagttccgaaattaaagaaggataatcacttaattcaccggtaacttatctgaaaattctgttatttttcttcactcattctctccccctctccttctatgctgatttatcactataaactgaaaattaaatatgctcaaccaatgtgggttgagaccaatttcattttgcccccacaccatcatccatctcttgaaacat

SEQ ID NO: 189652 - DNA, 443 bp, Glycine max
  unsure (1)..(443): unsure at all n locations
agcttgtagaacggctggacatgatatatgtcattttgttggtttatccagcggttcagggataaaggaatatcccacattatttccatgacacgcgtgcaacaatgatgattcagaaantttatgcaaaacttgtcatgcatgcacctatgtggacactcaagcatcaagttttgtggtcatgtgacactagggctcaagattcattnttcctatttaagtcaatccagtgtttccaaaacatgctcttttatcaattcatgcattcatccgagtccattntgggtgttcggtgaaaatttcacagcattcacccttcaggtgtatacactatttttcaacaaaacacttttgtggtttgatcagtgaatctttntcaaagaaagagttggagaatatttctttttgaaagcatcttgtgcttttagtcaaaaaatatattt

SEQ ID NO: 189653 - DNA, 450 bp, Glycine max
  unsure (1)..(450): unsure at all n locations
aagcttccatataaagtctaacaatgttaggtgattgaacccatatactacctcaanagtggattgcttggtggttctatgaacccccctgctgtatgcaaattctacatgaggaagatactcatcccaagacttatggttgcctttcagaagagcccttaaaagggcggataaagacctattcactacctctatttgccatcaatttgtggatgacaagtggttgagaaaagaagtttagttcctaccttatcccataaggttttccagaagtggctaaagaacttagcatctctatctgacacaatggtgctaggcaaaccatggagtctcacaacttccctgaataagagttntgagatgtgggaagcatcatccaccttgtggcatggtataaagtgtgctatcttgctaaaccctatcatcaccacaaagatagagtctacacct

SEQ ID NO: 189654 - DNA, 449 bp, Glycine max
  unsure (1)..(449): unsure at all n locations
agctttgagccaattcaaacgacaataactttttttgtttgtctganngagtcctgncatatatcgagacgctcgaaattgaatgttgaatctctgagccaatccaaacgacaataactttntactcggatgtctgattgtgccccgtaatataacgagactctcaaaattgaatgttgaagctctgagctaattcaaacgacaataacttttaactcggatgtctgattgagtcctgtcatacatcgagacgctcgaaattgaatgttgaagctctgagccaattcaaacgacaataactctttactcggatgtctgattgactctcgtcacatatcgagacgctcgaaattgaatgttgaagctctgagccaattcaaacgacaataactttttactcggatgtctgattgagtccagtcatatatcaagacgctcgatattgaatg

SEQ ID NO: 189655 - DNA, 423 bp, Glycine max
  unsure (1)..(423): unsure at all n locations
ctaagcttaacattcattntgagcgtctcgaatattacgggactctatcagacatctttngtaaaagttattgtcgtttggattggctcaaagattcaacattcaatatcgagcgtctcaatatattacgggactcattcagacatccgaggtaaaagttattgtcggttgaattagcttagagcttaacaatcaatttcgagcgtctcgttatatcacgggactcaatcagacatccgagtaaaaagatattgtcgtttgaattggctcaaagcttcaacattcaatttcgagcgtctcgatatatgacaggactcactctaacatccgagtaaaaagctaatgtcggttgattggctcagaggttaacattcaatttgagcgtctcgtttattaaggactcatcaacatccagtaaaagat

SEQ ID NO: 189656 - DNA, 325 bp, Glycine max
  unsure (1)..(325): unsure at all n locations
agcttgttgagggcacgcgagaacagtttttttgtttttcttcagggaacaacttgcaaacactgtcacttagtttatacaatnccacccacccaccgaccacagttttgtctgtatatacggacaaaacttcataccccatgtcttaggacgctgtaaatgagggcccccacaaatcagatttcatgatagcatcacccgccatnacacataccaccataaagaatctgcagtcactttatacgttgtgtgcaaccgaaacactgggacttgcaatggcgtacccaaactcttgtgtttggaatgtggaaaaaggagccacgtt

SEQ ID NO: 189657 - DNA, 449 bp, Glycine max
  unsure (1)..(449): unsure at all n locations
agctntgaaaagtgttgttnttcaccttctctcttgtttatctgctggcttagggagcgtccgctaagcgcaacactcatgggctaagcgcaaggaagactctggaagaagatgagttgtacaggatcgctaagtgcaccacttcatctcactaagcgcaccgcttcagttcatccgctaagcgagaaaggcgcgctaagccaaaaatcactaatgtgcgctaagcggtccataagtgcgctaagcacacgagcacgaacaaggccacctatttaagcctgaaatcagattttgtgaagagagtttggactaggatntagagctttgcatgtctaggatttctagagagagaaaggtccaagttctagagagttntgagagaatttgctgtgtgaagatctacagagaccaaagcttgaagcangagccgatntgagagctagagatga

SEQ ID NO: 189658 - DNA, 495 bp, Glycine max
  unsure (1)..(495): unsure at all n locations
ctttatgtganaagatgtgactcttcacatatgaatntgaatttcaacgttcaaaggtactggtaatcgattaccaaaacactgtaatcgattacagccttttgaaaataattggaacattgtaaatttaatttgaaaactttatcaaaacaattttgctactggtaatcgattacaacaatctggtaatcgattaccagagaagtaaaactctttggtaaaaggttttgtcaaaaactcatgtgctattcaaagttttgaaaaactttttaatacttatcttgattgagtcttctcttcattcttgaatcttgatcttgattcttgagatcaagaaccttgaatcttgattcttggctctagactctcttcttgagtcttcaattcgtcatgattcttatcttgaactcttgaactgttcttgattgatctttgatttacttgaattgtcattgattgatctttgagctttctgcatcatctcttgtatcataa

SEQ ID NO: 189659 - DNA, 447 bp, Glycine max
  unsure (1)..(447): unsure at all n locations
agcttctgttatcaatttggaatggctctatttttattttactcaataagacatccgagtaaaaattattgtcgtttgaatatgctacaaacttcccctttcaatttggagtctctaaatatattacgggactcaatcgaacatccgaggaaaaagttattgtcgtttgaatttgctacaattttccgttttcaatttggagtgcctggatatattacaggactcaattatacattcgagtaaaaagttattgtctattaaatttgacacgagcatctgttttcaattgggagcatctctatatattatgggactcaatcagacatccgagtaaaaagttattgtcgttngaatntggtacgagcttcccgtttaatttggagcatctaatatattactggactctgtaggacattcgagtaaaatgttattgtcgtctgaatcgtc

SEQ ID NO: 189660 - DNA, 453 bp, Glycine max
gttgagcaaattcacacgacaataacatttgcttcggatgtttgattgacttccttaatatctagagacgctagatattgataacagaaactctgagaaaattcaagccgcaataacattatactcggatttccctctgagggctataatatataaaaatgctcgaaattaaaaatgaatactcgtagcacattcagacgacagtagcactttactcggatgtccgattgagccccgtaatacatcgagacgctcgaaattgaaaacggaagctggtagcatattgaaaccgcaatatatcaagacactctatagtgaaagaggagactctgagcaaattagaatgacaatcaattttaactcggaagtttgattgagtgcgttaatagttctagacgctcgaaattgaataaagaagctcagagcaaattcaaacgataataactttctact

SEQ ID NO: 189661 - DNA, 442 bp, Glycine max
agctttgtgttatagcataccacttctctcttttttttgtcagtgggtgcaaaattatttaaaaaaatttatttattataaaaaaatccctccttttacattgtcgtttctcttctctttctccctctcatgaaattacgcttccactctttctatacttttctttattttcttttggctctgtcactaccttcttctctctcttcccctataactattcacaaatcttctcctcttttcttttctatacttattaattaccattttccttttttattactctcatcttgattatataaatatcttattagtgatcattttccttttgtattactcttattttgattatattaatatccttgttattaaacaattcttctataacgttaacttaataaaaataaagcaaaaatacaataattgtaaatgttgtcatatcaaa

SEQ ID NO: 189662 - DNA, 422 bp, Glycine max
  unsure (1)..(422): unsure at all n locations
actcaagcctaaagaacactcanaccgggtgtatntacccncaaggcctagtctctgaagagtccgttaaggcctctccctcctgtatcaggtccaacttagaaaacattttagcacattttagtacaacctgcccaattccttctatttccgtagcatatctaagaaaaacaaaccaaacaataataaatgtaattaagaaaattatgtcttcaaactcagtaacttcttctccgtgctttgaaaataacacttataatgagataataatctcggtgaataaaacaactaanagatatgtattggtaatgtaagtatccatactctcttccncatccagatgacttatatataaataaacatcattatcatttcagatggacgtatcatctcataataagatgtcatcatcacaaaattat

SEQ ID NO: 189663 - DNA, 411 bp, Glycine max
  unsure (1)..(411): unsure at all n locations
gacgacccgcggcatgcangcntataagtgggactcgcattgaatttttatttttttgactcaggcaccgatctacaaggtgattcgtaccatttctcttctattccacttttcacataattttcccacttagggggagaaaaccattcttttcttcccacttttcctcattcgttgctggtgagaaaaaaataatatcctctttgtctcggctttcactacaggtgaaattgtctttttgtctctgataagaccttttagattctttataaaaatattttcaaaacttcgccacctctcatgatatagaaaaaaatgttatacttaaaaaatttcttcgttgaaagatctaggatctcttcaaaaaatcatattaattctcttattcgatgcgattcaagaatatcatat

SEQ ID NO: 189664 - DNA, 449 bp, Glycine max
  unsure (1)..(449): unsure at all n locations
agctntgcgaaaagcttgccgctggagctgccctattatcttcttatctctttnagactggtgatccctaggctcttgaccttgacttgatagaacctttttttaagcgaaggcgtttgacttgatcccatgttttactaaagtgaaacaaaatctagcgcgaatcaaaactccgacatctatcatgggtggaatggatgaatgcattaagaaatgcatatgacacagatgcaatttgtgaatatgggagcccgagaaattgtctccttcttagatacaacgtcttggggtagcacagtgcccgacgtatgtatttaagaaggtgacacggaccctccattggtttgccaaagagagaggatcaagacagaacccgtgcatgatgcatatgcgaaaggcacaacacaaggatgtacatagtacgacaatattcacaaacaaatataagc

SEQ ID NO: 189665 - DNA, 421 bp, Glycine max
  unsure (1)..(421): unsure at all n locations
agcttgagaagaggaagngttgaagggagaaactttttgttattttgtcgaccacacagtgatacctgaagatatgtcgcgggggccaggaaaccttggggacgtcaggtggggagctattgcccacaaccaagcttgaccaatcccgactcaacccgggcataattcggcagtgagaacctgtgatgtacctaaacaggcgagcttctggccttcaacagatataaggaaaacaaaaccacaaagcaaggaggcttgtggtggctggccacctgtgaattttgtgtaatatgcggattgaggcctctggtaatcaattaccaagggtgggtaatcgatcacaacgcttaaaatcgaggacaggaggctataatggtctctggtaatcgattaccaaggggtgtaatctattaccaggctt

SEQ ID NO: 189666 - DNA, 363 bp, Glycine max
  unsure (1)..(363): unsure at all n locations
gtgaattcatgagataaatncgagataaagaacgatcttatctcgcgactgatagcatataaacatagacatatagagcaaagttttagatatactaggttgcctccttggagcgcttctttaacgtctttagctggatgcggggttgtggtcagtgctttgccatctcatcctccctaccttattccttgattgagagaaactctgatcatggacctaacacctgttggcacctgccctaatgctttgacaatgaaagtgttaacatgcaaatgtgaaaaaatactatgcgatgctcgtatcacgcttccacttgctcctatacttacacaattggtgtggtgctgaccatcacctcaaatg

SEQ ID NO: 189667 - DNA, 397 bp, Glycine max
  unsure (1)..(397): unsure at all n locations
agcttgcctcaaagaggtccaggaaggatctgtgttctctttgaactagtnccgccccggagnacgacagtcactgctttaggagcgttgttcaccagcagcgcttcgaagccatcaagggatggtcgtttctccgggagcgacgtgtccagctcagggacgacaagtttactgatttccaggaggaaatagggcgccggcggtgggcaccactggttactcccatggccaagattgatccagaaatagcccttgagttttatgccaatgcttggccaacagaggagggcgtgcgtgacatgagatcctgtgttatgggtcagtggattcctttcgatgccgacgctataatccagctcctgggaatatctattgtattggaagagggccattaatg

SEQ ID NO: 189668 - DNA, 284 bp, Glycine max
tcttagagcacctacacatctgctccatttgtaaacaatactagctcacactgtcacacctcttgtgcttgaagttcttctctcacgaaaggattgttgaatgaaagttcgatccatacgatcttatatccacgacctttgttgctgcgcaaatccgtactattactgcccaaataccctaaaatagcgcgacatgcacgacatgagtatcgtggtcgaatcactacctctgtataagtactcacgcacacaacaccgtcatgactcatttacacacggactta

SEQ ID NO: 189669 - DNA, 408 bp, Glycine max
tgccgcgtttaggaaagaagatcgtggggtacgattcagattatcttataatgattcacaaggaacagtaaacatttgcaatgctgtaattttcaagggcgtaaaagtaaccacatcttaggttctccttccacggaaaagaaaaaaagtaacaaattatagaagaaagggattgtgatagaaactgaaattcactcttatacacaaagaatctataactttacatttgaagaattcttgtgattcacgacagaagaaatggacaaaagaaactcatggggcatgcaagtatcttctttcactttggcaaggattagatgagcacgacagaacccactactcatattcaaactcaaactttacatgcccatattttcttccaagttgaagaatgaattctgagaatct

SEQ ID NO: 189670 - DNA, 370 bp, Glycine max
  unsure (1)..(370): unsure at all n locations
tgtgctagcagtctcctgtattcactatatgtatcnggagagtatgatatgttgatattagactcctatggagccatgaagtatctgtactctagcattatatatccggtaagacacaagtccatgactagcttcacaacattcattaggattcaatatacagcatcacctattagcaagaaaataatatatatgttgcttcatgcattcttctcctaaatctcagtgctgctttacctgttggttcccatcaaatctacgtagataatcacattaaacatacataagtactttatacattaatcacgtcacataccaaatgtgtttacactataatggggacgggttgggaatttcttcaatataaaaa

SEQ ID NO: 189671 - DNA, 233 bp, Glycine max
  unsure (1)..(233): unsure at all n locations
gggtaaagcctcatgactggcacgttcttcttcttcaaantgacgtcgaggctatacgagacatcttgccaaacaaagtcaagttatccataactcgcctgtgctttttcttccatgctatatgtagcaaagtcattaatcctgtcacagtttgatgagttggaaaatgaggccgcaattatactatgtcagttggagatgtttttttcccctgctttcttagacatcatgat

SEQ ID NO: 189672 - DNA, 481 bp, Glycine max
  unsure (1)..(481): unsure at all n locations
tcagtgttntatggtccagacgagtagtgtgaggctgcagattatggtcatgacaagttaaccttcggatttataagtggaattttccacggaagtaaacataatacaatgttcagtgcaatcaaattaattgatgaatcaaatgtattattccatgaactgctggtgattttatgcatcttatgaagccacacaacattttgcggaagatcccctgcaggactatgtaactagatccctccttcatttgtgcacagtaaaaaataactggagtcttttgtgaaagtgatggcttatatagagaacatgtatactagcatgtagtttataatacactgtagttagatttttgttcttttatgataaacaggaaagatatctggcagctatttaattattgatatactatatatatgctctactaaagagnaacattactattgtctataaaccttatgccttacagcatctgtggtggaca

SEQ ID NO: 189673 - DNA, 454 bp, Glycine max
  unsure (1)..(454): unsure at all n locations
agcttaaggaggatacctaagctctctgctgaaatgatctaaattttctgaaaaggaagcctatggacccaaagatcaccaaggaaattgagaagaatgcaactttgctttcacacaatctctcactgcataatgccacataaagtaatcaggacaagttaaaaattcaggactaggataaggggaccaataattngcaacttagtgctaccacgcgaatgaataaaaggacattggttcatgatgtcaaatcatatgaaacatttagattttgatcaatgtaacttcctgtcctactatagaaaacattcttgtcgagtatttcatgattgaaaatcagacatcatggcacttgaactcaagggtctcatactcttattctttttatttaatcagcaaaaaaatatatctattactatagcaaaaggtacaagtagtaccatcagtcccatac

SEQ ID NO: 189674 - DNA, 494 bp, Glycine max
  unsure (1)..(494): unsure at all n locations
ctaagctgattctacaataaatccttccatatgcatgcatcaaatattcttggatgatgattccaagcctgtaagaaagccccagaggagattgaatcccaacattcttgatgtggtgaagaaagaggttaagaagccactagctgcagtgatcatntatcccatttcaaatagcacttgggtttcacctgtccaagtggtccctaagaagtcgagcatcacgattgtgaagaaccaagataatgagttgatcctgactagagtggccaatagttggcgagtttgcattgattataggagactgaaccangaaanctcgcaggatcccttccctctcccatntataatcaggttctagagaggttgccagtanatcatactattgatgtcctgatggccttcaggttacatgcacactcatattgcaccaaaggaccaacacaggaccacatttcacctatcattcngcacattttcctacaacatgatgcctt

SEQ ID NO: 189675 - DNA, 311 bp, Glycine max
  unsure (1)..(311): unsure at all n locations
agcttgtgaaactcttaaataaaatgagttctagttatgctttgaganagagacaaatgcaagcgagaaagctacccttcttaataatttcaggagttggaaaacaaactaaaatatcttcaaaaggatttgaaggagcttaatgcacttcacaatcataaaaaagaacaaagatattatctttggatagagtgtgcaccaccgcacaaagattatgaagaactcaaagtgagtaaacacaatctttgggtggaatgtgaataatacaagaaatctacaagttntatgaaagatgtggttttgaagcatca

SEQ ID NO: 189676 - DNA, 378 bp, Glycine max
  unsure (1)..(378): unsure at all n locations
ttgatactcagcttgctgtctagtgtttagataagaaggtccatcttcttatatgtttgagagattttgttgtgtgaagatcagcaaagaccatagcttgaatcacgagccgatttgagagcttgaaatgagtttgtgagcgattgtgagatcctataggtgaaggagaaatcctcaccacttgtatgtgtccaatccttcatcttgttcttctctttgatgttaacaacgcttcctggtatggaaagctagatcctctgttggatcttccctgtatgtacctgacgtaaatatgtctctatctatataacgaggacttgtgtgttctctatgctatcttcttctcactgangtatgcctttaacttgatgacatata

SEQ ID NO: 189677 - DNA, 367 bp, Glycine max
ctctaactgaatttgcgacagtaccatcgttgtttataaggttctatcgattacaacatattggcaatcgatcactagtgtctctgagcattgcaattcagattctattgagaagagacacatcttttcatataatgctttaagtaatcgattacatgtgcttgggtatgcattaccattgacaagtgttgaataataaatcaagacaagtaactctttccaatggctttctcaagattttctcaaggttataactcttccaatggttttcttgaccatacatgaagagtctattaaagctagaccttgacttgcattgtatgtactcgatataactcttacaaactttttgaacttcttcttcttc

SEQ ID NO: 189678 - DNA, 96 bp, Glycine max
  unsure (1)..(96): unsure at all n locations
agcntgcatacactactgaagagtcgagacagttgttacttggctctttttagaaggccatgcaaataaacaggaaacctctatttgcattccaac

SEQ ID NO: 189679 - DNA, 302 bp, Glycine max
acgaacgaagaacgtcgaagaacgggtgaaacctctgtgagattcctcacggaaaacgttacggaaacgtttcggaagcgcctcggctcagattatcttcacggaaacaatttttccaagcaaatcccatagagagagaagtgccaaaggggcggaaccactttctactccacttcctcccatatatatagcaaaaaaagggaggtggttgccgcccacctcgcccaggcgagctcagctcgcccaggcgagccaggttgcttcctccagaaccaaccgcttctgaagaaataatggagggc

SEQ ID NO: 189680 - DNA, 216 bp, Glycine max
tcggcaataaccttacaccccttaaataaaacaaaaacttctacattattcataaaaaaaggcgctacatatccaaactcccggaaaaaaattccggacacaccacgaaacataacctttagatcgagaacacgctatgcgctacatacattcccccttcaaaaataaacaactagcgcagaaaataacaatctaatattcaaaataaagaacacc

SEQ ID NO: 189681 - DNA, 448 bp, Glycine max
agctttcttgagaaaacttccttgagaaatctttttgttatatcttccttgagaagctagagcttagctacacacacccctctaataactaagcttaccttcttgagaagcttctttgagaagattcctaaagaagctacggcttagctacacacaccccctataatagctaagctcacccccatgccaaaatacatgaaaatataaaaaaagtcccaactacaaagactactcaaaatgccctgaaatacaaggctaaagccctatactactagaatggccaaaatacaaggcccaaaagaaggaataacctattctaatatttacaaagaagagaggacccaaccttggtccatgggctcatatatctatcctgggattcatgagaaccccaaggccttctttagcagctctagcccaatcctcttggagtcttcaatccaatacc

SEQ ID NO: 189682 - DNA, 376 bp, Glycine max
  unsure (1)..(376): unsure at all n locations
tctggttttccaaaccttgaanacttgtgctattcatcttttcattctctgctccctttgccanaaagaattcgtcaaggactaaccgcctgaattctttttgtgtctctcttctcctttccaaagaacaagactaccgctgattcttttggtctcccttttcgttgcaaagaattcaaatgacacagtctgagaattcttttgattcttcccattccctaatacaaaagtgttcanaggactaatcgcttgagaattcttttgtatccccattcacaaagcatcaaaggtttaacagcctgagatctttttcttaacacattggagggtacactccttgtggtacaagtagatggtacatctacatggggttgac

SEQ ID NO: 189683 - DNA, 326 bp, Glycine max
cgcggcatgcagcccgagccccacagacagattgttttgatatcaccacaacactacgcgagcccccgagagcaaaacaaaccacaacacaaccacggcgctgctggacaaaacgaaaatgaggataggaacaaaagcaacagccaaagcacacgcccacacccccaacattaaaagcaagaaaccggctcaactaaaacacaccaagacaacctacaaaacaagatcagacccctagatcccaccccatcctgcacctcgacacaaacaaaccacgcaccaaagggaacaagaaaaaaacccagaagcatgaatccaaagacaac

SEQ ID NO: 189684 - DNA, 174 bp, Glycine max
ttgagtcaacactgtaaggactgactcactttttaactaaatatggagctactccacggttaccattctatgacttgaatttcgacacctctgtcgatgggaaacataaaaatcctttgatgactgataccataaaatcttaatgtgggcccaatttttttgggataatatcca

SEQ ID NO: 189685 - DNA, 441 bp, Glycine max
  unsure (1)..(441): unsure at all n locations
agctgggnttatgaattgattttagccttatttttattttggttattagacaattcaattaagaaagaaaaatcccaaagaaaaacgtccgattgatttttattattattttattaaaagatattttcttattattatattattatttcgcctccttttggatttaaacgtggttacgacatgaaagatcggccggatattattctaacagaaattaaaagatattacaactcaaatgatcggtggaaatttattttatttttttgattaggcgagaaagtgacttaaataaatgactaaagcacgccaaatgggggtacggaaagtaaatgaaataaagataatagcttgcgaaacatgcaggggccactaaggacacatagaatgaattgaaaggtttgatatcgggaacttaccggttgaagacccgagatcgacgat

SEQ ID NO: 189686 - DNA, 440 bp, Glycine max
actaagctaaagggtaactagatgcattggttaacctgttaacccaactggccttgaatcaaaattctgtacctgtcgcaagagtctgtggtttatgctcctttgctgaccaccatacagacctttgcccttctatgcagcaacctggatcaattaagcagtctgaagcttatgctgtaaacatttacaacagacctcctcaacctcagcaggaaaataaaccacaggagaacaattatgacctctccagcaatagatacaatctcggatggaggaatcaccctaatctcagatggtctatgatgcaatcctaccccccaagggtattcgatagaagactccaagagccttgggctagagctactaaagaaggccctatggttctcatgaaccttatggtagaattttgagcccatgggtcaagggtggatccactcttc

SEQ ID NO: 189687 - DNA, 303 bp, Glycine max
  unsure (1)..(303): unsure at all n locations
agctgttatagaattngccctgttgaatatgcttttcataacattaagatccaaatttgggaaagcacaccccaaggtatagatgcataattttttcaagagtgtgagacagactcatgactatggatctggccttttcctcagcagcagacacaacttctaatttaaactttgctctcaaaaacttggaatctccattttgaactattgagtctaagttcccttccttctccttcaacctatctgtctcaacagtgacatgcttcaactaatttatgatgacattcaaagaggccataaact

SEQ ID NO: 189688 - DNA, 351 bp, Glycine max
  unsure (1)..(351): unsure at all n locations
tacctatctaggacataagttgagaatgacaatgatctctttcccttctgtcaaagcctacctgagtccgcctctcatctgttcttcacatgtggtaaagtcttgcctttgtggtgggaattcaattcatgggttaaggaagatagagtcctccactatagcccgatggataactttcttcagcactcaactacagcaggaaggaaggaaatcaatagaagatggaaaatatggtggttggctgctacaaagtcaattnggaaactcagaaatgacatggtgtttcatgatcagtctttngatatctctaagctggtggacaatacaaatttcctcactttgtcttggctg

SEQ ID NO: 189689 - DNA, 450 bp, Glycine max
  unsure (1)..(450): unsure at all n locations
gcagctnggagttccaagtgccattcgcttctttttatttattcttcttcgggcttcaattcatcagtgggcgttccttctgtgtccagcatcttgggatgttcccagcctttgatgacagctttccaggttctgctatccagtgatttgaggaaggccaccataccttgcttccagtattcatagttggttccatccaagattggtggtctgttcactggtcctccttctttctccatgttcatcagaatttatctccctagatctcactcagtgatttcgagtgcctgctctgataccaattgaaattctgatactggggacagatgtcgtacaggatgtcacgacatcacgcttcaaaacatgcagattgtatttgacagtgtgcacagtttaagcaagtaaataacacaagagaattgtaacccagttcggtgcaacctcacctac

SEQ ID NO: 189690 - DNA, 390 bp, Glycine max
  unsure (1)..(390): unsure at all n locations
tgatatcatcattgataaacaggtaagctgttggtcaaatggctcgtatatacaacaataatggccttcatcatatccacatttatgcatttcattctaaaattcagagatngatacaaaaatcattgctatatgccagtccttctcttaacaattaagttcacactctcaccaagttatggttcaagcttttctttctcaatcaatctatctattgactaacatttctaattgcgagcctactttcttgttctttctcatctaacatacatgctcattcataactcatgatttcagcatatgctgtaccccttcatgcaatcaattcacaacaccaatttcacaacaaanataattattgtttgtactggatgctcaaataatcttcac

SEQ ID NO: 189691 - DNA, 440 bp, Glycine max
atgcttaatgcaggataagaatgatggagagatttatagagggtggagcacttttttgatagaagaaaagggagagaagttgaactttgagttatgtctcacaagactcttattcattaaagtgacaacaagtgttacacatgtttctatgtatagactaggtagcttacttgagaagctttcttgagaaaacttccttgagaagcttctttgagaaaacttccttgagaagctagagcttagctacacacacccctctaataactaagctcacctccttgagaagcttccttgagaagaatcctaaagaagctagagcttatctacacacacatttctaatagctatactcacctccttgagatgagaagctagaacttaactactcacccactataatagctaagctctacctcgtgacacaatacttgagaatacat

SEQ ID NO: 189692 - DNA, 383 bp, Glycine max
  unsure (1)..(383): unsure at all n locations
agcttcatgatggtgaatcaagatagatacaagttgtttgttatttatcaaagatgatgacaaanagcccaagagaatgatttcaagattgagtcaagaacaattcaagaataaagagaaatttgatttcaatattcaagaaaagatgaattcacgattcaagagaagaaatcaagaagacttcacaagggaagtattgaaaagatttttgaaaaaacaaacatagcacagttttgtttttcaaaagagttgttcttaaaattttcaagttcccagagtttttactcttctggtaatcgactaccagtttcctgtaatcgattaccagtgacaaagtttgtttcaaaagctttcagctgatttacaacattccaaataatttc

SEQ ID NO: 189693 - DNA, 497 bp, Glycine max
  unsure (1)..(497): unsure at all n locations
cttgctgatgataggctgccaaacatttcaacttttagaactctaccctattggaattccaagataagataaaggaatatccagctagccacaattaagaaaatgagctggctccctgcaccaagcctttgatatgcccatgcacccaaattgagtttagcataattgatcttgagaccggaaaccatctcaaaacttctcagaatagatttcaaaactctaacattatctgttgatgcagatccaaaaaacaaagtatctccaccacaagcccacactgctgatttaatttccaattcagagaatctagcaacaaggctttctttctctccttggccaagggaaggaaactgaaccccatccagtgttggcctatngagattctgctcagaaaatctgtctttgatatgatttaaggctgcatcttaacactactatgctcatggacccacatgccatcaatgatcagaaccttgaaagcattgcccttcttctat

SEQ ID NO: 189694 - DNA, 373 bp, Glycine max
agctctcgaagccactatggatttgcgtgggactttttttttatctcctagtgacacggcgggctcagcaagttgggattgaaaagaactggatcgaatccatatcacctacttcacatttataatggttcttcttgttaaagtcgaactaactgattcaatcaataaaaggctggttctttttattcattagatttaaatgattttttttagttttaaaaacaatgagatagtgataactacaaaatttgaatctaattagttatcaagattgactaagagtgattaaaaactctctatggagtgtgtgtttagtggaaatcgatgatttaatatatttcatccttgcaaacatgatcagaagagtgagaat

SEQ ID NO: 189695 - DNA, 416 bp, Glycine max
  unsure (1)..(416): unsure at all n locations
agcttaaatgaccttgtttgagacgagattacttttgtatttattacgacaagtntgaatatgatgtagaagaaaatgaatgtgagcctttttcccctttgaaagacttgtaaaaaaaatgttttaaaaatacttttaattaatatttgaatgttttttccttattaatatatatgtgaggggtagagggtgtgttataccctaaccatgattcttcatgtgaaagagcccaaagaacctaatttcactcctaatcccttaagagctacatcaaataatttgttttaagaataaaaatgcataaataagactaaataatatcattttattcctagacatggattacctaaatgttcttttcaagttcttatgagataaacatatttccatgcataaaccctataacactacatgag

SEQ ID NO: 189696 - DNA, 456 bp, Glycine max
cgatatccgtaagaagaaggtaattcacgacccaaggtggtctattgttcccctcaccacccagttcaacatcaacttatccagattcatattcttctcattcacacgcatgatgaatacatgatcatctgcttctttagcttttcccttcattctctggtcagattacatatatgtacctctctgattgatgcctttattctctgctgtccctttatcttattgtagttttctattatgcatgcacctacacatagaaaataaagccaagggtggcaaaatacaatgagagaaagctaccatgtacctttgatttgtagatggttgtttgtgggtatctatgattagaaaactcatagaaaatggaatgtcaaggcctcagcaagatatcatcaacatttagactcaatgttactgactgactgtgcacgctatgattttccaattgaccacctg

SEQ ID NO: 189697 - DNA, 465 bp, Glycine max
accttaagacgacctgcggcatgcagcttcatctatttgccaccatatatttttattttggaagaagccaactctgatgagaaatactataatagatttggatactaaatcatcgaaattcacggaggtggtaccccccatccccacctcatgatagcatatctggaacacagtttctagaaaagggctttctttgggggggtgggtaatatacaacggatgggaggaatacaaataataatggggaggtatgtataacaattgccctaagtatactgatttcgccttcaagaagtagcaatatcaccctaaagaaaacatggcccaccccagaataattaagctcattactttattttaatgcgattaagctcattactaatgggtataattaattgttttttatcactaacatactctttgtacacagatatcatttaccaaaatctctaatttattcaataa

SEQ ID NO: 189698 - DNA, 393 bp, Glycine max
taaaaactcactgttctggctattactacaagaactgataacattcttgatttacattcgccttaagataaatcaggcactatttaatacagtcttgtttaataataatatcaatatgcatgatatgtgatttacgtgatttttttagcggagctttcataatatgaaataaaaggacgcgaaaatctctgtataaaccttcttcagtataataataagatattgtattctcaaaatattcaatgcattaatctattttcatttaatacgcttatatgaaaaattataaagcattaaatactcaccatactatagaaatcagagattaaattgaagtgaaaaacattattttgacaaaaataataaaacactaaaaaataatattagtaacaa

SEQ ID NO: 189699 - DNA, 434 bp, Glycine max
agctttccttaatcgatatactttctccttctgttcttgaacaacgaacccttcaggttgctcaacaaaatattcttcctccaagtatccatttaagaaggctgatttcacatccatttgatgtataatccaacacttttgtgcagcaagagacatcaacattcttatggtttctagtctggcaactggggcaaaagtctcttaaaaatcaacaccaaacacttgagcatattctttaacaacaagccttgccttgtatttgtttacagaaccatctgagttgaggtttgttctataaacccacttgacaccaatccgctttcttgtggttaggtctgtccaccaccctccatgttttatttttttcaatcattataaagctctctttcattgcatttcttcatttctgaacagctgtagctgtttcatatccc

SEQ ID NO: 189700 - DNA, 446 bp, Glycine max
  unsure (1)..(446): unsure at all n locations
ntagccttncatggcaagttatcacctgtcagttacaataggagggtttgaaagcacaattcagattacacagtggtagggatgtcgtctccacctctaggaacctaaaagtcactctaaaacctagaacctagaaatcactctaaaacctagaacctaaaaatcactctaaaacctagaatcctctcacgtatatctctattctgtcacaagctaaagactcctcttgtcatgccaacttcagctggtaagggctttctatcctcgaaggctcgcttagcgtcattttcgcgcttagcgcgagttagtgatttttggatgagcgagtcaggcgcgctaagcgccagaagagacaaatgactcgctaggtgagctaatggcgcgttgagcgcgtgcatgcatggaagattctcttccagattctcctactcactaagcgagctgat

SEQ ID NO: 189701 - DNA, 443 bp, Glycine max
  unsure (1)..(443): unsure at all n locations
tgaggcctgcaagcataatacacacctttgcttggaagcagtagctttcttctttctncctggccaaatgagcgaaaattacaatcattgtcaattaatcagaccgactttaatctttattaattaaaaagagaagctgactcccaaaaatagtagctctatttgtatggtcacccacgcaacattttcatcatcatcatcatcataataaaaggattgatgttctagaagcttgtcctcgttattaaatttcaccaatccctttcttgcataatctccctaatatcatctcttgttgtaagcatatttgaacaagcacccataatgaatgttactggatacacatcattagtcttattcctagaagacagcactttgattctctcatccccatattatgtataatggtcgacacacaaccatggctgagcgatctcaataca

SEQ ID NO: 189702 - DNA, 407 bp, Glycine max
cttgcaggaccagatcggatcatatatatgggataatattatcgattcgggccgaagatgttaattgcgggttacgcatttaatattcacagccataattctgtattgcctggccaccgacttaagatatcggctgtttcaccatggattctaggttccgcacaaagatgagcatggatagagttttttactactggaaaactgaataactcggtgtctgcatacacggaggataattagagcttctcttctcgtaatgaacggggcactcagaatgagaagataatgctgcatttgaatgctcattgtctctttctattttcaaagcgtcaaatgtaggagatatatacacccgacaggtgattgtgtttcgttctataacacgattaaaaaaatgatatgcgact

SEQ ID NO: 189703 - DNA, 443 bp, Glycine max
  unsure (1)..(443): unsure at all n locations
acctcacgctgcaagctgaagctgtacccacctttttattaatatacatcganaacgcgtctactatcattgttatcatctctttctccatcattgggggcactacttgagctgccagatccctccatctttgggcgtattccttgaaagattcatgctctttcatacacatgctctgtagctgcatcctatccggagccatatcagaattgtactaatactgcctaacgaaggaaaacatcaggtccttacaagtatggactcaggaaggttccaaattattatactaggtgaaggatgccccattaagactttcctggaagaaatgcatcaacaatctttcatctttcaagtatgcccccatctcccgacagtatattttcatatgattcatggggcaaatagtccccttgtacttatcgaaattcggcactttgaacatc

SEQ ID NO: 189704 - DNA, 442 bp, Glycine max
tctatagaaggttcattcctaatttctctacaattgcatcacctctcaatgagctggtgaagaagaatgtggcatttacctgcggttaaaaacaagagcaagcctttgctttgctcaaagaagagcttattaaggcacctgctctaactcttcctgacttttctaaaacttttgagctacaatgtgatgcctctggagtgggagtcggagtgtattgtacacggcggcaccctatgcttatttagtgataaactgatagtgccacccttaactaccctacctatgataagaggttatgcctaataaagccctccaacttgtgaacatacctgttccaggatttgcattatagtgactcaatactcagtcatagaggaaacaagtaaacaaaggatgccaatggtaagacctatacaattcatatgtatcaatacaaaggaaa

SEQ ID NO: 189705 - DNA, 407 bp, Glycine max
  unsure (1)..(407): unsure at all n locations
agctttgcggatttggccttcaccggcgattggatcgtttcaggntcgaaaagaggcaaatttgatcatcctgctttgatgaatgagaaaactagggcaaatgaagaggatgacaataaggaaggaacccatgttgtggctgtcattcctacatggccaaacttactaccagcccaacaatgtcatcgctcagccaatatcgacccttctcattacccaccacccagtcatccacaaaggccactcctacatggcattttccttccttggaagatgcacccatgagccccgcatcgccctctcgtcgaagggtaggttacgatattcggattttaaaaaaccaatctgtaaatactcacttaacatcgnnttttgaagaaactgatgctaagaattctatcaacatc

SEQ ID NO: 189706 - DNA, 434 bp, Glycine max
  unsure (1)..(434): unsure at all n locations
gaccttaaaactaagctgaatgggaatgggaaggtggacttcctacttattctttggccagagggacctggagatatgccggggtcagagaccttgggacgtaggggggtgtattgccaaaaccaagcttgaccatcccgacccacccggcatagtcagtcaggaaacctgtgatgtacctaacaggcgagctcctggaagtaatcgataaagacaaagacccaaacaaggagcttgtgggggctggcagctggaatcttgagtgatattgggatgggctctggaatcgattaccgaggtgggagtcgatacaggcttaaagtgaaacagngctagatggctctggtatcattaccaagaggtatcgattcaggttaaaacgaatcagagctagaggttctgtatcatacaagggcgatcatacagctaaaatg

SEQ ID NO: 189707 - DNA, 428 bp, Glycine max
  unsure (1)..(428): unsure at all n locations
catgcaagcttgcaagaggattaggaaaggggctttctactaatgccttcatgccntagaacacaaggacactcttgattgcaaatttactttttctattatcaattcccattcaaattccattccttgtaaaaacgctcatatttggcattctagatttggtcatatctcagacaaagttttcaaacatttgaataataaaattggaatgcacctttctcctaatttctcttcttctaattgttttgttagccctcttgctaaatttacaagattatcttttcctaactctaaccatttatctaaattaccatttgatttaattcactgtgatatatggggtccctatgctcaccctacgaatgagggaaggagattttccttacattggttgatgatngctcacattcacttgatatttctgctta

SEQ ID NO: 189708 - DNA, 464 bp, Glycine max
  unsure (1)..(464): unsure at all n locations
tgctgcccatgaagatattagatggcattgtatgaaggcatgtgcacgtgtatnttttgcccttcacctattttttatgtngatattcagatgggctgcagcttctaatgatatttcactatatgcaatgatttttccaattgctttgtatatttggcaaataccacactctatggccctaacctatttgtgtcatgatgacctgctggaggccaccggaatgtcttatatctttgtgtatagtgacaattttttttcatacaactatcttggtgctctgtaatattcaatatctgcctaaagtccttgttcatatatacaaagaacttaatgactctaatgcaatgtctgactcaggatagcacgtatacatttttctatgagataccatctcaactggaggacttaaattttttaaatggattacatctggattgacaaattatataacatttactacacat

SEQ ID NO: 189709 - DNA, 292 bp, Glycine max
  unsure (1)..(292): unsure at all n locations
cggcatgcaagcttatatgaaatcatcttacagggcatctgtattcnctnatgtttctccaacaactcaaaccggcaacttgacagatcgaaatatgagggtctcgttattatcttccataacgtcctggaagccatgaagaggatgtgctgctggcccagatctgctctgtggaagaaactagcttatgacgaaacctaactattatgaacataaacaatcatgacaaccacaaagccttttcccacatgagaccacctacatcatcaaacaattaccccgcttatagagc

SEQ ID NO: 189710 - DNA, 359 bp, Glycine max
tagcgcttaaggatctatatgtgtcaaagtgtgcaattcttcgatgccggtatcgcccttctctcaaaggccaagctgcctaactagcaagtgcttaccttgtctggttgttctgatgtatcaaacaagagtgcgcctttactgaccaaattgggccagaccttgctgggattgaatcttcaaaactgcaattcaattggcagcagcacaatggagttgctagtggagaaatcgtggagatgcgatattctggcttaatcatgttagaaactataaacaaatataactgactaaatcacggaaggagatagaattgtacaggtcacattcaacatacatcttgactgatatttctatca

SEQ ID NO: 189711 - DNA, 427 bp, Glycine max
agcttgtaatggtaagaaatgagcaacacacactgtttttttttatgccgcaagggtgttaaaaaaaattgtaagtattaaataaaagtgtgtgtgctgctatttaagaaaaataaaagctaagtgcggaaaggaaagtaatagagctggaataaaaagaaaaaggttgatctatggatgaatgctctcttagaacctaagcttttgcatcctagaaaaaccatgaattgattgccgcccagccttgttacaagccttgaaaagtccttcggattcaggttgggtgttcttgactatatggcatgagatgaattgcaaagattgagacttgtgttacttgttgattgttgaataaccctaaacactcgtgtttgagtgaaacagtacctgtaaggctttggttaatgatcctttcttgataatttgc

SEQ ID NO: 189712 - DNA, 378 bp, Glycine max
gcttcctccataagcaacagtcttttggaggaatcttctggagggcccaagtgggcaagttctattgcccccccttctattttttgaattatttccgtaacgttacatatttacaattctaacgaacttatttcttcgcaggttcgaacctacagatatgattactctttttacttcgaagagtcagaactcacattgccaaacaccttttcattccgcacttctgaattacgacaccaacctgttctttggtttgaacgtctcggactcattattgcatgcatcagaatatcctgacatataggatatagaagactaatttttcccactttattatcactaggaacacaaactgttttctctctatccaatttaaga

SEQ ID NO: 189713 - DNA, 360 bp, Glycine max
catgcaagcttatcattatatgcaagggctagaacaactattaaattattttctcgcaacgacccttaacacactatatagaatcaagggttcttactgaacttcttctcgacatcgcgcttcacattctcgaacgacaaccttgtgaacttatctttatatacttctcacaactcatatactttactggagtatcgaaatcatttggtttagcgggtccacattttgtccctttaattaagaccattttctacgaccgtgcgaagatcagtccatcttacggcgcatttatattgttctgggtcatctccaaccttgtatggtcaccagtaaatattattatttaaaattctcttatcg

SEQ ID NO: 189714 - DNA, 363 bp, Glycine max
  unsure (1)..(363): unsure at all n locations
actatantatatctcagcttgcaaccacaaacaacttctactcttcgagtaacagtagggattggctaggatctgcattgctaccaagtttgaccggaaggtgcgtgtcacattcaggcacactccttcttggtggatttccatattcttccgaacttgcggagctgacgtagtgctaaacgtacagtggcctaagtcactggtacctgttctatacaactacttcactcttaccatgaaatacatttataacgataaattgattaatctcaagggtgatcgtgatgcaaatattgatcatatatctccatcacaactgcgacgcctcataaacacaggtaacactattacctattgtcacat

SEQ ID NO: 189715 - DNA, 311 bp, Glycine max
  unsure (1)..(311): unsure at all n locations
tgcaagcttgcataccctaaggatccatcaggaaatttcttgttatagagagccatgaggctgggctcatgggccattntgggatagacaagacccctgtcttactcaaagaaaagttttattggccccatatgaagaaagatgtccataagcattgcacaaggtgtgtgacttgtttacaagccaagtctagggtgatgcctcatgggctataaacacccttacccatctcatctgcaccttgtgtagacattagtatggactttgtccttgggcttcctagaacccaaagaggtgtagactctatcttt

SEQ ID NO: 189716 - DNA, 392 bp, Glycine max
cacctatattgactctcctatgctgtctctacatatataaaacagtcccaccatcccaattgtgcaaaatcatatccatatatcattggggcatttcaccgagcacttggtgggcgcacgtttggacataaattgcaagagaatgggggcaatgtggcatgccccattgcttcacaatacaacataggcctaatgccttctcacacaaaccctgaactcaacaaaacaagcatgaattcagatgcgaattgcttcacgaattttgcaaaatatgagcaactaaagcaccacaacacatcgatggagagccaaataaccaagggaaattgcacttacttgtggggagtgaattaaagcatgataagggaagcatatactcaacaatggaagct

SEQ ID NO: 189717 - DNA, 437 bp, Glycine max
agcttgagggaaaacttgatgccttggtcaacctattaactcagctggccataaatcagaaatctgcatctgaacttgttactgttgcaagagtctgtggtctatgttcttctgctgatcaccatacagatctctgtccttctttgcagcaatctggagtcaatgggcaacctgaagcctatgctgcaaacatttataatagacctcctcagcagcaaaaccaacaatagtagaataattatgatatttcaaacaacagatacaatccaggttggatgaatcatccaaatctgagatgggaaaatcctccataacaacaacaacaacaacaacaacaacatgtccttcccttccaaaatgttgctggtccaagcaggccatatgttcctcctccaatgcagcagcaacagcaacaacaacaaagacaacaagcaact

SEQ ID NO: 189718 - DNA, 416 bp, Glycine max
caagctaaacatccacatgagtctctaaatctctttctttttgtatcgcaactcatacttgcgattccatgacgcacctcaatactatactaatattactagaacagagttcttgtgatcacaagtactcgcactcgggtccatgtgaaactaccaccaaaatcaatcatcatattaataaaaatttcacaccacggttgaaaatcaaccgtatcacagagacaatcacatgcacaaacaatttcagtgcctgaggtccacactcctcctagtttgcaatatagttaattaaaataaatgcatcacacacatcaattaatagttacccgaaatttacactctctgggtcttttaattaacttaataaagcaagccaaacatttattgataagtcaactaatagcaactaatgctct

SEQ ID NO: 189719 - DNA, 391 bp, Glycine max
  unsure (1)..(391): unsure at all n locations
ctacacaatgacaatatagtttcaccatatattatgacctattagatgaagataaagtatttaaatcatagatgatattggagtaaaaatagggacacagttaggggtgttcacaacagaggatatggtcttggtcttctgatagaatgacaaatggacgatcagaaatatagtctcgatggtcctatgtaaagttttgaagaagaactatatatgtgtctctcaaaaattatctgtattaaatcgatacctgcgaaaataaaatatacttttgctaatccttaataataacttgttagacgatcttctaacttgattgaagaacataattaatttctctctatctatcctaatactattaagaagacactataaacnatntgttgcttca

SEQ ID NO: 189720 - DNA, 418 bp, Glycine max
gctgcagctaggaaccaaacttgggcgtcatgcatttatcttgcttatggctaggaatacaaaatttggttttagaattagaaaaacatgaaaatttggatttgcttgtgagagttcttgctcgaatttgggctgccccatgtttgatactttacatagaggtggcgtggaaaacaccttgcaatagtgtgtatacatatgtaaatataaggagcatgaaattcctagcaaagtatgagatattgttttcttaaatgaatgtatgatagtgtggaatgccctctttgaatgcaaatatgtgcaggatgtaattagcttctcaatatgcatataaataaatatgagtgaaacaacacacattttgttggcgtacttcaaatgtatttaagtagtttgtgataacacatttttatgatat

SEQ ID NO: 189721 - DNA, 436 bp, Glycine max
  unsure (1)..(436): unsure at all n locations
ctcagcttctaaggaagtnntctcaagagaggctctcaaggaagctatctagtctataaatagaagcatgtgtaacacttgttgtaactttgatgaatgagagtcttgtgagacacaactcatagatcaacttctctccctgtttcttccttcaatttcgggctcctcctccctctttctctccctctttcttttcctccaatgaagcatcctgtccaagcttcttatccaaggctcatcttggtggtgaagctccttcttccatggcttattccctagaggatggcgcctcctctcacctattctcctttgtcttccgctgcatctccatggtggaaaatcaccatcagaggacctcattgaagctcanagatccagcctccatagaaggcccacaagcgagctttcatcaagtggtaatcagagcacaagagct

SEQ ID NO: 189722 - DNA, 311 bp, Glycine max
agcttataatatatcgatacgctcgaaatttatttcgtaaactctcgggaaattcaaatagtcataacttttcacacggatgtccgattcgggcgcataatatgtcgagaggctcgtaattgaacaacgcaagctcttgagaaaatagactggtttaaatctccacacggaagctctcgtgaaagttaaatggtcataactattcacactgaggtccgattcaggtttataatatatcgatacactcgaaattaatcatcgaaaactctctagaaattcaaatggtcataacttttcacacggatgtccga

SEQ ID NO: 189723 - DNA, 301 bp, Glycine max
gccatatgtatctctggagagtttccggcgtctaatcatgagcggctcgctatatcatcatcctgaatcagacatccgagcgaaaagatatgaccatattaatttatggagagcttccagcgtgtagtttcgagctgtcccatatgtgatgctcccggatgagacatccgagcgaaaagatatgaccatagcattctctggagagtttccgatgttaatttatgagcggctccatatatgaacagcccgaatcggacctccgagcgattagatatgaccatataaattgctcgagagcttc

SEQ ID NO: 189724 - DNA, 414 bp, Glycine max
agcttctccttccttttcttataaatagggaaagtgttggttgaacaaaaatgttcaaccctcctagtatttaagattcacttaaaatttgtgagaagaattgtttccgtgaataaaatccaacccgaggcgcttccgtgacgtttccgtgggtgattacacaaagattttcaaccgttcttcggcgttcttcatttgttcttcgtcgatcttcgtcgctcttcggtcttcaaccggtgagttcccgaaatcaaactatgcaattcattctatgtacccttagtggtcctcatttgttccgcgtgcttttattttcatttcatttactttccgtacccccttaggacgtgctctagtcatttatttcaagcattttctcgcctaattaaaaataaaataaattcccactgatca

SEQ ID NO: 189725 - DNA, 436 bp, Glycine max
attacgtgacacttaaatactcagctttagctcgtccttcaagatcatgcctttgacccatgatgattcctttcacctcttcggagcttgagctcactattgctgccctataaagcccctcacaactttgctgtggtcgtgttcttcctttcgggccttcttggtttctcgttccaaggcttcagcggtggccatattgacgtcccttagttcatcatactctgttcagactttgatggctatggacttgaacttctcttcgactacccaggctctttcaagctttgcctttagggcttgtacctcatcactttcttccgaagctgtaacctcatcatttctcatagtctttagatttgggagccaatcaatccttgtgtccggtctcttagccgcttatgatagccgccgatgattccattactgcttcccctaa

SEQ ID NO: 189726 - DNA, 422 bp, Glycine max
tcagcttctctagtccactaggaatgcccactatctgtcattgtttctaacagtggcacactccatttagaagggacaatagttatattacctctcttcctagatgcaaacacacagtggatatgtagagacactacttgaacgcatcttattggacacaccaattccagccgaagactatctcatgagacgtaaaacatcattccttcaatagcaccaatagcacttctttacctaaaggtattacacgaacatccgacgtgtattctgttatttcatctcacacaatggctagggtgacatcacatacgaacatacttaccgacgtttgtcatacctatatatgcacatgcgcactccctggcaggtctatgacctctcgaacgcaaaccttattaggaatctgactacatagacactaa

SEQ ID NO: 189727 - DNA, 442 bp, Glycine max
agcttcaagaattatggcctcattaaactacttgtttcccgagggaaattctataaatagacctcccatctttaatggagtgggttaccactattggaaaacctgcatgcaaatctttataaaggcaatagatttaaatatttgggaagccatagaacaaggaccttatgttccctctatagtggccggaagtgcaacaatagaaaaatctagagcacattggactgaggaagaaagaagattatttcaatataatttaaaggccaaaaatattattacatctgccctaggaatagatgaatactttagggtttcaaattgtaaaagtgctaaggatatgtgggataccctacaagtaacacatgaaggctcaacagatgttaaaagatctaggataaacacattaactcgtgaatatgaactgtttaggatgaatgtaaat

SEQ ID NO: 189728 - DNA, 436 bp, Glycine max
tgagacgcatgtgaaccttatgcatcatcaatacattcagcttgatcatttgtccacaatctcgcccttttgatgatgacaatccctgaaatcaagacaagctatatacaagatgatagcacattcacacaacccttactccccctatctcttggcatgtatgcctaacttttcttaatgataaacttctaattgatttctaacccaagttctaacgaaactttggaaattcaaattcaaaagtcataacccttcatattataactgtgtaatcgattacacaaacattgtaatcgattaccagtggaaagtttttagaaaatctgccaacagtcacatcttttcattagatttgtgaatggccatcaaaagcctataaataagtgactcgtgcatgaattctatagaaagaaattttcttcgcacaaatgtctta

SEQ ID NO: 189729 - DNA, 385 bp, Glycine max
agcttgcattgatgtatgcaacatataggtgtgattatgaggcagtgccacagatgaccgcgattaaggcggatgtccaacaaagaaccagtacgtttaactccagaccagtccataacctgttgttattaagtggaaaaaaagtagtgccataatccatagccattaaccacttgcagtgatgcccaaccatgcatcccattcacatagaacgaggttttcttgaatgtggaatgcattctcaccatgccatgatgatatgggttgcatggctggcctgctgctatggagatcacacacttttcggagcctagaccaacgagcatcccacaatgccataatctcattatcctaccaaggccttgactaacactacccacatgca

SEQ ID NO: 189730 - DNA, 361 bp, Glycine max
tgaagatagagacttgccactctatatatattctctctcacatcggctctctcactgtctagcgttttcactctatgataaggatgcactctcgtcttggatggtcaggaatgaacgctactacctttatttatactactgcacctccacagtgaaaggcggatattacttgtatcctaaggtggagattaatactctagaatgctccacacattctagcaagctatacactctaatactccctttcatactctgccataaggtttcacacatctccagaatattctacaggttttcacaagcttcaagagaaggctacactactctagacgtctacacgacgttctacatacttctacac

SEQ ID NO: 189731 - DNA, 394 bp, Glycine max
acgctgacgggcggaaatacccgagtgagtatccgtataaacattcgtttttgttgtctgtaagacgaaaagcctgatagcaagcagagactaacgtcgttttctgcgcccttcgtcaatcgcggccgacaagacccgttgacacgcggagatttacgtcatcttccgcgcacacaagatctgtcatactgacatttgagtcacgttgacgggcggaaatacccaagtggttatccgtataaactttcttttttgctgtctgtaagacgaaaagcctgataacacgcatagactaacgtcgtcttctgtgcccttcgtaaatcgcggccgacaagcccattgacacgcggagatttacgtctacttccgcgctcacaaaatttgcatactgaca

SEQ ID NO: 189732 - DNA, 219 bp, Glycine max
taacttgacgcttgttcttaaaaagtttcatccctaagatacattgcttgctccttgatatacccctgggggcctgaatggccgtgaattgaccttctagtgcttctctggggcatcgcaagctgactcatagcttctgctataacttctcccctacttggatcacagaacagaagcacgctggcagaatgaactattggtgaattgtcaatgctttgc

SEQ ID NO: 189733 - DNA, 466 bp, Glycine max
  unsure (1)..(466): unsure at all n locations
ctgatgccgctagcctacatctcaggctaagcacatgttgcannaaatcntttgttgcanaaagcgcctaagggcagcctgtggcgctaagccccatatcctctctggaatttgaaacttcaaagtgggcttatcgtgaggttaggctaatcgcatgggctttaaactcatacgtcacgttggcatgctaagtgcagctatgcgctaagcgcgccaaacaaaaatgctaaaatgaaatagaactaccataggcagttaccttcacacttcaaagcattctctcccttgtgcttgtgcctactctgtgccttgtgcattatgctacctatgcttcaagttatcccttgcgctaagcgtgcctgctgtgcttancctgctcattgtaactattaaattcttggatttctaggtgatcgcgctaagctggcaatgtcacactatgcacgttcatccctgctgatgaaca

SEQ ID NO: 189734 - DNA, 261 bp, Glycine max
tatatttttcaatcactcgtgaaatcgaattaaattttccaaatatttcttgcatttttaaacatcagactttttggtatagacagtctcaacaaccatttaaatttggacgataatattcacattttctcaatgaaactaagaattttaatcatcgctactatatcacattagctctcttgcacatgaaaaccgatttattcaaacacccgatattacctcaatggatgtccataagtcacttattagtatagaaaccat

SEQ ID NO: 189735 - DNA, 210 bp, Glycine max
  unsure (1)..(210): unsure at all n locations
ctcatcactcttaactnttggggcccgcattaggaatctgcatcaactatgccaccaaggggcaaattttcaagccttatatgtacaatatcggtagcatttgagtttacactctgagatcattcaatgttgacccacgaacaggatgatgatgatgacccacatacagagtatgttcaacacggtttgagagcaactacactatgaaac

SEQ ID NO: 189736 - DNA, 349 bp, Glycine max
gaccttaatcacctgtgctgcagctctggataataagtaagccattatattgcatccaaaaccacactagaaaatgttttctgtaaatgctggttcatgttggaagaattgtagtaatgaggctgatgcattctatctttgctccacctatactacaaaataattcattcatatacttacaggcgacgcatgctaaatgcgcattttgttatcttctctggaatactgctcctttgtatcactgctctcataccttttatttggcattaataccatatgcttatgataatgagaggatggcatacgccagtgttctctccaactttcttctcttgcgtcatattaactc

SEQ ID NO: 189737 - DNA, 444 bp, Glycine max
  unsure (1)..(444): unsure at all n locations
ttgcataggatagactcagcttcatatgcaacttttatcttctttttaggttacagttgtatccatatgcatcacctactgaattggatgcatgagccctcacattaacaaacaataagcattgagtacattgataagataagcaatccaagaagcacaatggagggcaataaaccggttacagtaactataatttatatacttcgctaacccgcaattttctcgcagcgagagacatatgtggccactntaatatgtctactacagaattcgtctcatataagaatgactcgtgtcgctatggacgttaccaattatgaagaactcgattctgcacacccaatataattaatgcagtaattagaaataggccaatatcaagctatagctaactaaataaatcgaatttttacaggcagtaatctctcaaaacatcatgacgcg

SEQ ID NO: 189738 - DNA, 353 bp, Glycine max
atacatttgcattaattgattggacaatttttgtttgaagcgaattgattgtacgattaacagatatagattagtatttttccctttagagtaaatttccacgtttttttattgagaaagaaattttcacatacttgatgagtaaaattgtatgataaatgataagagcattaaccgtagagacgtatgcaagtttgggtcaacttgttcatattaattgggtctgactggccaatttgatctatagggaaaacgtagttgggtcactttgatctagggaaggtcaaaacatattcatattactgactgcttaaaagagattcatattagtaattgcgagggtgatgggttag

SEQ ID NO: 189739 - DNA, 413 bp, Glycine max
gtgttgcatgaaacgaacaatcatatgaagattggtataattgatgcaaagcatggactctatcacctgatacccactaaagctgtgaactccattatcactcatcctcagtgcaatatcatccctatagacctatggcatgttagaatgggacacccatcagttgagagattacagggtatgaaaaactattatccgcttttaagaaatgataaagaattcgtctgcaacacatgtcattatgcaaagcacaagagaatgcctcttttttctccaaaatccatgcatcgcatcctttcgatctgctgcatatcgacatatggggcccatgctcacaactatccatgcatggtcacaaatatctctgaccatcgtgacgatattcgcttttacatggatatacctatgaatct

SEQ ID NO: 189740 - DNA, 380 bp, Glycine max
agcttatggagagatctgggatctaatcattttataggtctccacagaggccattgcctccctcgcccaatattatgacccaaccttgaggtgcttcaccttttgggaccttcacctaacacccactgtgaaagacttgaagagaatctgtgatgccccttaggaagaacgaaaccatatctcttctcgggattctatccctccttagctagaatttctaatatagtcaaaatctcaacacaagaattggaccgcgggaagcaagtcgaaaatggggtggttggggtaccaaagaaatgtttggaagccaaggctaagagtcttgtgcagtcaagaccaatgggcaccgttcatggacatcctgacacttttgatctttg

SEQ ID NO: 189741 - DNA, 403 bp, Glycine max
  unsure (1)..(403): unsure at all n locations
gatggcgcctcctctcacctcttctcctttgtcttccgctgcatctccatggtggaaaatcaccattaaaggacctcattgtagctcaaagatccaacctccatagaagccccacaagcaagctttcatcacaacatcaaaagaagatcgttaaagatccaaggcttgttgccttggtaggcaaggaatctaaagacattccaaatgatgttgttctagcatctctaaagacactatttgttaatgaaatgcacatgacacgtgctgaagaggccaccatgatggatattaatggtgagcctgtacctaaggagattatcattgactctatcanagctcactcaaaagaagagcaaaagggagttgagcttgaagaattcaatctgcacaaagcatatttgag

SEQ ID NO: 189742 - DNA, 396 bp, Glycine max
cgctctgagcctcatcgtgcagctattggttatgttcccaacctagcccacgtagcacacgacatctcagtcgagggttttgaaggccttgttaatcacataactaccattaactatcacgcgttgttggaagaagagataccagttgaggggagagggcacaacaaagctctacatgtgtctgtcagatgcatggaccatgttgtcgctaacgtactcatcaataatggttcaagtttaaatgtgatgtccaagaccaccttggagaaacttccttttaatgcgtcacgtctaaaaccgagttcgatggtagtaccagctttttggcggtgtcgacaggaggtgatgggggaaattgacatccccattcagataggctcccacattcgcaatgtg

SEQ ID NO: 189743 - DNA, 445 bp, Glycine max
  unsure (1)..(445): unsure at all n locations
actcagcttanaaatatgggctcataaactacttgnttcccgatgtaaattctataaatagacctcccatctttaatggagtgggttacaactactggaaaacccgcatgctaatctttatagaggcgatagatttaaatatttgggaagccataaaacaaggaccttatgttccctctataatggccggaagtgcaacaatagaaaaacctagagcagattggactgatgaagaaagaagattattacaatataatttaaaggccaaaaatattattatatctgccttaggaatagatgaatactttaaggtttcaaattgtaaaagtgctaatgatatgtgggatacactacaagtaacacatgaaagccatacagatgttagaagaactaggagtaacactttaactcgtgaatattaacatcttacgatgaatgtaatgaa

SEQ ID NO: 189744 - DNA, 387 bp, Glycine max
agctcgtgaaaatcttcatttttaattgaaatttcattctgctgagccacgcctgtaagcactatgctttttccatttttctcgagctggatcatttttctgcgttgatgacgattatcacaatcatgtatgggtatcaagccacagtcaggtttttctgccttggtgaaagggtaatggaaagttcctaaattaccacaagtaaaggagtgtggacaatcttggagcccatttccataaccagcggagagaatgagtacaaggtgaccaaacatgacgaagcagaacaaatcaactattgccataccaaattcccattaattttacgaacaggtaatgaactctcttaatgataaccgaattttcttttaatgaatataggtgatc

SEQ ID NO: 189745 - DNA, 391 bp, Glycine max
  unsure (1)..(391): unsure at all n locations
tcaagcatctatttgagcacaattacaagagagtggagcagtttatgaatgaaattgagatccttactcgcctacgccacagaaatcttgtgtccctctatggctgcacttcacgtcacggccaagagctactgcttgtatatgaatacgttcctaatggcacagttgctagccatctccatggtgatttagcaagggttggnttgttgacatggcctattcgaatgcaaattgccatagacactgctgctgcattgacctatctccatgcttcaaacatcatccaccgtgatgttcaaaccaacaacattttacttgacattatgttttcggctaaagaacagattttgggcttcaagattgctcccatgatgtagccatgtctcacagc

SEQ ID NO: 189746 - DNA, 332 bp, Glycine max
aactagaatgctttgaacttatgtgacttttgttatttcaattctaatagtaacttttctcacattgagggcccaatttgtggctagaaccactgcgttgctagcagagttttatgtcatcactgacaacaccatcatacgcacccatcgctatatcaagaagctttcatatatgccaacttcggctcacaaattgcaagtccactctctcaaagcctccaccctactccctcgctaatctggttgtcgatgtaaatgcttccatctggatgaagagacagaggtgcacataggcatggctaatccaatctaggatgtggatagaccgactt

SEQ ID NO: 189747 - DNA, 480 bp, Glycine max
actataaatactcaacctaacacaccggctttgcaaacaatgtttggttatatttatacaccaccggctcaccacaaaccatcgctgaattccaacaatacccattacaggaatcatcttatgtgtggagtattaaggttgaatcctaaatatccacatgactcatttacaacaagaacatcgaattcttcagacggctaatccggccacctgacactaaatcctgagcactcatgtctgactagacagaccaaatataatcatctaaccctcatataagacacattcctcatatatctatctatatatggcgaatgataacaaagacccacttagaaattataacgtctctattaccatccagtatccttacatcgaacaaagaaatcactcttaaggtagatgaacatagactaaaggactattacatatgtacactactatactttttgacaaagaaatgttagggccacacaatcc

SEQ ID NO: 189748 - DNA, 397 bp, Glycine max
agcttctttgggtctactgtgtatacccaatttctcttttcttgctgagcctaagaatgagttagtctcacacctagagaccttaacattgcttgagaaaatttgaaaggaagccaccatagcctctaagtataagctcgaaaatggatagatcatccacaagcagcgcctttggcttccatcggggatccaccatcataccactactcacggaagagtttcacagtacgctcacatgaggccattacgtgattctgaaaacaccacaacgtttttaggagaatttctcatggagcttcatgcgcaaagactgttgcacctttgtcgcggcttgtgtcacatgccatgcgcaaacctgcagggctcttatgccccctctccgtgcatatcggcaatg

SEQ ID NO: 189749 - DNA, 264 bp, Glycine max
cgtgcgttttaaataaatctaccagtagtcacgaggaaaggaacaccttaaaatgtgaaattctccatacacaacgacaaggactacaataatataacagtggtacgactataaggactatcatgagacatgtttaaaaggccctggtcatactttctttatcatgctacaattagagatagagtaaattgcagcataccaaatgagcaattcgtacttcctagcagtctcacaaactagaaaataggtcaacacaatcaacgg

SEQ ID NO: 189750 - DNA, 367 bp, Glycine max
  unsure (1)..(367): unsure at all n locations
agcttctttgganagtttttcaagaaagcttttctatgaagctacttagtctataaatagaagcatgtgtaacacttgttgcaactttgatgaatgaaagtcttgtgataaactactcaaagttgaacttctctcctttctttcttccttcagattcgtgctcccccctctctctttctctccctctgtcttttgctccattgaagcatcctctccaagccttttatccaaggctcatcttggtggagaagctccttcttccatggcttattccctagtggatgacacctcctctcacctcttctcctatgtcttctgctgcatctccatggtggaaaatcaccattaaaggacctcattgaagctc

SEQ ID NO: 189751 - DNA, 403 bp, Glycine max
  unsure (1)..(403): unsure at all n locations
tgaaagagcttcggtagtcaatagagaagnttcattntcttattccatcaaagnctgaagagagtatgatgaactaatggacgtcaatatgtgcaccgatgaagcctcggaatgagaaaccaatattgcccgaaaggaagaacacgaccaacacaagttttgaggggctttatatggcagcgatagtgagctcaaacttcgaataggtgaaaggaattatcacgggtcaaaggcatgatctggaaggactagctaaaggcttgccttatgtcgaaaagatatttgtccctacagttaaagtgagactgaagggaatatgtgggccatcatcgatgagtgcaaagagaagctaaatctagcggcgactcacgagctaaggctagaagatgagtacgccaagata

SEQ ID NO: 189752 - DNA, 384 bp, Glycine max
catgcaagcttcaacctaaaggagaccgaccattccttgtgtggagaagatcaacgaccatgcgtacaagattgacttgcctaatgagtataatgtaagtgccactttcaatgtgtctgatctatctctttttgatgcagatggaggagccttggatttgaggacaaatccttttcaagaaagagggagtgatgaggacataaccaagggcaaggaccatgaaccacttgaaggtcccatgaccagaggcagacttaaacaagcctcaacacgtcatagagacaaggctggtcatttgtataactgtcattgatgatgattgaaagcccaagtggagaaagatgaagagtcttctattttagcactattgagtatacttattga

SEQ ID NO: 189753 - DNA, 318 bp, Glycine max
gatagagcaagagatgaagatccaatggttgatacatggacggagatgaaaaagatcatgaggaagcgtgttgtgccggctaattactcaagggacttgaaattcaagctccaaaaactaacccaaggcaacaaggtggttgaggagtattctaaggaaatggatgtgctcatgattcaagcaaatattgaagaatatgaggaggtaactatggctcgcttcttaatggttgactaatgaatccgagaattgatgcctgcaggagtttgtgaaatggatgattagctcacaaagcaatccaaatggagctacaattaa

SEQ ID NO: 189754 - DNA, 292 bp, Glycine max
cacgtattttacattcataagcgcccataaaccacccatcccctgttgccaccttcattgagctcacgatctctcaacgaacccaaatacttgtttctctcaacaccgggtccacatcaatcctgcctagcttccacaacattcaagctaaacgatattcagacaggacacgctattctagaccatcaatcagatcagagctgaaactctgccgaacaccaaccaaatccagctttctctgataaaacctccgtacaatacttcgtccgggtataaccgtggacgactcgaa

SEQ ID NO: 189755 - DNA, 400 bp, Glycine max
actcaacttaaattgctcgaatctgaacggtgcgctagcgtttttttgttttattgcgagaagcggatgagagcttagcaccagtcgtgcgctgagcctggctgaagacaactgctgcacttatcgcattgatcttgcgcttatcacgcgaccttgatattgatgccctcgcaaactcttctatcgcgctaagtgagctgaagttgcgcttatcaggggatgcgcgcttattccactgatgagctaagctcaactgtcacttttagtacttcatgacttaacctccttttcacctgaaattgcacaatttcattattaaattcaatggaaatattcttgatacagcctgtaaccataaaacaatatctatgtagaaaatctcatcataataaccatatgt

SEQ ID NO: 189756 - DNA, 399 bp, Glycine max
agcttcaaatgaacaggctttatggcggaattcctattgaaattggccaacttcataagttgtcaatatcgaatttaagctggaattctctgggtggatcaataccatctgagattacaaagctgagcagacttacttttctgaacttgcgaagcaacaatctgagtggttccataccaacattcattgaaaacctgaaacttctaattgaactccaacttatggaaaaccacctgagtggtatgataccaagcatgctgcagagtctgctggtgtcactgaatcttagtaacaaccactttattggaatattgttagcagttttggtaattttgttaacctggaagttttggatgttgggaattttcaataaaccatataccataccaaatgagcacc

SEQ ID NO: 189757 - DNA, 350 bp, Glycine max
cactctattatactcaagcttgttgtccgtgtacacgcgtctccgatgaggtggcattgacttgtcctgtggtcattctcacttggctgccaccataatgtggtgacattaagttgcatccttttagagtcatcaccggcttgtgtcataaccgagttggtgagagtgtccaatctggagactgataggaacgaagaaagagtgtgacatcgtataagatcaaccttctgtctgtcttcgagtgagttgacgaatcctgcttttatcttctgaaatgccgaatcacgtggggagaaaatggtcaatccaccacaacctgacgtgatgagttgacaattgagttggttgat

SEQ ID NO: 189758 - DNA, 382 bp, Glycine max
cacctgctgcctgcagcttacaagggcagcctatgtgtatttatgcatttcaccgagcacttggtgggcgcatgttattgcatgaatagccagataatgggggcaatgccgcatgccccacatctccagaatgcaacatatgcctagggccatcccatacaacctcctaactcacaccaatcaagcctgaaacaaagccaaaattgccccatagacttgggcatattcacactatttatagctccaaaagaagaccaagatacattaatggaaagctcgaaagctcaagaatgagatacttacttgatggagtgaggtgcaacacttagaagtgaagcaatagctccaaaatatgtgcctaggtgtgaaaatactcatctcc

SEQ ID NO: 189759 - DNA, 437 bp, Glycine max
catgtcttttatctctctgtctaccaaaagacatcaaactcatttatctggtacctaacaaaaatatcattgagagacttggtaggggttatatttatattttaaatatcaaaaatatatttcttgtgtgcgtatatcatcttaggctatctatcaatgatgacattacataaatggttccaggttatatatgattgtattgtaaacaatttgtcattaaagtacatgtacaaacatacatatttgactaattataacttataattggattaaagaaacaataattggttgttctattctctcttttgcaacatatgaatcgctgaaaaatattgtacttgttgattctaaacacatgtaagggttgtagtatccattatattcttttaataccgcacatatatatactatatatatacatactattatctatctat

SEQ ID NO: 189760 - DNA, 406 bp, Glycine max
  unsure (1)..(406): unsure at all n locations
agctttcctgtgaggcctgctcttcaagggaatcctgtagtcaatagatgaaacaaatttgatttattgatccaacaattattataaaaaatgactacagacaaataagagtcacttacaatcctatctgcaattttctttgcttcctgagacgtcatttgaacagatttttttgtgcgagccatattccacttcacgtgtcgtctaatgggagatggaggatcaatgattgtgttggtgctcttggattgagctactttctccaatcgtttctttttttgtcctttatcaacttttnttctggaaaatcataacccccacgagacaacacgtatgtggtagtggtttcttattgaatgggctgcgccttctttcgaacatcttgtaacaattacacataagtcta

SEQ ID NO: 189761 - DNA, 462 bp, Glycine max
  unsure (1)..(462): unsure at all n locations
tgccaacanantgtgcacatgtggctgttattgtgagtatgtgggcacgnntagcagaagcaagactaaagtgcctgaagcatgacttacacctaggaatctaaacttttcgttttgaatgtaaagatgcatgaatattaggacatgtttgagaggtttttgactagaatttgggtatgctgcctcatgaggaataccttgcctctaagtagcatggaaaatacctttcaatggtatgtatatatgtgaatatgtatagcatggaaaatacctctcaatggtatgtatatatgtgaatatgtatagcatggaaatgccttacaaagtgtgtgaatatatagcaaataatgcctttcaaaatgttgtatatgttgaattggtagcgttaaaatgccttcaaaatatgtatatttgtgagtatgtagcatatcgagcctttcaaaaaaatgtacacatgtgaat

SEQ ID NO: 189762 - DNA, 309 bp, Glycine max
  unsure (1)..(309): unsure at all n locations
agcttgtgatgaggattttttgactcctctattagaactcnaataatttgcacacactttgaatcttttgcgattagttataaaaatcaccccccgggagaatcaacacctaatcaaaacctccaaacagccaaggggagaattaacactctggcctagagcattgcataaatattgtattaaaacctagaggaaggctacgagaacacttcctaccacatttttttattgactaaactgtattataaattattaaattacaaaagagctcgattcattaaataagaaatgtggatctaccatcttttt

SEQ ID NO: 189763 - DNA, 340 bp, Glycine max
cggacacaatatactagccgaaagacctcgtgggtggacacttaaagacgtttaatatcagccccatgtagggagtgtattggcacttattatcaatatgcaaagatcttatccttgtgaactgagaatatcatgctactaaaaatatcgcgtggtacaagttcacaaccgtaaataatcccgcgcggctacgttcacacaccatccatgtatcatataggaatgccttttcagtcataggcttacttcaaataagaatgcagtcgacaacattgtcgtactacaatattatcgtaggtcatattaccactcgacaacattctgtatctcggagaatgat

SEQ ID NO: 189764 - DNA, 383 bp, Glycine max
tagcttgcctcagagaggtccttgaaagacattgctgccgcaagaactatttccgccccggagtacgacagtcaccgctttatgagcgttgtacaccaccagcgtttcgaagccatcaagggatggtcgtttcttcgagagcgacgcgtccagctcagggaggacgagtatactgatttccaggaggaaatagggcgccggcggtgggcaccactggttactcccatggccaagtttgatccagaaatagtccttgagttttacgccaatgcttggccaacataggagggcgtgcgtgacatgagatcctgggttatgggtcagtggatcccgttcgatgccgacgctatcagccagctcctgtgatatccgatggtattgga

SEQ ID NO: 189765 - DNA, 432 bp, Glycine max
  unsure (1)..(432): unsure at all n locations
tgtgcatncaataccctgatgaggatgttctatatgttcttaacactggactgattcatttgcttccaaagattcatggccttgcatgtgaagaccctcacaaacatttgaaagaatttcacattgtatgctccaccatgaaacccccacacgtcctagacgatcacatatttctgaaggctgntcctcattcattagagggagtggtataagactggctgcaataccttgctctaaggtccatcacgagctgggatgaccttatgagagtattcttataaaaaactttctctgctgtcggaccacaaccatcaagaatgatatctcatgtattatacaactcagcggacaagcctgttgagtactggagagatttacaaactatgtgcccttgccccaccatagattcataaaccttcttctctattttta

SEQ ID NO: 189766 - DNA, 378 bp, Glycine max
ctaccccgcaacacaggagtgctttatctctcttttttgtgtgggacgtctcgatggccgggctttctcacaactacttggacccatctttactcgctacataccctatgaaaactatgttattctcacaaaaactaagcttgctataatcgcataaagggagttgccactacagactgaaagaacttgcctgagatgtcctaggagatcacctacgctcctactgtactctaaaatatcatcaagatgaacaactacaaatctacctatgaaattccttaagacatgatacttaagcctcataaatgagcttggtgcattactgagcccagaacgcatcactagcgcattcatcaaaaccaaactctgtctttaaag

SEQ ID NO: 189767 - DNA, 443 bp, Glycine max
  unsure (1)..(443): unsure at all n locations
tacactcggaggtccgattctttctcttttatatctatacgctcgaaacngaacaatggagactcttgagttattctaatggccataactattcactccgaggtccgattcaggcgcataagatatctagatgctccaaattgaacaacggaagctctcgagaaattcatatggtcataacttctatcacagaggtcagattctggcacataagatatctagacactcgaatacgaacaatggaaactcttgagttattcaaatgggcataacttttcactcagaggtctgattctggcgcataatatatctatacgctctatattgaacaacggaatctgtccagagattcaaatggtcataaatattccttcgaggttcgatttatgcgcattatatatcgagactctcgaaattgaatcaatgaagctcttgagcactca

SEQ ID NO: 189768 - DNA, 395 bp, Glycine max
catgcaagctagggatcttcaagcgactgtgcttgtattgtgactcttttatgacatgcaaccaatccattataagtccaagccactggacatgcccaatagtaccatttccaccagatggggaagctgtgttcaaaatggaatagaaccatcaacataaattaatatacatccattgaaatcatgcatttaatggtggcgcaacaacttacaggtcttactacaataaattctgagaacagattccaaattgcataaaatacagcaaccacaatggaaacaacatggtggttttgcttcactcccacaaccatcatgccatacaaggtgaagatcaacaatgttaagtacatgaaataaatataccaaaagagatttttctcagtccagtcata

SEQ ID NO: 189769 - DNA, 386 bp, Glycine max
caaacacacaggctgaagcgacataatcagctgacacaaaatgatatgtccatcttttttattaatgacatgatcagtatgagagctcttaattggtgacaaatctgcattcgctggaattggcaatctcaatgatacggcgattcaccttgttagcttagatattactaattgctaattttattgcaatccaagctttatatgtcgataacatatatagcgcaatgtagagtgcatatgagtaaatattatctttcttgaacggaagagaagaaaagaagaccatcgaagctccgaggtcacaccaattggaccttcggaatatgtaaataccggagatttatgtcctgaggtctcatccgcgatcttgaagagccatgaatttc

SEQ ID NO: 189770 - DNA, 359 bp, Glycine max
agcttgacgcgatctttgaggaggaggatgagtgtcggatcctttcctgaatgaactacgacagaagctgtggcgtgaggaaaaaggacgaaccacgtgtgtcttccatatgaataacacgagtggatgcaagagaacggtttggatgatgcatattaaaatgctatttattatgggaatgcctacgaaagtctgcactctctcgtggtggcgtgcttctgtgatacgtacctttgtatgtgagcaggtgagagattcaacctttgatcatgaatggggtagatgactactaaattgtattgtttatttcaacatgatgtcgtgcttgatatggtacttccttgtttagcatataatcc

SEQ ID NO: 189771 - DNA, 421 bp, Glycine max
tacctgcacgcatgcaagcttggatttccttttagtagggaatcttttcttcctaagatggagccaaactcagtccccctcattaagaactagctcctttcttcctctattgcccttagttgaatacacctttgtttggttctctatttgggtcttaacactctcatgcaacttctttacaaactctgacctagattccccttctttatgtataaaagaagtgtcatgtgggaagggaatgaggtctaagggtgttaagggattgaacccatatacaacctcaaaaggggatttcttggtggttctatgaacccccctattgtaggcaaattctacatgaggaagatactcatcccaagacttatggttgccttttagaagagtccttaaaagagtggataaagacctattcactacctct

SEQ ID NO: 189772 - DNA, 378 bp, Glycine max
  unsure (1)..(378): unsure at all n locations
cagcttccagggtgcatccgagctgacccttttttatccttgncattaaacgctgactaggtgctcctcaatttagagtccaaatggcataactttgaaccaaagtttgacgactggtgataatagtccgcttggccttgtccctttggtccatctttatcccattgcagccaaaatacgcatccaaaagattcaacaatttgcgctcagttgctccgtcaatcaggtggaggatgtttgaatgtgggtctcgaggatgctcgactcacgtccatatactctgtacacattcttcacttcccattccatttcttcgccattaccaatttgaaaggccagtgctatagtccattactttgatgaactggccaaccttca

SEQ ID NO: 189773 - DNA, 457 bp, Glycine max
  unsure (1)..(457): unsure at all n locations
ctcaacaacaacgacattggatatggcttttggcaaatcgtactctccanacatcgangaggatctccacagtcgacagtgtatgggaaagagaccatgtagaggctctttggttccaacattctcgtcttcaagatgcagggtcttgcattgagattgataaaatgtttgaacacttggcttttgttgactcttttttgttgttttggtgtttctttgtgcatattcattcctcttagctcccttatactttctctttgtgtttctctttatttttgaaactcaacttgaacccttaagtgttaggggggttattattggttcataacttggctttgtagcattttttcttttggataaaatgggaaggaaacctttctgtgccaaagttgggttgaagaacgggccatggaccgtatatgaggacaagaagctcataagcttgatcctcaataat

SEQ ID NO: 189774 - DNA, 345 bp, Glycine max
tagcctccattgatgagatgttgcttcccttttattgctataattcactccccacgagtaactgccattttccttggttatttggcttctccttgatgtgttttggcgctttagttgcttcattattcgcaaaaatcgttaatctatttccatacgaatccatgcctgttatgttcgacttagggtttgcgcgataaggcattttgcctactttgctttttgaacccaatgcgcatgccacatagtccccattctcatgtaatgagagttcaaacatgccctcaccacttgctccgcgataagcctcaatgaattttgaatgatactgtgtataacttgaaatgt

SEQ ID NO: 189775 - DNA, 390 bp, Glycine max
  unsure (1)..(390): unsure at all n locations
agcttgatgatgaatcaagattgattcaaatatttttgatgataacanagaagatgaccaatagctgaaaagttaagaacacctcatgataacaaagaagatgatctcaagaatcaaagaataagtttcagattgaatcaagaacatctcaagggtcaagaggaaatttgatctcaagaatcaagaatcaagattcatggttcaagcttcctagaatcaagatcaagaatcaagagtcaagattcaagaattaagagaagaattaatcaagataagtatggaaaagtttctttgagaactgagtagcacatggatatttctcaaaacatgtttaccaaagagtttatactctctggtaatcgattaccagattgttgtaatcgattacca

SEQ ID NO: 189776 - DNA, 459 bp, Glycine max
  unsure (1)..(459): unsure at all n locations
ttgcttctacacaatgaaataatcaactttatctgcaatttcttcatcntcctcagctcttcctccatctccttgggcagctccttgagcatctgtaggtcttggctcctcatgaaaaataggcctatctccaggccatgtaacaatgtctctaaactacttgggagtaggccaagggtaagggctatggtcctggtgatgctggtgcagtgtgtaatggtagaagttgtcattcaactgcatctggcccctatgatttgcttcctactggtcagccaaatgatgcatgtacgtgtgcatctggagcttcatcctttgtaagtgggatgagatgaactccaaggatgatggctaatgtggaggtggtggtgttgcatctgctgctggctgaggttgctgatcttgctctagttattgtacctgccttggtangaaatattcntcaataaatgatctatt

SEQ ID NO: 189777 - DNA, 176 bp, Glycine max
acacgagatccacggggctgtgtttgtattttttactcgtattcaaagagggcagtgtggataaaaattcccatccccttatatcaaatgtcaggggaaaccaacgtaccggtattttcgtaacatagcatgtctctactacgcatgctatgacccttatggtgataaatttgaac

SEQ ID NO: 189778 - DNA, 283 bp, Glycine max
tccggagaacctactaaaaggcccaagagggccttattgctatctgcaccccgtgtttactaaataccccccttgcctttataatgctcgatacttttatcgtactgtacggaatcttatgaattacggaacgattccttggtctttcccgcattgttttagaacctcacggattacgtaagcattcttcttttgcctttcaaaatactacaaactacaccgattgtgctacaacgctctcttttgacttcttgcacgtctcggatattcatgaattgcctaa

SEQ ID NO: 189779 - DNA, 380 bp, Glycine max
  unsure (1)..(380): unsure at all n locations
atacatgatattctagtaatgaacctctaacctagaatttatataacttagtgccattaacctagggaattaagaaaacttaatggctgagtgtaactgaaattgtggcaaccaaaagtcacccccaacagtcaacacgtcatccaccatttggtctcccaaaatgctgatgcctangttgccaattgtgcccttattacaactcgaactaaacctaactaaagcccttctagttgattaacccaaaacatatttttggtcaaccaactttacaaggatagtgccattatttagacaaactaaacactctaaaattgaaacaaagtggagttatttagtactcctccatgtgggacatgatacaactcacaaccttggac

SEQ ID NO: 189780 - DNA, 420 bp, Glycine max
  unsure (1)..(420): unsure at all n locations
cgcattagagagaacactggctgtgaatgatgtcttacttgttccctctatcagatntaacattgtaactgaaacatcgccgggaaaagatggataaagacatcctttgagcctgataagatagtcacgactaacaataacacattattcgggcaaaagttattgggatcaagagtcttttatactcaaatgccctgaaatgattaataagaaagtaaacacttctgcctacttgatggattcctatgatatatgacatgctacattaggacatgtgaatccaacatatgtgatgacacttcaatgactaacgtgaattaatatgcatgacaaacaaacgaataaatgtgaaatacgtggtgaatcaaactaactaagaatcatgttcttctgacaacataaacaaccttgacattctga

SEQ ID NO: 189781 - DNA, 140 bp, Glycine max
acccaacacatggtcattactcaagtaataaccaaaccacctccttacccaccacccagttatccacaaaggccatccctaaatcaaccacaaagcctgtctaccgcactttcaatgacgaagaccacctttagcacaaa

SEQ ID NO: 189782 - DNA, 444 bp, Glycine max
  unsure (1)..(444): unsure at all n locations
tatgaagaanagaanaggaagaacgaagggatcatggatcaactactcaagacacaagttaactcaatggtgagcatcaacgagcttgatgaatcagtgagctgcaacgtggcctttggagattaatccaaggtacaaatgaaaggaaaaggtaacattcttattcgtttgaagaatggtgagcatcaattcatctcaaatgtttattacgttctacatatgaaaagtaatatcttgagcctgcggcaactcctagagaaaggttatgagattcgctcaaaagaccataacctttctacaagagacaatgaaaatcactcgattgcctaggtgttgatgtccacaaatggaatgtgtgtgctcaacattcataacgatgctgcaaatgtctcaacatgtgctacacacatgcatgctcgctttggcatctcaatttgggccttt

SEQ ID NO: 189783 - DNA, 420 bp, Glycine max
  unsure (1)..(420): unsure at all n locations
gctttggccaacacccgtgggcatataagacatgcttaacaccttactctagcaatctcaaatgagtcaaaatctaaactacatgcattgattaacaatgaaaatgattgagaaaattaagagaaaagttgggttgcctctcagtaaccgcttctttaacgtcactagcttgacgtatgttacctctaggggtcttgtaattgcataatggtggtcaatctcatgttcctactatggtatagcttcaatctctggccatntattgtccagcttctatctagagcttctgactgaggatcaaataatttcactgccccgtaaggtttgacctccttgatgctgaatggtccagaccatttagattttaactctcctggaaacaactttaaccttgagttgaataacacaacttgttgacct

SEQ ID NO: 189784 - DNA, 419 bp, Glycine max
taaccacctgagctgcaacttctcttagcagcaggaaatactatttacgccatctattcattacctgcttctactatttgtcgaaaacacacaagataaacctcacctattgcaatgtccataagaggtcaccttaaaatgaactatatgggtctttagcatcacgctatttgtagagaaataattcatcaaccaaatttaaaatgaagaatacaatcctttttaagtatctacttaaagagttcattgcttgatctaatctataatcaaggaaatacatctcaacaaaggtaaacttccttgttgttgcacaatcttcatacaccattaattagtaaagtcccaatggcttagaagtaaaaatatatacataaataagaaacaaaacgagatacctatattctagatcttttttctac

SEQ ID NO: 189785 - DNA, 426 bp, Glycine max
tctgacacctacattcctataccgaaaaatttgttgataccacacttaaaacctgtcgtttatataacatagtcatatagacctctatgcttttaaagattcttgttttcttttctaacatacacttggtgcttatacaaaaaaatttctttatatacactcattgctcacacacaagaagtgtttttcacacattatttatatacacaaaaatctttccatacactttttatatacaaaaaaatctgttgttttcctcatatacagacatgacacttgttcacaacgcctctttcttttcctattcttggtgctatcatgatgctccttcgctttattttacgacggcgttgctatatgaacactctacacggttccggaagttcaacaaacattatcgacaataacgaagtgagcactatcgca

SEQ ID NO: 189786 - DNA, 406 bp, Glycine max
  unsure (1)..(406): unsure at all n locations
agcttgccacccanctcgcccaggcgagctatgttgttttctctagaaggcaccgccttctggggaacatcctggaaggcccaagtgggcctggttgctatttgcagcccctgtttattaaatacaccccctgcctttttttgttgattctttttctgtaacgttatggaactttacgaattacgtaacgatacttgttttctttccataatatcacaaaaccttacgaattacgcaatcatcccttctttggcttccggaatgttacggaactttacgaattgtgcattaacacnttctcttgacttccggcatgtcacggaaattcaaggattgtcacagaaactcacggattgcctaacgatgggtgccaagtacctccaagtggtcaaacgacggatgcatc

SEQ ID NO: 189787 - DNA, 414 bp, Glycine max
  unsure (1)..(414): unsure at all n locations
taaaancaaatgatgaactcttcaatagttcttgacacttttcaaatttggtttttatagtctttttctaataagtcataactcctctaatggctggcctgaccagacatgaagagtctataaaaagcaaggctttgttcttgcatttcaagcatcctgaataattttccaatcaatctcttacaatcctttacaagccttgaatctctttgaacttcttcttcttctttgtaccacaagctttctaaagttttctggttatctaaaccttgaaaacttgtgctattcatcttttcattctcttctccctttgcccaaaagaattcgccaaggactaaccgcctgaattcttttgtgctctcttctccctttccaaagacaaagacctaccgctgaatctgagtgctccctttc

SEQ ID NO: 189788 - DNA, 411 bp, Glycine max
  unsure (1)..(411): unsure at all n locations
agcttttcgattcattctatgtacccgnggtggttcacattgtgtttcgtgcatttttattctcgttttgcttactttttataccccctgttgacgtgcttaagccattttacttaagtcatttctcgcttaacttaaaaataaaataaatttccaccgaacgtttgaattgtattatccattaacttcggttaaaataaattccgaccgttcggtcgtgccgtaaccacgttggaaatcaaaaagaggttaaaaaataatataataatcaaaaaaacatctttttagtaaaataaagcggagaatcaatcggacgttttctctttgggatttctcattcttaatcgaattgattaataattaaagtgaaactaatgctaaaatcaactcgcctagtcaagctcgttcaca

SEQ ID NO: 189789 - DNA, 483 bp, Glycine max
  unsure (1)..(483): unsure at all n locations
ctcagcttgaggatatgggaacccatacatgtggactatgttgtgtcgggcgatggtgcacaacaagnnttccacgtccacaaatcgcgcataaacccaccatcccctggtgcccacctccaactgagctcacgtactcccacgtagctcatatcctcgtttctctcaacaccgggtccccattaatcctcccaagctgtcccaacatccaaataactcaacattcaaacagcagaaattatcacagccaaacaaaacatggcaaaggcatataactctgcccaaaacaccaaccaaaatcacagcttttctcatttaaagaccccagttataattccttcgttccacttcgttaaccggttgatcgacttcgaaagtttactggaagtctctagtacttaagcctacattgtgaccgntgtgatctactagaaaacatccagaactcattctgtacttactctttcacagcccaccacacac

SEQ ID NO: 189790 - DNA, 306 bp, Glycine max
agctttctattctaaaatatatattcatgatagtaccctaatatctgaggattatgggattaagatggtcattgacccatccctattttatgaattaacaaaaattgctaatgaaagtgtgccttttaacggtgcactgattgatgattggaaattcaattattctgtgcatgatgcccgtcggatgggttgtcccacccaagtggatattaccggaaggccttttgccagatcattggctttttgaagccacatcctccattaccttattgccccattttgcttccgaggttttaaaccctgctc

SEQ ID NO: 189791 - DNA, 283 bp, Glycine max
tatatgagcacccactcagaaaatgctatctacaaaatgagactgcgtgcccaccatttgacaatttgtactgttttgctctagcgctgactacaccgtacatggacactaaaaattctgctactgagatattcttctgtaggaatttcaaatccgtattgctgcctcctcgttgcctgtaaagaactgaataactttgagcctatatggacatcttgtatagaatgcagcataaaataggaattctctctatcccctttttggagctctaatctcaatttag

SEQ ID NO: 189792 - DNA, 400 bp, Glycine max
  unsure (1)..(400): unsure at all n locations
agcttgtagaatggctagacatgatacatgttttggtttggttttggttcaagataaaagggatgccccacattatatccatgacacaaatgcaaaaatgatgatttggaaactgtatgcaaaactggtcatgcatgcacctatgtggacactcaagtgtcaaattcttatggtcatgtgatgctaatgctcatgattcattccctctattttaaatcaacccaatgctttcaaaatatgttcttttaacaatttgtgcattcaacccgaattcatttccggcgtccgggaaaattattacagccgttaccctttcagtgtacacatttnttcaaacactaagtttgatcaatgaattctgtgtttcaaacaaagttggaaccatcttttttaaaagctg

SEQ ID NO: 189793 - DNA, 383 bp, Glycine max
ataaaccacagagtctggcgataggtgcgaatgtattattcatggccagttgtgttaccatgttaaccaaggcatctagtataccttcaagcttcttattctcagctgaagaagatgaattcgtggctacttcatgcactcctctaatgacaatagcatcattagtggcacttaattgctgggagtttgaagccatcttctcaattaaaattctggcttcaacatgggtcatgtctccaagggctccaccactggcagcatctatcatgcttctcgcatgttactgaatctgtcataaacatattggagaagaagctgctctcaaatctggtggtgaaggcaactggcacatagctctttaaatctcttcaagtattcatata

SEQ ID NO: 189794 - DNA, 397 bp, Glycine max
  unsure (1)..(397): unsure at all n locations
agcttatacgagatggagctttggtggatattattatncttgcccggctgaactaaagcatttgaattacttggacttgatcggcaatgtattccttagagaaggtatgtcaattccttctttccttgggacaatgacctccttgactcaccttaacctctctgctactggattctatgggaagattcctcctcagattgcgaatctctccaatttggtgtatcttgacctgagttatgtgtttgccaacggaagagtaccctctccgatcgggaatctctctaagcttctatatcttgacttgagccacaattatttccttggagaacgtatgtcaattccttctttccttgggaacaatgacttcatgactcacctcgaccttttttatactgga

SEQ ID NO: 189795 - DNA, 236 bp, Glycine max
cgacaagtagtatatctgtgtgctagtattgtatcagtatactcacgtagtaactcgtgtaggtgatccaagtgaggatatgaacctcaaaatggcgagcatatatatgtatatatatatacatatatatatacgtatagatatacatacttatagctcccatcttttatacatgcaatgatttgttttctaacacattttttcatgaacaaaggtattgatgctaattggttcag

SEQ ID NO: 189796 - DNA, 397 bp, Glycine max
agcttgttgacttatcagacctatgtaagttgatctgaatgttttattttttgtacatttttgtaagtattgagattttcaattaattaatactaacaattatttgtaaacatgttgttgctttctgaaaattacaattactattctgatggtggagcggtgcgtgtctgagcatttcgaaactagtgatgaagacaactttagttggtaatttgaattcttaacattgtgttttcatttatcctgtggagtctaccttactattatatactattctaacggatggagtttctttagaaggtatctcaacataacatttatgttcttgagaagaaatttcactctttgaacaacgtatctcggcccatgggatatggtgagaaattctttgaagctt

SEQ ID NO: 189797 - DNA, 420 bp, Glycine max
cttcatatgacagcacattggtttctctcctttgcatctgaagagaaaaatgtcagggcttagtcaaccaataaccatgtgaagatttcaataaagtcatgcctttgatgaataagcatttacccaaaactgatgtacaatgaatacatgagccaagatttccacctacccgtcttgtgtgaagactgtgggccttctcccttggccgaaagacattatacgggttggtgtctttaaccggtggatgcggctgtatgcaaaatgcaattcatcttgtcaaaattcttcataatgagctttgccctcatactactttaggccaacaagtatagctattatacaacccacctctcgcagttaacaataatatagacaaaatggagttcatagctagcatcaaatttattacacgagaatttg

SEQ ID NO: 189798 - DNA, 183 bp, Glycine max
tactgggggcccccatggccttcagaaaatttttaataaatcccttataaaggcagcacttggttattggcacaacaaattggcgatggttccacttaacatagcacttatacattattaggctattctgctttcttaaatctacacattattcccacttaatcatgcttcaccgcaatgctc

SEQ ID NO: 189799 - DNA, 430 bp, Glycine max
ctaagcttgagccaatttacgatattaattttacttggtgtcatattgaccgccgaatatatcgagacgctcataattgaaaatggatgctcgttgcaaatgtaaaccgaaataacttttaactcggatgtccgattgagtcctaaaaattattgagacactcgaaattgagaacaaaagctctaagcatatacaaacgacaatgaacttttactcggatgtccaattgagttccgtacactcaatattgagagcagaagctctaagaaaattcatacgacaataacattttactctgatgtccgattgagtcccgtaatatatcgagatgctcaatatcgaaaactgaagctgtgagaaaatctaacgacaatcaatctttactcggatgtccgatggatgccggatacatatcaagacgcttgatatt

SEQ ID NO: 189800 - DNA, 388 bp, Glycine max
agcttaccttgaacccaacagtgacaatggcttcaagattggcagcgagatcagtgacaatgacacaaagacatgaagcttacctggtacctcacgtcacgagttcctcaatccttgcagcataaaccaaaaacagttcttgggttaaccacgagttcccgaaacaaacctatggtttcaatataacaacacacgtaagttacaacgaagacatgaagcttatacgaaatgtacctaggtacgttggcgatggacaacaaaaagcgagcagttctggtcgtccgcgctatggagaaagcttagatgctcaacactgagaagaatatagcgctagccatgcacgtcgtgtatgatataagttacaatgtaattacaacatcgaatttca

SEQ ID NO: 189801 - DNA, 408 bp, Glycine max
gacactattaatactacgcgcaatcatatgaatacatattaaattggcttattttttatacacgtgaactctgaacacaattccatgtgacaacaaatttgatctatctcttcaatgaaagggaaagatcttattcgtattggttaagataacataactcttagagagcatcgccaagtcttgttgctcttactgattattcagtaatagtattaatcataggagaaaatttatcaaccgaatatctatattaattgcattaatgataagataatagtaagatttattttatcaaaatgcttgctccggatatcggtaggacttaataacgcgccgataaataatatctaatacagaaccaatcatctaggtcatattcaaatatcctcatagtcgctaatgaactat

SEQ ID NO: 189802 - DNA, 267 bp, Glycine max
taactaaagggcgtctatattgccaccgatgaaaccttggaatgagaaaccaaaaaagctccaaaagaagaacaccacccaagcaaagtttctaggggctttatagggcaacaatagtgagctcaagctccgaagaggtgaaaggaatcatcacgggtcaaaggcatgatcttgaaggacgagctaatagcttgccttaagtcgaaaaaaaatttgttccaacagttaaaccagactgaagggaatatgtgggccattatcgatgaa

SEQ ID NO: 189803 - DNA, 349 bp, Glycine max
agcttggaactctagaacttaaagtagccatcttatttatattctttaatacttgccctgaagaacattgatgtttaacacaaattaatggagtgcaattttatgaataaagtacaatccaaaaaaagaaggatcatattataagagtcaaacaagaagagaaaaactcccaaaatggacatacttccaaaccaatatttacaaagaaccaacctccattcttactacaccacgaaatatattgcaaacaatatatgcctttctcgttttccgtaaccaaaccaaattcttatagcaataagctcaattttaaatctgatcatattttcaagagagtcagcacaaaaaa

SEQ ID NO: 189804 - DNA, 471 bp, Glycine max
  unsure (1)..(471): unsure at all n locations
aagacatggagacanttcttggtcaatatgccaatgttatatttatgattggtgccatgtttacttacaacatnttagctagagagcattatagtaacctctctctattgttgttggttttgatgcatgttatgtgacaactggcatgaaaaccgtataaaagttcacttgatctcttgatatgaaattggagcacaatcactatgctttttataaacaaatgtcttcagcatttaaagagatatgaaattggagcacaattgctatgcttcttataaacaggttgtcttgatattctaaaaataaaatctgaagattgattccacggattaatctttacatgcttcagattatgtattaatctaatgataaattgttttgacagatagtcctggcggtatgaagtactnttgatgaattatcttactctctatgtaacaaaaatgagaaattcttggttctctgtttcag

SEQ ID NO: 189805 - DNA, 341 bp, Glycine max
ctccatgagctggcgaagaataatgttgcatttacctgaggtgacaaaccagatcaagccttagctagctcacagaaagcattactaagacctgttctagctcttcctgactgttctaaacctgttgagctttaactcgatgcctctatagcgggaagctggagctgtattgctacaaagtgggcaccctattgcttattttagcgaaagacttcatagtgccacccttaactaccccacctatataaagaactttatgccttaataagagccctccaaacttgtatcattaactctgatgcaacgaatcctgcattcatagtgatcatcactcactcaag

SEQ ID NO: 189806 - DNA, 349 bp, Glycine max
tgcactactttatattactaataatgatttacatctcatacgatctagaattgatcaacacaaagttacatttattcgtgatttaaaatgaatcccagaacttttaatgaccaaacacatattcttattctcaaaagggtggaacattattttaaaatatcttatagaaagattccgaggagatatatacatctgagacagaatgaaagatctgattgaacttgaaacatatttaatgatcggataaaagagatatatcacactataatatgatcaaattattggcctatagacttcacttatattggtgtgaatttctcatctccatatcattcctacatgcaaataa

SEQ ID NO: 189807 - DNA, 407 bp, Glycine max
  unsure (1)..(407): unsure at all n locations
agcgtatattatgtattagaggccttagaatttgtattctgttatccactcttngctaaccacaatcctacatgtgtttttaatattattacttaacatactcaatggattgaaagtttatgccctataatcaaattaacactaatgctttgacattgtcgatagcagtcacaatgtatatgctacatatttcgttgaatatgtttgaatacaaataggtaataaatgtgaatattattttatggcctcgaatgaaattaataaaatgactatgaattgctaataataataagtatgtgcacgtcatatatttgattggagaacactaatatacattggtcgtatctgaacaaatcctatgtatgacactgtgtttatgtctcacaacacttatgtgaaatttatta

SEQ ID NO: 189808 - DNA, 164 bp, Glycine max
ctcccaagagccttttcaccattagcatatcaccctggatagtctttcttctaagcgactcttccccttcttcttcaccgatttcagaatcattggtgagttttacatctgccttcaggatcatggtcctcctgagtggacatttatatgccgcatgtgctctg

SEQ ID NO: 189809 - DNA, 398 bp, Glycine max
  unsure (1)..(398): unsure at all n locations
agctngaaatgatgaagtgtgaaagggtgatatctttcttcttttattgntgaccacatagtggtacctggagatatgtcgcgggggtcaagagaccttggggacgtctagtggggtgctattgcccaaaacctagcttgagcaatcccgacccaacccgggcatagacagtcagtgatgaacctgtgatgtacctaaacaggtgagctcctgtcagtctacagataaatagaactaagaccacttagcaaggatgcttgtgtggtggctggccatctgtgaactttgattgatatatgggatatggcctctggtaatctgataccaacggtgggtactcgattattatgctctaaatgaagacaggagactaagatggtctctggtaatcgactacc

SEQ ID NO: 189810 - DNA, 362 bp, Glycine max
ctaatctgtctctcaagtccttaatgacaggcggtcgaatgattctttcctctcctgagtacgacagacaccgcttgacgagcgctgtatacctagagcgctatcaatacatcttgggatggacgattcttctggagcgacgcgtccacctcatggaccattagtatactgattttcatcgaggaaatatggcgccggcggaggcaccactggtactcatatggccgagttgaaccaaaaatcgtccttcgagttttatgccgatgcttggccaacagaggaaggtgtgcgtgacatgatattcctggcatagggaattaggatccaataattgcctacgctattaaccatctcctgcgata

SEQ ID NO: 189811 - DNA, 447 bp, Glycine max
  unsure (1)..(447): unsure at all n locations
tccagcttatgcgcatatttgcttacataccggtctgttgcacataattatgtaacncgaaaaagtggcgcgcatatacaatcaagggcagcttcgttacctagattatttacacgtactgccaaggtgtatttgttacttacatcacacacatctccttggctgaatatacatacatgcatactcaaagcattttgaggtacctaaaattgcacatgagcacatcttgggatttctaatacctatatatacacaaacttcatgatgaatcttgactatcttcacaagaaggtgctacacttcatccctatttcaagtttttgctcctaagccgcatcagattcagcatattttctttgggacaaaattgattcaattaaaggatatttttgaaatgtttcttacataacatgcacatattatattatattttattgcagacatttg

SEQ ID NO: 189812 - DNA, 369 bp, Glycine max
agcttataagaacaaaattgccttaatcatttccaaatatgcatgtgaattaggacgcatcaacaagaatcaagccaaggctattgtgcaagcaatcaatggggcaaaacacaccaaatgattataatgatggatggctcaaattctcacaaaggtaaaatcatcactttcaaattgagctttcaaaactatcatgacatgtagagaagaatcaatgatttcaagtcacaaaatgtcaagaacttttattttcaaaacaattacccatttcttgaacatatcctataattcaaagaaaaacattcaaaggcgtacgtgcacacaaaaatgacccaaaatattagactgaaaatccgatgaaactaacaa

SEQ ID NO: 189813 - DNA, 399 bp, Glycine max
  unsure (1)..(399): unsure at all n locations
cgcttatanaggatgtgacacgttcagagtgttataatcctattggttgtatcataatactctaattaaaatggatttcggtaaggatgttcattccatcactagctacgtcgaaagggcatctgctactgttttttaaaaataataatttgtaaataaacactggaatatggcggtgtattatgatttagctgggaggacgtcattcccatggaataggacaacaatgcatactaagatgaaacttcaagtaacctttgtttctgttgcatcattgaaggggctacggttaggtaactcctattattgttgctgctgtttggggctatatgctatgaatcatggacacttgctatcatttgggtgtgcctctatccgagactaacacccttacatcac

SEQ ID NO: 189814 - DNA, 399 bp, Glycine max
agcttggtgctggttaaaaaaaatactattatgtaatccaaacatttaggggaagtccatagcatctcaaccaagtaagtctcatgtcggatacaatcgatagagataatttctgaatcgaatggaaacaggatagaaacgtatcacaacccttcatgatcttctcatgtgcaggcttcttcgtccaatcacgaaatgaggaccaagtcatccccgaaatacctcagttgtacattgcccccctcataaaaaaagaatcatctcctggatcctatcaaacattggtatgccccttaaccatccgacgagacagtcctgaacccacatctgatttccatcatcaatattcatgtctatccccatccaatcacccacttgccatctttgcatttgtctagc

SEQ ID NO: 189815 - DNA, 460 bp, Glycine max
  unsure (1)..(460): unsure at all n locations
ntcaccgcaatgaagcaagactttngatcaattggaatttatagatatntttcacaatgaatgttcatttcgccacaacaaatctacaaagcttaacactttggaattaagagaaactcaccataatgagttatctattcaccccaacaaataaaggtccaaaagcatgaagatcaagtacaaagttcttagttcataagtgtagtttcgctgcagcaaaaatcctctgaggcgcaaaaatttaatgtaatctcaactccatttaaagatcttgtaacatcattcctgtagacttttagtacattagacaatttcataaataaaatctcaaactctcttctttcttttttctctattatccctctctcccatattcctccattcgtactcatttgaggttctatttgaatccttcatgatccanatgagttaaaatatgtagttattgagagattgaagt

SEQ ID NO: 189816 - DNA, 395 bp, Glycine max
  unsure (1)..(395): unsure at all n locations
agctngacaagtagatgaacatgctgcaatattctcatcttcacaggttgaaagagctacaacactttacttctttgagctccaggatataggtgcaccaccaatcatgaatatatatcccatggtacttcttctgtccaaaacatctccacaccaatcagagtcttgaataagccactagatgtggtctaaccttctcatcttgatgtgggaataaaatgcccatattcaatgtacctctaagatatcttcaaattctcttcgctgcaaccatgtgagagtgcctaggatcactcatgaatatgctaatcatcccaacacagaatgcgaactcaggtcttgtatgacaaatatatttcagacttcccaaattttgctgaatacagtgtcatcca

SEQ ID NO: 189817 - DNA, 433 bp, Glycine max
  unsure (1)..(433): unsure at all n locations
aatacanaagttagtcgtaaatgactactaacactttcacttgtgctaacccatgcactgtcagagataggataaatgaggcctgcttctagcacattaagcatttcctttcgcatttcttccttcataacaggattcaatcttttttgctgctgacttacaggctagtattcggcttccatattgatcttatgcgtgcactatgaagggttgtagaagcaagcttcatgatgatgaaccaagcaattttgatgatgccaaaagcccaagtgattgattcaagacttcaagatcaagcatcaagaatccaatccaagattcaagattcaagagaagaaataaagaagcaacaagtcaagacttcatataggataagtattaaaagatttttcaaaaccatatatcacagttttgttttacacaaaaatttctc

SEQ ID NO: 189818 - DNA, 389 bp, Glycine max
agcttgagtgtagaagagaccaaatcttcaatgccataaccattaatcatccattgttactctcatggcaatgccagtattagtagtatacttaaagcttattggaaaaaacttatatttactttctccattctaactttggcaatctcttgcctcttgttatttttatcataaataatgcacgtatcttcttcaaggtgaagataatagcctttctccatcatttatccaatgctcaagagatttttcttatgatttggaactgataagacatgttttcatgagcccttacctttctttgactccaccatgacagagccttttccttttgactctaccatggtgtcatttcacaatagaactatgactttgacagcgtcgactatatt

SEQ ID NO: 189819 - DNA, 468 bp, Glycine max
gggccatagtggctgtggcatggtatacctatctggaatcttcccatatccgatcatggaaagactcggtgactgccttcattatgcagtaccaatacaatacagatatggctctcgatcggaaccagcttcagagtatgaccaagcgagaacatgagtccattaaggagtatgcccatagatggaattgatctcgcagcccaagtcgtgccgcccatgatagatagggagatgatcacaattatggtagatacgttacccacgttctactatgaaaagttgataggctacatgccagctaactgtgcggatctcgttttcgccggagaaaggatctgaatcggactaccaaaagggaagttcgaatatgctgccaatatggccgccaacaacaacagaagagctccagtagtgggctcgaggaatatggaatgagatccctcgcggtcaccaccgtctcacatggat

SEQ ID NO: 189820 - DNA, 361 bp, Glycine max
agctttattatttgtcattattgagttgatttactaatttgccatgattgggttgcttggatgatattcacgaatgtcttgaccctgtggatctcttcatgttagatggtacccattccttgatgttcattgagaaatatgtaaatgctttgtctgtctctctttgatatccttggatattgttctttatttcattttgcccaagaatacaataagcttaacatgtggggtcttgatgctgccttattttctccttttcttaacccttttgcctcattttaaatactgattaatcttaattgctaatttatgagacacctttttatttgggccccttagctaatttgatgttttaattaat

SEQ ID NO: 189821 - DNA, 458 bp, Glycine max
  unsure (1)..(458): unsure at all n locations
ctttgtgtgaaaggatgngacttttttcatttgaatctgtattncaatgggcgaagacactggtaatcgattacgataacattgtaatcgattacagacttttgaaattaattggaacgttgtaaattcaatttgataactttttcataacagttttgctactggtaatcgattacaacaatctggtaatcgattactagagagtaaaaactctttggtaaacatgtttttaagaaaaatcatgtgctactcaatttttcgagaaaaactttttatacttatcttgattaagccttctcttgattcttgaatcttgagtcttgaatcttgatcttgattcttgagatcttgaaccttgaatcttgattcttgtctctagactttcttcttgagtcttgaattcttcttgattcttagcttgaactcttgaattgttcttgattgatctttgatctact

SEQ ID NO: 189822 - DNA, 398 bp, Glycine max
  unsure (1)..(398): unsure at all n locations
acacttanaatactcccgcttgatctatgtgacaccgacttattagtcncttggngttaatctaggcaccatctgccatataccaaccatttcgattatatctgactaacatgcccattgacttgatagggaaatgcacaattcaaacacgtcttcatacaaaatggtaaaagtgttggaacgagagattaacaccattacctatctttggttttccaatacttaccaagagtaactcaaatcagtcctttcttattgtcttaacccgctcgcattatcacaagaaaaggacagtcactaaaacatctagtttgttagtgtatagatcaaaaaattaaatatatcattaatgcgtgtcttaaatgcattattatttatctcatctatatagaactgtt

SEQ ID NO: 189823 - DNA, 130 bp, Glycine max
aacaatggaaaacaaaaaacacactcccaaaacaggcaaacaaagcgcaaataaaaaaaacccccgaagacaagacaaaatgggaaagaggacaatccaaggccaagagaaaaaggatggaggcaaaaca

SEQ ID NO: 189824 - DNA, 132 bp, Glycine max
agcttaacaagttacctttgcagagagtgcatattcttattttttcccctccactggcgatactttcactctgcggtttaagcacttcttcagctttccacttatgatccttctcaaacacattcattattc

SEQ ID NO: 189825 - DNA, 437 bp, Glycine max
  unsure (1)..(437): unsure at all n locations
actcaactaagtaactatgcatagtgaatagctatggatatagctttatctacaaacaatataagagcacacaacgacggtgtcaattaacatattactaatagccaaaataaaagtatactagttaacgctgaacaccttactcaggtaaaaactaacaattaacaagtaatatttgttgattaaaaaaagatacaaacaacacagattttattatcaaatcaagtgtgagttgagcagttctaattgaactaaacagatcgacatgacttaagaacatataattctagtaaccctgaaatatttccttcttttccttttgcttcggagcaagctataggagatgtcaaaattgagcgagatattgcaatttacgcaccttatnaaataaatcttgttgaattctgaggagcttcacctgcctgtaagcaacttta

SEQ ID NO: 189826 - DNA, 381 bp, Glycine max
agcttgctgttagatcgtcggcgtggcagtgtctttcacatatttgtgagaaggagatctcctgcattctttaagctcccttcctatgaggacgaaaggcccaatataaaaagtcccttcttttctcacttatttaagtggagatgggtcataccatagagagactcatttgtgaggaaacaacagttacaaaacattacaagagaaaggagagagaaaatcactatgattttcgcacactcaccacagagtgcttttcacattacaactgctgattcattcaccgctggatcagactgatctttggataccagttctacacacgtgataatataaattgtgtggctggattattaaaatgaaatctagagagggaaataa

SEQ ID NO: 189827 - DNA, 409 bp, Glycine max
  unsure (1)..(409): unsure at all n locations
agcttggatttccttttagtagggaatcttttcttcctaatatggagccnaacccagtccccctcattaagaactagctcctttcttcctctattgcccttagttgaatacacctttgattggatctctatttgggtcttaacactctcatgcaacttctttacaaactctgacctagattccccttctttatgtataaaagaagtgtcatgtgggaagggaatgacgtctaagggtgttataggattgaacccatagacaacctcaaaaggggatttcttggtgtgtctatgaacctccctattgtaggcgaattctacatgaggaagatactcatcccaagacttatggtttgcctttaaaagagcccttaatagagtggatacagacctattctctacctctgttt

SEQ ID NO: 189828 - DNA, 445 bp, Glycine max
  unsure (1)..(445): unsure at all n locations
tgtagatgcttanagaatantatggagaagcccagatattctatgagaatattgagtgaaatctacatatgtgtagaataatgatgcaacctgcagaggcttaagaagaatactaagaaagtctaaagaggcttaacgagaaaaaatatattgcattttatgcatgtgttagtggaaatcctacagttgtagggactggatgtaacattgttgcccaagatttatgggtgaaccaatataatcttgtgtgtgtttgcttccttttgtttatgcttcttatacatgtgtacgctctatattcattatatttacatttgaatttatttaacaggtgtacacttcaacaaagttctttataaacatatttaactttaaaagaaacacattatttttaagagaataaatacattatgattagtgaagaaacagactatgagtcattttc

SEQ ID NO: 189829 - DNA, 205 bp, Glycine max
agctcttaaccttgacttggtataacctcttgtctgtttgatttttttccatgcttgctaaagtgagacaaaatctggtgctaattcaaactccgatatctcatgggtggaacggatgaatgcatgaaggaatgcatataacacagatgcaatctaagaatgctggggtctggtgaattcttcccctatttatacacaacgtcta

SEQ ID NO: 189830 - DNA, 451 bp, Glycine max
  unsure (1)..(451): unsure at all n locations
aacatgaaactcaagctaaagctagacaaggaggggagtgttgagaatattacttctaggaaccctcccgtaagagctggacatttggaggaggaaagaagaagcatagctaggctccctactgggcttaatatanaagtgagggacactgtggaactccttccatatagggacctagaagagctacgccaactctgtataagagtggagcaacaacttaaaagaaagccttcttcaaaatcttatggctctcactcttatcccaggaaggaccaaccccatggaatttctggggctgcacctttaaaacccaacaaagataaggggaagaccatagagaaaacacccccaagacagctcccagataggactagccacatcaacgctgcatagtcttgggagaggcacaagcctctaatgcccacaagaaacctgacatgagggcaaacat

SEQ ID NO: 189831 - DNA, 401 bp, Glycine max
agcttatgctcaagctgtaatcttccctattattttttgttctatcaagccaggtctggctctaaacaaatttgaagatttgttgaagatggttagctcattgactagtcgcaatgtattatagaccattatacaaattaaacacttagttttttatctgaaggtatacaaagtgttttgatagctttataacgtaagaaaattcaaagagatagctcaaagaaaacggaaaaatgaatttcacatatttgcttgtaggtttgtaacttcatctcttcatagcttctcgtatctgagatcattcttcatcaagtgtccattgctactaaacaatagttttttcattgatcttgcaactaaagaggtgattgtaggtgtattaaatgcaaacattgaatgcc

SEQ ID NO: 189832 - DNA, 330 bp, Glycine max
gacgactgaaaactgggcaaataatagggtgagagatggaaaaaccctgcttgactgccattcctgtacgaacagtttccacatcccacaatatcttactcaccaatacaaaccttctcttacccccacccatgatccacatagccatcctaaatctacccatagtctgctaccgccttccatgacgaacccactttatccgatccaaactccacctaaatgaatttgcgcgaaaacctgagaatcacccattcaggtctatctacttgctccacattcttgatatcaatgtagcataccctgccaagtcacaactccattttgagatac

SEQ ID NO: 189833 - DNA, 215 bp, Glycine max
taataattcccctcacccatatagaaaattatataaattacttgaataatctctgccaagacaacaatttttgtcacgagtgatttagggtcacttactattattattatattaaaaccttatatcccatataacaaattttttaactatattgattagaagctcattaactatgtaatatctttacttggttaaacatacactatatccctaat

SEQ ID NO: 189834 - DNA, 440 bp, Glycine max
  unsure (1)..(440): unsure at all n locations
ggacactatgaaactaagcttgacaccttgtgagcgagaaactttatatttattttgacagcncgatatgatgttgaagaaaatgaatgtgagcctttttcccctttgaaagacttggttaaaaaaaatgttttaaaaatactcttaattaatattagaatatgttcttattccttattagtatatatgtgaggggtagagggtgtcacacaacacactataattaaagcatcctttgaaacaagtacacatgtggttggacatgtttttaaagttatcttatacaagaggcttcttggcatggtttaaaggtatgctttaaatcagattactgctgaatacgagcatgtacattatgctgggaagaatccttctcgttgtgggtatgtgatgagatttacgcanggtcttccttgtgcatgtgagctatttaaatatgt

SEQ ID NO: 189835 - DNA, 398 bp, Glycine max
agctttacaaggcttgctgacgacaattcttatatgagaaaaactgaaattaagtggcaggaagtgggaaccgcatcactgatcacccacagaccatctgagcacaaaaactcacagacatgctgccctcaatgtatgtttgggaaaccactaaaattactatgggttagggtccaataaaattaagcagaatatactaaattcagacgaaatgattaaaacatttgggcaaaaaatcttgttaccaaaccttgtccaaaactgatgcccgtggttctccaggcatctgtcctcttgccctagctttcatctcattattaatttctgtagcccgaaaaacaatcaaatcacaagtattgcatatcaggaaataaagtttaaactatattaaagaaata

SEQ ID NO: 189836 - DNA, 339 bp, Glycine max
  unsure (1)..(339): unsure at all n locations
ccacggggatccttcactatatttaaagtgcaaaaactatataaatctaattggtttttaaaaaatacaaatgaagcagcaacttcacagcacaattgacgatagcatgaaagcaacctattatgaaagacaagtcagttctttaaattgacactggacgatcgatgcatgacctctttcgagacaaacatatccaaacagcgcatatagacatatatatgaccgatgagttggcgctttatgctcattacggctgtgcataaaagaagatcgcagttatttgtgaaaacaagcagagtatacgataattgacaaanatgggctctgatgagatgcatg

SEQ ID NO: 189837 - DNA, 357 bp, Glycine max
agcttaaaaatgtaaaatgtgaaatgaaatttttatagaatccagtgaaacggataggccgacactcctacaatggatttccttcaacaacagctatggcttagcttcttttgctttactctacttcttctttgcttcatcgtgaaagaaggtagtgaatgaatgcttcactttttgcaaatatatactcattcgatggccaatcaaaacctcctttatgcattaagcgaggatttaacgttgagcacgaccattcagcacttcaatccactttcatatcttctatatatttctacacaaaaaaaaagctaccaaattactataaaacattacctttgcatctttcaataaaactca

SEQ ID NO: 189838 - DNA, 370 bp, Glycine max
gaaccaccacgagtgctcctaaacccacatctacagaacataaatggcgcatggggctcaatacacatcacaaacaagttctacacatgtattaaaccaacaccgacacccacatacacaaacagagacttggtgctcatataaacaaagtcgcatgcataatgaacattctcggattaagaaaatcctcaccctatcccacctattattacgtctcaacacccaaaacgatccaaactctcgcctcttccttacagaaatacctgaacaacggatgaacgaagacatccccgcaccacaaggagatctaggatctcaaaaatactcttaaacaatcaaaacaagaatggaaaaaaatacctacacccat

SEQ ID NO: 189839 - DNA, 387 bp, Glycine max
agcttcttatccaaggctcatcttggtggttaatctccttcttccaaggcttattccctagaggatggcgcctcctctctcctcttctactttgtcttccgctgcatctccatggtggaaaatcaccattaaaggacctcattgaagctcaaagatccatcctccatagaagccccacacgcaagctaccatcagttgctctgctttattttactgaaattgaaaatgcttacaaactgaatatacaacatcgaagtacaacaaattccttgtggacacaatactcggacttactgttttaattactacttgtgcacattcgtatacttgccaatcaagttaacaagttcttggcgcccgtgccggggaatatcttcttacttggat

SEQ ID NO: 189840 - DNA, 385 bp, Glycine max
tcctttacacacagagaagagaaagatgaatgtttgattaaatacaagtggtgaggatgtctcctccatctctagaacctcacaattactgacaaactcatctcaagctctcaagacggcttcctcttccagctttggtctctttaggtctccatacagaaaaatctctcaaactctctggaacttggacctttctctctctagaatctctcacatgcagaagctccttgagaaaatggccaaactgatgagaatcctaaaactgtcaaaatacacggacctatgaccaggagtatgaccaaacagtcagtggatacccttcaacaaatggtagtatgcatacttagcaagacccaagtggagaaggacaaagcccaaatggaga

SEQ ID NO: 189841 - DNA, 393 bp, Glycine max
  unsure (1)..(393): unsure at all n locations
gcttgtcttnctggttgaagcctgccgctgtcattctggaggagagaaaccttataatgcagaccgcttataatcaagtccgcaaaacacctgctgataggcctatcattgggatggttgcagctcactggaacgaggatgaagattctcaagctccttcttctaagtggtgggatggtaatggcataccaaattcaaccaataagtataaagaagtatgacttataattattatttcctacttgaaagaggtttgaatctatatattgcacttgcatctaattttttgtttattttcacgatcataaagtgatatggcatgctacaccatttgaagagaggttggaaacgctatatctgatgagactgtcatctctcaaaggtatgcattct

SEQ ID NO: 189842 - DNA, 438 bp, Glycine max
  unsure (1)..(438): unsure at all n locations
taacgtgaggcccactggagccagattctggttaagccattctgatagctctattaaaagttaagatccatagatcttaaagctcataaatatgtgtatataaatagttaaattctcaaggtaatacacaccattatattctattcatttttggttgctagttagtatacctgcatcctgacttaacctgacttgagtgtcaaatgcctttattatttgaaggaggatgatcgagcactaattaaaaagacaagaagatatacattgaaacataatgaaagaaagtattcgacaactctcgtgtaggtaaaaaaaaattcaaataatttcatttacctatcctatactatgtgaagaaacgatcaaaataataaattttgtattttctaacaatgatgagaatacaaagtttagattaacatantttacagaatactc

SEQ ID NO: 189843 - DNA, 282 bp, Glycine max
tctcaaatgacgtggacgtttagcttcttttcttatacgtccttttgtttttatgtttaacaggaccgccaaaagcataaaatatacatgtactgtgcaattttgaagaacacctaggttgattttctcatctacatgaggtacatataagcaaaagctttgctttgtcaccacctcaagaatcgctaatgggctaacccttaacgctttctcctttaaaaaataagagatcgtgatgggcgaagcctatatgttcgttcttttcaaaccaaagatcgttat

SEQ ID NO: 189844 - DNA, 421 bp, Glycine max
ccacatatattgggcgtatagcctatgcctaaattatggataatagttctaatctatttaacattatataacttttttttaaaatcaaacaattaaatgagtctcattagtaaggcaaatagcttaaataattatataagaagtaatattgacatccattttgtaacaaaaattaaaaaatccttgaattgtataaacatcaatttaatatcttttaacaaaaaagaaatactatactatcattgatttataacaaaaaaaataaatatctttggatgcttacaaaaatcaatttactacctcttacaacaaggttttaaggttttacctactatcaccatataagagggtgacgttgagagtaacggtgacgagggttgttaatgtaacaacccaccgttgttacatagaactatgaact

SEQ ID NO: 189845 - DNA, 405 bp, Glycine max
  unsure (1)..(405): unsure at all n locations
agcttttcaggtnnaatagttgttattatcatattcaattcaattatttcctttgcctaattaaccagtttgttgactaatttgaatcacctcatcatccttatcttctcttctattaatcttatcatcgctgatgtgttggcgcatattctcggcgattgactttgggtggttattgaaaatagctcccaccaacttcctgagtaatcgtcatttatgttacagatattgactagaatatctttttcttatttatcttaatttacaaacaaattctcggtttatactttctcattccaatcaacatcgagcattaaaaataacttagaatgtaattttctatattttaaataatcatatgttctatgagtttaatgtctatggctaaataatcacattgaaatc

SEQ ID NO: 189846 - DNA, 476 bp, Glycine max
tgaagctcatagtccttcaagtgcccaggaatgtagctccttcttctgtgccttgtagcctgagattcgaagttgctatttgtaacaaaactacacagattaaatgatgtcatagtgcaatgcttgaacacaaaataacatacataaaaatttagaatttttgcatcccgtaattatagtggaaccattaaagttcaattttttactcaaagatccatcacaaattgtgaaagaactcaatatagtatctgcgaaatcaataaactttaggatgctatccatgggatgctgagagaaaaatcgacaaacacaagacaatagctacttgagaaatagaagacaataatatgatgaagattgatttacctgctatgccaaccgaacaaggtcacaagtgatactgctctaacaatattctatataagtagcttacgtaattgtgaagatacaagaattaatagaatgaagatatgata

SEQ ID NO: 189847 - DNA, 410 bp, Glycine max
agcttctcccctattttcctataaatagggggtaaagtgaatggaaaaccaattcagccctcctggtgactcgatgtcacttgaaattagtgaaaaaaattgtttccgtgaagaaaatccaagccgaggcgcttccgtaacgtttctgtgggtgatttcgcgaagattttcaaccgttcttcgttcgttcttcgacgttcttcggtcttgaaccggtaagttaccgaaatcgaacttttcaattcattctatgtacccttagtggtcctcatttgtgtcgcgtacttttattttcgattcatttacttttcgcacgccttttcgacgtgctttagtcatttacttaagtcattttctcggctaataagaaaaataataattttcacccatcatttgaattttaatatccg

SEQ ID NO: 189848 - DNA, 371 bp, Glycine max
  unsure (1)..(371): unsure at all n locations
ctcagctggntcaggtacttacccgttgaagatcgatgaacgatgaagaacgaatgtataacgtcgaanaatggctgaaaccttcgcgagattcctcacggataacgttaccgaaactgttcggaagcgcctccgcttaaattttcttccgggaacaacttttcctagctaattcgatagagagagaagcgcttatgggcttgaaccctctccttcttgccttccctccctatttatagcaaaataggggaggtggttgccgcccagctcgcccaggcgagctcagctcgcccatgcgagcagggttgcttcctccagaagcaaccgccgcttggaggaatattccggatggtccaagtgggcctgggtgc

SEQ ID NO: 189849 - DNA, 385 bp, Glycine max
agcttaggagaacgatcttggaagagggtcatataagtagtttgtattatccaccctggagcgactatgatgtatcaggaccttaagcacatgttttggcggccgagtatgaacagagaagttaatgagtttgtccttgcatgcctagtgtgtcagaaagctacgatagaacaccataagccttcacggaagttgcaacctttatagatacctgagtggaagtgggatgtcatctccatggattttgctgtaaggttacctatgaccccaaaggtgtagatgtcattcgggttattgtagacaggttgtccatatctgctcattttatacctattaacctcagatattccttagagaggttgactagctttgttgtcagtgaaat

SEQ ID NO: 189850 - DNA, 482 bp, Glycine max
  unsure (1)..(482): unsure at all n locations
tatagtgaggctnggctacaaaaataatnggntnttctatgattcaaaatcttagattataagagagcacaaatcctagacttatccaaatatttcttccaatacaattagcttatttactggcctttcactttaatttgtctttgaccttattacaacaacacacattttctttgattgctcttttttttttaaaacacaacttatttgttgtgtgtgttgatgctttaccttttactttacatcccaatcaactcccccaaatttggggtaatttgccttgaactatctgctctcctagaatctaaacaaggtatctggagatattcattcaagtttagggttcacatttgaaaatgtaattcaactcacacaggttgcaaaggatacaattataattcaaggtaagctttttggtcaattggcttgtatatacaatcatggccttcatcatgtcctcattcatacantttattctaaaa

SEQ ID NO: 189851 - DNA, 416 bp, Glycine max
tcctctaagtcactgcagcatgcaagctatctgttcgagcagtataatgattttccgagtatgttggggaacggttacgaacccggaatgggtttatgaaaatatcactgaggcataactagcttgatatatgcctaacgaaatcatgggaagtatggtttctgctataaactcactcaggctgatatagagagaagcatcgccggaagaaagatcggtggtcatacctcgcggttgatacaagatactgaatgaagccccgcctgtcccataaattaatctttattagcgcgggcctgggacacgaaagtcaagtggtcgctacattctatgatgatgttgcgagtacattggagttggtacgaccatgccctcctgatttcaactacgatacggcgcgtggtgaaccccccgcc

SEQ ID NO: 189852 - DNA, 388 bp, Glycine max
ttcggacctctcatatagcttgtcttataaatgaaagtctttctctttttttctaaaatctaggggatcaatgctcgacatccatttcatactcagttggggcatactgtgcaatcctaccccacaaggcttgataaagactcaagaaatgggccaaaatgcaaagaagccctaggttctatagccttagggagattcggcccatgggctaatatgacccctatttggtcatataattaagtcattatttggccttgatttagctccataagaggatggtacccagaaatattgatttcagccttgattttaggccctaactgttttgattggggagtttgtaatcatatgcctagtgatattgatggtgggttgaaaaataattgaa

SEQ ID NO: 189853 - DNA, 416 bp, Glycine max
ggatccttaagtcacctgcagcatgcaagcttgaagcaaactggatgcattggtttacttggtaacccagctggccttgaatcaaaaatctgtacctgttgcaagggtttgtggtttgtgctcctctgctgaccaccatacagacctttgcccttccatgcagcaacctggagcaattgagcagcctgaagcttatgctgcaaatatttacaatagacctcctcaacctcagcagcaaaatcaaccacagcagaacaattatgacctctccaacaacagatacaaccctggatggaggaatcaccctaacctcagatggtccagccctcagcaacaacaacagcagcctgctccttccttccaaaatgctgctggcccaagcagaccatacatatctccaccaatccaacaacagc

SEQ ID NO: 189854 - DNA, 468 bp, Glycine max
  unsure (1)..(468): unsure at all n locations
ccacaacatccaagcaaaacatcagtcaaacagcacaagctatcacagccaagccaaacagagcaaaggcagataactctgctcaacacatcaaccaaaatcacagcttttctcacgtaaagaccacagtaacaatttcttcgatccaattcgttacccgttggatcgactccaaaattttactggaagtctatagtgtataagcctacattntgaccgttgggatctactagcaaacatccagaactcattctgcactagactttccacagccaaccacacacaagcatttttctgcacttgtgcaaaantctgttgcacaatttcacagcaaatattctgcataagtgcagatttcaaaatcacccttcctctcatccaatcttgcccaaatcaaatcctacaagtcccaaatcatgtatcatacatgtctaaaccaaagccaagcttcaaaccacagcaacacaa

SEQ ID NO: 189855 - DNA, 340 bp, Glycine max
  unsure (1)..(340): unsure at all n locations
agcttggttagaggaaagcataatcatttcttattaagaagagaanaacgcaaactagaggtgtagtttcatcggatgagaccaaaaccaccttaatttacaatacgattctcagtattttataattttgtagcagaaccacctattatggttggggtgtggcatattctcatatacagaaaatgggtgacatacgcatgatatgataagcttacattacgcaagtgatttttttttatatatattaattatagtatttcgtaaaatgcgctgcgcttttctttgtataactttcagggtacgacaatacctttgttaagtgcacactagctatacctaa

SEQ ID NO: 189856 - DNA, 462 bp, Glycine max
  unsure (1)..(462): unsure at all n locations
tcacatatatgaataagagccattaccttcnattttgtgttccatcaaaggggcaaaaacattaatcatcacacagatccattcatcgagtcataactttattaccattaagtaatacagctctcaaaagcttaatttttagcttcaaagcagtatccagagaaattcaagcattcaacaaacaatagaataaacgtgtgttgacataaaagaagaacagagttgaaagagaaatataaagcgctgacctgaaatcgggtcctaacagactgaaaacgatagaagggtcttaaatcccaccaagaagccatagtgtgaagcaacgaacaaagaaatagaaacagagagattgggaatatcaaatgagagctagaatagatgtgaaaagtgaagggtttgcagcatatggcattcgaaaagtagtggggaatacaattccaattccaatttgtgccacacgag

SEQ ID NO: 189857 - DNA, 373 bp, Glycine max
  unsure (1)..(373): unsure at all n locations
cttanaccttggaatattgggaacctgcttgtcatttcagtgtttacttaatcaaaaggcttccttcaacagctattcagaatgaagtacctttccaaaggctgtaccaaagacttccagattacaaatttctcaagaatttttggtgggcttgctttccccttctcagaccctataatcagcacaagctacaaccaagatctcaggaaggttactcactttctcataaaggctataagtgtcttgcagcaaatggcagaatctacatcttcaaagatgaataaaggagattgtctacatgtctcacacccctggtttccaccaatcaaatttctctattgtctgcaagctgaataaagctttgtatgggctt

SEQ ID NO: 189858 - DNA, 456 bp, Glycine max
  unsure (1)..(456): unsure at all n locations
acttntacccaatattcttatcctaccaagccattgttggctctaaaaaaatcaacaagatttgttggaagtttacacactgactaaattgtgatcatcttatagatagataaatcactcggcatttttaatcttttctctcaggttatacaaagtgttttaagagcttagtatctatataaagaattatagaaagattttcaagaaagaatgaaagaatatgttcgcgtagatgatttgtgtcttgtttcttctaagcttattctatttatagccttcatcttcaagtattcgtttgtctcccaacggttggattgtttactctgtcctttatctgaagtcttgagtctattgcagcatttaatgctcgcattaaattcactttccttcttcatgcatagatcatgctaataggctaccttatcttatacttcagttggaaagcacttctttcat

SEQ ID NO: 189859 - DNA, 344 bp, Glycine max
ccattgagaaacctttattcaaaccctgtcaaagttagtgaaaacgctaaacaaaaaattatggaacttatagaaactaatttcctaatctgaagcgtacgtgacaatcatagtgaattactaaacaagattggtagcttacttaaggtcattccaaatactccccaaaccctcgaaaatacttcccaaatggtaacaaggagtaccgcccaattattaatggtattatgaagataggaccaaactcatatacacatctgtgaaggatcgagtcagaaaaaatatatatcaattattctaacccggaaacacctccaatatatataacgtcgatgccctgatct

SEQ ID NO: 189860 - DNA, 408 bp, Glycine max
  unsure (1)..(408): unsure at all n locations
cagcttaccttttggtcctcctcatagttgttgcatgagaatataatctctattttcatctcccacaccaagtaagcctccggatcattctttcctttaaagggagaaatgttgagattaataccatcaattcggttttgtctaagaacaccatcattccctcttctcatcctttcttcttcattatgagctctattctccatttgatccaacctctcatggagcgcatcatctcattgtttcattaacctcttcaaatgttgcatcaaagcttgcatttggaattgcgaaagccccattccatcattaggattagtacctgacatctcanacaaacaaatcaaacatgacaagaaaattatagtttgtgtttgaatacctcacccactcaagtttatcacacaatta

SEQ ID NO: 189861 - DNA, 481 bp, Glycine max
  unsure (1)..(481): unsure at all n locations
ngtaggattatggggtatccatcacatgtggtactatgttgctgtcagtctatggtgcacaacaatgctccacatccacaaatcacgtattacccaccatcccctgttgcccacctccaactgagctcacgtactcccacgtagcccttatccccgttcctctcaacgtcgggtccccatcaatcctcacaagcttccacaacatccaggtaattccacatccaatcatcatggtctaacaaaaccaagcaaaacatagcaaaggcagaaaactctgcccaaaacacaacttagaatcacagcttttcacatacaaataccctagtaacatttccttcattccaattctctaaccgctggatcgactctaaaatgttactggaagtctcttatacataagtctacattttgaccgttgggatctgctaacaaacatccagaacttattctgtactactctgtacacaaccagctaatacat

SEQ ID NO: 189862 - DNA, 344 bp, Glycine max
  unsure (1)..(344): unsure at all n locations
gcagcatgcaacttatggagacgtgatgtgtaataattatactggagccgaagctcaatccggagaaatntttgcaaaattaatgtgatatttttaagcctctgctgaacaatatagcatttatctgtgggcccttgctcttcttgctttcaagcacggtccttgaatgaaggctggtgggataatgatattactcattggtgcatcgcattgggtatgaataatggcaggttggtataacccatctacctttgtgataaactcttattggccttaacagacattttggtgttgaattgaatactttgtgtaactgtacctgattgacatgacgttccttatat

SEQ ID NO: 189863 - DNA, 237 bp, Glycine max
aatcctgtgaaacacaatgaacaagccctacaagctcaaacaatcaaataggttgacaagccatgagacttattcaataagaacaaaagatagttgcgtgacgagaagtggaaaaagactgaaaaatcaaaaggcggggaggctcgatcatctccacagagatttgtgacaaatccatgaagccaatctcatggaaaaagaaatgggtctaccagaataaggtgcagtgttacaact

SEQ ID NO: 189864 - DNA, 387 bp, Glycine max
agccttcttctttgagagtgcatcaaaatcttgttgattgctggtagaagtatttctcaagactattgatgaaatgaaaccaattccatttctcactctccgaagtgcatatagcaatggattgaagatgaccgcaacgagcctatccccctttgcaattacgagatactgtaaataccgagagggaaggaaaaatataattctcattgcacggtacttatcattaattcatgactattagtcagtctaaagaggaatcatgaaagttcttactactacaacgagaccaagtctagctagaatagcttgttctgctttttgccaacaatatcatcatttgactcgccaaaccatttaccccaccaaagccaccaccttcaccagtgt

SEQ ID NO: 189865 - DNA, 194 bp, Glycine max
tcgactaaataacgcccaacctaacccttggaataatttcaccgtgactaggtggctgatgtccaaaataaataacctcgctacgaaactagaacccctcaccatcaagaaacataaccacacttgtcaaaaaattaagtcaatcctcctggcatcttgcacgcatcacgaccccttagatctacactccttga

SEQ ID NO: 189866 - DNA, 419 bp, Glycine max
  unsure (1)..(419): unsure at all n locations
atcctctgagtcacctgcngcatcaagcttgtaataatntttttgagttacttataaattatcgcaaagcttctgataaaaattctgaagtaaccaaaatgacacgagattgtttcagtttaattaaaaaatttgaatttcaattgtaagtatgattacctgtcgtgagtgatgcttattatctttacaaataaagaagcggatgggatggctcgaacatagtagtgagtacagggttcaaaatttaatgggagatctcatgctttttatggacataacctaatctaaaataatgggataaatatatgaaatcacgattacgcttcacaattattgatgatcacttaaccctcaacatgaggagcaacatctttgaatacggaggatggtaacgttccaacagcaacagtttgagtata

SEQ ID NO: 189867 - DNA, 364 bp, Glycine max
aaatactaacaagttactaagagatatacttttttttattttgcagcaaacaggttgatctgtgtatatacataactatttattgcccttacaaggctgtatatattccctctggttcactatagcctatgttattttgcgataactgtcatcatttatatgtttctagtccttaaatataaacatgtcctggacatattaaacactattattcttcattgattcgctaatttaaagttcttattatcctcggtgctaccacaaacattacggatgaaatttaagatcaattaaataattcatggatatattaaaaataaatttttaactaattatattatttgtcaaggataattataatctt

SEQ ID NO: 189868 - DNA, 243 bp, Glycine max
gaggggccaagctagtaatcttcatgagtgaatcaccgtagggaatctataaatgacttctatttgctcctacgaaggccttgttcactttataggactggctaaacagacaattttgctaatggacaagtggaaatctcttaagttactagctctttattattagattaatcctataaaactttctgcatagctcttacataacttctgattagttatatacccttgggataggccagctga

SEQ ID NO: 189869 - DNA, 392 bp, Glycine max
  unsure (1)..(392): unsure at all n locations
agcttgcaaaaacttttaaattacaattcatttttctttcttgtgatattatcttttataactaggggctattttagtctaaatatgattaacaaaatagacaatataaattggacaaacattacttctaatttaagctttataaatatgaatggaggtacaaaatatgaataatcttgtttaatattataaattataaaagactaaaaaaattcaataaatctgatttaatattttaaaatatttatgcnaaggtaataatgagttatgccattggtaaagaagaaataaagaaaggcgtaattaattgattaactaatactacaagtatgtattaagtaaagtattaaatagagtaatctcttaactcatatctatctctatattaatat

SEQ ID NO: 189870 - DNA, 154 bp, Glycine max
tctaacttccccatggcttgaatttaagatccttgtttcttggactaagaaacctgtgatccgtttgttctgaagcagtgggagaaagaatttctatctgattgtgaagatatttcctgcactcacgactgtcctctctacacaaaaactcttc

SEQ ID NO: 189871 - DNA, 333 bp, Glycine max
aagcctacctactcttaaggggagttgtgttaacttgtcgaactctgatgaacgagagtcctgcgagacaccactcaaaggtcacctgcgttacccttgttctcgcttcaatatgagtgctcctccactcatgtctttatctacctactttctttacctccactgaagcatcctctctaagcattttattcaaggcttaatttgttggtgaagcttttttttccatggcgtttatccttaatggaaggcgcctcctctcacctctttgcattgacaactctgatgctcatgcgcaaatcacctgacagcctcaggaactaagatccgcctcat

SEQ ID NO: 189872 - DNA, 70 bp, Glycine max
ctacttcagaggcccatttgtaaggttgtgtttctaccaagctctccagaagtttctcaaaaagcttctc

SEQ ID NO: 189873 - DNA, 253 bp, Glycine max
ccagcaaaaatgtcaattatgacattgccagacacccacacttgttcactttatcacttaatacagggaaaatctcgtgtgtatacgtctcgagcaaaaatcttggtataagaaacacatgcgattactgaaatggaatgggctgaccaattataacgttgatcgtgcttcgaacatggatgtaccaagaaagtcacaggcgagattgtgactgcaacctcattatgtggaacttcacactactgcgaggaaa

SEQ ID NO: 189874 - DNA, 167 bp, Glycine max
  unsure (1)..(167): unsure at all n locations
agcacctgcggctgcagctcttatcnaagcactctctagtgcgaannntctttnnanggnnnnatccagagtgtgtgaccctctcctctcttctccttatgattacgtgtatctaattgtggaaactcaccccgtatgggctcattgatactcgaatatttatcctt

SEQ ID NO: 189875 - DNA, 413 bp, Glycine max
  unsure (1)..(413): unsure at all n locations
tcttatactgagttcagcctaccatcctcagactgatggccatactgaanttttcattcagtcattggaggacctttcaagagcatgtgtcttacaacagaaaggaagcttggagagtttnttttcattgatagaagtcacttataataacagttttcactctaccattggcatgactccctatgaagctttgtatggtagaaggtgtaggacacccctatgttggttagagcccggagtaagcctcaccttatgaccataagtggtacagcaaaccactaagaaagttaagttaatctatgaaaggatgagaactgctcatagtatgcagaaaagttatcatgataagaggaagaaagatctggaattcgatgttggtgatcatgtattcttgagagtcactccatggactg

SEQ ID NO: 189876 - DNA, 393 bp, Glycine max
agtgctagactattaagtgaatttcgttcacacaatgaaaataaaaagtgtagaatgtagatgttaaagtgccgaaagtaaatgccttttgaatgacccaatgccttactatttaagtagatttattataagtgttgatgggacctattttcttataaacctaacctctgaacctagtgcagatgtactcaactcttaattttattttctaagcctataagctcacacccttttatggtaagtctatcataacaaacatataacaatcaattaattaattaactaattatcacagcacataatagagcataatcataattcaaaccatttatactgtgtaaataaagtcaatcatgataaacatcacatgatcaattattaaataaatcatac

SEQ ID NO: 189877 - DNA, 406 bp, Glycine max
agttaaacatgaagcggtagtcaaacttgttagtcctttttttgtaaaacatgggcgttgaaaagcatatcataactttctgtgattggtttaaagatacaatctttgcaaatgagaatgcttcataaacattaagaaaactagcagatgggcctaatagatatgttataacctgtcaaggatacgacttaaacaagcattcattttacacaatagctcaatatgacaaaagtacattgcataactgcggggtcaccctaatggctgaatctcaacactttgcaagtgtcaatgacgccaatccctgtgtagcttacatcccttactgtgggttcatcgatgaaatttgggagcttattatgtgaaattaacagatgtgttttaaatgtaaatggttgacagcaca

SEQ ID NO: 189878 - DNA, 437 bp, Glycine max
tatgacatctacttctatagataaataattattccgaatccttcatatgtgtgtcatcaaagtcaacttcttgacaaaactaaatgagatgtaaagatattaccctagacactaatcatttccgtaataataaatattcatatgatcagacacttgatataataccttatgtggagcgatcatataaaaatatgtgtagtctataaaaaaaagaaatcaatacctctctatgaaccaaatctagcttaagtgttcgcttgaggtcctccataaaatggttcacaggtggcaaaacttctagaaatccacagagactaataatttcatatcagatatcctagtatgaatatcattatgtcccaagtaataaaacatcacaaccgatggcctataaatatataaaagatcgactatgtcgcatcttagtgataacaatg

SEQ ID NO: 189879 - DNA, 428 bp, Glycine max
tgagtggacgacggttcacggaccacatttgacaaacttttgtaataaggatctcttattgcccgcaaacacaggcataacaaagacgtaggaaccttggaaattatctgcatcattgatcatcatttggtacacattcaacaaaatatactctgttatctagggtactgaagaacaacctctttagctggtggacgaactttatgatcaaatgcaagttatcgctccagcagattaagacccaatggatctgcatttggaaatgttctggaaaatggaatatgtggctttttctgcatgctagcaaggaatcttctatccttctcattccgaatctgtaaaataaaataaaaaattactaacacgaggacatgtgggaagaaaaaaagtatgcatggaagacacttataacaaccaaatctgaaaaa

SEQ ID NO: 189880 - DNA, 366 bp, Glycine max
  unsure (1)..(366): unsure at all n locations
agcttctccgaagggcatggttatntccagtttcctgattatatctanatatcttgccaaangacagtccttatccttcttggaaggtactacaagatatgctacttccataccttcattcacagctttatcacttctactcttcttttcattctcaattttctcatctttttcaatttttgtatttcctttgtctttttctacttctttttctttttcttggacaataaactcttttttcttgaccattatttgttctcttcttcctgattgtttcacctctcacatcattnttcttgccatcaatacctttcttttcatcagctttcttcttgtcacaacactctcctcatcctaagcctccac

SEQ ID NO: 189881 - DNA, 442 bp, Glycine max
  unsure (1)..(442): unsure at all n locations
ntcgtaggtgaaatcatgtgcagccatttcccttagagtcctctcacgttgtgtatgttgtgccatgttctcagaatgtgcaaaatcagaatgctcagaatcagaatgctcaaaattataatgctcaagatcaggatgttcaaaatcaccaataacagaatgcacagattcaccagttatggaatgctcagaatgatcaaaaggtataaaaggatgcctaactaatctgtgaaatgtcctatctatctcatgatcaaagggttgtaagtcagatggattgcctctagtcatacactacattcagcatgcacacaactatgtgccttgtcatgtaaataaaggtgtaggtttgaactacagctaccctcaaatgatatccaaatgacttgaaattttgtgagcaaccctataaaatgatgagaagatagcacaaaaaatttca

SEQ ID NO: 189882 - DNA, 381 bp, Glycine max
aagatctcggacattcaaatacacacactgcacaaataaatctgtcatgataataaataaatcaatattacataaacccacatatcttgacattgaagaaatctaaaataactgcattccggtatgaaatctataattaaaatacaacccaaatcttattataatgctctcaatttttatggaaatagaacaattaagccagagtatccaaaacatgatatggagcaagaattaagtcgtagcacgagcatcttactgatattaaagtcggagattaagaaaacatgcacacgcccatataatttgtacatgttccatatgaccttgcggaagaataaactctccttccctaaaagattgtaaggagtccacacatacatg

SEQ ID NO: 189883 - DNA, 363 bp, Glycine max
  unsure (1)..(363): unsure at all n locations
aacagatncgaaactaactacccaacggtctaaccaactaacccctagcttatacaaagcgtggcttatcaacatgtggctcaactctatgcatgcatgcagtcacgtgctcacgtatccttctagatacttaagtcacgtagcattccttcttggcctatcttcgtgagttgttgcaagtggtggtgttcccttctcactgctgctgctagcattatccgaccttgtgaaaaccaccttgttctcatggtggtgggcgtggaaaccgcaatccaattatcctaggtggagtcttgcggggccaagcccttccactagtcgagtactagacgtgtgtgagggtgtggggaagaatcaacacgt

SEQ ID NO: 189884 - DNA, 476 bp, Glycine max
  unsure (1)..(476): unsure at all n locations
agcttgatggtgtcgagaagatatcacatgtttgtcatcatcaanaaaggggagaatgtgaatgtatgtatacatgatnttgatgatgtcaaaagaagaatcaaacaaagttgcttcataggataagcatggcttcaagattaatacaagattgcttcaaaaaacaaagccttgcttcaagattaactcaagatcaagccttgccttataacaaagtgctttcaagacatgcaaggtagtgtaatcgattaccagaagacagggttgagaaatagctgttgaaaaaggttttgaatttgatttttcaacttgtaatcgattaccatatgtctgtaatcgattaccagcaacgaaactcctganattcaaattcaaaagtaatgaacccttcaattataactatgtaatcgattacacaaacatttgtaatcgatactagtgtgagaatttcagaaatctgcaacagtcacatcttt

SEQ ID NO: 189885 - DNA, 433 bp, Glycine max
tgaacttatatactaagctttgttcctttgtataaaagagaagtttgaaactcttctcgttgtctaaaaaggccttgaggtggatccaagtgctctgatcattcattagcatattcatgttttggtgacatactcaccactgtttgtttctttatggaactcatcataactaaaaaagcgcataggcacccctattacacccgatccagaagtaggatggataacgaagagggagtgcaagaacagatgaaggccgacctatcggccttaaaagatcaaatggcttctatcacggaggccatgctaaagcttcaaaaaactatagaagataatgctacagcggtcgcttccaatacagctagggaagcggaactggtgctacagcccgcaataaacttgggccgagacagaaacgcgacggtgtttaatcgga

SEQ ID NO: 189886 - DNA, 458 bp, Glycine max
  unsure (1)..(458): unsure at all n locations
agctntcagatagttatagggcactatcaattttatcgcaatgaatcataaagtaggcaaccaaactcaactattctatggtcattatgttgaacatgagaaccactacatggacttcattactccgccggtactcctccactaaaaaattaatcaatttattgcaaaaagtcttataaagaaagcaacagagagatttatagaatgaaaaagaattggttcactatttttttcccaagacataaacttgttggcacgttagaatcataaacttttgtgttgttctaacttctaaataaaccatgagaaagtggattctctgcaaaacgcgtaaacccacaacagaggaaataccagccttttaacaccagctcagttcgcatacttgatagaaaanggtaggtaagatacatctagaaaatacaaatgatgcttgtaattcttttaaaaaataatct

SEQ ID NO: 189887 - DNA, 429 bp, Glycine max
  unsure (1)..(429): unsure at all n locations
tctcaagttattactactgacacaattgatatgaaacttttttgcactcgntgagctccttctttgcatttatcattgtcaaagatatgaaagtaaacacattattataatttctaatgtccgattcaaaccaaaagttgtactactaccctccatttttgctggggcttcttctcctctgtctagtggccttatcccccccttctatattaaaatagttatatgaagtttcatagctcagtgaagaaattgtgtgaaaaagagagttacttgatctattttttgcttggatcataagtatagagtaataattaatccctttcatgtgaaaatggtaatgttaagcatttgtcaaatagctttatattgtttttatcataacattacacctagtaatgcattgaaagcttattcatcccatgacaagca

SEQ ID NO: 189888 - DNA, 300 bp, Glycine max
acttgatgtaacatcatttatctatataatgatgttttgtgtgttcactgtgctatcagaacttcattctaccatgcttttaccttgatcacgtagatgcatgtgtttttaagatcattcaacagtggaaactggtatgattcttagaacatgattagacggggctagtctcgtgtaatgttgtcttaatgcaggccttaccgattttattccgacaagaagaatctgcggaccatgcttgatcatgaatatgctcgactatcatgatgaatcatggtttatcatttcaggagacaccat

SEQ ID NO: 189889 - DNA, 228 bp, Glycine max
ttgctcaaagaaaagcttactaatgcacatgttctaactcttcctgacttttctaaaacatttgagctagaatgtgatgcccctggaattgggaattggagctgcattgttacaatgtgggcaccctattgcttattttattgaaaaacttcatagtgccacccttaactaccccacctatgataaagagctttatgccttaatatgagccctccaacttgtgaacat

SEQ ID NO: 189890 - DNA, 454 bp, Glycine max
  unsure (1)..(454): unsure at all n locations
agcttgccttgctccttgatatattngatgtactcatggtcactatgaatgacaaattccttgggataaaggtagtgttgccatgttttcaaagcccgtactaatgcatacaactccttatcataagttgaatagttaagggtaggaccacttaacttttcactaaaataagcaattggatggccttcttgcatcaacacagccccaatcccaacatttgaagcatcacactcaatttcaaaagatttttgaaagtttggcaacgcaagtatggtggcattagttagcttttgcttaagaacattgaaagcttcttcttggttctctccccatttgacaaccaacattttcttgagcacttcattgagaggtgctgncaatgtgctaatatccttcacaaatcgtctataaaaacttgctaagccatgaaaactcctcacctcagtcacagact

SEQ ID NO: 189891 - DNA, 343 bp, Glycine max
aatatagcttctattagctgaaccttttctttcacattgatttatcaaaaattagagtatctcttatctagtgaaggatctcctaaatcttgagtgatcagaaaccctggtgtatcaaaggactttcacaacctttggtgtgccctcgctggaagaatattctttccttcctttatcttcacccttgttctttcaaccacaattccagaaaattcacctctgcccagaattatctcgtggcataactcccgttttacgcactcaattaatgattcttgacccaattgatttcaaacgaactttaactcgttggatcactctttgaccctgtgctcatattgca

SEQ ID NO: 189892 - DNA, 362 bp, Glycine max
  unsure (1)..(362): unsure at all n locations
attagatctctaagtgtcgnaagcttgtaagcttccctacttcagaaaggaattctccacgaagagaatttccacttagatctagatgttgtaagcttgtaagcacccctacttcagaatggatttctccactaagagaatttaggcttagatctagatgctgtaaacttgtaagcttccctagttgagaacgtattgctccatcaagagaattccatttaagatcaagatactccaactctgagagattccccatatcatatggaattctcccaccaaacctcgaccatgatagatcaagatattgtaagttggtgaaccagcccataaatttcgggatgtaactcccttcataatcatta

SEQ ID NO: 189893 - DNA, 452 bp, Glycine max
cttaacgatttatttggaatggcaccaatgaggataatggtatattattttacaatcccatattgtgcaacgtattccataaccagtctggtacagagtcattaatcccgttatcagaaatatcaaggatatacaaagaactttgagtcttgagccaacttggaaaagtggggcccaacttgcgagatctgattcccaatgattctaattggaatggaggaacccaactcgagacaaatttcatagacaacgagctctctgataagtacaagtattttaatttggaaaaattagaaagatgggactcagtgacgtcacccttcatagaattcccagccaagttaagaaccctcaactttgatagataaccaatgctgttaggtaacatgccagttatctgggtattagataaatccaagctcttaaatatgtctctgttgcaccatgaagaa

SEQ ID NO: 189894 - DNA, 482 bp, Glycine max
  unsure (1)..(482): unsure at all n locations
agcttatgctgcanatatatacaatagacctcctcaacctcagcagcaaaatcaaccacagcagaacaattatgacctctccaacaacagatacaacccttgatggaggaatcaccctaacctcagatggtccagccctcagcaacaacaacagcagcctgctccttccttccaaaatgctgctggcccaagcagaccatacattcctccaccaatccaacaacagcaacaaacccagaaacaaccaacagttgaggcccctccataaccttccctcgaagaacttgtgaggcaaatgactatgcagaacatgcagtttcagtaagagaccaaagcctccattcagagcttaaccaatcagatgggacaattggctacccaattgaatcaacaacagtcccagaattctgacaagttgccttctcaagctgtccaaaataccaaanatgtcagtgccactttattgaggtcgggaaagcagt

SEQ ID NO: 189895 - DNA, 441 bp, Glycine max
  unsure (1)..(441): unsure at all n locations
tattacggacacttaaaactcagcttctaaggaggtgagcttagttatgagaggggtgtgtgtatctaatctctagcttctcaaggaagttntctcaaagaagcttctcaaggaagttttctcaagaaagcttctcatggaagctacctagtctataaatagaagcatgtgtaacacttgttgtaactttgatgaataagagtcttgcgagacatacttcaaagttccacttctctccctcttttattccttcaatttcgtgctcccctctctctctttctctccctctttcttttcctccattgaagcatccttccaagcttcttatccaaggcttatcttggtggtgaagctccttcttccatggcttattccctagtggatggcgcctcctctcacctcttctcctttgtcttacgctgcatctacatggtggaaaat

SEQ ID NO: 189896 - DNA, 422 bp, Glycine max
  unsure (1)..(422): unsure at all n locations
agctnggatacgacgaggaagaggtatactgttttncgtatacttgttctntgctaacaccccaatatgagggatggagctatgatctgatttacgagtcatgcgacggatctagggtggtgtcaacatagataacatgggctccatatttccgtgaagttctatgaattggccatcatagaagaacttcatactcatagtactatagttagtgagcaccggcccaagcaattttagtcattgtacacctagaaagatgttctcgaccgcaatgggcatcacatactcattcaccacacaagtaaagtgctggatggtgagagaaatgcttgtgcaatagcgagtgcaagctaagtgttggtcatttcaaccatacatcacagtgggtcttgatcctaagtctgcaatcaagttggccacca

SEQ ID NO: 189897 - DNA, 444 bp, Glycine max
  unsure (1)..(444): unsure at all n locations
tactaagctgttgttgaaatactgatcatagggtcaagttgttgtctgtattgtttcggangcgagagtcgtatttgtcgacatgagggttgtggagactatggttctggttgaggaataacgtcagtaacatcatataattcggcagaattcaattgtggatattggagaattgtttccatcgcgcctctgagatcgtaatcgtcgaatagttgtattgaaatataatgtgtctgattctgatgaaatgaaatagggacacgaaatatcaattgagcaactttttcagttgctcgagtatggagatgattgtttatcttccgaatcaatagtgttaacgtaatagaaccgctgatgtaaataaatattgggttcgcatatgtgttcactgatccgtatattgtgttgtctgctatgtgaccattgggataaattacgatcaat

SEQ ID NO: 189898 - DNA, 393 bp, Glycine max
  unsure (1)..(393): unsure at all n locations
tggctttgaatcaganatctgnacctgtcgcaaggggttgtggtttgtgctcctctgctgaccaccatacagacctttgcccttccatgcagcaacctggagcaattgaacagcctgaagctnatgctgtaaatatttacaatagacctcctcaacctcagcagcataattaaccacagcagaacaattatgacctctccagcaacagatacaaccctggatggaggaatcaccctaatcttagatggtccagcccttagcaacaacaacagcagcctgctccttcctttccaaatgctgctggcccaagcagaccatacattcctccaccaatccaacaacaacaacaaccncagatacaaccaacagttgatgcccctcacaaccttcctc

SEQ ID NO: 189899 - DNA, 443 bp, Glycine max
aatgggttcttcttcaatgttagatatagttctgtccttcttcttcactaccttgatttcatattttcacgaagcaatgtcactgaaacaagtgaattgaatggacatttgtactgattattggtgcagttaattgaatgagcagttataatgttccattggataaacgagataaattccaaatatgactaatgcccaagtgttacatagatcccatgtgttaaatattaggctctttttgtctgtaccgagtatatttcttgttcacccaacacatattccatatttccaaaattacccctgctaataaatggattggtgacaaaataattgtcttcttttattctacatctaacgcataacatgtttggtaagacaaagaaaagagggtcagacgcagaaattgctacagaagttgataaaaatgagaaacctgatataaa

SEQ ID NO: 189900 - DNA, 416 bp, Glycine max
  unsure (1)..(416): unsure at all n locations
agcttatgcacggagaatgtatttatgaatttgagatgcccgaagaaacaccatttcctagttaaccatgcattaagtaccatgttcaattattntggttttaagagaaacgggtttatgatcccaacatggttggctcgtggtgcctaacacatgaaactaagaatgtagtgtgaagtttcacgctttccccttgtttgtttttgttttgtagaggaaaacgcaaggatgagcaaacatgaaaacaaatggtatgcaattttgcagatcaaaaagtttgctgaacgcatatgcatgatgatgccatgactcatgcataatgtgaggctggaatatgataacggacaaatgcatgatatgtccattatgatgttatgaagagatgcttatgcgatgcatgatatgaatgcatttta

SEQ ID NO: 189901 - DNA, 441 bp, Glycine max
  unsure (1)..(441): unsure at all n locations
tacgtacactattatactaagctgtcaaatgcatgttggtgatttactacctttctgtttaggttttgtgatgatgtttgtaatgtttatatgctgaaattgctgatggaaatctgttaaagatgaagggtagaactaacctatggttagaaagtgagaatgtgatgttatgagtggaaaaagagtgagactctgagagttggaaagctaaatctgaattctgtggtaaatggaggttaaagcgagttaatactagcttgaaatgtcatttangacatgtgagaaaggttacgctgagctagatagaaaaacaaatgaccaaagtgaaccaagagccattttaaggcaaaattgggtgttgaagagtaaaattttgatttggtggaattcttggtgtaaattcagtttgagcaagtttatattgattgtatggacttgtgt

SEQ ID NO: 189902 - DNA, 493 bp, Glycine max
  unsure (1)..(493): unsure at all n locations
ttacagtcacctgcggcatgcaagcttaactccttaactgccaagctcttatatntgattattatccnngnggaaccttcacccaacgaagacactgacaaaaacttatcttctccttcttggacaaagtatggcaggctgggggcaagtaaatttttttcccatcaaaccttggatgcaattgtaatcgtatacccatatcagctagatcttgacgggtattcaagccatccttcgtcttgccttgaatgttaaggagcgtcccaataacactgtcaaaaacatttttctccacatgcataacatcaatacaatgtctaacgtcaagatcacaccagtacggaagatcaaagataatggacctcttcttccatatgcaactctgactattatccttctcttgggtcttcccaaatacagtattcatgcattgaacccgctgatatacctgctaccagtcaacagtatcggcgcaatatatgctcttgacttc

SEQ ID NO: 189903 - DNA, 386 bp, Glycine max
  unsure (1)..(386): unsure at all n locations
gttaaggttcaagacgatggattatatactcatttatattgtnttcaaccatcncattcctactcgatgtgagactttatctcacacttatttcaattatctctccctcaagtgagtctccttcacatggtagtctccccctcaagcttaactcattatcatccacgagtatttcatggtgggtattagagctcacatgttctaaatacttgcaccgtcacttcacccacaggacacgtctactgaacccaccatcacgaagactctcaatacaagggatcttcatgccaaagatatgtctacacgagttcaaatccaactcgtcccaagaacttgtcgatccactattgaagtatataacccatttattggtctccgaatatgac

SEQ ID NO: 189904 - DNA, 458 bp, Glycine max
  unsure (1)..(458): unsure at all n locations
agcttcttggttggaaagaaatatgagccttcnctctatttgcagnangcngatgatactgggcttgtaagagaggctgtgtgggagaatattcatgttataaaggccttattaagaggatatgaattagcttctggtttaaagattaactctgtcaaaagtcagtttgggataatagggggtggagtcaattggtctttggaagcaaccaatattttgcactgtcaacagttggaatatcctttcctctatttaagcttacctattggggctaatccttctagccagctggtgtgggagcctctcatttctaaattcaagtctaaactagccaaatgggctcaaagagatatatccatggctgggaagatcacccttatcaattctggccttaattccctccaatctatcttctttctttttaaaattcctcagaaggtagcaaaagctgatatcct

SEQ ID NO: 189905 - DNA, 438 bp, Glycine max
tatatctggtcgagtgcaggtctgagcatacataatactcttttcaactgatgcatacggaattgcttccatttgcttccgttccagatcatttttaagacattgtgcgagactaaatttgtctcctttctgaattggaacgggagatgctgagcacttttccatcctaaatctctctagtactttattgatatatgccttttgagacaagcctaacaatccttgtgatctatttcggaatatttctatccctatcacatagcttgcctcacccatatccttcatttcaaagttactagaaagaaactttttagtctcatgaagaagaccaagatcattagttgcaagcaatatatcatcaacatacaggactagaaacataaccttactcccactgaccttcatatatacacaccgatcaacagtgtttgtcttaaa

SEQ ID NO: 189906 - DNA, 407 bp, Glycine max
  unsure (1)..(407): unsure at all n locations
agcttcgttccaatcatattctttgtggatatccaattncgataacgtttatataatgattaattatgctattactcaatataatatatgatatttttnttttatattcgaaacaaggttatgatgtaatcctgggtctatgcctatatatctactcacacctagagctattattttttgcataaaactatcgaaaattatcactttagaaaaaacaaactaatcttttgagtatgtgttataaattattntcttacggacacatttaatttaccaatcaagcccattaactcattgtttccttctcttacataattgattgcatctcaatttttcaccnaatcaattcaacaactgaaaaacccagatataggtattattgacctgacgacttcactatgtcttgt

SEQ ID NO: 189907 - DNA, 444 bp, Glycine max
  unsure (1)..(444): unsure at all n locations
cagcttgctctgtaatngttgatggatgaagctgtaccaatgtttgctgttccaggttagtgtccaaactgaatntggatactatgccccatcctatgccataaagaatttagtggcttagtgaaggtgaagaggtaaaagtgactcagcatgttgaggtgtgtctcaccattggaagagacaatgatagggtgctgtgtgatgtggttccaatggaggcgactcatatactgttgggaagaccatggtaatatgacaccaaagcagtgcatgatggcttcaccaacaagatttctttccaacaccatgactggaagactattcttaaacctctatccccttgagaagtgtatgatgaccaaatcataataagagaaaagagagaacaagagaaagataagagtgaggcaccaaagaggaatatgaaaaaaaagagtgattcac

SEQ ID NO: 189908 - DNA, 442 bp, Glycine max
  unsure (1)..(442): unsure at all n locations
agctngctcgtgcggngaattataaangtgttttattgtaatgngtttcacttgtgaaggctntgtcccacccttctaagtaaattgtaattgacacacagctagaaagaatataaaatgaaggaagcccaaaattaagtttgttctgcattgttaactacaatgggaagaatgcatatttcaaggaagcatttaaccctatactctttttctttagcctgtacatgatgttaagagttaataactagtttggttcacagatccttgtggttaagtgttttaggttgagcatatttggctgttggccatggtataattcagtaagggtagtttgtctatggacttattttgaaggagtgtggaaattcttgttttataataaaaattatctaacacaaataaggcagtagttaattggttttgatgggtactttctggaaca

SEQ ID NO: 189909 - DNA, 387 bp, Glycine max
ttgagccataatcctgactcatcataaaccttttccctttgtgagaatgtcaatccttaccctcggaagcaaataagaatagaagggaaatttccaatcaaagaaaaagagaaggaaaatttccaatgaaagcaaaaaaaaaaatgaaaagaagatgaagaagaataagaagaagagaaaagaaggaaaattccccaatcaaagagtgggagaaagcaaaaagaaaagaaaggaaattcccaatcaaagaatgggagaaagttaaataggaagaagaagaaggaaagaaagctcctgatcggggatcgaaggaaaaacagaagacatgtgcagagaggtctttggaccgaacaatatctgaacaatacagaattgtcaccatatgaa

SEQ ID NO: 189910 - DNA, 439 bp, Glycine max
  unsure (1)..(439): unsure at all n locations
agcttctcccctattttgctataaataggggaagaagtgtttattannaaggttcagccncttaagcacttctctctctgttcgaattgctgaggaaaattatttccgtgaagaaaatccgagccgaagcacttccgtaacgtttccgtgagtaattacgcgaagattctcgaccgttcttcaaagattcatcgttcgttcttcgttttcttcaatcttcaacgggtaagtacctcaaaccaagcttttcaattcactctatgtacccgtggtggtccacattttgtttcatgtatntttattctcgttttcatttactttttatacccccttttgacgtgcttaagccatntatttaagtcatttctcgcttaatctaaaaataaaataaatttccaccgatcgtttgaattgcatcatccgttaattttggtaaaat

SEQ ID NO: 189911 - DNA, 448 bp, Glycine max
  unsure (1)..(448): unsure at all n locations
ttttctctgtacacctacattcctatacacgaaaaactgtttctgtatacacactcattataaaactctttctctntatatcaacatggtctatataaaacctttattccttttcaaagatttcttcttcctttttcagcatacgctcgttgtttatacaaaaattttctttatatacactcattgctcacacacaagaatttcttttcacacattatttatacacaaaatcttttcatacactttttatatacaaaaactcttttcttttctttatatacatatatgacattttgttcacaacgcctctttctttttctattcttggggttatcatgatgtttgttcgttttattttaggatgacgttcctaaatgaaaactctacacggttccagaatgtcaacaaacattattgacaataacgaagtaagcactaatgcaacagt

SEQ ID NO: 189912 - DNA, 437 bp, Glycine max
  unsure (1)..(437): unsure at all n locations
tgaatagcaggttcaagtctaatatacagtcttccaaacttgtattaagttaaagtccaaagtacaagttctccaaaagataatttcagcaaggaaagatgcagtaaaaggagaaatggagaatcaagttagcaaatactcaaacatgtttgaattttcgattntttatgagtcagatcaaccggtaatgctaaattcaagaactcatgtttgtcttaatcacgagctaattttttttatatataatattgataccaaattgacgataaattaataatttacttgcaaacgaagaaactgttttttcaacctanaagggaaaaataattgacgatagcattttntaaaaaatatntaattatcttaaaaagtcgggttgagtcaaattattattntttaatttaaaaaatattttagtaaataatatttgaagtgag

SEQ ID NO: 189913 - DNA, 445 bp, Glycine max
aatctatgggaaaggtgtgaatagtctgtatgaaaagcttatggtccttatctatatcactgggcttaacctacaaataaacacataacaatattaattgcatcaatgtcattgcattaattttgtacttactgacatcaacctcaagcactaattgtcagaaatttcaattttgtaggggcactgtgggcacaacaaatttgtcaatgaaacacttaagaaacttgctcctaaacgtaagccaccaacaacaagaatgcaccaacaaaaaaatttcaaattcaagaaaaaaaaattaaagattgtcaactaccaactgttgagaaaaaattgagttgagaattggtcttgctaccactcaggccaagacatgcgcatcaattaacaaatctaaatgggcaacttgagatactaatagataataaaggactgtgtgaaataattt

SEQ ID NO: 189914 - DNA, 482 bp, Glycine max
  unsure (1)..(482): unsure at all n locations
catgcaagctnntactaccttctagttgaactctggatattcgggtccattcttcngttaactggagggntaagataaagaacaattaaacatataaatacttactagcatgaaagtgattataaagaagcaaaataatataactcaatgttacatagaagaatgagatggaaaacatgctaaaagcataattgcatgtgagttgaactgaatgaaaaattacaaaaattgcttaattctattttgggttaaaataatgttaaaattgaaatattgttggtcatttgttgtccaagaaattgacatgattacagaatgtaagacattttataactaanagttgttattcaatagtagagatgtcatatatattgtcaagttaagccatctcaaaatattgagcattntcattgttggttcaaagtaaggtttgggttgacagaataatcatatgacttaaatataggagggcaacaacatat

SEQ ID NO: 189915 - DNA, 435 bp, Glycine max
  unsure (1)..(435): unsure at all n locations
tatcattcttagacttgatatatatataataacnggatctttctggttcagnctgttcctccttaatatctcgatcaagtgtcaaaagaatttcctgttgctaccatatagtattcatctgtacatggtgataaataaagcatgagttttcttttttatatcagagatttcataaaatgggctttctatgaaaccccaactaccaatcctcacacgaattgctagaagatccaatgagtccaacattgattccttttgacgtgtcaattgggcaaatgcatccatagtgactatggtggatatctggtatccgaaaacttgcaagttgccctgtcaatcctccagggtccaaataactcagttttctctcatgaactatttgggtcaatggattattttgatccaaaacttgagataatggatgtaatccaaaaa

SEQ ID NO: 189916 - DNA, 446 bp, Glycine max
  unsure (1)..(446): unsure at all n locations
gcagctataagacaaatgtgctagagcatttctaaattttgagaatangaagcataacaacaacaagccaagctattgacaagcaatcaatggggcaaacacaccaatgattatgatgatgtgtggctcaaattctcacaaggtatactcatcactttcaaattgagctttcaaaactatcatgacatgtagaggagatataatgattcctagtcacaaaatgtcaagaactgttatttacaaaacaattacccatttcttgaacatatcctataattcaaagatcaacatgcaaagtcgtacatgcacacaaaatagacccataatattaaactatatatccgacatagctatcaacattaacacattaacacaactaacaaattaacaaaactcacattactacgcataccaaagaacactccgctccatactataacaacaca

SEQ ID NO: 189917 - DNA, 460 bp, Glycine max
  unsure (1)..(460): unsure at all n locations
agcttaatgacccttaatctttcaatgattatagacccatctcccttatatggtgggtctataaaattgtggctaaagttntagccaagaggttggcccttgtgttacctcatcttatagatgaaaggcagacggcttttatgaaggggaggcacattcttcatggagttttgattgccaatgaggctttagctgaggccaaagctagaaatacaccttgcatggtcttcaaagtggattttgaaaaggcatatgattcggtttcatggggttttcttgactacatgctcatgaggatgggcttttgtgaaaggtggaggaaatggattaatggttgtctgtccactgcaaccatatccatcctaattaatggaagcccttctaaggaatatgctccaaagagatgtctaaggggtgtcttctaagagctggatcgtgtggcagcctattataaggaagt

SEQ ID NO: 189918 - DNA, 449 bp, Glycine max
ttctccgtgaggtacgtaagttaaattcgtgtatgctatttttccttgttagtggtttgacccgaattgagagtggcatcggataataaacaaaaggtttttgtttgcgattctacaggctccgctcacgtgcgtgttgctgggttctcttgatcaatgtaacactaacttgtatacttcatttgacctattttattttttctgggtagtaataagtaatgttgcatgatttttagtaacgtgttattctgtttgcactatatcagagaatcaaccatcatttctgtagatggatccacaggggtgttgaaattgcctgcaattgctgtaacattttactgcccaacagaaggggcttgactggtgttgttttaacatattctttgtgtcttgagcaagtaatgcttaagtatagataaagctccctccagttcttataagacacccct

SEQ ID NO: 189919 - DNA, 455 bp, Glycine max
  unsure (1)..(455): unsure at all n locations
agcttctccttccttgtcctatatattggttttgagggaagaacanaaatggtcaaccctcctggtatctaagaatcacttaaaattagtgagaaaaattgtttgcgtgaagaaaatccaagccgagacacttccgtaatgcttccgagacgtttccgtgggtgatttcgcaaagatattcaatcgttcttcgtcattcttcggtcttcaaccggtaagttcccgaaatcgaacttttcaattcattctatgtacccttagtggtcctcatttgtttcgcgtgcttctattttcatttcatttactttccgtacccccttttgacatactttagtcatttatttaagttattttctcacctaatcaaaaataaaataaatttccactgatcattcgtattgaacatcctttaatttctgtaaaatgaattcgaccgtcagcctgccgtaccactt

SEQ ID NO: 189920 - DNA, 432 bp, Glycine max
cgctgtcgctagtgttagtcgatgagtatgactaacttttgtgtataaaacctgtgtatattgtatcaaactctcccaatttatggttgttttgcaatactataagtactttttgtaaatataggtaatagataatttatacttttgttttgtgcgtttaataatcaatttctctcaattacaggttaaataggcaactttggcaaagtgttgtttttcactcttttgctaagccaagctgctggcttagcgagaattcgctaagcgcaaccttcagcggctaagcgcgaggaagaatccagaagaagatgagctgtcaagttcgctaagcgcaccgctccatgtcatcaagtgcactgcttcagctcatccgctaagtgaaacaagcgtgctaagccaaaattcacttatgcgcgctaagcgatccatatc

SEQ ID NO: 189921 - DNA, 454 bp, Glycine max
  unsure (1)..(454): unsure at all n locations
agctnttgaattgaaatgcttgatgtttatcttataatgctggcaatggcaactcatgagccccattnttcaatattaagagaggtgattttgtcaagatatcaatagatataatcatgtgtagtttaatttgaaaaatcaaatatcctgaaccatgtgataaagtgatttttatttttaacacagcatgtagcaatagctacagatttgaaatttactattttacctttgtatacaaaattaattcctaacattctaggcatgtacaggatgtaccaatacagcggcagcactcaaaagatgccgctaagcctttcaaggtataataaccgatttacattctacaactacaantttgctggtgatatcatcatgagccttatgaatttaataactgtctgcagttnttgcatatntggttattgagggagtatcttgagatagacatgataat

SEQ ID NO: 189922 - DNA, 454 bp, Glycine max
  unsure (1)..(454): unsure at all n locations
agctntgagcaaattcaaacgacaataactnttaactcgggtggtccgatgagtcccgtagtatatcgagacgctcgaaattgaaaacagaagcactaagcaaattcaaacggcaataactttttactcggatgtccgattgagtcccgtaatatatcgagacgctcgtaattgaaaacagaagctctgagcaaattcaaaagacaataactntttactcggatgtccaattgagtcccgtaatatatcgagacgctcgtaattgaaaacagaagctctgagcaaattctaacgacaataactttttactcggatgtccgattgagtcccgtaatatatcgagacgctcgtaattgaaaacagaagctctgagacaattcaaacgacaataacttttaactcgggtgtccgattgagtcccgtagtatatcgagacgctcgatattgaaacaga

SEQ ID NO: 189923 - DNA, 412 bp, Glycine max
  unsure (1)..(412): unsure at all n locations
ntcagcaggaaagctaagtgtgaagtattccattctgcacatgattggagctgcaaactgggttcccaccaatcatacttccactgttgccacaggtttgggtaaatatctgtatgctgttggaaccaaatccaaatttaattttggaaactatatctttgatcaaactgttaagcattcagaatcttttgctatcaaattacccattgccttccctactgtattgtgtggcattatgttgagtcagcatcccaatatgttaaactacactgactctgtgatgaagagagaatctactctatccctgcattacaaactgtttgaagggacacatgtgccatacattgtctcgacatctgtctcgacatcaaggaaagctgctgcttcaagtgctgtgttcaaagatgctctg

SEQ ID NO: 189924 - DNA, 471 bp, Glycine max
agctagagtcgaatgcattatttcatggccttaccagcgactcattcttctcattcatttcaattttggaggcctgtcgttacaacttgttcaatatcttccaaaataattaatcaaagtttttatacgagataataaagttatcgtgtgtgctacgtgtgtaaatgtaatgtaatataagccgagagccatacacaattcaagacctttggatatggtatgtgaccctatagtgttttaatgctttgttttttctactgctaattatatttgttaaatattgcatgttacatcatcccaccacctttgtcatgtcactaaatattctgttcatatattcatcagatgatttcttttcaagcaataatggtctaacttcaatttatagtagttttttctttaagaaattatacatagatcacttttaattgtaaacacctcattgacatctctcatctctctattatatca

SEQ ID NO: 189925 - DNA, 406 bp, Glycine max
  unsure (1)..(406): unsure at all n locations
tgtgtattgctgcattctactaatatatggagttgtccactgctttgcctganaataacaattgcttgaccacaacaacgctggatgcggtaagggacaatggtctttcaaataaacctgttgtacatgaacatagattatatcatgtggtgaccgaatcaaatgaaccagggaagtcattgcataattgttatactaactatattcaatgtacctgaacaaaatgatttccaaacacgtgaccgacacatatgatgcggtgcccagaagaatcaggtggtggttgaattctaagaagaaaaaatgtcatgctttgttgtcggtacaacgatacaacgattacgttataccgtgatgcaatcacatatcccatctccgttatatccatccacttgtccacactaac

SEQ ID NO: 189926 - DNA, 315 bp, Glycine max
tccaactataaactatggaaccaatacaatttctcaaagcctccaaatgtgacaactatcaagataaatgcgttggggagctgcctacagaactatctctccgcgtataaaatgacttcttctctatctaacgctatcctagcgtccttacactgagaaaatactctaaccacgagtcctcacatgaatgagccgtatctcttctagcctttggtcttgattcctcaacaaacttgctctcatacgagtcgcacctatctgatagtgtgaaacatactagatcgctgcactctacttctatacatacagatttct

SEQ ID NO: 189927 - DNA, 265 bp, Glycine max
agccactacgttcgacatcgggcactcatatataccttacttgcaacctataacctaatagctcaatcgtctttgcattcctgctacttctcctttgaatttctctttccgatgcgccccaactgtcaacatctcacgaagtttaaaatatctgattctcttgatgcctatcacaagaaacacatacgtgttaaactaattcacatgacagaaatatatatgacgaacgcacatggaatgcgtgggaatagtataaacgttcggg

SEQ ID NO: 189928 - DNA, 466 bp, Glycine max
  unsure (1)..(466): unsure at all n locations
agctngaatgtctacgttatacggatgaagtgtggtcagaaggacatttactacatcacaggagagagcaagaaggcagtggagaactctcccttcttggagagactcaagaagaagggctatgaagttcttttcatggtggatgcaattgatgagtatgctgttggacaactcaaggagtacgatggcaagaaattggtttcagctacaaaggaagggttgaagctagatgatgagactgaggaagagaaaaagaagatagaggagaagaagaagtcatttgatgaactctgcaaggtcatcaaggacattctgggagacaaagtggagaaggttgttgtctctgacagaattgttgattcccctcgctgtttggtgactggtgaatatggatggagtgcaaacatggagaggatcatgaatgcacacgctctgagagacagcagcatgagtggctcatgtctac

SEQ ID NO: 189929 - DNA, 427 bp, Glycine max
  unsure (1)..(427): unsure at all n locations
cgtnataaagtagacaatacctttgattattacgtcctccatagcatcaagtggattgagatcatacgcaagtccctttacatctctaccatgttcatccaatcgacttgatcagatcgcggtaacctctcaatgttggattacttcaaacttttacttactcctgaagaacagaaccattgactattcacaaccagtgagacacaattaagtcggtagcaggatatgaaaaaaggtcatttatgagtgaaaaagataaacagagcactggctctgataatcaaattcctatcactatagttggaacttatttgctacattctttcaccataccatatcttcactactacatgttgaccttcatggttggctctatacacatctacaacactggtgaagccaatgagattggactaccgaaattggt

SEQ ID NO: 189930 - DNA, 467 bp, Glycine max
  unsure (1)..(467): unsure at all n locations
agctagagatgtgtctcaatctgcgnnnngtagttttgccaanaccancctccacatactacgctgttactttacagatggctttgatatagatatgtgtgtacgaattgtgaacgtgctagcatcaacatgattattcaaacatttttagcatgaaaattatttttgttctgatgttaacactactgttgatttatataaaacacatcaatcaagatgtancttctccaagttggaggatcttgtaggtcttcaccacaataaagtacgtccaaattcacatcatgggacatttatacgagtatataaaaaaaacataagttttttagttatttaattaaaactttatgaaaagtatgttacaaatatatttaataattaaatatatattaatatctaaaatggatatatatatatatatatatatatatatatagtaataatccatgtctatagagaagatatat

SEQ ID NO: 189931 - DNA, 395 bp, Glycine max
  unsure (1)..(395): unsure at all n locations
tacaccctgttggaagctggttttgatagagacttccctgccntttttgaaaaaattccacctctccgtgcttctgggattgaagaaatatgtgattttggatagaacgatggtttgaccctgaccaatgatgctttgcttgtgttcaccataactttatatcccatctgtttttggctgccatatgattttgtgggagttccatcttatctgtgtcagaagcatcagaaatctggatcttagaatcaactgattcattatggttcactgttaacatctatgttggcttcgaatcaagtgatgcattttgattggcaacatgatgttattatcaccaccataatgccgtctgaacttagggaaagagatattctttcgctctcttaatcattgaa

SEQ ID NO: 189932 - DNA, 478 bp, Glycine max
agcttaagaggtatggcggtgctaagggatgtttcccttgataggagaaggtagaaagaatgtttaagaaggagtgctattttaatatcacattttgttgcaaaatgattttccttgttaacaatcttcttggaggaatccttttcctccttttccttccccttggcctttgaacacaaggccttactatccttctttttcttttgtttttctagtttttcttcctcatccctcttatctttcatagttagttgatctttggccacctgtgaaggtgtttgaggatgcaacacatatttagtgccaagatgggtgagggtaatttcattagttaggccattgtaaatgatcttcctatcaaattgccatggccttcctaaaagaatatgtcctgcctccatgggaactatatcacaattaacttcatccttatatgtcccaatggagaaaggtaccttcacttgttggttaactatca

SEQ ID NO: 189933 - DNA, 454 bp, Glycine max
actaagcttatatatatcgatacgctcgaaattaaacatcagaaactctcgagatattcatatcgccataacttttcacacggatgtccgattctggcgcataatatgtcgagaggctcgaaattgaacaacggatgctcttgagaaattcaaatggtcataacttttcacactgatgtccgattcatgcttataatatatcgatacgctcgaaattaaacatcggaaactctcgagaaattcaaatggtcataacttttcacacggatgtctgattcgatcgcataatatgtcgagaggctcgaaattgaacaacggaaagtcttgtgaaattcaaatggtcataacttttcatacggatgttcgattcaggcttataatatatcgacacgctcgaaattaaacgtcggaaactctcgagaaattcaattggtcataacttttcacacggatg

SEQ ID NO: 189934 - DNA, 404 bp, Glycine max
  unsure (1)..(404): unsure at all n locations
ttaagataatgattatctatacgatgatcatctgcactttaatttattggtttaatggtgtatatcttgaatatactttgtttgctagctttatagcaactgagagattaacgatgattatctataccatttttatggcattatgaagggtaggatgaagtgatataaagggcttagagagtttcacttgcatgtggaatatttccaaaaagagaaagactcagattaaaaggataatgcaaccatattaatactttcaatgaaaagaatattctgtaaagatattnttagacaatntaaatatctttggttggctatgttagtataaatcatctctaatccatacattnntttaatactatgctctctttnttaatttcttttgatatactctatagtttaac

SEQ ID NO: 189935 - DNA, 375 bp, Glycine max
gctatattggagatggagcgagagcacaatcgtcttttattgttttcactacaccagaagcaaaaattttgaactcatcttaacatcactcaccataaatatcttggctcttgataaatatgtattgactatcatctaaaagagggggtccttcatttggcacctctctactatctccgcaagggaaaaagcttccctttgcctccattctttatcttcttccaccttccatgtattttgatgctacccatgaaaatggataactaaatcttccattattgatggtagatgcaaccaagcttatactctcctatatgtctatatatgtttatatatatccaatgtattgacgttcgtatttgcgtttttacttaa

SEQ ID NO: 189936 - DNA, 407 bp, Glycine max
  unsure (1)..(407): unsure at all n locations
taagtagactcgtaagaatgagaacgttgtctgggatgagaagcgtgatcaaagtctccaagagttgaagaggcgattgacgacagctccagtgtttaatttgcccgaccctaagaggacatttgaagtgtattgcgatgcaagcgggcaaggcttgtgatgtgtgttgatgcaagagggaagagtagtggcttatgcttcgcgtcaattacgtcctcatgaagttaactatccgactcatgactnggaactagcagcggtggtctttgccttatagaattggaggcattattngtacggtactcgttttgtaagtctcagtgatcacaagagtctcacatacttgttcgatcagaaggaactcattatgagacaacgaagatggatggagttcctcaaggattatg

SEQ ID NO: 189937 - DNA, 319 bp, Glycine max
ttcacactatacacacgtggcggacaaattgggcagcgaacttgaatggccattattgtcaatgcagaatgtattcagcacttcactatccatgtaacacattattgcatcttgttgttaccgtagcatgaaccactaccaatatatatatgatgtttacaccgatgaacacatattataagcatactacacacagtgagggcctctttggaatgaagcggcacaccctccctctgaagaggcatggacactaatccatgacccaactacaattcctgcgataggtcggtcaacatcaacacagatatagaacgacatg

SEQ ID NO: 189938 - DNA, 446 bp, Glycine max
  unsure (1)..(446): unsure at all n locations
agcttatcngantcgcactgcctcagagttctgaatctattataccacaacttatcaggcagaattcccaagagcacccaacttcagagctgtgaagaacttatctactctggaaatcctgagctttgtggtcctcctgtaacaaataattgcatgtacaaaaaaaaaaatacaaaacacttgtcaggtccttttgctcctcagacaatgaagacagattcagaatgctctcataatttatatctagtttaatttcacttttgatctccatgcattacgtaaactaggtattataattttgtaagtctaatttggtcccttagatgtggcttattcacttctgcctccttataactgcaataatcttagggatcaaaagattatttcactatgtgttaggcaacatggaggtagcatattatctacctntcatctagcgtcatgcc

SEQ ID NO: 189939 - DNA, 436 bp, Glycine max
tgttatcattgcaacaaacacatactggatctgatgtttctttaatttaatactatgagagaacacgatatgcatggaagttaaactgacaagggaaaggtaaattgcagaacttttaggaccaccgaattcattcgatcgaatgaaccatgtaaaagacaggaattatatataaagaaacgtattgcattgctcttccaaattagtaagtgtacagaaacttataatggggcacaattatacattctccttgcgtacacgtttctctctgcgctgggtactctgagtgtataatgatttgtagaaatgatttgcgaccctcgacatctgactaaaaactgctttatttagacattcaaaaataaaattgcctaacggtctgacactatccttatgccagtgttctgtgtttacaccttacatgcacataactgct

SEQ ID NO: 189940 - DNA, 497 bp, Glycine max
  unsure (1)..(497): unsure at all n locations
ctcgacccggatccttaatcacctgangctgcagcttctgaagnttctggtttttaaaccttgaanactngngctattcatctnttcattctcttctccctttgccaaaaagaattcgccaaggactaaccgcctgaattctttggtgtctcccttctcccttgtcaaagaattcaaaatgacacagtctgagaattcttttgattcttccctttccctaatacaaaagtgttcaaagtactaaccacttgagaattcttctatatccccattcacaaagtatcaaaggtttaaccgcctgagatctttgtcttaacacattggagggtacatcctttgtggtacaagaagagggtacatatacttgggtttgactgagaacaagagagggtacatctcttgtggattagttctagtggagggtacatccactatgttcaaagagaacaatggagggtacatcccttgtggatctttgcttgtaaaanggattttac

SEQ ID NO: 189941 - DNA, 413 bp, Glycine max
tatgaacaagaaagcagagaaaatgagcttgatgatcttttcatgcttcaatcttattctttgagcaaaaagaacttatatacagattgagaatagatccagaaactaacacaagcagttacaaagtttgttacaaatctgttagagttcaaaatgaatctggcggaaaatgacaacttgattaagataatatggtaaataaataataagcttgtttagtatgtgagttttttttatcctattcccagtctaaccagctgatctctcaaatattttgaaattaaatccaactgttttaagatggttatgtaaaaaccttctttgataaaacttgataacacttgaaccaaacttgataccagaaaataaattatggactaaaagtagacaagtgaaaattgattttgaaatag

SEQ ID NO: 189942 - DNA, 352 bp, Glycine max
tatccctttcccattctttattcatcagttctaaacccccttcaaggtaggcccttaggctatgagaggctaacccttattagggtctgacagacctaaaaagccaaagatgtattgatgttcatatctatcaatgcaaacatgtgttttctttcctatatcctttttatttaattcatgtatattatccttgattatctttagggtaggtgctcacaaggtatcctaatgaaaacaagaaagctacatgcatcatttaggatatcactcaagaggtattctataaacaaaagaaggttctaataatcatgtaacataaggatgatatccatgctaacaactattatgacta

SEQ ID NO: 189943 - DNA, 407 bp, Glycine max
tgcctactttcctattgattgcctctgtcttattttctgaattggacgaataggggatagctgcatttatcagcctcatgtttaccactgcatcattattcgttagctgtctttcttattgaacaacatatgagaaaactgttataatgctaggctggggatcctgataactgctaaataagtgtattgtgatagcagaaaatgagtcaaatattggcctgaaattaattatttagcagctatttgtaattaatagttataaattaattaaattgaattcttggtctgcagatataaaaatcggaggtgttacacgcaaaatgggctgacatattgaagaatagaaaatatttgaagatagcgcatcccattcacgtgctaatgcgcgtactggcctaacggccatg

SEQ ID NO: 189944 - DNA, 454 bp, Glycine max
  unsure (1)..(454): unsure at all n locations
agctcaatcatgaagtccttttaattttgttatgtcattgtnncagnctaaatacttattattattatttacaatatataatattaaaatgaatacatttataaaatgaagaatttaaataactaacctctatatattagagtaatgtttaagaaataaaataggagtaaatgtttactcctgaacaatcagatcatatatataaagctgtttatgaacattccaggtttaattgttatacattcagaagaataatcacacacagaaatttatgccacagcttttgtggcgcactaaattatattgtcggatccactcagaaatacccacatatacacggtcaataaccaccagctagctaactagctgcgggaagaagaatctagctcatgaacacatcaatatgaataatcgagagaatccaccgacaccaagacattctggnttaattagt

SEQ ID NO: 189945 - DNA, 463 bp, Glycine max
  unsure (1)..(463): unsure at all n locations
gtgacactactataatactaagcttgaactataaaatcaccacgcatagatctgtacatttggtgcatnttnctatcaagaaaatgaaaaacagatgctattgctcgataagaaaagatgaaaagcttatgaacaagaaagcgaagaaattgagcaagatgatcaaaacaagcttctattattcattgagcatatagaacttatatacagattgagaatagatccataaactaacacaaaagcagttacaaagtttgttacaaatctgttagagttcaaaatgaattcggcgggaaatgacagcttgtattagagcccccctcaagctgggaatatatgttcatcattcccagcttggatatcatgaatctgaatgaagctggcttgaacgccttggtaaatgcatcggctatctgcatatatgaccggactattacaatttcaatagccactcatacatttc

SEQ ID NO: 189946 - DNA, 468 bp, Glycine max
  unsure (1)..(468): unsure at all n locations
agctnacattcatatgagctgttgtctcttgttaatngctttttttcatgtagaacttcatcaacatatcaatcacatacttcctttgcagcatgaatgctccacaattagtccttagaaattcaatgcctaagaagttagtgagcagttccaagtcagtcatttcaaactcttgactgagctgcttcttgactcgatcaatcaacttcacatcactacctgtaataagtagatcatcaacatacaagcaaatgattgtgatatctccagctccctcttgcttgacatataaaccatgttcaacagtgcacttaacatagcccacatgactaataaaggaatcaatccttttgttccaagctagaggggcttgctttaatccatataaagccttcttcagcctaaacaccttttcttcctcacctgtcctctcatatccatggggctgctgatgtaaacttcctatct

SEQ ID NO: 189947 - DNA, 434 bp, Glycine max
  unsure (1)..(434): unsure at all n locations
tacaacatgataagcgagaanaggaggaaganagtactttggtcttattgatcttgaaacaagcttcttcgacgcttgttccatactgtgaccaaaccaattggcatggagactctatcttgtattgttttgatcaaagctttaaattgtagttgtggtcgtgattcttccgagatggttgatattgaattcaatgtggtcggggagagtctaaaaacctttacgttgtggctgaaattgctgtcgtttctaaaaattctgtgtgttaagaattgaagtggtagatgctaacaaaccaaatgctcaattggaatgctaaatagatgctctattgtatggagatgactaactccatgttgacaccctatgagatacatgatgatttcttcaataagatacatgaagtgaatcacattgtaatactaattggcatg

SEQ ID NO: 189948 - DNA, 466 bp, Glycine max
  unsure (1)..(466): unsure at all n locations
agcttgttaaaccccaatgatttttgtcctatcaagccactgttggctctacattaatcaaacaaatttgttgtttgcttgtacaatgactagcttttaatcatcttttttgtctgatactttagacgcacgatgtaaacaacatgatctgatatcgcataagacacaacttttagcctttgtatttatttgcatcgaataaaaataattaggagtcatgacttatcttaagacataaatggtttttaacttcacaaatataaaatctttatctatttaattataaatcagaaatgtaaaatacaaaatatagaactntaaatatcatgtatatntatttaatttattattaatataaaataaaanttgtccagtttttttaaaaataaaacattgntttccatttttaaatatactcaaatacatttagatatnaaaatactcctataattacacttttatattc

SEQ ID NO: 189949 - DNA, 434 bp, Glycine max
  unsure (1)..(434): unsure at all n locations
tctatagaggctgaatacttgagctataatgaggtccttcaatggtgattgtcaaccatggagttgcaacagaagataaaggagaggaggtgccatccactatggaataagtcatggaaggaggggctttaccaccaagagagtaccttggataagaagcttagagagaaagtttcaatggaggaaaagaatgagagagaggcgggagcacgaaattgaaggagaaaaagggagagagaagttgaactttgaagtgtttctcacaagtttctcattcatcaaagttgtgacaagtgttacacatgtgtctatttatagcctatgtcacaaactaaatgaaattcactttatgaatttcattttcatttcatgtgaatctaagaagaatattccaaggatatgtcaaaggcatcttancatattctaagaatatg

SEQ ID NO: 189950 - DNA, 380 bp, Glycine max
  unsure (1)..(380): unsure at all n locations
gatanntgggaataaatagggaanaanatttatattanattttgtaattgttntnttnttaagggaggtggatnagagnanaaatgaaatgtatattttaannagtagatagttaaatgtatgattannttaaagtagnntttgtangttgttttggtgtagtatntaaaggaagattagtgttatataatagaaatgtaagtanaanannnaggtgattggagtttagtagtttaaaaggggatgtnagaannntnnttttagatggngttggttttaaaatattnntatggtggtnntggtgaaaaattgaaaaaaatattntnttttaannagaaagataatgagaaatntaananataattnaatagataatagta

SEQ ID NO: 189951 - DNA, 400 bp, Glycine max
tgcgcatgctctcatcagtggtcagcctgtatatccatgtccacaaccccctgacctccttgataagcaaataagcttattaacaccatttgtgatggatgcaacccctattggtgtgaagtttggggattgtagctctgatgttcccaagaactcgacctttaatagagctgacatggtgtctgttactttctggtctgcgtgccctcgtaatgaccttatgactgaaggtacattttccctggtggaatttctccaatgaaaggatatgtgggttcctgcttatgatgatgatgatttctgcctgcgcttcaagtggtcaagacctttcatactcatggttcataattaagctaccatagaatggggaatcccaaaggatgttaatcctggtgtatac

SEQ ID NO: 189952 - DNA, 459 bp, Glycine max
  unsure (1)..(459): unsure at all n locations
agctntaattctgaattggctcacaatggattatttctttcagcaaatgtagatggctaaatgtactttactttaattgggatgccattcagcataacttcttaagatgtagtataacagtcaatgaaaatgataattgcatcgagaaatttgcagattcctttcactcaacaaatttagaaaatttaaactatactattgcacaaatcaagttgtactttgtctttcttttagttgcccctccttctgttggtactgacacctacagaacgaaggtagcactgcattgtgcataccatctgaaatataacccatgaggtcaatattgagcctctatcgttgagtaaaggatttaagtttgatcaactagcaatgaccaatatgatggcacctactgaaaagagtgttcatattattactggaagtgaaataccttgatgcatactggtttgagaaagt

SEQ ID NO: 189953 - DNA, 392 bp, Glycine max
ggcctaaactatggaccttcctcccgtgagaggatatcttcttctcatgacgctcctgaattgaagtataaatgaacgcaaaattcgttaaaatcatcatttaaaggaaaactaatttcagtcataaagtataatttacaagtaactaaaaataaatattataaatacctctcccgtccatacgctgcaagcaacgtgttccccatactgggtcaacacggatgggtcgctcggaccacccggaaatccctcatgctcatcctcagtagcctccgcgcctgtgtgcataagaatgtttgccacaatatcctcagaatcaactggtgccatcggctcatccggaaatacatcatcctcaacatctggcgcatggaccactggctcatcgtgcg

SEQ ID NO: 189954 - DNA, 461 bp, Glycine max
  unsure (1)..(461): unsure at all n locations
cttcaagaagctttctcgtggcttctttgagaatctttctcaagaggcttctttgagaatctagatccttatctacatacacccttctattaactaaattaacctccttaaaaataattacggataaaataacacaacaaatataagcaaacatcaaacatacttattaatatatagatatatatatcagggtgttacagatatcagctaactgattctttgtgtcaacaaattctaacacacaatcccctttntgaatatgatctctcaaaaaatggtcttatttcaacatatnttgttctagagtgtagaataggatttttagatagtttgattgcacttgtgttatcacaccgaatgggaatatgatcaagcattaagccataatcaaaaagttattgtttcatccaaagtatntgtgcacaacaatttccagcagaaatatattccgtctctgtagt

SEQ ID NO: 189955 - DNA, 258 bp, Glycine max
  unsure (1)..(258): unsure at all n locations
tttgtcatgttggatttgttattcttatcccgcttttactattctcaatcccgcgtgttcaattttnttccaattattattattgaatgtcattaaaggatttaaagtttatgtcctgaaattaaattaatgtgaatgctttgaaattggcggaagcaataaaatatgtatatgctacatattcgccttgatgggtttgaaagcaaagacaaattaaaggggaattttattctatgggctcgaatgaaaataatttta

SEQ ID NO: 189956 - DNA, 448 bp, Glycine max
  unsure (1)..(448): unsure at all n locations
aacagagccatgagggtggcctcatgtggccatttgggatagacaagacccttgtcttactgaaagaaaacttttattggccccatatgaagaaagatgtccataagcattcactacaagaaaaatgacctaagcctacggacgcctttttcctacagacattaattagtgtaggtaaatctcanaaatacttctacctacaagtgactaatgtaggtaaaactcaaccatttgtaccaaccattatttggtgtaagtaaattcattaaaactganaaaggacttctacctacaattacattgtgtaggtaaaacttcanaaaacttgtgcctatggttgattagtgtaggtaaaactcaaaaggatgactacctacaaaagcacagtgtaggcaaatattctaaaaacttatacctacaactacgtaatgtagaatannacttcata

SEQ ID NO: 189957 - DNA, 364 bp, Glycine max
  unsure (1)..(364): unsure at all n locations
gttagcgcttatcactactgagttaaaaagggtggctaagattgtgctataacataagcacttatacaatgaaggaaagctggagttgctgcacatgatgtccaacgttatgtcaaagaataaaatcgggctgcacaatgcacaacgctagataaagtgtcatgtgatgatattggaagttgaggatccacgatgtcggatacaatgtcctgacatactgctcgagaatactggaattgctgttcaatgcaagattaaagtcaagaaagcattgaagctgcatgatccaagatgtctgatacgatgttctgacatcttggcccaanatactgcgcatattaattctgtatatctttaacagatt

SEQ ID NO: 189958 - DNA, 345 bp, Glycine max
  unsure (1)..(345): unsure at all n locations
tattgagattccagtatggcatccatgagagtaggctactacgatttgaatggagtgctatatcaagaatgagttgtctagttcatgaaaaaggttgcacaaggctgaacgcacgccgggttttcgtaaggaccttgcttgctctgtttaccctttctacctgaatgatgggtctacttatcaagaaatatactgctgaggaggagacgatcttgagtcgatgtggggcaatgttacgccgattntaatcttctttgtggatttggcacaatggttgtattataaattctctctgatatgaattctttctttgtgagaatatcactgctaatgattgatgtgatt

SEQ ID NO: 189959 - DNA, 368 bp, Glycine max
ttgattgatgaacttagtagagcatgtcttgggcatccctttgtctcatgaaggcaacccgatcgcaacacttcaacaacatttataaggatgatgactcgggatccgtatgcttgcatggatatgttatatgacgtgagatgccgataaacatcatttctatttacatgcatatgtaccatgctcaatcatttgtttgtagggggttttttttctgaaaatgggttatgatccaaccggttgctcatggacctacactgcaactaaatgtatgtgaatttcaccttctttttgctttgtttgtgaggaaaccgagacatgccgacaacataaacaaagggtgcatttgttatcaaaaatttgtgaac

SEQ ID NO: 189960 - DNA, 465 bp, Glycine max
agcttgaagaggaggataaagctccctagcttcttaattctcttaccaaaatcctcgaacagttcaaggatgcaattctttatggcttagatcaagacattaccctagaagaagtcttgacctcaataaggaccaaggagatgcaaatatagcatgactccaaatctgatgattatggtgaatgcctgaattttcaaggggaatgaatgaaaataacggaacaagaggaattaagtccacatcaaggttaagggattcaaagaatggccagaaaacaaagttcaaatgctttaatagttacaatactggtcttttctagatagactgcccagacaagatcaagaaacgatctttggactcttgtgacatagttgaagcctctgaaggttatgagagcgcatgtgttctaatatcttctataccaacacacatacagaatggatagggattctcgatctcatatcc

SEQ ID NO: 189961 - DNA, 395 bp, Glycine max
taagctttggtgaaagcgcatgcattaggtgtgggaacatctcgtacttttttataaaacaacccggttgttgcttcttgaagatagtaactcggagcgtctctaacctttgtttacattaattacatcttttaaagccatatgctaatgacacaaaatgacacttatcattggtgtatggaatgaacacccaatgtggtgtcataaaaggaaacaaacacctcatatgcaccctggttcatagactgtgtaaaaaagcaaaacatcccctttcactacatatgatatatggctattccaagaacacaatccgaagacagattctcttcatgatagagaggaagatataaggctatccaataaacatatcgacctaaaagcacttcatgagttga

SEQ ID NO: 189962 - DNA, 481 bp, Glycine max
  unsure (1)..(481): unsure at all n locations
agcttatatatatatatatatatatatatattcttccctttatcatcgcttcttggacctcattattnttgtcctgcacccaaaattttttaatatccccatcttatccttctcccctcgctgaacctcttcttctctccatcttcctcttcttatgtctcccttcctctctcacccaatgtacaataccaacaagtcttatgcaaataccataagagtatgtttggatggaaaattttaaaattctaaagaattttaaattctgagaatttcaaatgcttcaatttaaatttcttcattnttaaaatttcttattttgataaaataatcaaatgcatctttaaaaaaaaattatatttgaataaaaaccaatttttaatacaagaattattcntgtcattaataaatcttatgtactatttcgcaagtgtggtattccaataaatatgtactactttaatctatntcaattaanaatata

SEQ ID NO: 189963 - DNA, 454 bp, Glycine max
  unsure (1)..(454): unsure at all n locations
ctaatcttagatnttngatgatctaccttgncacattgnattattttttctcattttttttcctcaagtatttctagggaccacaataataatgtgtaacactgtctctaatttatatttctttattgctatttaaggccatccttgtttttatttcctggaaaataaattgttttcttttggctcctttctttaattaatgaaagtgtgccatgtaatccttatttccataaatgaatgaccaaaacaagatgattttttttttttgaaagacaaagattacatttgaacattttcataaatgaggtatcaaatggagacaatgtatttttgagattaaaaatgaatattgcattatttactggggcaaaaaacatatttaaacctaccaaaatatgttttcatgctaaaagtttattattgtttcctgaaattgataatgatcaacaagatc

SEQ ID NO: 189964 - DNA, 457 bp, Glycine max
  unsure (1)..(457): unsure at all n locations
agctgtataagtgaattatgtgttcctctccctaagagtcctctcatgaggaggaggttgagccatgttctcggtatgaaaattagtagtggaatgctcaaaattagaatattcagaatcaccctcaacagaatgctcaaaatgcacagaatgaccaggatgcaaattatgcctaactaatctatgaaaggttctatctatttcaggatcaaagggttgtaaatcacttggattgcccctagtcatgcactatatgtagcaaataatgtgtttctcaacaagcacctaacaaggcggtaaaactacaactatactcaaacaatatcaaaatgagctgatattttgtgaggaacaccctataatcatgaaaagatagcacaaaaaatntcaaacaataattaaaagtctaactatganaactacctaagcaaagtctagaaatataggacaataatac

SEQ ID NO: 189965 - DNA, 434 bp, Glycine max
  unsure (1)..(434): unsure at all n locations
tactcagcttaagctggtagcgttacctaagagtggtaaattttttanatnaccaaaatatccttgattatattttagaataacttagagtatcttatattttgttaagattattctctatatttcctaatatgtcatgatttgtttccatattgactattagtataaataaggattagtgctttatgttttagtcatactataacacatcatatcaaataaagtcaacatcaataatctcactgtattcagtctcttaattcctattcctctctctctatacctaaatccatatagttttaacacacgtaatgtatcagttcacactagcataaatttaaaaacaaaatccaaatgatgatcataagtggcgcacatggactgacatgtaacacaatatatacatgcttccattcttccctatattgttcatg

SEQ ID NO: 189966 - DNA, 472 bp, Glycine max
  unsure (1)..(472): unsure at all n locations
agcttataataagaaagagatgtctaaaacttttaatgnngtagaattagnnnggaaggttatcctgcccatagatagtaaggatcgagccttgggcaaatggtccccaaattgngaaggaccgtttaaaataattcagatttattcgaatggtgcttatgaattagaggaattaacccctcagaaacgtactttgagtataaatggtaaatattttaaaaaatataaaccaacattgctcgaagttaaaataagcatagaatagacagaaataatggaaacataaaaatggcgataacagtaaaattgccacgaaagggcatgtgtcaatattacatcaagagtagaatcgaaatacagaattcgaaataaagaaattataagttctactaatgcatgactaagtcctcatatagtttcttcagggtggccatctctntgctcaagacctggtcagcactctccatagctc

SEQ ID NO: 189967 - DNA, 380 bp, Glycine max
aaaactaactatggttgaattactgtgtttacgagcttttttttgtcaacaatatcctgattgacggtctggaagtcaaactcagacacaggtcgttctcaaacagaccaatggcttgcacccacattccggtgaagtgaataacaaagatgcgttgtgaaggacgaggacaagattaacttatccatttatttaacattgaactgggttacaataatggtacaaacttgaaaatcctgagagcattagagacatctacaacagctttcaaattgcccatgtgtggatctttgtaatgtaagatttaacacgatctcctaatttcagcagccgcataattaacctgcacctaccttaagccctacatgtcatggatgccc

SEQ ID NO: 189968 - DNA, 471 bp, Glycine max
agctagcagaatatagagaatatatgacaattgttttggatcttgttagatgcactacagacgaagaagagaacgtgtttggttacaaataaggatatcaaagagagatgggatagttacttttacaagtatttcaatcatggtcaagggcctcgtactaatatggaggagttaaaactccaagatgaggaaagaagttggtattataaccgaagaattcccattacagaggtcaaagaatctcttaaaaggatggaaaagggtaaagttgttgtgccagatggtatccatattgaagtttggaagtgtatggggaacaacgtttcatttggctcactatgtctttcaatgagatgttgagatctaagaagatgtgagatgagacgaggaatagttctcttcgcccaattcttaataacacaggagatatccaaaattgtgctactatagatgataaaatatgagcccact

SEQ ID NO: 189969 - DNA, 360 bp, Glycine max
cttacatgtgacagtggagttgcagctcatactcatcttttttcttctgcatatatatatatatatatcacatgagtggatcccataaaacatcataaatgatgagacttagataaaaaaaaaagataaactaatataattttttaaaaggatattgtatggtttcatatactaacttctcttataatagcatccttttattctcatttgtagattttaacaataaatctaacattatatattgggtctctaattaactctaatgaccataattatctcatgatgaatctaatacatgttcaaatgtgatgtaatattaagcctatactcagagagatgtatatgtgacattctcttatt

SEQ ID NO: 189970 - DNA, 436 bp, Glycine max
agctagcagaccttattctgtcctgacacttttgttctcttgttcatacacacttcctttagatcctcatggagaaatgcgttattgacatccaattggtgaatgaacccattgttgatagataccaaagccaaaatgtcgaactcggattatggttaactttgccattggagagaaagtattatagtaatcacacccttaatatggttgcaattaacctctggtcaccaaccgagccttgaacctagctcttaatagatccatccagtttcctcttaatgttgtacacccattggcagacaatgggcacaacattggcagagggacggatccaggaatgcattataggaggttgggggtcgatattttttacataattatgtcacttctaataaataatcatttgataataaaagacttaatatgtttttggtcc

SEQ ID NO: 189971 - DNA, 446 bp, Glycine max
tctattgttgaaaggtatatggctgaataatgtatctgttcttgttcccaatacatcgaaggtggtaaatctgtcgggctgtctgaagatcatcatggtccaaatcatgggtaagggtacacgatgatacaatgttgtcacaatgacttgacaggaggtgtcacaagcgcatctctatgtattaaacaacacagcagaggtcattccatacatatatgctcacaaaaaagaactcataacaatgaacctaaaactgaacatgatgagggcttttcaagagcacaatagaagtttcattaactggtttagagaaagaatatttcttgatgatggtgcttacaaaacattaaaattgttagctggtggaccaaatctgaatgtaccggcttgtaaaggtatgatatcaatatatattccttctacaccaagtctcaagatgacaaaac

SEQ ID NO: 189972 - DNA, 467 bp, Glycine max
  unsure (1)..(467): unsure at all n locations
agcttggatgctgctagatcaaccttagcttcttgttgatgccattagaatcattgaagacatgtgctctaaccccgacaacaactcaagggatatgaggattatgaagaaaggcatcaattagatgaggatggattaatcccaaactaaattaggaaagcagatacacgctctatcactgaagattgagacacccatgagagcttaagctcaagtccccattacaaaaccttcattctcaacctataataaatgtgggattatgcatgttccaagagaatgcattattgatgaaagctagtggcaaccatggatgagatcaactttgttaggggaggaaataattcttatagttagtaccccaacaatctcaatcaaaaatatggcttcacgcagagtcatggaatgtntatgtctcaacctattgataacttgtcattataggtatatttcgcgataaattatat

SEQ ID NO: 189973 - DNA, 437 bp, Glycine max
  unsure (1)..(437): unsure at all n locations
ntcttgagaaaacttccttgagaagcttctttgttaattcttccttgagaagctagagcttagctacacacacccctctcataactaagctcacctccttgagaagcttccttaagaagattcctaaagaagctagagcttagctacacatacctctctaatagctaagctcacctccttaagatgagaagctagagcttagctacacaccccctataataactaagctcaccccatggcaaaatacatgaaaatacaaaaaaaatccctactacatagactactcaaaatacctcgaaatacaaggctaaaaccctatactactagaatggccaaaatacaaggcccaaacgaaggaaaaacctattctaatatttacaaagataagcgggctcatacttagcccatgggctcaaaatctaccctaaggctcatga

SEQ ID NO: 189974 - DNA, 465 bp, Glycine max
  unsure (1)..(465): unsure at all n locations
agctnttcatatgggtaataggctcacatttactntcttctacatcatattcaaacttgtccaaataaataataaagtcatcttgactcatagaaagtcatataagtctcatacaattaatatagaacctatatcctaatgtcacatcctatcagagcgtggtgttcccgtgtcctctagcatgaggttcttcatagtcatccacctattcatctgctcccccgaacacaagttcaagatcatcacaagatccaaacacaacaacacacagggagtgagttatcacattcctagctaatagagaaacaagacaattaaatatacatattatataaatgagataccacttgcttaaacatagttcacgtaacttcaccacttcgtcattcaaaattcacttttcaattatcaatcacattacacaaaaatcccacacttcgatcaagatataataacacatcaatt

SEQ ID NO: 189975 - DNA, 412 bp, Glycine max
ctgcccaattaatggtatctaatgtaagtatgcttgtttcatccgtagctcaacttgaaaaggatcgtaatgttgagattgtgatagataagatgatatcttctcttgcaacagttgttactcgagagcaagtattggatgattctattagtgggaaaatagtttatattgaggaaggcactatccatttaattgaaaagtataatcagattctttctgatatgtatcaacttgggcaatctttctctgaggtaggcttggatactaacgagcatgaatacgggaacatactcgctgatgctcgtggtgggttactggagctcaataaataggaaacagaattgggtgaataaccggctcatcttgaagatgaatatcacaaaatggttgttgaacttgacagggaaatgtg

SEQ ID NO: 189976 - DNA, 479 bp, Glycine max
  unsure (1)..(479): unsure at all n locations
gcagcttgacaggcagaacatatgatcctatatgggtaacgcacangatctctgtgcccanaagggttcanaacttcaaggtggagttggaccatttgggcttctcacattagcttctcaaaattttgaggagttcactcctgtgttttttagaattttcaaaggtccagataagcatgtggttctcttatgctcagatgcaagaaggttagtctataattcaaattgggatgaggatttctaatttctttctatttttacatctttgatttttttattttattttattttgacaattctgaacagttcctctttgaagagtagtatgtacaagccatcatttgctggttttgtagatgtggatntggccactaaaaggaaactctctcttatgagttnggtatgtgcaaatgcaaccattgctccatttattgcttacatataacatatttatgagctccagacactanatcaatgtc

SEQ ID NO: 189977 - DNA, 438 bp, Glycine max
tggaaccacaggttataagaagattgaaatcattacttgttgtgattacttgcttattgttaaaattcacgtatgtggaacaaataagatagatatcagcctatctgtcataagccaatgtctggaaattcatatatacaaattttcagagtcttttattgtcagaactattcaaactgtgtattttagggggcaaatataaataataatagacaatacatcattagctaagcagttaaagaaacatggcatcaacatatgctattgctatcatttgcagaacaaacaaacctttaacatcacaaataagcacacaaaattgaaaacttggaaacaaaattgcaaaaacaaaattcatgactaccactggatatgtagtatccaaaatacacccattttggaatattcgattatatctggtcagtgcaatgtacatta

SEQ ID NO: 189978 - DNA, 480 bp, Glycine max
  unsure (1)..(480): unsure at all n locations
agctntgaggaatccaacagaatcaccacaatgatactcctcacaatgggaatagtagccctcaattatccaagtcatgacatggtacctttggcacgcctgcgctatgacaatctgaaaagatgttggttgtatgggtgagcttccggtctatgcacaaaccaccaaacagatggtccttaaagtatctttgaatggagaaatttgatagggtaattcaattttttaaaggattttattacttttcaattaaataagatgtttggataaaaatttgaaaagaaattgaaattggagtattttgataaggaattntagttaacttaaatattatcctctcggttctcttgaatccgtggttaacccctttcaaccaaccctggctactgaggccatgggtgctggcagcttcacgctcaacatttcacgcgttaacggctctgtcgcaatcaacactggcatcgttcagggctcaattac

SEQ ID NO: 189979 - DNA, 451 bp, Glycine max
  unsure (1)..(451): unsure at all n locations
tactaagcttncattggtcaatttcgagcgtctcgatatattatgcgcctgaatctgtctttcgaagtaaaagttatgaccatttgaatttctcgagagcttccgttgctgaattggagcgtctcgatatattatgtgccggaatctggccatccggagttaaaagttatgaccgtgtgaatttcttataagcgttcggtgctcaattttcgaccatctcgatatattatgcgcctgaatctgacatccgagttaaaagttatgaccatttgaatttcacgagcgcttccattgttcaatttctagcgtctctatatattatgcgcgtgaatctgacatccgagttaaagttatgaccatttgaatttctcgagagattccggtgttcaatntcgagcgtctctattattatgcgcctgatctgaccttcgtgtgataactatgaccattt

SEQ ID NO: 189980 - DNA, 431 bp, Glycine max
gcaagcttctcaacgaagttgtctcaagagagcttctcaaggaatctacctattttataaatagaagcatgtgtaacacttgtggtaactttgatgaatgacagtcttctgagacacacttcagagttccactcctctccctctgttattccttcaatttcgtgctcccccctctctctttctctccctctttcttttcctccattgaagcatccttccaagcttcttatccaaggctcatcttggtggtgaagctcctttttccatggcttattccttaatggatggcgcctcctctcacctcttctcctttgtcttccactgcatctacatggtggaaaatcaccattataggacttcattgaagctcaaagatccagcctccatagaagccccacatgcaagctttcatcaacatggcacctccacta

SEQ ID NO: 189981 - DNA, 429 bp, Glycine max
ggtccaatagatgtaactggcaccttttatgtcgattctgtatccatctctaatgccggacgctcactcttttttttttgtgctattcctcatcttgaaatccaaacacttacactgtcgccatgtatgtgggattcctaccctgtggatatcttatgctagaacgcctaatccttaatagccatcgagtggattaccctttaatgacatccatgcaaaccccttgttagtgcttagctctactgaactttaaaagattggctaaaatgttggtaaaacataaacacttatacatcgaatgaaagctggaatggctgcacatgatgactatacattagtcaaggaaacaaatcgggctgcacaatgcacaaggcaagataaatggcaaatgagaaatgaagctgcaggatacactatgtctgatacaat

SEQ ID NO: 189982 - DNA, 484 bp, Glycine max
  unsure (1)..(484): unsure at all n locations
agcttatgtcacctccttggacagcaccaatatacctcatatcttccatgaagcaatccaagtggcaggctgctgttaaagaacaaatcaaggctttggagatgaatgagacttggaagctctcaaaattgacagaaggaaataagccagatgaatgtaagtggatatttttgtcaaatacaatgttgatggtagtgtcagcaggtacatggcctccttggtggctaaggggttcacccaatcttatggggtggactgtgaagaaacgcctacactcatggcaaaactgaattcaattcagatcctcctctcctagtaaatatagattgaatcctataccaacaagatatcaagaatgctagtagtgcagaagttgagttcaaatctatgccccatggaatntgtgaaagaatgtggctacaaatgatgcttgaggagcttaaagttccaactaattataacatgagttcatgagtttgttatg

SEQ ID NO: 189983 - DNA, 451 bp, Glycine max
  unsure (1)..(451): unsure at all n locations
ctaagcttacttgttaaagaaacttataagatgttcaaaaccaactcctgtatctaatgatcttcctttgttcaaagaaacttataatgtactcaaaacccttgtcaaacataaaatcgtgattcanaatacccattttagtggttcaaagatttcgaagaaaatggccgcaaacatttcaagatatcaggctattaattaaattacggcaacggataagtttatccagtgatatcatacttcatcattttttttaatacttaaaacatgtaaaataaaaatctaaaatacttcataattaaagattaacttaaatatatttttaatgtgtcaaatgtgactcatttttttttaatcctttaaatttgaagttcattttttagttctcgaaattcgcaaaatattctttgtagacttctacaaagtgtgaattatacagaaaataagatat

SEQ ID NO: 189984 - DNA, 346 bp, Glycine max
  unsure (1)..(346): unsure at all n locations
ttgggagctactataaagatgttaaaaggagcaccatctattacagtatcttgagatggacgagctgttaggtgcgcgacatgtgcacaaccttcggtacgggtctgcgaacacctttctgnttttagaattgacaatgaactcgaccgagttccttcaaaaaagattgggtcttagtgcgcatgtctgaactgcgttagagaattgactatgaactgaacatttattcaagaccagttctgaccaaatatatattacaactattttaaccagtgttacaatcgatctggtaagaacacgagcaaaaactaaacattaaactgtgtttcaaactttctattaattc

SEQ ID NO: 189985 - DNA, 470 bp, Glycine max
  unsure (1)..(470): unsure at all n locations
agctntgtccctganaccctctgtgtaaatctaagctntgtttctgagactgataaggttgctagtgaatacacagcagatttaacagctgtgttgggaaaggacaatattgactcatgaatattttatcctttaactctagagggttgggtagtggtgtcaagtggtcagccatcagaaaaatgaccttgaccaacaatcttgatgttctatgtatccaagaaacaaaaatggaagccattgataggaggatatgtcagtatttatgggctgactgtaatgttgcctcagaatgtgccccttcaattaatgctgctggtggcctcctttgcatctggaataatggatgcttttcagttgatagaaaggtagtgtgggcaggatttattctcttggaaggaatatggactaaagataataagagggtntccataatcaatgtgtatgctccatgtgacatccatagaaag

SEQ ID NO: 189986 - DNA, 408 bp, Glycine max
agaatctaatatttacaggggttaatattgacagattctacgtatatattcatgccactatatgtagaaattccagattctctcgggtatttgtttttatacataattaggattttgaaatatatggcaaagatgggaaggaagatgagccatgataacctgttgcgatctatccttaagcagtgtagaacttcattaagaaaggtatgatgaccatgcctgtcattttatctgcacaaaactggctacattcaaataaaataaggaatatttacgggatacataaagaatagagatacaataaattatagataaaataatattgtttgtcctttatattttttaacttaaacttgtgttgcttctttatattttaaaagattgatttgtgccctttaaatgtcaaat

SEQ ID NO: 189987 - DNA, 468 bp, Glycine max
  unsure (1)..(468): unsure at all n locations
agcttatccaaacaggccctatttcanaagtgattaangcattgaagntagatataataaatcagagaaacacagataaaagtaaggtttcagctacagggaatttgtattgtttgataaaaaaaaaatagagattatctccataaagcagagggaaacctatttaaatctcccaaagacacagggtaaaatcaaaacagataagagaaagagatggagttcttcaacttatcaagttcatttatctaaatcagacaagcactgtcactcacatcataattatgaagctggcaatattgattcaatatttcaagggaaataaaataaggagatggagttctccaacttatcaagttcattcagaagatacacacaacgcgggaatggaggggagaagaaaaaagcgatgacttggaagatnggcttaaggcaacggcaactgacagcataaggaatctcatatctcgg

SEQ ID NO: 189988 - DNA, 408 bp, Glycine max
  unsure (1)..(408): unsure at all n locations
ngcacatttaacagcatatatgaatatattatgaggaattgaaagataaaacaggcgatnataagttcttccaccctacaaaaacatatttcatattcaaacagaatggntaaattataaaaatgctcagattaacttcaactatgcatacaataaaaaaaatagaagattaagttcctttaactgttaaaatatatgacttggtgcaaattaaaatatcatgcaaaaaaagaggtgcagagtggggggaaaaaaaaaagatgagattttgctgtcaattgagaaattgtatttatttcccattaataaaatactactgtttcaaaaaactaaattgaaaacagtgcttgcttcttaattcttacatgaggaatcttaactacattaagttatatactagagtcattt

SEQ ID NO: 189989 - DNA, 365 bp, Glycine max
  unsure (1)..(365): unsure at all n locations
agctnttcagattttaaagaatatattgtcttctntnntctacccccgcttcttatccttagtttcctctctcanatgcctccatcatcgttcaattgaaccatttcacccactttaatcgtatgtttggatggaggattttaactggaatattaaaatgccttgctataatgtaatccatttggataggatactttaaaagtaattgaaaggttagcatttttatgaagcgatttaatacactaaattatgagaatttcaaattcttataaaaaacgaaagagttaaaattgctcactcgcgagacacaacacactctttctctactcaagctatacgtcgctttgcaatgtgatctcactcac

SEQ ID NO: 189990 - DNA, 367 bp, Glycine max
taatatagcttttggataaacagatgcaatttatggcttatctcttggttacttgacagattcttgtatgacatattgtgaaatggaataaggagcacaagtcctaactctttcctaatgcctataggagtgttattttgctgaagtcattttgggggcacaatctctattgactattgttattatccaatggaatgcagcatgaatattcacttataaaataaattttaattacaacattaacaaactgaaaaattggtaatcaatcaatgttgtattgagacttttgtggcaatgtgtaatcaatcaatgttgttttgatgatgatctgatcgtatttggagctgcaaaaactcatcttttgttt

SEQ ID NO: 189991 - DNA, 458 bp, Glycine max
  unsure (1)..(458): unsure at all n locations
agctaggttggatgattantnggcattgtctttgannnnggtctcaataatgaattactttggttgataaaggcccgcttgtttgtgcttaagaaagtgatattttttataattcttttaagagatccttatataagtgattatctgatgaaaaatgtttaaacaaatggaggataataaaaagaagaaaattgatatctttcttctacaaaaactgaatttccagaacagcaggtcctatttgctactaaaaagcataaatctgattatttttttacccttgaaaaaagattacctaaaacactgtagaaatttcaataattgatttttttatttataaaaaggcgtttctttagaanattaagaataaaagtttaaagaaatgcaataataaataatcttcttgattgatattgttcaaggtatgataatgtaaagtttgggggtaaagacacata

SEQ ID NO: 189992 - DNA, 420 bp, Glycine max
tactaaacttggatggaatcttaaatatatgtgttctatctaactatcgcctgaatgggatgatggtggttaataagtataattttagattgatcattgatccatttggaaattaaatatacgcaatacacaaatgaagtatttaaaaatattcgtgacccaataatcatattatataataactcgataatgcaaaaggcgaacggggcttctcacaatttcaatataaattacactgagaaattaactcaagacatcaattttgtttttttattttcgtatttttgaaattacaaggatctattataggaaataatttttttcagcaagtaaaattatttggaaacaaaaccttttttcttatggcatacagaaaattaatggtcgctttttaaatgtatatctctctctaaaaaatat

SEQ ID NO: 189993 - DNA, 454 bp, Glycine max
  unsure (1)..(454): unsure at all n locations
agcttgtaatcgattacacatatactgtattctattaccagagcagattntcagaatatattctcaacaatcacatctttttatgtggttcttgaatggctatcaaaggcctatatatatgtgacttgagacacgaatttgcgaagagtttttcagaacaaaaaggtcttatcctcttaaaaagcaaaatcgttttattctcttacaaattccttggccaaaacacttgtgattcaataaggaattatttgagtgctcanattgttcaatctatctctntcaagagagaattcttcttttcttcttcttcattctgaaaagggattaagagaccgagggtctcttngtgtgaaagaattctaaacacaaaggaaggattgccttgtgtattagaacttgaaaacgaattacatatagtgaactctaagcgggttgttgggactggacgtagcac

SEQ ID NO: 189994 - DNA, 424 bp, Glycine max
actaagctgcttgggagcttcatggaggctggatctttgatcttcttgttgtccttcaatggtgatttttcaccatggagatgcagcggaaggcaaaggagaagatgagaggggaggcaccatccactatggaataagccaaggaagaatgagcttcaccaccaagaattgccttggataaaaagcttgaagaggatgctttaatggaggaaaagaaagagagaaggggggagcacgaaattgaaggaataaaagagggaaagaagtggaactttgaagtgtatctcataagattttcattcatcaaagttacaacaagtgttacacatgcttctatttatagactaggtagcttccttgagaatgtttcttaatataacttccttgagaagcgtctttgagaaaacttccttgagaagctaga

SEQ ID NO: 189995 - DNA, 481 bp, Glycine max
  unsure (1)..(481): unsure at all n locations
agctnngacacctctatgtctctacctttcatcacaaactctggtggntgtttgacaaaaacttcttcttctagtgagccattaagaaatgcaaattttacatccatttggtgtacttcccagcaattgtagctagccattgctattacaagtctcattgtttccaacctagcaacagggacaaatacttcatcataatccagaccttgcttctacagaaatccctttgcaaccagtctggctctgaactntgttacttctcctctaggattcaacttagttttgtagacccattttactgctatggctttctttcctgttggtagctntgtgagactccatgtcttgtttctctcaatagacctcagctcttcttccattgcttcaacccaatgtgagtgcttcaaagattcttccatgccaataggttccatctcagcaagtaaggccatatggacaaagtcaccatcagctgtaatca

SEQ ID NO: 189996 - DNA, 414 bp, Glycine max
  unsure (1)..(414): unsure at all n locations
cagcttaacaagctcttatggcttatattagtcccaaagctgtggtttgacatgttaaaatctactctactntattttgtctttgtgggaaacaaatgtgattcttctctactcatctacacacatcataaacatattgtctatcttttaatttattgggatgatatcatcatcataagcaattctgtctctcttattcatcagctaacttctaaactaaacattgccttctctcttaagcaattcggtcatttggattactttttgggactagagatcaaataccctcctaataattctatactaataactcaaagcaaatatatttgtgattttcttcacacaactcaaatgattgaagcacattctatttccctttccatggtttctaactgtaaactgtccaaacatgtg

SEQ ID NO: 189997 - DNA, 370 bp, Glycine max
  unsure (1)..(370): unsure at all n locations
tacatatatncttctcttaatatatcttcatctgtctctatagtcggatattgtctgcgaatgaggcctcntatatctaccaacaaatcctacgaaaaaaaacatcagtgtactacaatgagataataacattgacgcctcatatatgcgactgatactacctgtgattgcaattaagttatttttaaggttacaaaaatccaatcaaaatgaagagagagagactcaatactcacttttttttttaaatggtggattttagagacccaataataatgggctccccaggagaaaggttgtttgcaatgaaaaaagaaaaaatgtgtgtgtggggtttggattggctcgagctgctcctatttggagccca

SEQ ID NO: 189998 - DNA, 457 bp, Glycine max
agcttatgacaattgaatttctcgatagcttccgtctttctatttcgagcgtctcgatatattatgcgcccgaatcggattaccttgtgaaaagttatgaatatttaaatttctcgagagcttccgttgttcaatttttggtgtcttgatatattatgcgcctatatctgacatccgagttaaaagttatctccatttgaatttcccgagagcttccgttgttcaatttcgagcgtctctatatattatgcgcctgaattagacatgcgagctaaaagttatgaccatttgaatttctcgagagcttccgttgttgaacttcgagcgtctctatatattatacgccaaaatctgaactccgtgtgaaacatatgaccattagatttctcgagaggttccgttgttaatttcgagcgtctcgattatatgcgcctgatcggcatccagtgaaagtttg

SEQ ID NO: 189999 - DNA, 430 bp, Glycine max
  unsure (1)..(430): unsure at all n locations
ttagagaaattcanatggtcataacttttcgctcggatgttcgattcatgtgcattatatatcaagacgtttgaaattgaacaacgaaagctcttgacaattcaaatggtcataacttttaacccggacgaccgattcatgagcatcacatatagagaagctcgaaaatgaagaacaaaagctctcgagaatttcaaatggtcataacttttcactcggaggtgcgattcatgcgcataatatatcgagacgctcgaaattgaacaacggaagctctcgcgaaattcaaatattcataacttttaactcggatgtcagattcaggcgcataatatatagagacgctcgaaattgaacaacggaagctctcgagaaattcaaatggtcatatactttaacatggaggtgcgattcacgcgcataatatatc

SEQ ID NO: 190000 - DNA, 500 bp, Glycine max
  unsure (1)..(500): unsure at all n locations
atctcagagtcacctgcggcatgccaagcttgtaagtattgttggtatagttggcctgttccattantctcttaatgnncttagagggtatttcctcgttgacatcttttgtcttgaatggaattgccatgacaggtttattgttactgtctttgatgtttggtagttgatattgtgttgcgggaggtaattccgattggattaactcaccatccttcacttgccaatttngtatgacatttgttgttggatcacctatgatgtcttgtttccaagggtaatctatatcctttctgatggcataagcatgaaaccaatcaaagaaaaggacattaattttgactctctcgacaaattcatagaacttgtcttggatttgttttctgtttgtacccttgtaatgttggaaaaaccatctcctttgaggttcattctccggagaataaatatctttccttaagggttccttatcaatgctaaagttgtcagataaacatcat

SEQ ID NO: 190001 - DNA, 430 bp, Glycine max
cgacgcatgaagaaccacacagatgtttgaagacttttgtttcgttttacatgtgatggattggctctgtgtcatgaaatgtcatggtcaccaccatcaattggacctattttgatggcaacaagccattgtcaagaacagcccccctatggtaaaaaatgatcaatctctactaaagaaaaccctttttaggcatgtgggtttgtttacgcattgcttacactttaatgggtgtatggatcagaaagtcagctgagtcttgcattggtgcatccactgattatgggactcgatgaatggaatataccacaaataaaaacttagcattgcttattgacgtcatgtgccccttccatatgatatgatctgcatcatgaaatgtcaagatcaagtgtgtccctccaaatactggctatagttttctctttat

SEQ ID NO: 190002 - DNA, 473 bp, Glycine max
  unsure (1)..(473): unsure at all n locations
acctgatgcatgcaagcttaacactngngctcagctataatatgtatttcattattgggcgcttgntgatggtaccatatcttgaatattgctctgtaacactgttaaaattaatcatgttcaagttttcaaataatgtgtaggttggaagccaatttaactggcgtgttgcattctgggttgaggcacatttgatgcttccttttcccattttgggttttgtaataaagcctttgcaattggaaggtgaccattttcttctgtttgatgtgtttcagaatagccattaatttttaatccctatcatagtaatgcattatttgcgaatatattatatatcttcttatgatttttttaagaaacatattttcttatgatacttttgcaatgcactgggagaaatacttgccttcaatattattttcgtaatatcacctagctcgggagaagattcaaagacttgacaaattctt

SEQ ID NO: 190003 - DNA, 321 bp, Glycine max
gccctaccacagctaggactactttgtctttggttggaacccttatgatttattctaaacatctgcgacaaactactatcttcttatttcttatttgtagtgtatatggagactgcaactgcttctaaatacatgcatgtatttatgtgactagatgaatcgaaaaggaaattgctatactgggataagcgtttcgatattattagtggcattgctcgaagactccaggatgtctatcaacactctacgtcgatgagtattcacagagatctaaaaactagcaatatttctctagatgaaaatttggatcccaaaatatct

SEQ ID NO: 190004 - DNA, 476 bp, Glycine max
  unsure (1)..(476): unsure at all n locations
agcttgtagtatgannatntgtaagacttatttctctcctcnctcttaagttattaaggccacttatcctataagtggtgtcagagtagtattcttgtttaaaatttaaaaacttcaagaataattatggcctcatctgactntccattttctgagggaaattctattaataggcctcttgttttcaatggtgagggttatcattatggaaaacccgaatgcagatctttgtagaagacatatatttaaatatatgggaagccattaaaattggtcccttcattcctacaatggtagtgggaaatgcaactataaaaaaacctagaaaagaattggatgatgatgaaagaagaagggttcaatacaatntaaaggcaaaaatataatcacttctgcattangcatggatgaatatttcagagtctcaaattgtaaaaatgcaaaagaaatgtggaatacattacaagtaacccatg

SEQ ID NO: 190005 - DNA, 423 bp, Glycine max
atatagatctaagatataagtgtgataatgttatttattggatggaaaccttcttgagaagagaatctatatctgttaagtaaaaaacaacagagatcttttagttgttgaaagtgtagcaagtggctgacaaaagttgtaacaatgggaataattggtctatctgtacctaagtgtgaaatctaatggtttgttggtacaacagtggctggttgtgtttgtgaaaccttctcttgaatagtaaggactggacgtaactcaaggttagggtgaaccagtataaaaatcattgtgcatcatcttcttactctttctctcaactaattgtaatatgtacaatgttcactgcttttgttatcactaacgcagaatactcctttgaaaatactctgacactaaacactattttttatcgatatcttt

SEQ ID NO: 190006 - DNA, 476 bp, Glycine max
  unsure (1)..(476): unsure at all n locations
agctntaagagaaaccataagaactaaggtttttcctanacttatatcaatggaggaagcttcgccaagtatccctattgaaaaacctttattcatacctttcaaagttagtgagaaggctaaacgaaaatttatggaacttanaaaaactagatccttaattgaaggcgtaggtgataaccatagtgaattacttaacaagattggtagtttacttaaggtcattccagatactcctcaagcctcggaaaatacttccaaaatggtaacaagaagtaccttcaaattaattaatgttattaatgaagatagtgaccaaaactcagataacacaactgagatatgatcagtgtcagaaaagaatataaatccaattaattccaaacactggaaaacacccttcaagttatattatcaacgtccaactgcccttgacctactattagatgaaagaagtgataacattttcagagttt

SEQ ID NO: 190007 - DNA, 402 bp, Glycine max
taccttcacaaacacataaacacattactccattattgcatcattctgtactctatttgaaaatggaacttgtactctgtgcctgacaagactgctgaccctttcacctgatagttcattgcatcaaatagacaaaatatatcataagatataagtctcaaagttcataaatttagagagccacacattcaaaataagcaactaaccatgaatgcataaacaaatattgaaatatataataccactattatgtgtagtgcagctttccaacttttgtacctaactgaaggagacttgtcaatcacttgagagcctgtagcagatgcaatactgtaattaatgaagcttcattgtgagaactgtggtaaaacctatagtgacagacaatgagtcattattata

SEQ ID NO: 190008 - DNA, 424 bp, Glycine max
  unsure (1)..(424): unsure at all n locations
agcttctcanagatgtacttgaccgggttcattttggatatcagnccagggggatggctcagcatgtactgtcttagatggtgggatgcccagactaaagcacaacacgttctttccagtagggagtagttcatttcacaggccgtgaacttcttactcaagtagtagacggcgcgctctcttttcccagactcgtcatgttgccccagcatacaccccattgacttgtccaaaatcgtcatatacaagatgagaggtcttccgggcaccggcggcagaagcacgagagggtntatgaggcactgtttgatcctcccaaacgcctcttgacagtccttgtttcaacggatggaatggttcttgcataagagcttgaacaacggctcacaaatggcggtgagttgtgatatgaatctagcaatat

SEQ ID NO: 190009 - DNA, 427 bp, Glycine max
tgtaagaagtgtgtacgtatagggaatatgtatggttcttctacaattgtgcagtgtatttattatgaatacaaaatcattggagtaattttaatatggcagtggataagtcgtatttatttgtacactaagtggaagttgaaaaggcaatcgtatatgagtgtaagcacgaatacaaaatgtgcatggttggtccagggacttggaaaatattttcattaaatcacattgaataaaaaaaggattgaagttgtaattatttgtatactaagtggaagttgagaaagcaatcgtatatgagtgtaatcacgaatacaatatgtgcgggggtggtccatggagttctaaaacattttcgttaaatcacattaaatataaaaggatttcaatttaattaaccataatatggatttgtatgtggatgtcg

SEQ ID NO: 190010 - DNA, 452 bp, Glycine max
  unsure (1)..(452): unsure at all n locations
gcacctgcagcatgcaagctatacaagcctagactagaatttaatttatgtcttatgcccangaaaggagtcaaagtaatgaatgatgcattccgcccccccncccacccccccttttgagtttcccataagggtagaactcatgaaccataaaacttaatgtctgtaatgaaggagaaattaaactcatccaatcctagattggtgttgccatcactatcccacaccgctccctttatttccttttctacaaaaggtgtttctagcaattgattctccatgtcccaatgttattgaaccaaactccacccaacaacaaagatatatcaacattctccttgaatctctcgataaagaagaatattactccttacttgacaagatttggatcatccatcattacataggtcatgcacactgtgacaccatttacccctcacatatatactaat

SEQ ID NO: 190011 - DNA, 445 bp, Glycine max
  unsure (1)..(445): unsure at all n locations
taagctntatgatgatgaatcatagatgatcgaagtttttttgattatgtctattgatgangacaattaagcccatagaaatgatcttcatgattgatttcatcacaattcaacgatcaagaagtatgatattcatagactcaacgagaagaatatgatgaatatcctcacacagggaacgtattgaataagatgttttcatataaccaaacatatgcacacgttttgtttgttacaaagagcttttctctcaattttctaagctaccatagttttttactctctggtaatcgattaccaattacctatattcgatttccactatcaaagttcgacttcaaaagactttaagtgaatttgcaatgttccaattgattgtanactggtgaatcgattaccatatatattgtcattgattaccagtgtttcttgaccgttgaaattc

SEQ ID NO: 190012 - DNA, 449 bp, Glycine max
  unsure (1)..(449): unsure at all n locations
agcttcaccacctcagccattgcctcctnngtactcataaagaacgttgaattctaacaagaaaacaaaatcaaaagtgcctcgttggtagtagagaatgaacaaagaaggcaaacttatctttcagacaatctctaagagaaatgctattctcacccaattttttcaggaattttggagagaaacaaaaaaaaaagatgcaaaattataaaacaatacaaaaacaattagcagacacccttcagttgaaagaaagcaaaatgagacaaacatagatataaccggtaatattacgtaataggaagagagataaataaaatgaacaatggaatggaaagagataagaaaataaataaattatacaaaagtgttattatgtgttgaaagggtagaatatccaattcgatttcgaattataaagctaccccctatattatctttctttctta

SEQ ID NO: 190013 - DNA, 290 bp, Glycine max
agcttcaacattcaacttcgagcgtctcgttatattatacgactcaattagacatccgagtaaaaagttattgtcgtttgaatttgctcagagattcaacattcaatttcgagcgtctcgatatatgacgggactcaatcagacatctgagtaaaaagatattgtcgtcttaattggctgagggcttctacattcaatttcgagcgtctcgatatatgacgggactcaatcaggcatccgtgtaaaaagttattgtcgttggattggctgagaacctccaccttccattt

SEQ ID NO: 190014 - DNA, 425 bp, Glycine max
ttgagcaaattcaaacgacaataaattgttactcggatttctgatatagtcccgtaatataacgagacgctcgaagttgaatgttgaagctctgaacatattcaaacgacaattacattttactcggatgtctgattgagtcccgtaatatatggacatgctcgaaattgaatgttgaagctctgagcaaattcaaacgacaataactatttactcggatgtctgattgagtcccgtaacatatcgagacgctcgtaattgaatgttgaagctctcagccaattcaaacgacaataactttttactcggatgtctgattgagtcccgtcatatatcgagactcttgaaattgaatgtcgaagctctgagccaactcaaacgacaataacttgttactcggatgtctgattgagtcccgtaacata

SEQ ID NO: 190015 - DNA, 464 bp, Glycine max
  unsure (1)..(464): unsure at all n locations
agctnnagattatagattcttgatcgannctacatattaacaaacaaggggccatgagaaacctaattcaaaactgcttgtcaaaattcaaattcagatacaatttatagataaagattttgaaaaaggaccaaatgtgatttcataagtgattaaagacaaaaaaagataaaagtcaatacacaattgtatgaaagaggcaactcatactactttcgaagaccatatggtcacatacaactattttgaagccaaagagcctacatatagattcacattcgaagtgttcattgcaaggaaagaaattacagcaacatatcttcatacttattgtctccaaaagtctagatagatgatccaattaactcttctagaacttcattactctcatattttcttctaaacataagctatgtatttttagtaagaatcgcatataagaaaatttgattaacatttctttt

SEQ ID NO: 190016 - DNA, 451 bp, Glycine max
  unsure (1)..(451): unsure at all n locations
gcaagctcctctaccgnagaaaaatattatcggtcagtgtttttaanaagaattgcgcaatgtcngcagaanaatatcagtcgtggctatataacgaccgatgtcaggtattttttgttcaattcaatccctgaataatttttggatattgtccaataggaaatgttcgatcggcgtcatcaggtgatgcttgctttntattttagacctgctggaccggtcatctttcctggccgacatcgactatcattttttntatcagtgtcggtgaataatgtttnttggccgaggtgggctgatgttttcttggccgagtgcatgggaacatgccaatgtcggccgaaacacaacctcggttgagctcgcacgaaaaaccctagccgacctacattgtaagttttgtaggcgacgccgaacatcaaaacctcctctaccggataaaactattatc

SEQ ID NO: 190017 - DNA, 450 bp, Glycine max
  unsure (1)..(450): unsure at all n locations
agctttcatggggctctgagataaattttatggtggatgatatacgaacaatgctaggcaatcaattcgtggggctccagactcgatgctggaggatgcatgaatgataagcatttcatagggctccggataagatttgaaggtggaggatacacgaacaacgctaggcaaccaattcgtggggctccagactcgatggtggaggatgcgtaaatgacaaccaattcatggaattccgaaaaagatttaagggtggaggatagacgaacagccctaggaaatcaattcgtggcgctacagactcgatggtggaggatgcatgaatgataagcatttcatgggtctccggataaggattgagggtggaggatagatganaagcgctatgccatcaactcgtggggttccagactcgatggcggacgatgcatgaatgactnagcattcatg

SEQ ID NO: 190018 - DNA, 451 bp, Glycine max
taagcttgatttatttatacattcctttacttgtactgtcaaatgtagtttctatcttctctcacatctctaaaagaagtatcttctctattgaaacgatttatgaaatgacaaagtttgatgagtatgcttcccttatacccttctattaaaatgccttcaaacatagccatcctaaaaaccggtttcgaagatgtggttttgcgtgctgcagattatgccaagtgtcttctattggctttaaatgtaataagctctcatttggctactctctcataaaagagttaggcacttgggaatatgcattgaatgactatcataccctaatttcatttggggaccattgtttgttggcatgcgactttcgcttgactacctcaaaatgtttaaacacctatcgttatgtaatttgtaaagtttcgcaacattccgaaagaaacaataacaagca

SEQ ID NO: 190019 - DNA, 478 bp, Glycine max
  unsure (1)..(478): unsure at all n locations
catgcagcttaccacttatgatcttttgacggtttgtcttttaaaacatatgnatttttgctctgncttgaagccatgaaatgccttgtattgtagtgacatcatatccaatcatgtntctttaaacttcgtgaaatttgctatgcttgtgtaattaaaaagattgaacgattacaaattacaaataagaaaatgaaaatgaggacaactttacacaagtttgaaagaattgaatctgttggtaaccatttatatcattttctcaaacttatcaagcatttttaccctttgcatggatctgacaaatagtgtcataaaaatacctgcacatcgaaatgctatatctatcagccttaagaataatntgaacatgattagacaataacttgagagatagccttataatatatagtcacctgcaccaatganagatccattcgcaatagttatgttgcctttgctgctcatagtgatacca

SEQ ID NO: 190020 - DNA, 416 bp, Glycine max
  unsure (1)..(416): unsure at all n locations
cttttaaatgatgaaacatgacgatgatgnaaattttttttatttttcttctcataacacaaaggttaatgganagggccttatgtatttggtgatctggaatatcatctatttaagagaataaataaaggttccctattcttagtgtttattgatagacatttgatctctatgagatagttggttcattacaaagtattaaagtctatatgacttaccaaaaaaaaaantctatatgaccaantagtctggagttcagctcgtgcatctcccattcttntaaataaataagttgaaattaagcacaagacaagtgaacctgaacatgatgtatgactcaaacccatatagctctagcatgacttgatatgcagattatttaagtataaaatcagtcatttgacttcacctaacaa

SEQ ID NO: 190021 - DNA, 468 bp, Glycine max
  unsure (1)..(468): unsure at all n locations
caagcttggcttctgtaatcaaggttagtcaacaaccagatgttaatttntaaacattntcctggaacattataatctttgtgttctcttgcggcaggagtatattttcattgattctgctactcgattaaaggtattctttcttttgctatagattccattggcattacattcatgagcattatttgaagtcttttacttgttcacatgcagcacaagtcactggacatatttgtggtcaattctttcggatctgggtttcaagtacgccttgcaacattaattgcaatgaatntagtgtacctttcataatctgtaaatggcatttataaccagtatctttttagttattttttttcttcattgctgatttcttaatagtcgcttcatcttgtatgaattcaaatggcattacgcgagttcccaaattatgttngctntctatcttttataggatttcaaaatcta

SEQ ID NO: 190022 - DNA, 434 bp, Glycine max
tactatacttgataaatcacccactcaccttaatatatgtaggatttaattagagtttttcttgcagactatgtttttatattagaaattgtttccaaacttgattccttaacacactatttaacgttttaaaaaatcggggacaggaacgcgtgtttcaaccgcaatatctatgaagcagaatggcaaacatgcgctatcccaaacgataatactcatgacaagcccgttaaccgcgtttttccaatgctataaatagcatcatcaaccatccccatcccttgcgacacaaatttatgatccagcgtttgattcaaaatgagacaccactgtctgcttctcctctccctcgtcttggtctcctacgctgcccggcggtcggaatctgcgctgggcggctggagccccatcaaggacgtgaacgacagccacgt

SEQ ID NO: 190023 - DNA, 461 bp, Glycine max
  unsure (1)..(461): unsure at all n locations
agctngacatgaaatggatttnnttttttttatcggcaaagataagtatatttatatatataatagcaattgagtaccagaggtacacatganatggatntaaaagttgttgcaaaataaggtaagaaaaaatgtgagtccataaatctggcaagcacaataatgtcactcaccatgcatgaacattgaatagacttccctaataagcatataacattctattttgagttaatatgaagtaggaaattccttgttgctcanacatagcanagctaacaattaatctaaacacaaagagaaattgataccttccctgcacgtgtggccctgtacagcttttccagctggttggtgcctctgcatttcgacctcatcgatgaccacaacatctgaactctcataaccactactgctgaactgctttatttactgctgaatacaagtacactgacaaagataca

SEQ ID NO: 190024 - DNA, 326 bp, Glycine max
tcaagagaatattgctaatcggttgatgctggacattttttcctacaagaagcataacggtgatgttgcttgaagaatacacaaagagctagagaagaagaagtatgtattgactttggatgatgttgaagatgccatcaatctgtagccagtgggaattccttatcacgtcaacaatggcggtaaggtaggaattgccactcgactccctcgagtttatagttgaataatgtgcagagggtcatcaaagtcatggaggtatctcctgaggaagcatggtagatgttcagagatactgttcatgccttttatcctaaattgtttcc

SEQ ID NO: 190025 - DNA, 420 bp, Glycine max
  unsure (1)..(420): unsure at all n locations
nnntgcagctagccctagangggatggtacctttctatgtttggagaggatcaataacaatgcctataggttggaccttccagaagagtatggagtcagcaccacttnttaacattctgatttaactccttttacaggtggagctgatattgaggaggaggaactaacagatttgaggtcaaatcctcttcaaggggaaggggatgatgcaatcctccctatgaaggaaccaatcactataaccatgagcaagaggctccaagaagattgggctagagctgctgaagaaggccctanggttctcatgaaccttatggtagatttctgagcccatgggccaaggttgggtccaattatctttttacatattagaataggatgtcattatatttggtccttgtatttanggctccatattgt

SEQ ID NO: 190026 - DNA, 407 bp, Glycine max
  unsure (1)..(407): unsure at all n locations
ntcaacaaatgtcttcacaaataatcatcacacagcagttatcttacaaaactacccctcatatctcccaaaaccccatacccacgaaaatcaagagggaaagaagtccacccaaacctgaaatttcgaagtcccactcgtatccacgcacttcacgaatccaaaaatgctctcctttcacgatgtatggcagaaatggtggccaaaggttgaagctttgcttgaagcttcaatggagaatgaagaagaagaaagctacgtgagagagggagagaaaaggcttctgaatttctgctttggctgagtgatgagagagaaaagctttttggttntaaaataaaaagggtgttcccttttgtccattgatttattcaagctctgccacatgtccctatttgattggagca

SEQ ID NO: 190027 - DNA, 477 bp, Glycine max
  unsure (1)..(477): unsure at all n locations
agcttgcagactataccttcgaccaaacactgtcgtgtttctgtctcggcccggatntaaagcgggttgcaacaccggctccgcttccctaactgtactggaggcggttgccgtggctttgtcctctatggttntctggagttttaacatgacctccgagatggaagccatttgatcttttaaggccgatagatcgaccttcatctgttcctgctcgccctcttcattatccattnttctggattgagtgttataggggtgccttggtgttttcttagttatgatgaaattcctaaagaaataaacaacggtgagtatgccaccaaaacatgagtatgcaaatggatgatcggagcacttggatccacccgaaggtttttagataatgtgatgagtccagaactctctcatttataaaaagaacatagctttcatctagccaagactatacatatgtgttacaagagaacctaacga

SEQ ID NO: 190028 - DNA, 341 bp, Glycine max
  unsure (1)..(341): unsure at all n locations
tganatgaggaagtgtagaatggtgagtacttctgcttttattcgtttaccacagaatggtacctggagatatgtcgcgggggtcatgagaccttgtggacgtcatgtggggtgcttattcccaaaaccatacttgaccaatcccgacccaaaccatgcataatcagttagtgagaacctgtgatgtacctaagcatgcgagctcctggcagtcaacaaataatatgaacaaagaccacaaatctatgatgcttgtgtggtggctggccaactatgaaacttgattgatatatgggatattgcctctggtaatcgataccaagggtgggttatcgattaca

SEQ ID NO: 190029 - DNA, 466 bp, Glycine max
  unsure (1)..(466): unsure at all n locations
agcttcagaactgtactactgttatnnnttttttcgatcgctaaacaaatatatttattaataaaagggcacgagatattcatacaccataatttcagtgtgcgcacgcacaccataaacataaaatgatgagtgtacgttgtaattatcaagcaaattataatataatagtaagtacgtaatatattaccactcaatgagaaaaaccaaattacttacaattgcttttattttttaggtgaaccttataattgttacatctagacgattaaaacgtaaacacaatcatatatatatgtaacatcccacaatatatatcttataggtctgaaagttctttatgatataaactatatatatttataacattttatatttatgtaatctttctattattacttcgatgattaatgttataaatactttaaatacatatatatataaatgattagataatttacccata

SEQ ID NO: 190030 - DNA, 437 bp, Glycine max
  unsure (1)..(437): unsure at all n locations
tcccttcctttcttataaaggggatgagtgatgtttttaatgccaaccctcctggtatctgaggttcacttaaaattagtgagaaaaaattgttcagtgaagaaaatccaagccgatgcgcttctgtaacgctgccgtgatgtttctgtgggtgatttcgcgaatatcttcaaccgttcttcgacgttgttccgtcattcttcgttcattcttcgctcttcaaccggtaagttcccgaaatcaaaccttanaattcattctatgtacgcttagtggtcctcgattgtgtcatgtgctgtatttttatctcatttacttgtcgtacccgcttttgacgtgctctatccatttatcttagtcattttctcacctaatcataaatataactaattttccacttgtcatttggcttataacatcccttatattcctggtac

SEQ ID NO: 190031 - DNA, 474 bp, Glycine max
  unsure (1)..(474): unsure at all n locations
agctagttatgaaagacttcttatgtatgcattatgatatttgtcagtctgatgcttagaacgttctaatgcaaataagtattttaggaagtaactagcataatgtaaaagaggaaggaaaagaagattcaatgtagagatttttatattggttcaccccaaccttgggttacgtctagtcctcactttcaagatgagaatttccactaacacaaccaacaacatattagaccagccaattgttggatttttacaattgctaaccacctactggactttcaaactagccaattgctagatcagtaacccatatgattttcaccttgctatctaactactggactntaaacatctcctcaccacagcaccacactaggtcttggcttggagataacccactcagccactacacctacttaatcattggagagacaacacaagtatttgcttcaccttgttaggctacataagtat

SEQ ID NO: 190032 - DNA, 428 bp, Glycine max
acttcttatccaaggctcatcttggtggagaagctctttctttctgtcttattccctagtggatggcgcctcctctcacctcttctccttagtcttctgctgcatctccatggtggaaaattaccattaaatgacctcattgaagctcaaagatctatcctccatagaagccccacaagcaatcttccatcatgaagtgatttgcaaaatcaagtcatgacatatttatgggccagaattttgatgaaacacttacctatgtgaaattgatacacctcgaatgattctcttctatttttgttgaacccaatgcttcctctaaatggtcgtttatatacgaaatgcttacatccaaaatctcacttatggtcatgaaaaaattcatcagcatactctccttcctcgatatacacattgtttttcatcca

SEQ ID NO: 190033 - DNA, 373 bp, Glycine max
agcttccacaacaactatgtgcgttaagttcttctcactcttatgctatacaggtagggggatgtcacatatgtggaggaacacatgagtcatgcttatgcatggtccaagatgacgcatccaatgaagttaactacatgggcagtcataatcatcaaggattccatcaaagaggaccaccaggattctatcagagcgataattttttgtacgaccacgattggagatattatccaagtaataacttctatcagcatcctatccaggggccgattcaagaagagaagcccaccaatatagaagaattggtaatacaactcatgcacgaaacaatgtcacatatgaagaggactgatgctagcatataaaattt

SEQ ID NO: 190034 - DNA, 367 bp, Glycine max
  unsure (1)..(367): unsure at all n locations
gaatataaaactcagctatcgcacaagcgcctagcgcagtgccccttgtcttcatcaaggganacagcaataacagcttgccaatcatggtagataacaaggacagctatagcagtcatttgataaagaccaccgngacaagcgctaatgaagaatgggaatggaagtgaagaaagggtagggcccaaagccgaaaacgacagcagaagaacttggagctcatttgcaatatgagtcatgacatgagctgttacaaaactatggcggcctattattgccacagagcgtctcgccatgacctgcaaaactgtaatcacacagaactataactgatagaggtgaacgaacatcatccgcggccgagaaa

SEQ ID NO: 190035 - DNA, 446 bp, Glycine max
  unsure (1)..(446): unsure at all n locations
agcttgtttcataatgtaaagccatagcttgtgatgatacctctacttcctttaacatggatgattacaagtttttgcaaacaaagtttgaaagtttcaaaaaggatcaccatgttgaatgtatgaaattgcacactgagctttcctaccttaaagaattgtttggaaaattaaacaaaggaaagagtgatcttaatcacatgctcagtatgcaaaagcatactacagataagactgacttangatataacaaacaaacctcctttacaaagaanactcattttgtatcctcanaaggggtaaacccaactaaggtcacaaaaagaaagaacatggtgtattctatgagaagtgcaaaacatgtcattattgcatataaaaggggtcacacttatattatttctatgttagaaaagttgacattctgagtggaaaatgcatatgga

SEQ ID NO: 190036 - DNA, 431 bp, Glycine max
tccatcaagtggtatcatagcacttgagcttctatgttgtgctccttatacctccattaattttttgctttaccttctcttccattgctttttcttcatgttttctccatgtatctcctcaaatgtcttgttctaaatgttgctaatatgactctttagagctttcaccgattaaactatctatagaagctagattttattttctatggctcaaatttgttgatcttgttcttgaaccatgaattgcgtagagtttaagttcctttgagttttgacttgttattttctgtggctgaaacctataccatataattcttacatatattttaatgtagaagaaaacctcataaatctatagtgatcttgtcacctattgtagtttcgcatagaagtcatgtctagtcatgaaacctgtcacatgagtattctta

SEQ ID NO: 190037 - DNA, 430 bp, Glycine max
  unsure (1)..(430): unsure at all n locations
agcttctcaaggaagttntctcaagaaagtctttcaaggaagctacctagtctataaatagaagcatgtgtaatacttgttgtaactntgatgaatgagagtcttgtgagacacaactcanagttcaacttctctccctttttcttccttcaatttcgtgctcccccctctctctttctctccctctttcttttcctccattgaagcatcctctccaagcttcttatccaaggctcatcttggtggtgaagctttttcttccatggcttattccttaatggatggtgcctcctctcacctcttttcctttgtcttccgctgcatctccatggtggaaaatcaccattaaaggaccccattgaagctcanagatccagccttcatagaatccctctgtgtaaacaaccaaaatttctcaattgattatttt

SEQ ID NO: 190038 - DNA, 420 bp, Glycine max
  unsure (1)..(420): unsure at all n locations
tgacacttataatactaagcttctaaggaggtgaccttagttatgagatgggtatgtgtttctaagctttagcttctcaaggaagttttctcaaataagcttctcaaggaagttttctcaagaaagcttctaaaggaagatacctaatgagagtcttgtttgacacaactcatatttcaacttcttctctctttttctctcttcaatttcgtgctcccccctctctctttttctctctcattctttctcttcattgaaacatacnctccaatcttcttatccaaagcccatcttgacggtgaaactacttcttccatggcttattccttaatggatggagcctcctctcacctttttctttgtcttcacctgcttctctatgtggaatatcattattataggacttcattgaaatctata

SEQ ID NO: 190039 - DNA, 391 bp, Glycine max
  unsure (1)..(391): unsure at all n locations
acacgcttagtggaatgttgtgcttagagtgaagatagcgtgaaaagtaagctaccttaggcctataaaaggagtaggaagcagaaggaaaagacaccacctcgaagactcacaactctctaatgaatacatcctaagcctaagtatctctaacaagggaaaccctctttctatgttcattatcccattttcctcctatatctatccctcttcttctatccacatcagcccttaaagtgtaaagcctctcatgacaatgagatgctaaacccccgtagatagggtctggcaggcctaataagccaaaagatgtattggatgcttcatatctatcaatgcanacatntnctttcctattatcctttcttatattaaattcatgtatcattca

SEQ ID NO: 190040 - DNA, 166 bp, Glycine max
cggcgatccactattgccatccaatttacaatcatgattaattgattttaagatattctgcttagattaacaaactctttataaatcttgatctatgattggatgataatctcacacaatcaatgcataactatctttctcaaatgataatggattattctacata

SEQ ID NO: 190041 - DNA, 369 bp, Glycine max
  unsure (1)..(369): unsure at all n locations
gtgattntcctgtttaacttctttcttttcttttattttctcggcaacttaagagaagagaaaaggaagagaatgaaaggcgtggttaagacaattaggctgagcatantttacagtcataatggttgaccttatttcaattaattacgtgggcggtgagtgggattgactttggtttagattaaaattngtattctttttgaaaaaagacgagttaaacgacaatggtagggctcctggagctcatgctatcacattgagagttcaagtccctccttcgagtacatggcgacatttactttttctgtcgaaagaaacacttctctgtgttttttaacaagtcattataatgaatgcaggtgatggttg

SEQ ID NO: 190042 - DNA, 277 bp, Glycine max
  unsure (1)..(277): unsure at all n locations
gagagagcaccnattttactactatccatcatagggaagctgaaaaaataaagaattctcagctcttctggatctcgaattgaaaatttgccagctgagttaaagaacttggataaactacaattactagacatcaccacttgttcaatagtcaagaggataccgcctcaccttatgtcaaggttgacttcgttggaagagttgtatgcaagaaagtgcttcatggaagtgtccgatgaaggagagaaaaaccactgtcaattttatttatttctga

SEQ ID NO: 190043 - DNA, 377 bp, Glycine max
  unsure (1)..(377): unsure at all n locations
agcttaagtgtatatattcatccattgggagatattgaacacttaangatganagctatgaatattagaagctctgaagatacaaaacaaaaacttacaaaagaatactaggtttntttaaaaagctatagattaattctttttgtaaaatgctctctgtaaattttctgtatagttctaaaaagctcccaaaataccttgagagaaaagactaagtgctgagatcgtatattcatctttaagacccttatagagccaatagtggctgggtaagacaaagaatactatgttgtgtcaagcttgggataaagcttgatttgtagagctcaaatatggcatgatagaatacttgtatctttgttaagatagtggaactt

SEQ ID NO: 190044 - DNA, 452 bp, Glycine max
  unsure (1)..(452): unsure at all n locations
agcttaagctctcttttgatctcagcggactatttctatcttatcctatccactaaccatcattaaacagagacatgtcttctacatattttgattcattgtatctgttcacctacccgtgagagggcagcaaggttggtaacaaatntattaatttgatgttgtatttgcacttatattatttttttaagctcagtgaattaggtgtgcttatattgaaattgaaccaagactcctcgtttatttatgtgaaagatgtcaagctgggaagaattgtgcatgtggaatcaattatgaaggaactcacgaagcttttatggntactgctctatcacaataaacaatgttagctatcttatggtgtgctagattgcttgcttatcattngaatatgtcctgttcagttggcccggatcaatacccaagtgtactgtgctgtgctataaataata

SEQ ID NO: 190045 - DNA, 386 bp, Glycine max
  unsure (1)..(386): unsure at all n locations
agctnggaatgatgcnttaatggagggaaagtaatatggagagaaagagagaggggggagcaagaaatcgaaggaagaaaaagggagagaagttgaactttgagttgtgtctcacaatactctcattcatcaaagttacaacaagtgttacacatgcttctatttatagactaggtagcttccttgagaagctttcttgagaaaacttccttgagaagcttctgtgagaaaacttccttgagaagaaagagcttagctacacacacccctctaataactaagctcacctcttggagaagcttccttgagaagattcctaaagaagctagagcttagctacacacacctcctataatagctaagctcacccccatgccaagatacat

SEQ ID NO: 190046 - DNA, 422 bp, Glycine max
  unsure (1)..(422): unsure at all n locations
agctntatgttttcagntgtgccaacacgaattacttgacaatatcttcctcactgttgcagaggctgttgcatattattctccaaagctggttgaggacccttgaaaaatatatataaatctttgtgttggtctacaaaaaaaaatgtggacccatatatatatgaaatgttgtaggggaatagaaatagagaccacgaagtttgagtttacttgagttagctagtgaatgatatatgaagaagaaggtgtgaaggatgagaattcatatgacattggtcactacaaaaagctatggtagaagaaaggggcatatccgattctgctactgtctgttagtgctactatagctccaccattcttatcnataagtgttgaaataaatactacaaaataaatagagataaggtcacgtggatgcg

SEQ ID NO: 190047 - DNA, 401 bp, Glycine max
  unsure (1)..(401): unsure at all n locations
agctngtgatatacctttcggtctccaaggagtccattagtgtagtactacttcaagaacatgacaacgagctaagactaatatatntcattagttgagtgctgaaggaggaccctaatacaagataccagtggatggaaaaattggctttgaccttaatcaacgttgcacattgtctccgacagtatttttagagtcatagaatcactatttggacagattgccccattgccaaagtgtcataccctaatttcattcggggacgcattgttggtggcatgcaactttcgtttgaccacttcgaggtacttggcacccatcgtttaagcaattcgtgaagttctgtgacatgccgaaaaatcaaaagaaaacatctgtgcacaatacgtggagttccgtga

SEQ ID NO: 190048 - DNA, 335 bp, Glycine max
  unsure (1)..(335): unsure at all n locations
tatctataacctcatcgtctgtcacagngctttatatccgggagaccancacaaacctgagacatgacttctacatattatgaatagccggcgatgatcccctacccgtgacacgtgaacatgggtgctttctatacgccgcatcccatgccttgcgaactccttggagtaccctcgcgttgtggtcactgaaaccccgtgcgatgaagggcgagatgctttcgtctaatggcgctcctctcatgcggtaaccaagcttgtttatggcgagaacgggattataattaatacaaccccttggttccatcaagggaacatttggacatccttcccat

SEQ ID NO: 190049 - DNA, 441 bp, Glycine max
  unsure (1)..(441): unsure at all n locations
tgtttgcatgcttctaggggaaaattatacttgaatgaatctaaaacataattcatgagatagattcaaaagactatgtaagtatgagattttatcattgattataacttatttanaagaattaattagtactattggcctataccaacaagatgtattttttttgtagtttattacttaaaaaatttatatttaagtgtgtttaactcgaaacaattatgagattaatgactttcaaatttgttttccaaagaagcatatgagtaaagatattacactctaaaaagtctcatgttgacttatgaggataatcaataatcttgaaagtagtagattgtaacaagtggtatgatatcaaaacatatctctctcctaactattatgatgggattcaagaatgaacaaaatagaagttagtggatatgtaacatcctatgcact

SEQ ID NO: 190050 - DNA, 339 bp, Glycine max
gagcttctatggaggctggattttttagcttcaatgaggtcttttaatggtggttttccactatggagatgcagcggaagacaaaggagaagaggtgagaggaggcgacatccactagggaataagccatggaagaaggagcttcaccaccaagatgagtcttggataagaagcttggagatgaggctttaatggaggaaaagaaagagggagagaaagagagaggggggagcacgaaattgaaggaagaaaaagggagagaagttgaactttgagttgtgtctcacaagactctcattcatcaaagttacaacaagtgttacacatgcttctatttat

SEQ ID NO: 190051 - DNA, 310 bp, Glycine max
  unsure (1)..(310): unsure at all n locations
tgacaaaattccaatgacaataactcgttacgtggatgtccaattgtgtcccgtaatatatcgagacgctccaaattgaaaacagaagtgcctacgcaactcaaatgacaataactttttactcggatgtccgatcgagtcctgaaatatatcgtgacactcgaatttgagaacataagctccgagcaaatcctaacgaatataacttgtaactcggatgtggaattgaccncctgaatacattgagacgttcacaactgaaaaccgatgttctgagcaaatacaaacgacaatgactttttactcggat

SEQ ID NO: 190052 - DNA, 313 bp, Glycine max
atgatagttttgttcaacttggaaactattttcttgctacaacaattgcaacaagacccactatccacaataagagaacaagttctatctaaaaattttcatcttgtatgtgtagaagcaagctccatgatgaatcaagattgattcaaagaagttttgatgataacaatggtgatgacaaaaagctcaaaggtcaagaacacttcatgataacacagatgatgatctcatgaatcaaagaatgagttcaagatattcaagattgaatcacgaacactccatggttcaagaggaatattgatttcaagaatca

SEQ ID NO: 190053 - DNA, 442 bp, Glycine max
  unsure (1)..(442): unsure at all n locations
gctgcaactaagctctcttttgatctcagcggactttgtctatcttatcctatcccttactcatcattaaacagagacatgtcttctacatattntgattcattgtatctgttcacctacccgtgagagggcagcaaggttggtaacaaatatattaatttgatgttgtatttgcacttatattatttttttaagctcagcgaattaggtgtgcttatattgaaattgaaccaagactcctcgtttatttatgtgaaagatgtcaagctgggaagaattgtgcatgtggaatcaattaggaaggaactcacgaagcttttatggttactgctctatcacaataaacaatgttagctatcttatggtgcgctagatagcttgcttatcatttgattatgtccctgtcagnttggtccggatcaatagcccaagtgtactgtgc

SEQ ID NO: 190054 - DNA, 475 bp, Glycine max
  unsure (1)..(475): unsure at all n locations
agcaaatactataccaaagattggatggtggaatacatcacaatcaaatgcccataatatctgtgggatggtatatcttgcaatgatgctggaagcataactagaatcacatactcaaattctacataagggatgtaatttgcaacactaaacctctctactttcaagaatttagaatggctagagatcttaggaagtgtactaagagggacaatcccaactgacattggtaatcttcccaaactcaccttaatttgtctaaaaattaccttgatggtgccatacctccttcacgaggaaatcttatcctattacagagcctagttatatctagcaacatcgttcaaggttccattccctatgaataggtgccntgaaaattcttactgtcttagaattatctcacaacaaaatcaatgcaaccttaccctattaccttacaaatctcaanaaatacagaagcttgcatatccac

SEQ ID NO: 190055 - DNA, 307 bp, Glycine max
  unsure (1)..(307): unsure at all n locations
aatagacctccntaacctgagctgcaaaatcaaccacagcagaacaattatgacctctccagcaacagatacaatcccggatggaggaatcacccaaatttcagatggtctatccctcaacaacaacaacagcctgctcttttcttccaaaatgtggctggtccaagtaggccatacgttcctcctccaatgcaacaacaacaaccacagtatctacaactatagagacaacaatcaactgagacccttctcaacctttcttagaggagttagtaaggcaaatgacaatacagaatatgctgtttta

SEQ ID NO: 190056 - DNA, 371 bp, Glycine max
atagaaaaagcactaccggatcttgtatttttatgggtgattgtgtttttacatggagttctaagaagcaaggcattgtaacactttctacttgtgaagccgagtatgtagctgcaacttcttgcacatgtcatgccatttggctaaaaagattgttggaggaacttcagttgttgcaaaaggaaagcacaaagatctatgttgataatatatctgcacaagagcttgcaaagaatccggtgttccatgaacgaagtaagcatatagataccaggtatcatttcattatagagtgcattacaaagaaagaagtagagttgactcatgtgaaaactcaagatcaagttcagatattttaccaagcctctcaa

SEQ ID NO: 190057 - DNA, 369 bp, Glycine max
agcttatgcttcatatatttacaatagacctcctcaacctcagtagctaaatcaaccacagcagaacaattatgacctctccagcaacaaatacaaccctggatggaggaatcaccctaacctcagatggtccagccctcagcaacaacaacagcagcctgctccttccttccaaaatgatgctggcccaagcagaccatatattcctccaccaatccaacaacagcaacaaccccagaaacagccaacagttgaggcccctccacaaccttccctcgaagaacttgtgaggcaaatgactatgcagaacatgcatgttcagcaagagaccagagcctccattcagagcttaaccaatcagatgggaca

SEQ ID NO: 190058 - DNA, 398 bp, Glycine max
  unsure (1)..(398): unsure at all n locations
ctgcagctgcgtcaatgttcctattatngagcttgnttcgctctgcagcngtttgtcgtatnnctttttcgagccgagcaggatcttgagttgcttcagagccaagtactttcattaaattgctaatcttgacctttggttttggtgggtctatgacaccctgtcttatcatctcctgtcgctctttctccttagctatacgtctttgcgtccggagtttcttctgctcttgcttagttagcttgagtggttgaggaggtgggggagcaggctcaacangtggctcaattggacgaggatgctccacataaaaattgattttttctattttcagtttatcttcgcctatgattccattatcaacatcaccataatttccagaatgcagaagaggcaca

SEQ ID NO: 190059 - DNA, 295 bp, Glycine max
  unsure (1)..(295): unsure at all n locations
acatccacaaagcgggcataaacccaccatccnctgttgcccacctccaactgagctcacgtcctcccacgtagcccatatcctcatttctttaacaccgggtccccatcaatcctcccaggcttccacaacatccaagcagaacaacatttaaacagcacaagctatcacagccaagcaaaacagggcagaggcagaatactctgctcaacacaccaaaccaaatcacagctgttctcacttaaagaccccaataacaagttcttcgatccaatccggtaaccgtaggatcgac

SEQ ID NO: 190060 - DNA, 418 bp, Glycine max
  unsure (1)..(418): unsure at all n locations
agcccgggtagtcgaagagaagttcttgtccatagccatcaaagtctgtttagagtatgatgaactaagggacgtcaatatggccacagctgaagccttggaacgagaaaccaagaaggcccgaaaggaagaacaccaccaaagcatagtgttgaggggctttatatggcaggaatagtgagctcaagctccgaagaggtgaaaggaatcatcacgggtcaaaggcatgatcttgaaggacgagctaaaggtttgccttatgtcgaaaagaaatctgtcccaacagttaagcgagactgaagggaatatgtgggccatcatcgataagtgcaaagaggctatatctatcggcgactcacgagcaaggctagaggatgagtacgcccagatatcanctgaaaggggaacaagggaaacg

SEQ ID NO: 190061 - DNA, 410 bp, Glycine max
  unsure (1)..(410): unsure at all n locations
gatctgcttattaatatagaccacagactcttgcaacaggtgcagatttctgattcatgacaagctgagttactaggttgactaaggcatcaagttttccctcaagctttttattttcagtagatgaagatgaatccgtggccacctcatggactcctctaaggacaatagcatcatttcttgcactgaattgttgggagttggaagccatcttctcgatcaaattcctagcctcaacaggggtcatatcaccaagagctccaccactggtagcatcaatcatactcctctccatgttgctaagtccctcatagaaatattgaagaanggagtgctcagaaatctggtggtgaggacagctngcacacaatttcttgaatctttcccagactcatacaagctctctccac

SEQ ID NO: 190062 - DNA, 269 bp, Glycine max
  unsure (1)..(269): unsure at all n locations
accactcgagaatnnccgccagtcagcgagactcanatgtgagtatgacagatcttgtgagcgcggaagatgacgtaaatctccgcgtgccaacgggcttgtcggctgagattgacgaagggcgcaaaagacgacgttagtctttgcgtgctatcacgcttttcgtcttacagacagcaaacaagaatgttcatacggatgaccactcgggtatttccgcctgtcagcgggacttaaatgtcagtattacagatctcgtgagcgcggaa

SEQ ID NO: 190063 - DNA, 324 bp, Glycine max
  unsure (1)..(324): unsure at all n locations
agcttcccatgtttttaagttcttcctcaaattttgtttaagcaattttcccaaagncctatgaacaacttccgtttgcccatcggtttgtgggtgacaagtggttgaaaataacaatttagtgcccaacttgctccacaaagtcctccaaaaatggcttaggaacttagagaccctatcactaacaatgctccttggcaaaccatggagtctcacaatctccttganaaacaaatcagccacatgggaagcatcatcaacttttttacatggaataaaatgagccattttataatacctatcaacaaccacaaaaatggaatc

SEQ ID NO: 190064 - DNA, 395 bp, Glycine max
  unsure (1)..(395): unsure at all n locations
agctngatgttttacattctcccctttctctatataattcttaattcttcttgacatcatcaaaatcttcatgatttacaaattgaacacgaagcgtgcacagattaatattaacgaatgtgggttaattggtgaagggaaaactgccaggaagctacattataaacagaacctcgaagagagttgagcttcatcctcagaaggaaacaacaccagaaaacttagccttccatagattcaataaaagtagaaacgtaaatgaaagcagaagaaggaacaagaaacgaaattccaataagaagtagagaaactgaaattgcattcaagtaaacagtaaactaaaacgtaaaaaccctaaactgtgctctaaataatgaatagcctaacagaatgcc

SEQ ID NO: 190065 - DNA, 439 bp, Glycine max
  unsure (1)..(439): unsure at all n locations
agctngtaggattatggtgtacccatcacattttgtactaggnggcggacgggcgatggngcacaacaagttttccacatccacaaagcgcgcataaacccaccatcctctgttgcccacctccaactgagctcacgtactcccacgtagcccatacccccgtttctctcaacaccgggtccccatcaatcctcccaagcttccccaacatcaaagtaatacaacattcaaacagcacaagctatcacagccaagcaaaacagggcagaggcagataactctgcccataacaccaaccaaaacacagctntcctcacttaaagaccccagtaaaaattcctctcgtctcgttcattaaccattggatcgaactcgaaaatttactggaagtatctagtacataaacctacattttgaccttgggatctctagcaaacat

SEQ ID NO: 190066 - DNA, 405 bp, Glycine max
  unsure (1)..(405): unsure at all n locations
agcttcngtagagcttgcatgtgtaagagctctatatggcagtgaaaaatacttgtaactgngaatagttaatggaaacttggtaggtttccaagaactggacatagtctcgggtttgatacgaaccggtataattctttgtgtgcttctttttattgctctaactaacaaagggtttgaatttgtttttaggtcttatatcttgttttattttacaaagaatattgtttttctcattgtctgataaagtctgatctctaattgtttttctccataaggtttatctacatcagacgataaatgtattttcagtcttagaaaaagttttaaatttctaanaacacaattcaacccccttcttgtgttatttgtntctatagttcggtatcaaagctcatcatataa

SEQ ID NO: 190067 - DNA, 405 bp, Glycine max
  unsure (1)..(405): unsure at all n locations
aatcagcacaagcagccacaccaaatagcaaccgaagcaaagaatgagtgagcggcaatctctntcggataaaaataaataaataaataaactacagtttatatcctttcaggttaagctggtatgtcagaaaacaaagactagctttccttataggaaacaacaaataatcactcttataatggagcaaataagtcctctccattttgatttgttcaaaatatacactctatcgtagcattggtgtgcagacagaaaagaattccaacagaacgaaatgaactgattctattctatttagttcttggtccaccattttaagagaaccaaactaccacttctaaactcatgtcaataccattccttttaaaatgacaatcatagacaaccccattcatctagcat

SEQ ID NO: 190068 - DNA, 401 bp, Glycine max
  unsure (1)..(401): unsure at all n locations
agcttgaagaaaatactcttaaccagagcatcttactgttaaaagcaaatnnttacagagagagttttattaaaatcttatgcatccaaagataagatagaagcaactaanaataaacaagttataatagaaattagagtaaaaacacaatgtttatactagttcactcaacttgagctacatctagttctcctttatgacaccatcaagtgttccactaatcaaattgattacaaatgagtttttactttgccactcttggttacaacaagtattttctatgccacttctagcttacccttaatctcttcccgagattaagaacacccaagtattctttgatcactaaggaacttctgacttttgttggtcttttggaaagcatagcaatttgaccgaag

SEQ ID NO: 190069 - DNA, 381 bp, Glycine max
  unsure (1)..(381): unsure at all n locations
ctgcggcatgcaagcttgctctanattacattgatgttngtannttttggtaggaggttacatgctattnttgctttaagagtaatgtcccactaaaactaactttccaaatgtttgccttcgcaggaatggcaccgaggaagcttgcctcaaagaggtccaggaaggacaaggcggccgaaggaactatttccgccccggagtacgacagtcaccgctttaggagcgttgtacaccagcagcgctttgaagccatcaagggatggtcgtttctccgggagcgacgcgtccagctcagggacgacgagtatactgatttccaggaggaaatagggcgccggcggtgggcaccactggttactcccatggccaagtttgatc

SEQ ID NO: 190070 - DNA, 407 bp, Glycine max
  unsure (1)..(407): unsure at all n locations
gatcttaagtcacctgtgctgtagcttcaatggatttctttggacccttttcatcattggacagtaatggttacccttcaagatttagcattgagcaaactgcaatggatgatgaatacagaggacttatgcaggttatagaagaagagggaataccacacctggaagaagatgaaactgaacatgaagattgtgttggatagagaaatgtggcagaagaaagaactacacacgatataaatgcttccaaagaagaagttattgttgaagatgttgatgatgatgatgatgatgaagacgacgacgaggaggaggaggatgaaaacgatgataaaacatactttnaagatgaaacttaaactgagcttgaggcctaagattcacaagctcatggttgtgcaagtttg

SEQ ID NO: 190071 - DNA, 342 bp, Glycine max
tggcttcattacagaaaagcataaatatggttgagcacaagtttaattttcctttacataagaagtcacacaacattgtatctagagaaatacgagacatcattttccgtgagttgcaatgggttgaaaacggaggtactgagagttctattatggatgcattactcacgggctaccatatgcttgtgaacttaaataatttatccggatatatgactctctccttgaagtccattatccattcccaattcaaaagacacgagtgaccgttgttagtcggataatacgactaacttttgcgaaaagaaacttgtgtaaatgggatataaatcctcccattat

SEQ ID NO: 190072 - DNA, 454 bp, Glycine max
  unsure (1)..(454): unsure at all n locations
agcttngaagtangtatcctggctctaaaactttggatggagatgtctttaacaagggccatcaaagcagtatttctctcaatggtggtctgacctaaggtctattaatcaacatccgagtatggttgatgtctctaaacagttttcttggaaggtgggtaggggagatcagattcttttctgggaagatacttgggtgatggtgggatacctcttaaagatcaatctccataattatatcaaatttcttcccaaagattacagcttgtggcagatatgggctctttctttgaaaatgggtgggaatggactttctcttgagatgaaatttgtttacagtgagatgggatccttcaatatttattgacaaattgcacaatcacctaaatgtaatctgaagacactggtgggggagctgaattatgggactttttacaaactgctcacatattaa

SEQ ID NO: 190073 - DNA, 351 bp, Glycine max
cacctcgatgacgggacatatatacccgttgctgacataaatgcccactgtcaccgtttcgtttctttttgtgaatcataaatattccccctatatttgacacaaattacataaatatttcgccgatttttattttcagaaaaaataaataacaaattcattactttatatttataagacagcgtctcccattgtttttttttttgacaaaattaactaatgctcttaacacgtaaatcgaagaattaataaaaaattatttttctactgaaaatgagaatctcttatgatatttatgataatactttggattgtatatcaaccacctttctaattcacatgtttttttag

SEQ ID NO: 190074 - DNA, 400 bp, Glycine max
  unsure (1)..(400): unsure at all n locations
tttgcaagctngagatgaggaagtgttgaagggtgaattcttctgctnttattgctgaccacagagtggtacctggagatatgtcgcgggggtcaggagaccttggggacgtcaggtggggtgctattgcccaaaaccaagcttgaccaatcccgacccgacccgggtatagtcggtcagtgagaacctgtgatgtacctaaacaggcgagctcctggcagtcaacagataaaaggaacaaagaccacanagcaaggaggcttgtggtggctggccagctgtgaattttgtgtgatatgtggagtatggcctctggtaatcgattactaagggtgggtaatcgattacaaggcttaaaattgaagacaagaggctaagatggtctctggtaatcgattac

SEQ ID NO: 190075 - DNA, 436 bp, Glycine max
  unsure (1)..(436): unsure at all n locations
agcttggaggaatatgaggtacccatcacatgtggtactaggtggcggncgggcgatggtgcacaacaatgtttccacatccacaatgcgcgcataaacccaccatcccctgttgcccacctccaactgagctcacgtactcccacgtagcccatatcctcgtttctctcaacaccgggtccccatcaatcctcccaagcttccacaacatccaagcaaaacaacattcaaacagaacatgctatcatagccaagcaaaacagagcaaaggcagaaaactctgccaaaacaccaaccagaatcacagctttccacacttaaagaccccagtaacaattccttcgatccaattcgataaccgttggatcgactccagaattttactggaagtctctagtacataagcctacattntaaccgtggtgatctactagca

SEQ ID NO: 190076 - DNA, 440 bp, Glycine max
  unsure (1)..(440): unsure at all n locations
tcactcctacatctcatctctagcatgcattttctttctttacccactcctcacgtttggttntttaggaaaaaaacaccataactaaacgcgccgcaagggatccctatcgcaccagatccaaatctagaacgatgggtgatcaagaggagacgcaggaacagatgaaagccgacatgtcggctctgaaagaacaaatggcctccatgatggaggccatgttaggtatgaagcagctcatggagaggaacgcggccactgccgccgctgtcagttcggctgccgaagcagacccgactctcttggcaactacgcaccatcctccctcaaacatagtatgacggggaagggacacactgtggcacgatggcagccctcacctgtgatacaaccgagcggcttacccttatggatttgccgctaactattcaccacccatc

SEQ ID NO: 190077 - DNA, 262 bp, Glycine max
gattagactaagagtgtaccaccatctataataacgctctaaacgctacagacactctcctttgctgactttacacaaactatctcctatcaggtctcggaagttgaatgtcatagaataaaaactaagtggacatcatgattgaacgtacaatcattattaataataatgtcaaataattatcatgagatttaacaaatatatcatatatcataaactatccatggaatacattctaaaattacttcacgtctataatcat

SEQ ID NO: 190078 - DNA, 368 bp, Glycine max
gatctcaactgccatggctgggcacctttctggagaaggaacaacttgttgataaaattgtggctcataaatggtggaaacctgagcagtgaagtccttataaggagagttgagttgaaccagagagcaatgatcttgtatagtgtgagatttctatctaggttgagatctaatgtaatcaagaagataaggtggagggtttgatgtgtagatgcaaatgcctttggtggtttgatgatgatcatgatgatatgatgcaattgatacaaatgggcttctcaagattaaattcaagacaatacttcaagattacaagtcacaacatcaagatgatcactagaatattaagacgggaattcctaattgaa

SEQ ID NO: 190079 - DNA, 454 bp, Glycine max
  unsure (1)..(454): unsure at all n locations
gcaagcttcctcggggccattcctgcgaaggcaaatattttgaaagtnagnnncacttgtgggacgttactcttaaagcaaaaatggcatataacctcctcccataaatacaaacatcaatgtaaatctagagcaagcttatgcgcatatttccttacaaacgttctcttgcacaagacattctattaaccgaaaaataatgcacccatatacaatcaaggcggcttcgttacctagattatttacacgtacttccaaggtgtatntgttacttacatcacacacatctccttggctaaattcacatacatgcatactcaaagcatnttggggtaccaaaaattgcacatgtgcatatcttgggtattttaatacctatacatacacaaacttcatgatgaatctngactatctacacaacaaggggctacattccatgctcttttaaagtttt

SEQ ID NO: 190080 - DNA, 390 bp, Glycine max
  unsure (1)..(390): unsure at all n locations
tggacctggagatatgncgcgggggtcaggagaccttggggacatcaggtggggtgctattgcccaaaaccaagcttgaccaatcccgacccaacccgggcatagtcgctcagtgagaccctgtgatgtacctaaacaggcgagctcctggcagtcaacagataaaaggaacaaagaccacaaaccaaggaggcttgtgtggtggctggccagctgtgaatcttgtgtgatatatgggttatggcctctggtaatcgattaccaagggtgggtaatcgattacaaggcttaaaatgaagacaggaggctgagatggtctctggtaatcaattaccacngcggtgtaatcgattaccatgcttgaaaaccaggtcaggaaactatgggagc

SEQ ID NO: 190081 - DNA, 437 bp, Glycine max
  unsure (1)..(437): unsure at all n locations
agcttccacttcatccaagcaattcaacattcttatatcatgaactatctcaaccaagaaaatagggccgaggcacaaaactctgcccaaaacactattcaataccacagttattctcactcaaataccccaataacattctcttcgttttgatttgctaaccgtcggatcgactctaaaattttactggaggtccctagtacataagtctacattttgaccgtggggatctgctataaaacgtccataacccaatatgtacaacctttttcacaaccagccatgcataagcattttctgcacaagcacaaaattctgctgcacatctcaacagcaaaattttacataatagtgcagattntcgacatcactctctgcctcatacaaatttgcccaaattggatcctacaagctctatatcaagtatatatcatacc

SEQ ID NO: 190082 - DNA, 364 bp, Glycine max
  unsure (1)..(364): unsure at all n locations
agctttgatgtgtgtagcccaccttcttccattgtagaatactggttatgcgtctactatcattgtcatcgtnttttcgtcattgaggtgtcactttgagctgcgaggttctccaccttggtgtgtattctttgaaagatttgtgcccccccttttgcacatgttctgtagttgcatcctatccgaagacattatactgacactgcctagcgaaggccaccactaggtccttccaagaatggactcgggaaggttccaagttagtgtaccaagtaacagctacccagtaagactttcttggaatgaatgtatcagtaattccttatcttttgcgtattcccccatcttctgacaatacatcttt

SEQ ID NO: 190083 - DNA, 263 bp, Glycine max
tttttaaaaaggcttttttgggactcaaagaaaacatttgtcgctaaacccaaattatagtagatcttcggtgccccaattacacgattaaatttctcttctctatttaggattttaaatgttaaaacggaccgtgtaggtaatccacttttttaatatgacttttgattaatattgctagtaccaaaataggacttttgcttgaatttatgcaacctagaataaattagctatggtgcaaaatgccgagcaggaacattaca

SEQ ID NO: 190084 - DNA, 159 bp, Glycine max
  unsure (1)..(159): unsure at all n locations
tgcctatactatnatctatgaaaagggttctaatctattttcagggatacaaaggggttgtagaatcacactggattggcccctagtcatgcactatatgcggcaaataatgtgtttctaacaagcacctaacaagggggtaaaactacaactatactc

SEQ ID NO: 190085 - DNA, 456 bp, Glycine max
  unsure (1)..(456): unsure at all n locations
acctgcngcatgcaagcttctaatttggcatggagatcttggccatctttgaaaaactgtttcatgtgtaagagataatcaaagacataaattattgctactcttggtagttgagtgaaaagtggaaagttgctggtaaaaaatggaaaaatactcacgtaggatggataccacatcattttagttgatggagaagccatgcaagggcaagttatgatgttataaatccatgtttatctaccaacttttctatcttgaaataattgctctcgtcaattctctgccaacacatgatacttccatgtttacattatgatctttctattgaattttcattcatatgggatgaaatattcctacttcttgcttaattgaacaaggaagacctacaatatcgatagcataattcaattatattttgctaaatagccaacttgtattattataaagaatatt

SEQ ID NO: 190086 - DNA, 398 bp, Glycine max
  unsure (1)..(398): unsure at all n locations
agctttgagccanaatccttactcaccatatattttgacccagggtgagaatgccaatccttaccctcggaagcaaaaaaataggagaagagaaggaaaatttccaatcataggaaaaaggagaaggaaaatttccaatccaagaggaagcataaaaaggagagaaggaatatttccattctaagagatagaaaagaagaggaaaggaaattcccaatcaaagagtgggagaaagaaaaaagaaaagatagataactcccaatcaaagaatgggagaaagaaaaaagaagaaagctcctggtcaaagaaaccagaagaaatgtgccgagaggtccttggaccagacgatatctgaacaatacagaattgtcaccaaatgaacaaaagaaagaaaagga

SEQ ID NO: 190087 - DNA, 417 bp, Glycine max
  unsure (1)..(417): unsure at all n locations
agctttaataaaaacccatattctcgccattttctctcatttcacatcaaannctaggagagntgagagcagcaaaacttcttcttgatcttgagggctagtctanaaaccttgaagcctagaagtgttggtaagcaagttcacccttcactctagccttgttcattcttcttcatcactagaatcttctctcacgttcttgagttttgttgaagcttgtttttgacttaagagaacttcattcttggttgtgcccttccatttcacgtggagaatacaagaggtaaggagggtctttccacttcttgaaccctcaccttgttgtctttggagagctaggctcactacatgttttgatgttaaaatttcagatctacttccatgagtggaaggggatgatatattatttctctgtat

SEQ ID NO: 190088 - DNA, 293 bp, Glycine max
taaaacactcctcgtctctttggtccttctatatgatctctttaaggaaaatgttaatgacccgtcatgctatatgagtatgttataccactgattagtcatgggctgtgaaaaagagttaaaaactcagtattagagattattgtgattttcttaaaaccctaggttagctaatagtggagattttgtctaaccccttgttctataatttaaatgcttaggtcctgtggaaaatactatggtggaccttactaacaacggtaggagtcagtgattgcgttattaggtgagta

SEQ ID NO: 190089 - DNA, 310 bp, Glycine max
  unsure (1)..(310): unsure at all n locations
gaacatangcgcatgtatatccatgtcagaggactaggtatatggctagctcgtcaactctacagcatttccatattgtagggttctatgttgtctcgggatcggaattatgctttgcataattatcgcacattttaaacttgtgagccacattcatatggtttcaaaataactgtttttttttggcaatctgtatgaattaataaactgaatctggagcttatccttagcctcccccattcccttcgtctttggaatcgaaaacacacagcttctttgtctttggtgcagatactagctggatatgcca

SEQ ID NO: 190090 - DNA, 298 bp, Glycine max
  unsure (1)..(298): unsure at all n locations
cacaaaccacaaacccttgcaacaggtacaaatntctgattcaaggccatcagggttaccaagttaaccaatgcatccagttngccttcaagcttcttagttttagatgatgcacatgggtttgtagctacctcatgcactcctctaatgactatggcatcatttctggcgctaaacttctgggagttggaggccatcttcacaattaaatttctggcttcagcaggagtcatgtctccaagggctccaccactggcagcatctatcatacttctctccatattactgagtccttcat

SEQ ID NO: 190091 - DNA, 353 bp, Glycine max
  unsure (1)..(353): unsure at all n locations
tgccgatntaattttcaccgatgaaatgttctaagtgggtctgagaatatgtataatngattatcctgcttcgatgaataggaagcctgtggcaaatggagagaataagaaggatggagaaacccatgttggtggtgtcgttcctacatggccaaatttcccattagcccaacaatatcaatactcggccaatatcaatccttctcattacccaccaccctaccagccaagagctcccaattattcacaaagaccatccccaaatcgaccacaaaatccacctgatgcacattcaagaccaaacacctaccagagaaggatatttccagaaaagaagcctgtataattcaccc

SEQ ID NO: 190092 - DNA, 507 bp, Glycine max
  unsure (1)..(507): unsure at all n locations
cctgcacgcatgcaagcttcaatggagcctacatctatgtggatcttatattcaattaaataaaatttatttgaatttctatatgcccaatccaattaaatcttagagggggaggtgagcatttggttactacacctcattgccacattatatagtcacacgttgtgcatgtccttcatgctttacatgcctcatgccacctaagcacacttagtggagaatcttcgaattgatcttggattagtgggctgaaccataactaaaattcactaatcataattagtgaaattgtgtctccaaagtttgggtccacaaattcaatttcaaattcaagtgaaaattgaattgaaattcatatttccctccaactttgtgtgacacttacgctataaatagaggtcatgtgtgtgcatntnttcaactttgatcatntgaaaattagactttagattcaaagctctctagaagcacaaaattcgtgctcttccctcnnctctccttattcat

SEQ ID NO: 190093 - DNA, 295 bp, Glycine max
  unsure (1)..(295): unsure at all n locations
atcacagggaataactaatagggtaaaatatattttctatccccagattccttccggtactttcagagaaatggaatgtaagtccttgaactacaactctgatcaatttgatacccctgaactttacaaaaggcattggttgttctcctctccaaggtgaaatctgtgggacaaataccactgtttctctaaaattcatgatccacatngatcatagttgaagttcggaaactattacgagactaataacatatctgtcccctcaacctttgtttagttctagaacttagatcaa

SEQ ID NO: 190094 - DNA, 422 bp, Glycine max
  unsure (1)..(422): unsure at all n locations
cttcgagcgtctcgatattttacaggactcaatcaaacatccgagaaanaagttattgtcgnttgaatttgctcagaggttcaacattcaatttcgagcgtctcgttatattacaggactcaatcagccatccgagtaaaaagttattgtcgtttgaattggctgagagcttcaacattcaatttcgagcgtctcgatatgttacgggactcaaacagacatccgagtaaaaatttattgtcgtttgaattggctcagagcatcaacattcaatttcgagcgtctcgatatatgacgggactcaatcagacatccgagaaaatagttattgtcgtttgattggctcaaacatcaacatttaatttnaggcgctcgatatatgacaggactcaatcagacatccgacataaaagttattgtcg

SEQ ID NO: 190095 - DNA, 371 bp, Glycine max
tcataccagtttatttgagggcatactttcaaggtttctaaatgccttattgtaatcgatacaagattaaatttcaaaactcttttgaaaaaccatttgcaatcttgtctctggtaatccattgcaatacctggtaatctattaccagtgcctttgatctcttggaaataatttgttttacgcaatatctgatcaaccaacgagactcttttaatcttgtttgctcgaccatgaattaactcttgcgcacatctctatttgcttaacatttgaatgtttcttgaagcaatcttgtttgatatactttgccatataaaaacctgatccatctacacattctcccttttgatgtggcacattttaattaatct

SEQ ID NO: 190096 - DNA, 449 bp, Glycine max
  unsure (1)..(449): unsure at all n locations
agctcgctaattcttaatttattagnccttcttgtttagacccattggtcctattatcgcattatatatccccgagttcaagttcgctatccatttctccaaggcatctaaaaaaagtaaccacagcattctcactgtattttggttgtcaatgatcccctacattataagaatttatactcagttgaatttgactgcacagtgtcaacaacacaagtacacaagtgaaaatcgttctcctacatccagaaagagcaattagaatgtcaaatctatttcgacatcttatatttatagatttagagtatattcagtcagccacggatgtatgatcaagtgcaagcccagtgacaccagatgacaaacagttacatataacagagattagatagtcactaactatagaacaatatgaaagagcctgatgccatgacaacctcatgactaat

SEQ ID NO: 190097 - DNA, 404 bp, Glycine max
gataataattggattgatttagtgggtccagctttcaaaattaagttgaaggttcataattctgagtttctaaagtaagcattagaaattagaaaaaactgtcttgatctgttataatcccagctgttgtagttgaataaattggttaaactattgtattccatgatatgcctttgcagttcccatttttgcatttaggtgataaagaatttattcatttgagtggcacagctttaccagtaccaacagtccaacaccatcaggccctactaacctggaagctggcatttgttcttttattattgtgttggaacaagtgatttggtatctccatttttggtagtaagcaatggggaattgataataagattgagaacttttatgaaatttggttgctgtatgtt

SEQ ID NO: 190098 - DNA, 279 bp, Glycine max
ccacagcagagtttcagaaaatattctcaacaatcacatctttttatgtggttcttgaatggctatcaaaggcctatatatatgtgacttgagacacgaatttgcgaagatgttttcagaacaaataggtcttatcctcttaaaaagcaaaatcgttttattctcttacaaattccttggccaaaacacttgtgattcaataaggaattatttgagtgctcaaattgttcaatctatctctttcaagagagatatcttcttttcttcttcttcattctg

SEQ ID NO: 190099 - DNA, 365 bp, Glycine max
tcaattcattcagtctttatatatattcccatgctcttaattagcagtttttctctttaaatttgtttaaaacaatgatatttataattaattaattactaaatgatattattctaaaacactacaattatttttaagtagttcacattattcaaaagatcctcatcatgatacatgcatgcagttgattttgctttgtggtttggtttttatttctcaaattcacttgtaagtgatgttgtgcatgccagtcaatgtcttggtcgctttcgctctcctttctattctactttgctctcctttctattctcttttctatttttaaagatatagtcactgtcaattataccataacgttgattaat

SEQ ID NO: 190100 - DNA, 194 bp, Glycine max
gcctcacttgagaagaggctagttttccggtagccctattgaggcttatagcagacatctggcatccgggtgtcgggacagacatcggagaataccggtctccttgaagtccaaccggaagactctctgttaaacggtggttattggcttttgtaagaactgcggctactgtattcaaggaccatatctttgaa

SEQ ID NO: 190101 - DNA, 258 bp, Glycine max
  unsure (1)..(258): unsure at all n locations
acaactttaatggactatggtaggagtattgtaatcaattcaaatttacccatatctttgtggatgtatgtctctgaaaatgtcatgtatttgtcgaataggattcctagtaaggcagttccaaagacaccttttgaactgtggacaaataggacacctattataaggcactcgcatgnttgtggttaccaggaagaaataaggatctgtaatccacaagaaagaagattgggtgcaagaacaataagtggatatttc

SEQ ID NO: 190102 - DNA, 364 bp, Glycine max
gcctggacatgcttcatatcaaaatggtgtattagaaaggggtaatacaactttaatggatatggttaggagtatgttaatcaattcaaatttacccatatctttgtggatgtatgtcttgaaaaatgtcatgtatttgtcgaataggattcctagtaaggcagttccaaagacaccttttgaactgtggacaaataggacacctagtataaggcacttgcatgtttggggttaccaggaagaaataaggatttgtaatccacaagatagaaaattgggtgcaagaaacaatagtggatatttcatttggtatccaaaaaagtcaaaggggtatatgctttattgttctatcatagtatgagaa

SEQ ID NO: 190103 - DNA, 386 bp, Glycine max
  unsure (1)..(386): unsure at all n locations
agggttacttcatcatgcattaatcttgttgtcccataacaagctttttcttttgntngtgtttttcttctttcttccattatttttctttttgtctgcttattcttcatcatttcttcaaacgttcctcatctcctgttgtctcttcttattctcagtgcagctgttcttcttcttcatgcgttcaatgtgtcttgtgctctgattattcaaaatttaagaatttggctctctattttcttagaatttcagaatctagttctctggtcttttagaatttcagaatcatgttgttcatgctctattgaggagatgggagctctgaagaatatggggtgggagtggaactttaaatggaggaggaacctattcgacaacgagattga

SEQ ID NO: 190104 - DNA, 371 bp, Glycine max
  unsure (1)..(371): unsure at all n locations
gagcttgctgtcatgccttagaatctncttctattagtctgngtagcttggctcggcagtctcacagttctatataaactacagtgtaactgaaaacagttgggaataataatatccgaattcataagtctcacaaactatctctctctctctctcttttcgagtatctctttctaattctaacaacttaaattaggaaagttgattcttgatttggaaccaaagcctgtttagaccaagtggtcaggataggcaagttcaatcccattcttcataaataattacttttcaacacaagtttgtttttttgaactgcgaaattaatatatatatatatatatatatatatatatatattaatcaaataatag

SEQ ID NO: 190105 - DNA, 356 bp, Glycine max
  unsure (1)..(356): unsure at all n locations
agctnggtaatcaagtgcccaagctagtnncataatatagaaggatttgtagcttangataattgattgcctcatttgataatcaattaccttgctcttggtaacaatgagaagctctttgtgtgattctataatcaattaccacatgtgaaaattgattacccagaaagcacagaagcaataaagatacttagactaaaacaaattaatcgattatccagtttctagaaatgcagaagaaagaggattttaacaaattaatcaattgcctaattttataatcgattaaatctattttaactcgcaaagttataaatacccttatgtgttttctttattaaagactcttgatatgt

SEQ ID NO: 190106 - DNA, 358 bp, Glycine max
agcttggattctttgcttccacacatgagtcatcctctaaggtcctgacaatatcactctagagcaagccttcaagctcaacttcaaagcctcaaacaaccaggaagagtatgagacgctcattgtaggtctaaagctagcaagagaagtcggagctaaaaaggtgcgatggcagaatcagacaagagaagtcggagctaaaaaactggtaaatcttatcctaatcttcctctatagccctcttccattcttccattggtgatacctcgtcataagtatatggttctttaaccatatccaattttgttaacgccaaattagcatattatggatgtggtttattgatatactccaacat

SEQ ID NO: 190107 - DNA, 411 bp, Glycine max
  unsure (1)..(411): unsure at all n locations
agcttactaattgtcctgtgctagctcttccttgcttntctaaaatttntgagctagaatgggaggcctctggagtgggagtttgagctgtattgttacaaggtgggcaccctattgcttattttagtgaaaaacttcatagtgccacccttaactaccccacctatgataaagagctttatgccttaataagagccctctaaacttgggaacattaccttgtttccaaggaatttgtcattcatagtgatcatcaatcacttaagtacattagagggcaaagcaagttaaacaagaggcatgcaaaatgagtagagtacctagagcaactttcatatgttatcaaatacaaaaggggaaaacacatgtggtagctgatgcctttctaggagaacacattgtttgctccta

SEQ ID NO: 190108 - DNA, 383 bp, Glycine max
  unsure (1)..(383): unsure at all n locations
gcaagcttataataagacatacttcatcattnntatttttaccagtccaagggaccccacaatattgggccgcagacacaagtatacacanccctgttccaccacataaaaaaggtcccaaagaggaaggccaaagaaaaatagaaggagatctgtagatgaggacaatgtcacaggacataagctaaagaggaaattggctgagtttacatgtggaaggtgtggccaaaccaatcataacattagaagctgtaaaaatattggagttcctgttaggccaaagaaatatgttgcaccatcaacttcaaatgaggatgaccacctattatctcaagatgaacaagctttgaatgaggctgaagaagctgctgctcatgttcaac

SEQ ID NO: 190109 - DNA, 450 bp, Glycine max
  unsure (1)..(450): unsure at all n locations
agctngttntaaagtntttatctagttaccatttatgaatnactaactntcaattaccaatttttttttaattttcagctcacttttaaattattttttataaatataaccttaataatgtggtgaattaagtcaataatatcaagcatattaattattatgatcactaatatttaaagagttgttaaattattatgatcactaaccttaattatgatcactaattattataacctcctgatagtcttctagtccttctaacatgtttttttggtgaataccagtccttctagctgatgccatgaagattggttttacacggatgntaatttttttttgtttttcccttttgctggttttgctttctagttagctcttgtaactagaaggactaattagtcaaaattaaatnttattgaaatctcacttatcaatatgtntttacacata

SEQ ID NO: 190110 - DNA, 426 bp, Glycine max
  unsure (1)..(426): unsure at all n locations
gctnccatcaagnggttatccgagcacaattttcttaagtangngctccttaaacctccatnaatttttttgctttaccttctcttccattggtgtttcttcaatttttctccatgtatctcctcacatgtcttgtgataaatgtttttaacatgattctttagagtttccaccgattaaacttgctatagaagctagatttgattttctatggttcaaatttcttgttcttgtttttgaaccatgaattgtgttgagtttaggttcctttcgagtttgtcttgttattttttgtggctganacctaaaccataaaattcttacanaaatattanagtagaagaaaacctcanaaatctagagtgacttgttcacctattgtagttntgtcatagaagtcatgtctagtcatgaaactcgtcacat

SEQ ID NO: 190111 - DNA, 304 bp, Glycine max
  unsure (1)..(304): unsure at all n locations
tttgttctccaaatgtatcaaactatatgatgcctttagggtttttcgggaaatgcctgatagaaatntggtctcgctggagtgctgtaattgcaggctatgttcaaaatgaccggtttattgagggattaaaatatgtcaaggatatgctcaaagtacgtatgggggtgagacaatctacctatgcttgtgtatacacgtcttgcgctggattattctgcattaaatagggcacacagttgcatggtcacgctctaaattctgattttgcgtatgacacgataattggacccgcaccttggac

SEQ ID NO: 190112 - DNA, 300 bp, Glycine max
aaaacaaaaaaactagggcatttggtaagttctatcaattccctcacttatttttactgtttgaagatactgattctcccataatgctgctcaacttcttgatcctgttctattatgtggttcctgaggagacaaatcattcaaattctacttcatttttgcaagatttgcattccaactggctccaccccacctcacactctccaattcttgttataaaaggagcacacattgtttcctctcttcaatatcaactcttcaacaattccttggagtcctattcaatagactcactttctt

SEQ ID NO: 190113 - DNA, 377 bp, Glycine max
gcaagcttgccacccagctcgcccaggcgagctatttttgcttcctccagaaggcactgtcttctatggttgctatttgcacccctccccctttttactaaatacaccccttgcctttttttgctaattctttttctgtaacgttagggaaacttacgaattacgtaacgatacttgttttccttccgtaatgttacggaaccttatggattacgtaatcatcccttttttgcctttcagaatgttatggaactttacggattgcgcactaacacttccttttaatttccggcatgtcacggaacttcacggattatgctacaatgctttcttttgactttcggcatgtctcggaacttcacgaattgcctaacgat

SEQ ID NO: 190114 - DNA, 390 bp, Glycine max
  unsure (1)..(390): unsure at all n locations
agcttagccttataggggatggaccttntcattttttggagaggatcaataacaatgcctataggttggaccttccagaagagtatggagtcagcaccacttttaacatttctgatataactccttttacaggtggagctgatattgaggaggaggaactaacagatttgaggtcaaatcctcttcaaggggaaggggatgatgcaatcctccctaggaaggaaccaatcactataaccatgagcaagaggctccaagaagattgtgctagagctgctgaagaaggccctagggttctcatgaaccttagggtagaattctgagcccatgggccaaggttgggtccaattatctnnttacatattagaataggatgtcattatatttggt

SEQ ID NO: 190115 - DNA, 299 bp, Glycine max
  unsure (1)..(299): unsure at all n locations
ctganacaaatatgaccaatgcaaaacatggatatcgataaacagttacaaagctgattcttttcgaaactcattcataattcaaacatggcaaaccaagggttttaaaaatgtaacctcttgtgaagcgataaatcaaataaccaaaaaagcttgtaaatgatgcacatgcatcatcaaaacgcatcaaagcccgaaaaaaatggctcattacaacaaactacccactaaaaatcataaagtcgcgtataagaaatgttaaactaatgatataatcaagaaagggctaagcttttgtc

SEQ ID NO: 190116 - DNA, 394 bp, Glycine max
  unsure (1)..(394): unsure at all n locations
accttaagtcacctgggctgcagctcatgtttttaagatganncaagatttttgatgataacaaaggggatgaaaaaaagctcaaaggtcaagaacacttaatgataacaaagatgatgatctcaagaatcaaagatgagttcaagattgaatcaagaacacttcaaagttcaaagaggaagtttgatttcaagaatcaagaatcaagtttcaagattcaagttccaagaatcaagatcaagattcaagactcaagaatcaagaaaagacttaatcaagataagtattacaaagttttttcaaaaactgagtagcacatgaatntttctcaaaaccttntaccaaagaagttttactctctggtaatcggataccagattattggtatcgatta

SEQ ID NO: 190117 - DNA, 295 bp, Glycine max
gaagacgaccatgtggaagagactcacacatgaggggagattgttatactacaagtgtgaggtgatatatcatattatgtaagaatgtaaaggttgtacaccatataaatgaggataaaacttatatacttgaatatataagttttgagtttaagtgtgaagacaagtttacttatatgattgcttatgacttattgttgtaaatattctcagtgctttaacccgctatgttcacaagaatggataacaaattcaatgattccacatggtgtcttgctctaatgagataatatct

SEQ ID NO: 190118 - DNA, 384 bp, Glycine max
  unsure (1)..(384): unsure at all n locations
caccgaagacctcgcattctgctgatactcgacttttaataaactcgagtaatttgtacacgtttctatttttttttataattatatccgcaaatctataaaaatagttatttgtaaaataaattaatctaaaacacgcagaaaatcgttttcttgcaaatcgatatcctcatttatgttgcacgatttaaggcatttataatgaaatatgataaaaaaaatacaagacacacaaaaaatagtaatttaaaccatgctgctccctataacttcaacttcgagagataatntgatttgtactttaattattaaacataactaaaatattaatttaattgaaatactaatcatcatagtttaatggttttcttcttatatgatata

SEQ ID NO: 190119 - DNA, 374 bp, Glycine max
  unsure (1)..(374): unsure at all n locations
agtgtcaagggatagagagaagagaaggactcgtttgnttgcaaagaatataagatatgatgtaaggaagttgaacgcacagaaaaggcctaaaatgaaaggtcgttttgtgaataggacatgctttgttggagccaatgcttttcctgcttaccactgacatcaatcaattaacggatccatctttgcttattctgcaaatttgggttaatacttggtttggctatatatatgtacgtatatatagcctgtatatataaatactagtaaataattatactgggccagcgtaattttactagaattgcggcttgagatatatccgtctatatataactcttaacaggtttagttattagtactaatatatgatc

SEQ ID NO: 190120 - DNA, 425 bp, Glycine max
  unsure (1)..(425): unsure at all n locations
agctncagggtactcattgactccagattgttgattataagacaaaganctgtatggnggnctgcagaagaacatagaccacagactctngcaacaggtgcagatttctgattcatggcaagctaagttactaggttgaccaaggcatcaagttttccctcaagctttttattttcagtagatgaagatgaatccgtggccacctcatggactcctctaaggacaatagcatcatttcttgcactgaattgttgggagttggaagtcatcttctcaatcaaattccaccactggcagtatcaatcatactcctctccatgttgctaagtccctcatagaaatattgaagaaggagttgctcaaaaatctggtggtgaggatagcttgcacacaatttcttgaatctttccagtatcatacaactc

SEQ ID NO: 190121 - DNA, 297 bp, Glycine max
agctttatcttgaaaaactgacttctaaatatttgttctcgtatgaaatggccccgaggaagcctgctttaaagagatccaggaaggataaagcggctgaaggaaccaactccgctcccaaatatgacagccaccgttttaggagtgctgaacaccaacaccgcttcaaggccatcaagggatggtcatttctccgggagcgacgcgttcaacttagggacaacgagtataccgacttccaggaggagatagttcgccggtggtggacaatactggttacccccatggctcaagttc

SEQ ID NO: 190122 - DNA, 281 bp, Glycine max
gaagccacaaagaggagaacttggtcccaaattatctataacaaacggccaaagttgtcctacaaacgagccgcattaacagaccgtttaagaaccaacactcttgacatgcaaggagagagccttgggaggattccaaccagcacataaccacctaaaatacggtatctgaattcttgaaatattatctttcactgagaaaaattctgcatcttctgcccgcgaaccttggtcaatcatgccttgggaacaccacttataaacaaatgttacttaaagtt

SEQ ID NO: 190123 - DNA, 202 bp, Glycine max
gtaatactcttggcaagcattccaaagcatcgtgcaaagaaatggacgttcaattatctgatcgacagggactagtatgcatgaagccactcgtgaaaactcaagctctcggaaaacgagaattcattttcatagcaaaagtgcagataacaaaatcggctcaacactaaaaacaaagcactgcaaaggtatacaaaaacac

SEQ ID NO: 190124 - DNA, 225 bp, Glycine max
agcttcgaatattagagagattctacgttatttcgagaatttttattctgtacccactatctctcaatgaggcagaattggagacggaaaggcatttgtcaatcactctatcccgtttgggctccgcactatgcacataatggaggtcataaataatttttcggtgattgcccatggcgagcattataatgtccagatcaaagaaaaaagttatacaaaacattg

SEQ ID NO: 190125 - DNA, 262 bp, Glycine max
acaaatgtagcttttggaataacttcttcacaatattactcttcctaggtataatagtggagtcccatgactctatggaagtttgacgcttggatccgtacactctcaatgggcctggcatccaacaactctattcccttatgaatatcatgaacatacattgtgaaaggactatatcatccttggattgaaccttatcaattcccattaagtatcaaagcttttcaaggtttttttcaccctccataaagagatgatacat

SEQ ID NO: 190126 - DNA, 312 bp, Glycine max
  unsure (1)..(312): unsure at all n locations
agctttggaaagaggggnnattttccttcgcttcttgccaatctactggctgagcgagcgtccactaagcgcaacactcctgtgctaagcgcgaggaagactctggaagaagatgagttgtacaggttctctaagcgcaccgcttcagttcatccgctaagcgagaaaggcacgccctaagccgaaattcactaatgtgtgctaagcggtccataagtgcgctaagcgcacgagcacgaacaaggccacctanttaagcctaaaattagaatttgtgaagggagtntggactgggatttagagctctgcatg

SEQ ID NO: 190127 - DNA, 159 bp, Glycine max
acaaacttaccccacacttacaattcgcacaatatatattgccagctaaggcccacaaaatcatgcgcaaatgccattgaggcatttcaccagaatacttgtggggcgcttgtttaaccatggaaatcaaaggaatggaggcaatgtggcatgccccat

SEQ ID NO: 190128 - DNA, 416 bp, Glycine max
  unsure (1)..(416): unsure at all n locations
gacctctgagtcacctgcggcatgcagcttattngaagncanactttgggttctaattaatcctcanaacggngggaaancatcaaacctttacagaaggtgcttctataaatcttccccttctttttacaagagaaactattcattttggacagtacacacacaaatattccttgaattgttgatagaggagtaaaggatgccattgtaaatggtccttacattccaaaagttgttgatgacagaaaaaggtagaaaaagactctatttcttggacactgaaagaaaatagacatgctcaatataatgttagagctaanaatattcttgcctccactttaaaactataggagtttatcgcgcttctcaacatgtagatgccaatgaaatttggaaaatcttataagtgactcatg

SEQ ID NO: 190129 - DNA, 382 bp, Glycine max
cacatagaactatatcaacaaggaaagaatgcgaaagaaagaattagtctatctgagataaaaaattgcaaaggaaaatagaaaagattaaaaaaaagggggaagttctttgaaccagacaatgtctgaacaaatgtgcaaaattgtcggaaagaaaaggaaaagagaagggcaataataacttggttaaaacccatgggatgtgtaaagtggtcacctattttagttacaaaccaaatatttgtgtttgctcctgtgccacaccaaacaaaaaggataaggggatataaaggggaaagaacaaccaaagcccaattttctaccaacatccaccttatacagtctatgatcatgatattatgcatatgtatcttgatttgat

SEQ ID NO: 190130 - DNA, 210 bp, Glycine max
aattggacattcgagtgagatcgtatgaccatctgaatttctcaagagcttccgtcgtccaattctgagcgtctcgatatgagatttgtctgaatcgcacatccgcgtgaaatgatatgaccatctgatttcctcagagcttccgatgtccaatttcaagcctctcgacgtattatgcgcccgaatcggtcatccgtgtgaaaagtatga

SEQ ID NO: 190131 - DNA, 308 bp, Glycine max
gcgcccgaatcggacactcgtgtgagttgttttggccatttcaatcacacgagagcttccgatgtttaattgggagcgtctcgctctatcattaacctgaatgggacttccgtgtgaaaagtattgaccatttgacgttccccaaagcttgcgctgttcattaaccaacgtacctatatgctatgcccactgatcgcacatcctggggaaaagatgtgactctttaaattcctctagaccttgcgaagataattgcaccgtgtcgaaatctatttgcctaatccacatcctgtgaaaagtttgaccat

SEQ ID NO: 190132 - DNA, 305 bp, Glycine max
  unsure (1)..(305): unsure at all n locations
agctagctcaacttgttttgtaggtgttcattctcattcganggcggcggagcaacatatttctttggcctaataggaactccaatgtttttgcagcttctgatgtaatgaaaggtttggccacaccttccacgtgtaaagtcaggcaattccctctttagcctatgtcctatgacattggcttcatctacgaatctcctcctatttttcttaggccttcctctttggacctttttatgtggaggaacaggttgtgcatactgtgtctgtgcccaatattgtggtccttcgactgggttaataaa

SEQ ID NO: 190133 - DNA, 319 bp, Glycine max
  unsure (1)..(319): unsure at all n locations
ggcaaaattggatgagggaaagagtggttttcgaaatctgcactttatgcagaattttgctgttgaaatgtgcagcanaattttgcgtaagtgcagaaaaatgctatgtatctgctggttgtggaaagagtattaccgaatgagttctagatgttngctagtagatcccaacggtcaaaatgtagacttatgtactagagaacttccaggaaaatttcgagtcgatccaacggttaatggaattgaacgaaggacatgttactggggtctttaagtgagaaaaagctgtgattttgtttgagttcgggcagagtttctg

SEQ ID NO: 190134 - DNA, 247 bp, Glycine max
acagaagcttaaaatattttattgaaacaactatatataaagagcccaaagcataacaaaaacatcccttatttctaggcataacaggataaatttaaatttaaaatacagaatcataactcctaatttttgaaactttaactcctaaaatctgaaacgtaaacagaagcaaaacaaattcctaaaaaccaggaagggcactacacattgcagcagctagtatgggcactctttcaacaaatcccct

SEQ ID NO: 190135 - DNA, 414 bp, Glycine max
  unsure (1)..(414): unsure at all n locations
agcttgcttataaaatgagccttncatcaggtcataacaatttatacatgnatnnnaggggcaagatccttgtgatgaaaagtggttagtggttctacacgacaaagcaattggtgttaatatcaaagatgatgattcaaccgttgatacttgtctcactcctttctccacacaaatgttgactaactgcgacggagaagaagaagatgatgatgtcctcacaaatcataatatcatgatgaaggagaattaattaacatcgcataatggaatttattttatatttacttggtttgttaattttatttacacaacttaatatagttctcatatgttgtgtaattaaaggtgttttttaacaaacacaatggcacacttcctagctcacctccttctcctcctgagtcaacaaca

SEQ ID NO: 190136 - DNA, 348 bp, Glycine max
  unsure (1)..(348): unsure at all n locations
agcacctgagctgcagcttacaagagacctactctgggngactgttttaagatattgtcttctcggnngaacactgaacacaagggaccaacgttccttgggttcattgcaaaaaacaagatttgccttcttggttgtatactggacacaaacaaccaacatctttcgggttcattgcatgaaacgtatacaacttcttggttgttattactggacacaagggaccaacttccttatggttcatcgcaagaactgggcataacttcttggttgtaatcactggacaccaaggacgggatccctctgggctcattgcttgcacaggatcttacaaggatagtggaaatc

SEQ ID NO: 190137 - DNA, 443 bp, Glycine max
cacttcaaactcttctttcaacggatcattgaagataagttggcggctgtatctgtcttggcgtcacccagatgcagtaaagttatgcaatgcatgtcatctggtgttttttatagatagtacctacaaaacaaacaggtacagactcccactacttgactttgttggagtgacaccaacggcgatgacattctctgctgggcttgcatatctggaggctgagcgtgttaataatattgtatgggctttggaacgatttcgaggcctatttttaagacacgatcgcctccctcttcgtattgtcactgacagagacctagcactgatgaatgcagtgaaaactgtgtttcccgagtctactaatttgttgtgcaggtttcatatcgataagaatgtgaatgcgatgtgcaaatcttaatccggaacaaaatgcgtgcgactat

SEQ ID NO: 190138 - DNA, 331 bp, Glycine max
  unsure (1)..(331): unsure at all n locations
agctnggacgaatccgaacctatgtntctgatttgtgtttcttaaaaaccagacactatcctactttttctttccctttctctctctctctctctctctctctaatccaacgagcctagcctctcttccttctctttctctacccttcgccgtctctatttctactcggaacccttcttgcccttgcctttcctcctctcacctccatgacaacctcgatgacaagttgttcgccttcccctctttctttctccctccaaatctaggactccgacaatgacttccttctcatcaagtcgggccttccacctnctctattggctcaaccctg

SEQ ID NO: 190139 - DNA, 362 bp, Glycine max
  unsure (1)..(362): unsure at all n locations
accctaagcacctgggctgcagcttattgcgagatcctttatgggaatgtcnctttctttttgcgccganccattgcaagagcaccgcggctattgcaaaaattgagaaccgttattacattggtaagaaatgacatattctttgtaaacaccacactgctttagatttactttcaacatgagctgttaaagtggatcacgtacgcattgatgataatctagcagatcctctgacaaatggatgagctagagagagagcccataacacttctaaaagaatgggactagtgcccttactgcgatgatcattcatgatctcagccccacctaaatgactggagatcccaaaactagtgtcattg

SEQ ID NO: 190140 - DNA, 333 bp, Glycine max
agcttgccacccagctcgacttgtaagcaattgtgcttcctccacaagcaacagccttctggaggaatcttctggagggcccaagtgggcctggttgctatttgcacccccatttttactaagtacacccccttgcctttttttgtgattcttttttcgtaaaggtacggaaacttacgaatttcgtaacgatacttgttttctttccgtaatgttacggaaccttgcggattacataatcatcctctttttttacttacggaatgttacggaacctcactaattgtgcaacgatgcttccatttgatttccggtgtgtcacggaaccttacg

SEQ ID NO: 190141 - DNA, 245 bp, Glycine max
  unsure (1)..(245): unsure at all n locations
ctaaggtaagccccacttgagaggagaaggcccacagactgctngagaacaaaagctctcttaatatctccttttccgtggactagctcatctaggtccctatatggaaggagttcaacctttgcccccacttccatattaagcccactaaggaacctagctatgcttgttntttccacctccctaagttcagctcttaaaaggaaggagtccatttgttgtctatattctctgacactcatact

SEQ ID NO: 190142 - DNA, 337 bp, Glycine max
agcttgccacgcatttctcccaggcttttattgttgtttcctccacaaaaaacaaccttctggaggaatcttttggagggcccaagtgggcctggatgctatttgcacccccatttatactaagtacaccccctgcccttttttggtgattcttttttcgtaaagttacggaaacttacgaatttcgtacgatacttgttttctttccgtaatgttacggatccttgcggattacataatcatcctcttttttgacttacgaaatgttacggaacctcactaattgtgcaacgatagcttcattctgatttcggggtgtcacggaaccctatggatt

SEQ ID NO: 190143 - DNA, 341 bp, Glycine max
ctgaaaaccctagccatgcaacaagttctagggaagaagacactgagatggacaagaaaatccgcggtattgtgagtagcatctcgaaagacgcctctgtgcctgatgctgagaaagatgctccaacatcttccaccccacatgttgctgcgcctgatgacgataaagatgctccaacatattccgatccaaatgctgaagccctcccttcacccagtgaagaggaatcaacagaagaagatgatcaagcctcagaggagacccctgcaccacgggcaccagaacctgctccaggtgatctcatcgactcagaagaagacgaatctgatgacgaacccatt

SEQ ID NO: 190144 - DNA, 283 bp, Glycine max
aactaagctctttatcaagccctctcaccagagtttcagacccaagaatttcaggagagcaaattgcactatgattatggattactctctcctattttctgtttccattcaattcaataaaatatgtcttcccttctcattatattcttggtgattaacaaattatcttctccttcaactagtgaaagggtgttgcaccatgtttgaataaacatcacaaataatcaatagttaccttgaaatatatatcacaaataatagaattctctaatagcttttgact

SEQ ID NO: 190145 - DNA, 79 bp, Glycine max
  unsure (1)..(79): unsure at all n locations
aaagaagaacacaagcccccnccagtatctctgaacgacaaaaccccggccaggaagcaaggacaatttcccaaggaag

SEQ ID NO: 190146 - DNA, 228 bp, Glycine max
caaacaggaggggacaggcgcaaaaaacaccccggagcccccccctcccccaaaaggaagagcgaaaaacgcgaagaaacgaacaggacgcaccagcccctaagcggcaacaccgaccagggaaagaagaagaaccggacacccacaaacaggaaacccaacacctcagcagatcgctcgaagccaaccgaaaaaaaccaaccaaaaacccccagggccccaggaaaa

SEQ ID NO: 190147 - DNA, 285 bp, Glycine max
ctattcaaactaaagatataatattgttgctcagttgctttcacgggcactagaggctaatcctctacactttgactaggaatcctccctcaacacgagacactcaggttataagcaacaaatagggcactcaactgccccacaaaggattgttcctaacttgttggtaatgaaagctctatgaagagtatttaatgaacatatttttatacccacaagattaggaccaacccgctgtggaatatcaattgcccctattgttgctcctctactgagtggctcttg

SEQ ID NO: 190148 - DNA, 280 bp, Glycine max
  unsure (1)..(280): unsure at all n locations
agcttgtaatcgatcacacgcattctgtaatttatttccagagcaaannntcagaaaatattctcagcagtcacatctttttatttggttcttgaatggctgtcaaaggcctatatatatgtgacttgagacacgaatttgcaaagagcttttcagaacaaaaaggtcttatcctcttaaaaagcaaaatcatttcatccttttanaaattccttggccaaaacacttgtgattcaataaggaattatttgagtgctcaaattgtcaatctatctctttc

SEQ ID NO: 190149 - DNA, 259 bp, Glycine max
  unsure (1)..(259): unsure at all n locations
agcctccatcactctagcaagtgtataagtgattaatctantgactatcaaagaaggcgacataggccacatactaaacatcactctcaaaaaagagaaaaggatagaaggcctcaagaggttaacatttgcctatcatatctccacggacaagaaaatggtgaggcctacccacatcgggaaatgaaggatgaacaaccctttgctcgccccatattaatgaagaggaaaagagaccattggctacccttagcatcca

SEQ ID NO: 190150 - DNA, 343 bp, Glycine max
  unsure (1)..(343): unsure at all n locations
acctctaagnnacctgcagcatgcaagctagaggatatggggtacccatcacatttgtattatgtggcggacgggcgatggagcacaacaagttntccacatncacaatgcgcgcataaacccaccatcccctgttgcccacccaccactgaactaacgtactcccacgtaacccataacactcgtgtctctccacccgggtccccatcaatcctcccaagctcccacaacatccaatcaaaacaacattcaaacagcacaagctatcacaagcaaacaaaacagagcaaaggcagaaaactctgctaacacaacaaccaaaaacacagcttttctctcttaa

SEQ ID NO: 190151 - DNA, 361 bp, Glycine max
  unsure (1)..(361): unsure at all n locations
tcaaggaagctacctagtctataaagagaagcttgtgttcacttgtngtcactctgatgaaagagagtcttgtgagacatacttcaaagatccactcctctacctctgttattccttcaatttcgtgctcccccctctctatttctctccctatttcatttcctccattgaagcatcctctccaagcttcttatgcaaggctcataattggcggtgaagctccttcttccatggctcattccctagtggatggcacctcctctcacctcttctcctttgacttccgctgcacctccatggtggaaaatcaccattgaaggacctcattgatactcaaagatctcacctccatataagcccc

SEQ ID NO: 190152 - DNA, 203 bp, Glycine max
  unsure (1)..(203): unsure at all n locations
agcttagggactattcccnacctatacctaattctatgcaatngggaggacatcaaatttaatatttatgctaaccaatgcccttaaggcatcagttaaaggacctaaaagaataaaattcaacaaattttcttattgggatgcgtacaattgaaatgtcatgaattcttttatgctctgatgcgatttttacactaaataat

SEQ ID NO: 190153 - DNA, 267 bp, Glycine max
  unsure (1)..(267): unsure at all n locations
acctgaggcatgcaagctttgagcaaattcaaacgacaataaccttttactcggatttctgtttgagncccgcaatatatcgagacgctcgaaattgaatgttgaagctcagagcaaattcaaacgacaataacttttttctcgtatgtctgattgagtcccgcaatatatcgagacgctggaaattgaatggttaagctttgagccaattcaaacgacaataaccttttactcggatgtctgattgagtccagtaatatattcgag

SEQ ID NO: 190154 - DNA, 331 bp, Glycine max
agctttgacttgagtcatcaagagattatatttatgtgaccatggcatgaatttaaaagtaatctatcttttaatcttttctcaacatcattcaattctttctacagaatctttctaatttatttctcttcatctttctaataagttttgttcaaacactttctcttccaagaaaagttctttgttcaaaaacttggtgtattcatattttccattcacttctccctttgctaaaagaacgaaggactaatcgcctaaattcttttgtgctctcttctcccttacaaaagattcaaacgactcaccgcctgagaattcttttgatttttcc

SEQ ID NO: 190155 - DNA, 459 bp, Glycine max
tggtccacatgccattgccatgatagtggcatatgcggacttcattaatgaatattactcttttgtgcaatggatatgaatatgtaaggatatcttgttaatggaaacttggggattgtctagtttgaccaatttatacagaactatatacatcggaatttatttttctgacgtcaatttcaatcatgacctctaagaattaattatgtctcttgctttgaatattttgcgtttcccactcctaattcaatttttaatactgccacaaggtcaaactgagagctttgatcttcctattaagaaaaggatgtatacatatcataccttccactcgcacatacttttgatagggtcattgacgagatattcatatggcatggtgcttcaatacgtcttggcgtggcgaatgttacccccatatcgctatctcgcgctacgaaatgaacaattgatgtaata

SEQ ID NO: 190156 - DNA, 333 bp, Glycine max
  unsure (1)..(333): unsure at all n locations
tgcttgggaagaaacatgagggaggagcatctcttggcctttttttaagcncccngcggncaacaagaagcgcctaatgaagtgcatgaacaacattgattctcgtgaagatcatcatcatcatcatgcagtgaaacacgtgccatgcttcatggtgcctgtgtcaatgctcccaccaccaccaccccctgagattagtggggttcaccaagggaaattgaatgggtcacttgtgaggagactaccacggagtgatgaacttaatgaagaaaaaaaagaaagcctttacctgtgcccccatgttctgagcaggaccatatccctatcaggacc

SEQ ID NO: 190157 - DNA, 189 bp, Glycine max
  unsure (1)..(189): unsure at all n locations
gctnggngcatatgatatatatgctccagctttgtgtggagtgnngtatgttgaacattcctttatagatttagcctcgtttggtagctaaatctgtaagccttattcagaaggcagcagtgaaatggcactggcatctctcctctctctttttggatcctatatatatgtaacattttgaatctaata

SEQ ID NO: 190158 - DNA, 438 bp, Glycine max
  unsure (1)..(438): unsure at all n locations
ttatactctctgatcgatatccagtggtatgtntcgttttcaaaaagcttgcaacctgaatttacatcgttccaatcaatttcaatatggtctaatcgattacaatatattggtaatcgattaccaatgtgtttgaacgttgaaattcacattcaaatgtgaagagtcacattctctcacataaatgctttgcgtaatcgattacaatgaattggatatcgattaccagcgatatgttatgaataaaaatcaaaagatgtaactcttccaaaggttctcaagctcttctaaaggttataactcttctaatggttttcttggccgatatgacgagtctataaaagcaagaccttaactcgcattctacacgacactgaatacattaattacaatgtcttaccacctctagtctctttcgacatctacttgaatttcttc

SEQ ID NO: 190159 - DNA, 307 bp, Glycine max
  unsure (1)..(307): unsure at all n locations
agctntaattatgggnctctgtctgttctacttgttacctgncacctccagcaagggcatcagaccccctactaatcgagctttcatcaagaagtactgcgtctccaggcaggcgcagggcgaaacaccacancancctgtggatggctggcagcgggcaacatacgcaccgccatcacctctagagttcacctctgctcatccacaaaaaggtttgagtattgcctacaccacatggccgaccaataggcgaccaagtccaaagccaaaggtaagcaaagtactaggtcagtgaccgacaagtcat

SEQ ID NO: 190160 - DNA, 460 bp, Glycine max
  unsure (1)..(460): unsure at all n locations
gggaccttaagtcacctgcggcatgcaagcttgaaataggaaagctgtcaagggatctttatacatattaantnngtncagggtaaatgcttaccacattcttggtcatgagcctgtcctttggagctttcaaagctggctccaaatctgacttctccaaattagcctttcctgtaatactgagcagaaggatgtagaggagtattcttattaatcattttagttcatagatgaaaaatgcaaagtagaaagttataaaactaaagcttttcaattgatcaagcaaacaatgcaataagcttcaaaccagtagataccaataaaaagaaaatggaaagagggtagctccctagaattacaagatggagcttaatttatctattcttttatccttttccaccatccaattattggcccaactccaactccattcctaaattcctaacacacgacaagttaa

SEQ ID NO: 190161 - DNA, 365 bp, Glycine max
  unsure (1)..(365): unsure at all n locations
tatgccgtaatattacaataaacctcctcaacctctactatcataattaaccacagcagaacaattatgaccttttcagcatcagattcaaccctgtgatggggaatcatccttatcttaaatggtccatcccttatcaacatcaacagcagcctgctccttccttccacaatgctgctggcccaagcataccatacatttctccaccaattcaacaactacaacaaccccagaaacaaccaacagttgatgcccctccacaacctttcctcgaagaacttgtgatgcaaatgactatgcacaacatgcaatttctacaatagaccatagcttncattctgagcttgactaatcagatgggacaa

SEQ ID NO: 190162 - DNA, 328 bp, Glycine max
  unsure (1)..(328): unsure at all n locations
agcttctaaactntatacaatattgaagctctgtttccactcgnnagacaaggggcctcagatatcttaagaagggggggttgaattaacatattacacactatttccccaattaaaattctatttcactttctattcaagttacaaattcccttaataatgaacttcttaaatattgattcaaatagaacactttgaatataaatataaaacaataataactaaaggagtttaagggaagagaaagtgaaactcagattatactggttcggccaccccttggcctacgccagccccagcaacccgctgagagtccactatcttgaaa

SEQ ID NO: 190163 - DNA, 302 bp, Glycine max
  unsure (1)..(302): unsure at all n locations
cctgcggcatgcaagcttggagaggatgcttcactggttttatatatagacggagggacagagagagggggagcaccaaattgacggaagaaaaagggagagaagccgaactttgagttgtgtctcacaagactctcattcatcatagttacaaccagtgctacacatgcttctatttttagactaggtagctnccttgagaagcttcttttagaaaacttacttgagaagctcctttgagaaaacatcccttgagagccagagcgtatactcacacgctctcataactaacctacctcctt

SEQ ID NO: 190164 - DNA, 254 bp, Glycine max
atccttaagtcacctgcggcatgcaagcttaaaaaaagcttacaaacttttatatttgtgatcatgtcttccgcaatatagggggagaaaaacggatgcacattttatctatatacaattggttgtcgcttgcttgaatcttgatttcaggcattgcatcgtcatcatcaacaagggggaagattgagaatgcattggctttgatgtttgatgatgatcatgataatgtgttgcaattgatgcaaatgggcttt

SEQ ID NO: 190165 - DNA, 398 bp, Glycine max
  unsure (1)..(398): unsure at all n locations
tcttnttgaagtgacatctctaaccatctttcttccatcttcattccactgccattaatcttcaagaagaagaggactccattgatgaagaagatccaaggcctacaagttccacatggagctacatcatgtggtataaagagcatcttcatctaggtggtgttgttttgcttcctctatctttttgttccgtcaattcactctaattccttggtcttcatcttattctccatgcatatcctccattgtcgtgtggtttggtgttgtttagagtagattcaaaaaaaaaaatcaattaaatcttagatctacatttgttcttgcatttctattgttcaacaacttaaaagaaagtatatttcaaaatcttatggctctcactcttattcaaagaaaga

SEQ ID NO: 190166 - DNA, 347 bp, Glycine max
  unsure (1)..(347): unsure at all n locations
agcacctgcggctgcagcttgatactcttgtcaacggctttctccatatgtgtttaatcctaagnggtacaagaaaataagttttaaatntaatcaacaacttaacaaaaattacaagtgtgtattcaaatgacaatttggcagggggattattatattacttacataagataaaggtttcactagatgtctgggccatccaatgaatgagttcacggcgtccctgacatactgaatctctgaagtgggtaacgggacaatggcttcagcatcgtatacagtgtcaacacacacccttactacatcatttccataagcaacagtgtgttttgtgccacctactccaa

SEQ ID NO: 190167 - DNA, 380 bp, Glycine max
  unsure (1)..(380): unsure at all n locations
tggctggattcgaatatgtcctgtggacagtttcgatgtttatgtcttaaacaganncaaaaggattagcaaacagctgatcgatgttgcatctacaaatatatgccatagagcgattctttttttggctttattgaagcaccaacagttngaaatggtaatgaatttcggttcagcactaaaatcttgaaagctttgccaaaaaaaaaagaacgaagaaatatgcttatttgccagataaacatattaatgcctcgggtctgaaacgtcgtgtcgtttgtgtagcangcatctgtccttgataatatatactccatttgtttattaattataaagatcttttcaacaaattaatttatctttttctataggtctttttt

SEQ ID NO: 190168 - DNA, 422 bp, Glycine max
attttataggggagcagacatagtgttgctctttgaatgtactctttgacctatgcatagtggctctacctctgaatacctcaaattatatcttgttgagcctgcgatatatgccaggtccacctttcactttgcaataaattactgtgagaatcaaagctgctaatatctgctcaacttggagatggagaaacaggaaagccatataattatataccaataaaagaagttggccagagagatatattcaagttggagtctactaaggccctttctagctgatagaaccaaatatatacaaaaatgctattagtttaatacattgcaatttgataaactatgcgcttacgtgtgttatggttcttaagattccctctggggaagatcattgttaaacactctattactttttttttctaaga

SEQ ID NO: 190169 - DNA, 318 bp, Glycine max
  unsure (1)..(318): unsure at all n locations
accttagagacacctgcggcatgcagctgcttgggagctctatgtggctgatcnttttctccaacgggagcctttaatggngattttccaccatggagatgcagcggaagacaaaggaaaggaggtgagaggaggcgccttccattaaggaataagccatggaagaaggagcttcaccaccaagatgagccttggataacaagcttggagaggatgcttcaatggaggaaaagaaagagggagagaaagagagaggggggagcacgaaattgaaggaatataagagggagagaagggaactttgagtatgtctcataa

SEQ ID NO: 190170 - DNA, 303 bp, Glycine max
  unsure (1)..(303): unsure at all n locations
agctngganaaataannagagccatatatcnctttcttgtgttcancaacagncgggattgggaagctgcccttaattgttattgcatccaacgctctataatcgagtcaaaattgccacgttccatcctttttctttaccaaaatgatgggtgaagaaaatggactattgttgggtgtgatgatgcctgcaccaagcatttcttgtaccataagttcaatctgtttttctgactatggggatatctataaggtctcaccttcattgtgttggcatcctttaccaatggaatggtatcggtct

SEQ ID NO: 190171 - DNA, 92 bp, Glycine max
aattatccaggaagaatgagcttctccacccataaatgccttggataataagcctgaagaggatgctttattggacgaaaataaagagagaa

SEQ ID NO: 190172 - DNA, 373 bp, Glycine max
  unsure (1)..(373): unsure at all n locations
gcaagctnggaatcgatnacacatatactgnaatctttttctatatcacanncncagaaaatattctcaacagtcacatctttctatgtggtttctgaacggctatcaaaggcctatatatgtgacttgagacaccaatttgctaatagtttttcagaacaaaaggtcttatcctcttaaaagaaaatcgtttatcctcttacaaatcctcggccagatacttgtgatcaataggaattattgagtgctcaattgttaatctatctttttcagagagaatctcttctctctcttcatcttaaagggattaaaaccaggatctttgtggaagaatctaacacaagaggatgccttggtgtaaactcgaaagaat

SEQ ID NO: 190173 - DNA, 413 bp, Glycine max
tgcacacgaaaaagttaagcatagcgatagattgtcatatgtacaccttgcgtacattgagttcccatggggattgaacttattaatggataacgcttcaccaaaggtgaaccttatgttttttgagccttggaccacggacatgttcgccctcggttttgttcaacctacagagattggtcgaggcttatcacagacgagccttacattttctagacctgtaaggattggcacgcacgaaactcttgatgaatcttgagtgcaacataaatgatgtgctctggcataacggcctcttacatagtggcatacaataggggcatggtggtgtgaacatattgacttttaaagcgaacctttggttttgagaccctttgaagattgacaacgattgctgactgcgtttgacacca

SEQ ID NO: 190174 - DNA, 290 bp, Glycine max
agctgagaggatgcttcaatgtgtataatatctatggagacaacgagagaagggggagcacggaattgaaggaagaaaacgggagacaagtcgaactttgagttgtgtctcacaagactctcattcatcaaagttacaacaagtgttatacacgcttctattaataactaggtagcttccttgagagagcttcttgagaaaactttcttgaaaagcttctctcagaatacctctcttgagaagctacagcttacctacatactcccctctattaactaaactcacctcct

SEQ ID NO: 190175 - DNA, 184 bp, Glycine max
aggaaacggaaagcacgaacggcccaccctccccccttaaggggcggagcggcaaacgggcaccaaaaagcacgcgcccgccagcaacccccaaggagcggcctccaaccaggaaagggccgtagaaaagcgggaaccaaaaaacggttccccggcccgggaggaaaaaacccggggagctccc

SEQ ID NO: 190176 - DNA, 359 bp, Glycine max
  unsure (1)..(359): unsure at all n locations
agcttntaatttcttatttaagggttgtgcngttataccacacaaaactntatggttgcaaatcctgttcttgcccccactattatggagcatgaagaccccacttagaaatttctgcaggaagaatcatttgaccaatggattcatctgttattgtcctaatagcgacagaaagtgctacacccaaccaccggaacagaaccaacacacaaatgccatactggcgaccataaatttgaacaagaaagttaagaatttggaacaatgttagtcttacaaaattcaaattgaatgttggataatcaaatttaaccggtaccgatntaacttaacttctacgatcattcgcctagaaaaat

SEQ ID NO: 190177 - DNA, 362 bp, Glycine max
  unsure (1)..(362): unsure at all n locations
aatttatttattttcaatgaattctataacattattacagngnactgcattacctcaattctataatagtaattcctaatattgataaacttaaaactttaataggaatttaatttactgtcaataactaaaataacatgacaaaataatcacaacttattacatgtttatatcaacatatttgctgctgaccgcttgtataaattaaactcaatttaaaaatgtacctctaataaagtacaagatacataaattaatttttaataacaaagtattttgcgtttttctctctaacactcactctctctgaactggctgaatgctattcaaaaatatcaaatttagtggataacatttttatt

SEQ ID NO: 190178 - DNA, 281 bp, Glycine max
  unsure (1)..(281): unsure at all n locations
acctgcggcatgcaagcttgtcagaagtctataccgctganntaatgttatnagatttcttagattnccttncnctttcggtttccgaaatctacctcattaaataaacaaagagatcttgcttcatctgttcttgcagttccaccttttctcatatcatattgcatgtttttgtttctctggccttgcttggtataaatatgaaggtcgattttttgaggatcctaacaacgagggtttgacaatcgattttgatagagatataagccaaacgataaacg

SEQ ID NO: 190179 - DNA, 86 bp, Glycine max
  unsure (1)..(86): unsure at all n locations
agctacatccactntctggcaagggaagaattgtgccancttttgaattttgtcaacaacaacaaactcaggatcctgttcattct

SEQ ID NO: 190180 - DNA, 367 bp, Glycine max
aagttttttgcttctcacaagccaccttagcgcaagcaccaatctcatgcgctaacgggcacttgctcacctaagcgcttggacccttgactagaggatgcaaggaagcgtaaagcgcactctcgtgtccatgcacatatacctatctggaatttgaagatctcgaagtgagcttaccacggtgatgcattaagcacacttacctctctattttggaaatctctggaatagcgctaagcgccagccagcactgcattaagaatcatgtttatgcactaagcgcaccattgttggctaaatgcggattgctagaccaatccaagctgtaagaagcgttaagcgctttgccttgagctaaacctaacac

SEQ ID NO: 190181 - DNA, 398 bp, Glycine max
agctttcaaagtacttatagcgcaggtccctctctctaacagatgatcaattcatgggttttatcctattggcttacctgaggatattcgcatggaggtgctgaccttcgaactctccccaatcgcgtgccctctcacgatggtacttctggttggcgtcaatccacccctcatctacgatttttccttttcggtatgcctaattctggcagtccacgttcctagacaagtgggcctagcagtccaacccaatctatggatagttccaatgggctagttgaccgagaacccaaatctgtttccaaccatgctgttccctcttcttatggtcgggtacctgtaatctatcctacccacaactcatggtgggccataatgaggggctttgctttaagtgt

SEQ ID NO: 190182 - DNA, 456 bp, Glycine max
  unsure (1)..(456): unsure at all n locations
gcccgccttgaatcttcttcatcaatggattcctttgcttcttgaagatcaanggcaggggaatggagaaggaataaagatgattagagatgccacttcaaggagaagatgagtcaagaacaaactcaccaccataggaagccattgataagagcttgaaggtagaagaagatgagttgatggagaatgagacaaggagcacgaaatttagtgcctcacatgaggtatgaactttgaagtgtaattctcaaatgatcaaagttgataaaaatgcacacacatggcctctatttatagcccaagtgtcacacacaattggaggaaaacttgaatttctattcaaatttcacttgaattngaaattgaatntgtagagccaaattttggagccaatatttcactaattntgattaggaatcttagctatggctcgtcccactaatccaagatcaagtc

SEQ ID NO: 190183 - DNA, 253 bp, Glycine max
gggggccatccttggatggacttgatattctcagggtccacttggaccccatttctaccaactataaatctcaagaaaactatattatctacacaaaaggtacacttttctatatcggcgtagagagtgtctttcctaagaactcgaagaacttgcttcggatgtcctaaatgctcatttaggctctcaccgcacactaacatatcatcaaattaagaaactacaagtctacctatacaatccctaatacatg

SEQ ID NO: 190184 - DNA, 332 bp, Glycine max
ccacgctcaacaaagaacttatgacacctactgtacgttgatttgaccaatgctgttatgggaatgttgcgacaatccttttaaaccttattgatacattctaataggttgggtgtcatgtggtcatatcaacgtccttttctatcataagccatcgtccatttttgctttgaaatgcgaacaatccatgttgttatggctggacttagttcacgaaattttctaaattttgataaaaaatgtgcttaaaggagtgttgctgctataatactatgaaaacactttacgtatattgtgagtaaataacggaccatcaattgatacttaccaac

SEQ ID NO: 190185 - DNA, 155 bp, Glycine max
gaagaccaccaaacccgtccaaatctatgaagaaaagatgaatctgccccatcacgtccttctccaccaacatggcgagcaccctttatcacccaagaaccatcatgctcttattgagaaccaaacgacgccatgactgaagcacccataagaaa

SEQ ID NO: 190186 - DNA, 357 bp, Glycine max
agcttctttgggactcttgacctcttttatatctatgctatgcgctcgcgactggtccctatcttcccttcgcaacttgagttcactattgctaccccatagagctccgcgaaatttgttccggccatactcttccttgcgagccctctaggtctcttgttcaagggctccttgcggtaattgcattctcttcccgtaacccggcacactcctttcgaacgtgtgtagcggccaacttgaacttctccttggcaagatttgcctttcctaactcgctattgagagtttggactttttcgtcctcttccggagcttcaaacctttttcgctgacgactttaacttggcagccaatcta

SEQ ID NO: 190187 - DNA, 327 bp, Glycine max
  unsure (1)..(327): unsure at all n locations
ctgaagtggcngggcggtgccccttctgtttgctgttctaaccaccggctttggccttagttcttacttttcgagatactatttcttatgtcaccttgcgtatgtctatagcctaaccaatacttcccgcggtttcctctggtgcttaccaagctggttctgtatctgttgatcttgcccaaacccattctaagctcgtagccgtaccccaacattacccggtgcaccatcattggcgtatcagacaagaaaggctgtccacagagggaatctacgaatgcaatgcttactaccttaaacgattggaaatccattttcaatgacttc

SEQ ID NO: 190188 - DNA, 316 bp, Glycine max
ttccacgatccactggagacctgagtgtttatgctttttcataattctgtaacaacatcttaccaaaatatctcgtgtgaaatggctctctaaggggtaatgacgaaatgaaaagatatgagaattataccctgcaatttagctctatttttattccaggtaactatcaactggtccgaccttagcatttcttttattacacttatctatcacagactaactggatatatctaagtactaaacacttttttaattaaatctaataaacattcacttctatcacattatttaacaaaatactcgctaggtaggggtg

SEQ ID NO: 190189 - DNA, 365 bp, Glycine max
  unsure (1)..(365): unsure at all n locations
agacacctgaggctgcagctttcaggtaaatgggcnttattatcatattcaatncaatantttccttcgccaacaaaaccagntgggggactaattggaatcacctcatcatccttatcttctcttctattaatcttatcatcgctgatgtgttggcgcatattcgcggcgattgactttgggtggctattgaaaatagctcccaccaacttcctgaggaaaagcccttatggtacagatattgcctagaatatctcttcttatttatcttaatttcaaacaaattctcgggttatctttctcattccaatcaacatcgagcattaaaaataattagaacttaacttttaatattcaaataatca

SEQ ID NO: 190190 - DNA, 303 bp, Glycine max
agctttaatatatcgaactaaccttctgaatttgcctacaagcatttgataaaaataaattaataatcttaatgtgacataacacagatattatattatctttaactctatataaagatatattaatatgtaattggaatttcaaattttttaattaatttggaactcttattttctaacattaacaacttggttcatggtatcacgcaacgaataactaatttaatgcaggtctatacaacactttccgcgttcaaatgctgccataggaaattatcatccgtgctttcgcttctcctggtc

SEQ ID NO: 190191 - DNA, 327 bp, Glycine max
tatttttgccgacgctcgcatcttcgccgccatgaaaacattatccctcctcggcaaaaaaaaacatgattcaccggtattgactgaaaaatatgctgggcttagtcggccaggaaagacgaccgatcgaggtctaaaaaagaagcctgaccggattacgccgatcgaacatttcctaatagatatgctccaggcgttattcagggattgaatgcgaaaaacaacatccgacatcggtagataaatacccgcgactgatatgtttcacctacactgctcaacttctttacaaacgctaggcgatatatactttaccgtaaggatgtt

SEQ ID NO: 190192 - DNA, 243 bp, Glycine max
agctggaaccgatgagtagttgattgtcgttttgattttgtttttatcttccccattcaatttcgagcgcctcgatgtataacggtaatccactcacacattcgcacaaaatgttattgtacctcgaactcgaccacaccttcatactcaatcttcattgctccctataataaccggactcattcaacatacgaccacaccgtttctgcgcttgaatatctctgagatctaacgtcaattacg

SEQ ID NO: 190193 - DNA, 235 bp, Glycine max
  unsure (1)..(235): unsure at all n locations
ttcttcgngcgagctcatccgatgttgtattttggtcgatgccggcatcttgtcggacaggaaaacattagcccatctcgtgaacaaaaatcatgattcaccggtattgacacgaaacaatgctggccctacttggccaggaaagatgactgatcgagtgctataaaagaagcatgaccggattacgccgatcgaacacttcctaatagatacactccatgcattattcacggat

SEQ ID NO: 190194 - DNA, 92 bp, Glycine max
gcggggacaacgaaaccggcaggagacccccgccaacagaaggcccagcgacaagggaacaaagcggggcacacaaaccccaatactagggg

SEQ ID NO: 190195 - DNA, 290 bp, Glycine max
  unsure (1)..(290): unsure at all n locations
tgatacgaccacaacatgattttgtgatataatgaccctacagtccttgtgaaaaattatgttccgggttaaacatgttcaaggtatcacaacgttgaattttcttctgggcttttaataaatatttgtcgtgttgagtccctgntatattgaaatgctgtttgagccccaccatcaactaagagataatatgtcacctcataaactgttcttgctaacacctatcacagtttgtattgtattacctcatcacttaattgacaattgaaacttcaaacaaatttttaata

SEQ ID NO: 190196 - DNA, 420 bp, Glycine max
  unsure (1)..(420): unsure at all n locations
acgacaaggacggggttctctgatgtttgaancaaccgcgtaacatatcgacatgctcgaaattgtaaacagaagctcgtagcactggcaaatcacaattacttattactcggatgtccgattaagtcccgtagtatatcgagacgctcaaaattgaatacaaaagctctgagcagattcatacgacaattactttctactcggatgtccgattgaatcccgtaatatatcgagatgctcgaaattgaagacagaaactcatagcaattgcaaatcacaatcacatttaactcggatgtccgattaagtcccgtgatatattgagactctcgaaattgaatacatatgctctgagcaattccatcgacaatcactttgtactcggatgtgcaacactacccgtaatatatccagatgctc

SEQ ID NO: 190197 - DNA, 361 bp, Glycine max
  unsure (1)..(361): unsure at all n locations
agcttatgcacggaaaatgtatttatgaaatttatatgcccgaagaaacaccatttcctagttaaccatgcattaggtaccatgttcaattatcttgtttttaagtgaaacgggtttatgatcccaacatggttggctcgnggtgcctaacacatgaaactaagaatgtagtgtgaagtttcacgcttcccccttcttcgtttttgttttgtagaagataacgcaaggatgagcaaacatgacaacaaatggtatacaattttcagatcaaaaagtttgttgaaccatatgcctgatgatgccttgactcatgccaaatgtgaggctggaatttgataacggacaaatgcggatatgtcca

SEQ ID NO: 190198 - DNA, 421 bp, Glycine max
tgccgacaagggacactgaccaccacattcatctgctaccgctgtcaacaccggtcaacgtgcgtccttattgatatccccactaccagaagcatgagatcgagcttcaggtggagtccatgctacagaagggtcttatacaacccagtacgagtccattctcctcggcggtactactagtgaagaagactaccgagccttgaatgcactcacagtcaaggataggttccccattcccacaattgatgaactcttggatgaattgtgaggcgctaggtgcatttcaaagttggacttgttgcaagggtaccatcaaattcgaatgcatgtttccgatattcccaaaacggccttcaagacacaccatgacattatgaattcaaagtaatgccattggggttgtgcaatgcgccgtcatcat

SEQ ID NO: 190199 - DNA, 429 bp, Glycine max
  unsure (1)..(429): unsure at all n locations
agcttctagctcttgcatggttntatagnttataatgttgatttgagcatggncttccctacttctaatcatgtcctgttttgttttgaataaaattaagctacaacatggccagtaagaaaagaatagcattgatacatacctggattttgtgaggatttaataaaatgtttgtgtaaacattatttccgttattgataacgtggcctcatcacgttaagaatagcatgtcttttgcacttgtgctgtatatgggaaactaaactggatacaaatgaaaaacaaagccaagctatgaaagaattaaaatatataagcacacaatagagtgctagatacaaatataaggagatgtgacagaagttgcttccaggttactttcactttgtctgatttccctgaagcaaaaatgatctcaaaaaacaaaca

SEQ ID NO: 190200 - DNA, 432 bp, Glycine max
  unsure (1)..(432): unsure at all n locations
taattaacaataagaatttgatgatatatcactaacataagtcactgaggaattcctttaagaatagagaaatcgacacaattcaacaattacatcataacctccgaactagggtgactagtcgttcatgattagagcataactcataatcctatatgaattaggcatagacataccaatatagtgggaataaggatcacgatctatcctcgtggtattgcccatgcttcacagctctcaaaaaccctcaagcttctctcataattcgtaaaatgatcaaaggtactaaagatacaagatacaacccttatttataacctcctaaaatatattagtccagaaaggcacacaacgaccatgttgaaatccaccatgaccacgattgaagagttcgacgctgaaactctatgacgttgntgataactacgaccc

SEQ ID NO: 190201 - DNA, 281 bp, Glycine max
acctgcggcatgcaagctttgatacttgctttggactcttggaatctgtcaagttggtcaattatttctcgacgtttttgttttgaccgatgtatttctgacatgtttcgctatatatcatgtcttcagataattttttcttatctctttcttctttaatgatgatgtattcgaattctccaagctagaagtgttttaacacattccaccttgcgggggggtatagagatacaatccatttgttagttatagaagtcattgagtaagttattgttactcag

SEQ ID NO: 190202 - DNA, 442 bp, Glycine max
cttgctcacccatggaagcttctaatatctcccacactgtgtggtgtgggccattcttggatggccttgattttcttagggtccacttggaccccatttctaccaactataaaccctaagaaaactatattatctacacaaaaagtacacttctctatatttgcatatagggtgtttttcctaaagactgatagaacttgtttgaaatgtcctaagtgatcatctatgctcctactgtacactaaaatataatcaaaataaacaactacaaatctacctatgaaatcccttaagacatgatgcataagcctcataaaggtgcttggtgcattattgagcccaaaaggcatcactagccattcatacaaaccatacttggctttgaaagcagattctcactcatcaccctttttatcctgatctggtgatacccacatttaag

SEQ ID NO: 190203 - DNA, 217 bp, Glycine max
  unsure (1)..(217): unsure at all n locations
gctagagatgaggaagtgtagaagggtggatcttcctgctnttattgtcgaccacatagtggtacctggagatatgtcgcgggggtcacgaaaccttggggatatcaggtggggtgctattgcccaaaaccatgcttgacccatcccgacccaacccgggcatatttggtcagtgagaacctgtgatgttcctaaacaggcgagctcctagcaatca

SEQ ID NO: 190204 - DNA, 427 bp, Glycine max
  unsure (1)..(427): unsure at all n locations
cttccttgagaagcttgttaagaaatctttttgagaagtnnctctgagaacacttacttgagaagctagagattagctacacacacccatctaaaaactaagctcactctcttgagaagactccttgagaagctagagcttagctacactcacccggttaaaaactaagctcacctccttgagaagctttcttgagaagctagagcttagctacacacccctataatagctaagctcacccccatgacaaacaaacatgagaatacctaataaatcctactacagagactactctaaatgccctgaaatacaaggctaatacnctatactactatgatggtcacaatacaatgcccaaaataagagaactacctattccactatttacaaagaaaagtgaccaaccttgggccatggctcaaaaatt

SEQ ID NO: 190205 - DNA, 440 bp, Glycine max
  unsure (1)..(440): unsure at all n locations
actcacgcctgaaacagcctatatctataactgaaacaatatttgcttttctgtnctncaaaagaagttaatcaagtggagtcaagaagattatacaaaaccaagtcatgaattgactgcatgtacaatactatggacagatgacaatatacattctcctaatagccgatttgggaacataaatacattggaattcataacacagatcgtaaccacattcatacacactgattacagtaactaaacatcacaaaaaacaacgttagcaaataaatttgtcttactacagaaagcacacaataagcactgctgaaagagttaattcttggcttaccctctcatatgtttcatcaagaattattgacccaattacacgaacatcgaccctataggaagtgaaatccttgaaatatctctatttcggcccataatgctgaaaa

SEQ ID NO: 190206 - DNA, 298 bp, Glycine max
  unsure (1)..(298): unsure at all n locations
agcttgatagaccggcctatatatatgcataattacttatattaccgnncgggnacaattaagtttttttttaacgattaattttccttaaactttactattacagtcctgctccagagcaaaagaatattaaagatttaatgtgaagaaggcttttaaaaggttatcatgtcaggctaggcttttataaaggccagactgagtcaaaataaaagtctttaataggctataggccaagcgcaggactcaaaaattcatcgtaggctaggctcaggccttntaaagcctagtctggcct

SEQ ID NO: 190207 - DNA, 100 bp, Glycine max
tgctcagtagcccttccaaaaaccatgaagaccctctggttgaactgttgtgggctcgggaacccattaacagctacagcttcacagatgctcattattg

SEQ ID NO: 190208 - DNA, 275 bp, Glycine max
atacacccttagttaggtcttctatttggtgcttaacactctcattcaacttctcgtataactctgaccgagattccctttctttataatacaaaaacgccaatggaggggaatgaggtctaaccgtgtatgggattaacccattacacactaaaaagggattgttgagggctctagaaccccgtgtttatgaaaatcgtactgtggaaatactaatcccagactttgggtgctataaaaaaccttaaagggtgaaaacactataactattctgt

SEQ ID NO: 190209 - DNA, 423 bp, Glycine max
tagtacttatgttggtagagtgtctttttccatgacctgcaagaatgactactccttcttcttgatgaaatggcatactctgataacaaaaaatatcatgtcacacatgtctttagaaacatatagaataactaactgccctctttctaattttttagcactccaatccggttcatcaaagtgctctttctcctggcttacactgatggcaagcgactacatcttataataattcaccaagctaaatcatcttactgattattaattaaatgcaaatattttcgctcatatagcatgccccttaacaatttttaaacaaatcttttaaaatatctaaacatcttgttaaaacgcatgcccttaaaaactttatctatttaaaaaccgcgctgttacatgtacctcgtcaatctaacaaaatat

SEQ ID NO: 190210 - DNA, 283 bp, Glycine max
gctgcagctgggatttgtctcctttttattattagagcggcaaaagagcaaccgatcatctgcttgaaaatgcaaaaaatgggcaaagaaaggggagatagggaaaaccctgtggacgccttctatacgcagtcccccaccaaagtgttttctcgccatacaacctttctaccccccccatttcacaggcatcctaatacacaagttgttccgattcatgcaacccccttgccaaccaacacacataatatttggcaaaaactgaatcacccaatccggcttg

SEQ ID NO: 190211 - DNA, 325 bp, Glycine max
tgcatcagacaaagatgatagcaaagtcatttctggatattgtttcactttaaacggtggtgccgcaagttggaaaagtttcaagcaagcttccgtggcccattcaactacagaatcagaatatatagcggcaagtgaagccgctaaagaagttgtttggatgaaaaagttcatatttgaacttggtgtgtgttcttcaacagaagagtcattcccactattgcgcgacaataatggggctattgctcatgcgaagaaccaagatcacctcaaagtccaacctattttgcgaaggcatcactcgattaagagatatagaacgcgg

SEQ ID NO: 190212 - DNA, 313 bp, Glycine max
  unsure (1)..(313): unsure at all n locations
agcttaagaccatatctatatgggtatataatttattttaattggttatcttatgttaattagtctttataatatcacattataattaaataatttatatattttttgtttcaataagtaattcctaaataataagaaaatatattctctcataagcnattattattatatatatataatcatcagttaattttaaacaatttaatgtgacatataaataatctacaattagtaaaaaaaattaacaataattatctaaaataaaccattcggtaaataatgagcattgaagatgctctaagataggaatact

SEQ ID NO: 190213 - DNA, 240 bp, Glycine max
ctaggcaagtattgtgtatccaacggtgaccaatcctgaacaatgtattaacagaaaataagacatgccgcaaggcgcaatccacaatataagccattattcctataaaataatctgaaccaaggaccttaactacagttaaatgagcgtatatttacattatttaacctacatattacgaagaacgctttacgggtatattacacagttcatataaagtctcagttctgccaaccttat

SEQ ID NO: 190214 - DNA, 479 bp, Glycine max
  unsure (1)..(479): unsure at all n locations
gcttatgcgcatatttccctaacgaacgttcacttngcaccaagacatctctattatattaatagaaatgcacccatatacaatcaaggtagcttcattacctagattatttacatgtacttccaaggtgtatttgttatttacatcacacacgcctccttggctaaatttacatacatgcatactcaaagcatctcggggtaccaaaaattgcacatgcgctcatcttggtatttctaatacctatacatatacaaacttcatgatgaatcttgactacctacgcaataaggtgctacatttcatgctttcttttttttnttttttttcaagtttttgctacctaaagccacatgcaaattcaagcatattttcctttgctgactaaaattgtattcaaattagaaggtatatatttttttcgtaatatgttttcttcacataacatgcaacacatttatatatattttttgtgagac

SEQ ID NO: 190215 - DNA, 466 bp, Glycine max
  unsure (1)..(466): unsure at all n locations
tatatctggtcgagtgcaagtctgagcatacataatactcccaacaactgatgcatacggaattgcttccatttgcttccgttccagatcatatttaggacattgtgcgagactaaaattgtctcctttctgaattggaacgggagatgctgaacacttttccatcctaaatctctctagtacttcattgatatatgcttattgagacaagcctaacaatccttgtgatctatttcggaatatttctatccctatcacatagcttgcctcacccatatccttcatttcaaagttactagaaagaaacttcttagtctcatgaagaagaccaagatcattagttgcangcaatacatcatcaacatacaggactagaaacataaccttactcccactgaccttcagatatacacaccgatcaacagtgttttccttaaatccaaaaggaaacaatggtatcattaaa

SEQ ID NO: 190216 - DNA, 449 bp, Glycine max
  unsure (1)..(449): unsure at all n locations
tcttgaagaaggatagcaaataaatgggtaaggctgttaagactgaattaatgagggttattctaccccccattgatagatttctttgcttccattctgtaagtttagcctcgcatttgctaataatgggctgccacacagacctatttttagagctgacccctacaggaattccaaggtaagacaatggaatatccatttgactacaattgagagaagatgctgcctccttacaccagtcctcggatttgctcanacacccaaattttctcttattgtagtttatcttaagaccagagaccaattcaaagcttttcaggatacactntagaattttccccgtatcttctccatatgcaatggccaccttcacgatttgaaatcaaataaagattggttggtggtgctttctcttgtgtacagcaatntctttggaagaacatgaaaat

SEQ ID NO: 190217 - DNA, 386 bp, Glycine max
  unsure (1)..(386): unsure at all n locations
tctncattatatgaatatgaaaagtctcggaagcccgggaagttaaatgattctgtatatcatgcaaatgctcatgtcatccttcatgaggataatatatattcgttacaatgtgtaggtcctttgtacccaattctaaaaccaaaaaaaaaagtcagacttgtgaacaggatcagcatgtgttcttgtggttaatattattttcctttgtcatcttattgcagtcctctaccccctcgcgactattcatccagctcatggacaatatgaatgaaaagcctgagttgtttgctgtttctattgatccaaatttctctttttatctgcacagtgaatntctgtctgtctttcctaacaaaaaggagccccatggcatcatactgcat

SEQ ID NO: 190218 - DNA, 393 bp, Glycine max
agaatgtcttctccagcctctcaaccccatttctctctgttattcacgtagcaaatgcttggctaacctctggttatggtagtcctatggtctttgtcaatctatgtgttctaaaggctcttggacttcttagcacacgaaggctcgcttagcgagcatgtttcactgagcgagagtatgtgaaaatctgctaagcgagcttggacacgctaagcgcgagaagagacaatgtcctcgctgggtgagctgactgcgcgctgagcgtgcatatctctgacttatcctcttctagggtttcccatccactaagtgagctggctgcctcgctaagcggatgaggctcacttagccaatctaccttgctaagcgagttcatcagcaactttttgcacc

SEQ ID NO: 190219 - DNA, 421 bp, Glycine max
  unsure (1)..(421): unsure at all n locations
atgattacanaagatgatgacaaaacgatcaaaggtcaatcaaagaatgagttcaagatgttcaagatagaatcaagaacacttcaagattcaagaggaaagttgaattcaagaatcaagattcaagaatcaagaaaatgcttaatcaagataagtatgaaaaggttttttcaaaaactgagtagcacatggatttttctcaaaacatgtttaccaaagagtttttactctctggtaatcgattaccagattattgtaatcgattaccagtagcaaaatgaatttgaaaaagttttcaaactgaatttacaacgttccaattaatttcaaaaagttgtaatcgattacaatgctttggtaatcgattaccagtgcctttgaatgttgaaattcaaattcaaatgtgaagagtcacattctt

SEQ ID NO: 190220 - DNA, 433 bp, Glycine max
  unsure (1)..(433): unsure at all n locations
ctacacaatcaagttggttacttgttgcatattaagttngacaaattaaaagatcttggagccttcatcatgaactattgtttgtactatatgtcaattctcacatatatatatatatatatatatatatatatatatatatacacacacacacacacacacaaacatctcttagcaaactaaggctgaggatcccttctgtgtgcatattttcatgctcacacatttcaagtgttgttatgcattaatgtcttcttatagtttacctttctaaatgatgtgtacttcattaggatcaagcaaactcttgtaggtggtagatgtgtcttaataaattactcttttactctacctttctaagtgatatataacatctttcactcatgctttatggaaaaacgtgtgctatngttgntacacgtcttaatatgct

SEQ ID NO: 190221 - DNA, 441 bp, Glycine max
ttccgcaagacttacggaaagatcttagagttgaccttagcagaggtatccatagaagccattgcatcactcacccaatactacgaccagcctttgagatgcttcacattcggagacttccaattagtaccaaccattgaagaatttgaggaacttctaggatgtcctctcgggggaagaaagccatatctttcatccgggtgtctcccctctttgagcagaattgcaactgtggtcaaggattcaacaagaggtttggaccgcataaaacagactcggaacggcatagcgggcctaccacggaggtacctataagacaaggcgaggggtatggccaatcaaggagattgggtcccgtttatggatgtgttagctctgctaattattggggtcgtcctctttccaaacgtggatgggttggtggacctagcagcaatcgac

SEQ ID NO: 190222 - DNA, 392 bp, Glycine max
  unsure (1)..(392): unsure at all n locations
tttttaccacatctagaatgacggagntgtagtnctctttgtggttgcctcactggcttagctccatcctctaaaagtatcctatgcatgcaagtagatgggctaataccaggaatgtctgctaaagtccatccaatgaccttcttgtgcttcttgagcactagcaacaacttctcctcttgctcagcagcaagggaagtagagatgatcactctgtcaaaagatgaaaatgtatgcaaaatgtataatagcaagtccatgggtctagactttttctgggagggggtccacacaccaaaatgggtcttgacttggttcccataatgaataatatggatgggtgttgacttggtattcagttcctactctatctgtttcattatttttaacag

SEQ ID NO: 190223 - DNA, 465 bp, Glycine max
  unsure (1)..(465): unsure at all n locations
tncttgagaagattcctgaagaagctagagcttaactacacacacctctctaatagctaagctcacctccttgagatgagaagctagagcttaactacacaccccctataatagctaagttcaccctcttgacaaaatacatggaaatacaaaaaaaagtcccactacaaagactactcaaaaggccctgaaatacaaggctaaaaccttatactactagaatggctaaaatacaaggcctaaaagaagaaaaaaaacctattctaatatttacaaagaagagtggacccaaccttggcccatgggcttagaaatctaccctaaggttcatgagaaccctagggccttctttagtagctctagcccaatcctcttggattcttctatccaataccattggggggtaggaatgcatcataaagggatgagacataatgtctcactaagtgctctanggactctaag

SEQ ID NO: 190224 - DNA, 465 bp, Glycine max
  unsure (1)..(465): unsure at all n locations
actaagcttgaattataaagattcaacaagctggccgaggtgaactcttccatgtttatgagaattgatcatcataaggagggaagtttaagcaagggtaataactatgggcaaaagaaagtacaaaaaaatgataatccaacatattaaaagcatgttcggcgtactatttaatctccacaaccaaaccattgaagcttgcacaattcacacgtgtattttatgatatttctgcaactaagtagaatgcttaatgaaagaaaaggaaaaagataacccatgcaacttccaactttgggaaagagtgaacccaatgaattcataaacacggtccaattcatctcatcctagcaacatataacaaatttgacacaanttagcagaatgggtggtggttntaacatgatgcctgcagtttgaagcataataaacttcatacaggcaaagaggatacanagaacatgt

SEQ ID NO: 190225 - DNA, 467 bp, Glycine max
  unsure (1)..(467): unsure at all n locations
actcagctgtggccctgccagtgagtttattacaaaatggcaaagtggtgatttcatcatcataacaaaaaanatctttcattcaatgataaacaagagaggtcaaaagggttggatgaccataaaagtttgtcttgaaaagtcttatgaccaccttaagtgggagcttctgcaagaaaccctcactgacattggttgccctaagaattttgtgcatatgatatggtgttggatttcttttgctaagatgcatatgctattgaatggcgaagttctcgatgagttcattcctaggagggggttcatcaaggcaacctaatctccccttacttgtttgtgttctgcccggagcgctttattcatactattaacctggcggtaaatacaaagcttggaactgattcaacttaatagaacgggttcgtttattgggcacctaacctttgtagaagaaatattgtctttgt

SEQ ID NO: 190226 - DNA, 319 bp, Glycine max
gaccgagaacacgagagggtacatcttttgtggatcagttctagtggagcggacaaccactctggttacgaagagaacaatggaggcgacactcctcgaggatctttgattgtaaaaggattattacactgctgaaagaaatctcaaggaccgcagactcttggggattgaatgtatgcgtgggtcgtcgcccaaccagtataaaaacacctgcgtgtgtgcctcactcttccctacactgttaattattgctgtgcaatcaaattccgcttgtactttctgtcaactgatctcatactccttgtctcttacaacataa

SEQ ID NO: 190227 - DNA, 466 bp, Glycine max
  unsure (1)..(466): unsure at all n locations
tggagaggatgcttcaatggtggaaaagaaagagagagagttattattagaggngggcggngggagcacaaaattgaacgaggaacagaggaaaagaagctgaactttgagttgtgtctcacaagactttcattcatcaaagttacaacaagtgttacacatgcttctatttatagcctaggtagcttccttaagaaacttccttttgaaacttccttgagaagcttgttngagaagcttccttgagaagctagaccttagctacacacacccctctaagaactaagctcacctccttgagaagcttccttgagaaacttccttgagcagcttccttgagaagcttccttgagaagattcctgaagaagctaaagcttagctacacacacccttctaatagctaagttcaccttcttgagatgaagaactagaaatcagttacacacaccccctataatagctaac

SEQ ID NO: 190228 - DNA, 435 bp, Glycine max
ggtggttattcctcaagtaaaggagttggtggatgagggtttggttcgtaagagcttaactccttgtgctttgttggtgtccaaaataggtattatgaggcatcgaatccctataataggtggtatgataaatgtgttgagtggtgcaaccctcgtttgtaaaatcacctatgcatccaacatcttcatgattcacatacatagggactcaattggtaggtttgttcttatttttagtttcaatacaaacttacgtgctcatatgggaaaccttacgtttgttgtactttttggtaggaataatcaacatgaaaatatagaaaaaggtatgttttattgcattactttccttaatcttttaaatagtaatcaaggggctcccacaaaccctaagagaataaaggtcattcctgagtggcccactccaccaagtat

SEQ ID NO: 190229 - DNA, 430 bp, Glycine max
  unsure (1)..(430): unsure at all n locations
ngaactactcactgtaagttgaagctcgatgttacgcttatcttcatatcttacgctaagngcatattgcagagagatttttggtgttgcagaaagtgctaagtgcagcctgtcgcgctaagccctagatgcttacgggattatacaacttcaagttgggcttaacgcgaggctaggctaagcgctagtgttttaaactcaaacgtcacgttggcaaaggcacttggcttgctacctttgcacccaaacctctgcaccctcacatctttaagcaaactcttttactttctgttatgtgtgtactgcttctctgcatcatctatgcttcatttcaagaacaatccaagtaagctagcacatttctatttttttacttttcattcttcaaaccttaggatagatgacttcttggttttcttagttagttgct

SEQ ID NO: 190230 - DNA, 411 bp, Glycine max
  unsure (1)..(411): unsure at all n locations
tctttacccaactatccttggtagtttgactctggcgcatttatttatatgaccaacaatgttgttgcccttaccaatgttacaaattactccggtaatttacaaatacacactgcagatggaaacaatttacctatcacaacaattggtgatattttttcatctcttaccaatgtatatgtttcccttgatctcaccagtaacccttcagttggtcaattagttgataatgattgcagagttgaattctccaaatctggttgtcttgtgcaggatcaacactaatggaagatgatcgcgaaagggtcttaagttggatgtctttttcctctttatttattggtgccaccatggttttttctgccttttatntctcgtaattcctaaactattaatttccaattatggcat

SEQ ID NO: 190231 - DNA, 454 bp, Glycine max
tgatgtcattcaaaacacactatgtatgacctatatgttgtctatacattcattgcttatttatttgtattcattatgcgatataattcgttgtaacccgtcactaaccaattaatattatcaactactcgtttggttaagcaaggaaattgttggtccaacaaaaatcatttacgcgtgcagcatacatcattgtcataattgacaacacataatgacatgcatgcgtattacagtttgagcgtgacaacacattggttgacttcagtacacattttgaaactagcagtcgctcgacaacacattggttgacttgactacacattagcgacaacacattggctgacttgactacacatttacgcgtgtctatttttttgtaaacaaagttaaacaaaggctcggtcacaaccatctatatatatggcagactaggctactaaatcacacatta

SEQ ID NO: 190232 - DNA, 379 bp, Glycine max
actcccacgatgctcctatgtcagtgtatgtggtacgaccatgctcctctgatttccagctaggaaaatggctaatggatgaacgccacggcgtttactcaacgagcgtaatatgcgatactagtcccccgacagtactaatactctgtgacccgtgtacacactccgagcatgaaactattctaaccgaatatgataggaacaaggaagtgtgacttacctcattattataaaggatggacgcccatgaacaccaagaaatggggccgtatgttaaagaatcatgacttataaacttgagaatcttacgtgtactactgtgttttaagataggctcaggtacttccgcacctttccgtgaggaattaatattcctgct

SEQ ID NO: 190233 - DNA, 472 bp, Glycine max
  unsure (1)..(472): unsure at all n locations
actcagcttgtccacatttctcaatagcaacatcaatatatccacgagcaatgggcgacatcatgtacaggttgggaatgacagttccagtggagattattttttggagggtgaaatagacatgactgcaaatttatgaaggatatagaaggtctgatcgtccaactgcagcgactagacacctagaattgggagcgagattcaagtgggggatatacaattgggaatgcttatatgatgcttgatagggattcgacaaatgaaaatcacgatggagagtttactacattatggaagttaaaaatcccaagtaaaggcttattctttgcttggagattaatccgggaaggactgccaacaaagagtaacttaagaagcaagaatatggaaatcaacaacgtccaatgaccattatgcagaaatcatgacaaagatgcatgtcacccattntttagctgtgttagaatcatgt

SEQ ID NO: 190234 - DNA, 393 bp, Glycine max
atatgagttgggcacacaaaattaacacaacggaatccattatatgtatattagctgtaaaggggctaaaagccttacaatctggtcccgcgtggagtaactacacccacaaaatcataccatgagaggtgtttagtaaaattaggtcggtatggaaccacaacactcctaaagacacccatgaccatgagaggcaagctatcggatactgtttacctccctggagcaagcttaacaatccactggagttgcatcatgttctgaatccattataatattatgcttaattgtattatatacttgactatttaattttcaacaaaatttatcttcaactttttaattgacacacaaattgtgataaaattatcaacaataaaaaaatgaatgtaa

SEQ ID NO: 190235 - DNA, 445 bp, Glycine max
ggcaagagatggaccactcgctgagtgagctgatcttgcgcttagcgtgcggcttttattcaggtgctcttctagattccatcttcatgctaagcgcgctaaaaccacacttagcgatgtatatgcgctaagcccgctgagttcacttagcgcgaaagccactttggcactacaagaaattagctcctttttacttgaaattgtacagattttaacattaattacaataaaagagaccctaatgacagagatcaaacacaacaacttttatttacaattcctacaaaagaacaataaattggggaaaaatatacatattttgaaaaagttttctatacaaaagttagtcgtataagacagctaacaatcagcaagcacgatgcttgggtttgacaagtcttgtgtgtagcgtaagtgttgtgccctttcatacatggccttcgct

SEQ ID NO: 190236 - DNA, 354 bp, Glycine max
  unsure (1)..(354): unsure at all n locations
ctaanataattcaatcacaaccagaatcagtcaaacagaacgtgctaaaaaccacaatcattcaaccatccaaacataaggtatgtagtaaaacaaccaaagttagaagttgtaatgaaagccacaatacatggccagaatataagtacggaaaaatagaaactaaaacataaataactggaatctaggaatccgcaggaggatcaaagcaacggtgaatgaaacctatgtcgttttcaagttgagtgatgcatgtgcccatccctacaaagtgagcattaatggcatcgatactaccatccaaggaatcaaagcgctcaccaacataagtacgggagtgtgttcatcttgtgg

SEQ ID NO: 190237 - DNA, 420 bp, Glycine max
taagagtttgagttaacggaaaaatgggtggactacattgttgcacattttgtatatttggggacaattttagtttttctttcaaggagctaacttttagcgcctaataaatttaagcacaaaaatgaatatttaccctattcatattttaaaaaattgatagaaaatcaataatgtttttataaaatcatattaatattaaaaatattttgaaattttagggagctttttattattatggcttaattgcatgcgtttcaagtattgtaatcgcttaattctaatccttcgggtattgtatttgtgcaatttagtccctttgttaaaaagccaacattgttctagtaatatatatatgacatattttatgagagtaataatctaaatgagtgagaagataattttcgaccgataatcata

SEQ ID NO: 190238 - DNA, 401 bp, Glycine max
acattgttagcactcgtgagctaccacatgactttcatttatgattttcgtgaagctagtaaatgaaaaagctaggactgaaaaagctaaaaactacagtgttttgatgtttgcacatggtagcttcagaagaggatgctgaaaacaagctttgtacgcttcaataaattgcacccgtgaagcttgcacatgcatgaatagtataaaagcaaagtggtgtgtaagaagcatgcacatgctactcagagttggtatatcgtgaagcatgcttataggtacatgaaatgatgtatgagaccgtggaagtgtgcatcaataacatatgtcgccagcaataaagctactcaataataacttgaatcacggaccacttaaacatgctttaagtattgatattggac

SEQ ID NO: 190239 - DNA, 444 bp, Glycine max
tcgtcctcagatccctcttggtgcactagacccaatttagacggccctcttaggtttagacaaacttaaactaagttttgtcagtagatcccacttgtaagactagactcagctcaagcagcttatgaaaatttaacttaatttagtctaagcttcgtccacagatccctcttgtaagactagacctagactaaacaacattattgtaacaacataactaaaccaaaacttaatccgtagatccctcttgtaagactaagtttcgatcctgcttcaatcaagttctaaggcaacagtacatttcccaatgctaaagtcacctaactatgcacacaaatggatgatcagaccaaaagcatacaaacattaagcattgaaggaagcattgaacacagaaaacataatcaattagatattaagtatttacatcatctgttcattaga

SEQ ID NO: 190240 - DNA, 449 bp, Glycine max
  unsure (1)..(449): unsure at all n locations
tgtaatngaataccttaatgataaccaactatcttgttttaagttcttaaaacataaccaacaacaatttaacatattacaacacctcataatccattataacatgttatcaaatacaattttaagcataaaaaatcaactttgttcatacaactataagtacacaaagattacaaaaatattaatgctacgtcctattaattttattaataaaaattaattactttaaaatcatataaataataagatctaattaattgataatataatttttagtcactaataaatgcatacgaaactcactctttttcttcttctcaaaatcactcgccattatactgatatagtgaacccaatttatactaatcacttaaaatggtgcacaggtaattntgccaatatatattatgagcaaggtcaactggacatggttgcatttgaccccatat

SEQ ID NO: 190241 - DNA, 386 bp, Glycine max
  unsure (1)..(386): unsure at all n locations
tctaccgnatcgcgtgcgtcatgaatcataaggtaccgcaaaacatagtggcccaattttgtttcaagtcaaaaaaaggcactttacatcaagacattagacatgtcaaaacacggtgcacactatgttctgtattcaaatgccacgctgccagctggtcttgtagagtccaataattttatggatttaatttagtttctatacactctttgaggccaaaaatatttacattattaattaataagacattatagtagttagatatttaaagtaaaaatcaatgagtttatcatatatattattgacttgaaagtattaaatatttgtataaaaactttttataccgataatgcatacgatatttactctaactttatattctaaca

SEQ ID NO: 190242 - DNA, 415 bp, Glycine max
  unsure (1)..(415): unsure at all n locations
agagttattcttatatactgctaccttattgactatatcaagatctgctgcatgctgtgattatgtgttatttatagaatctacaggctaacatttcattgctctctagcctcatgcttgttttgatattgctatagtattggctatgggttattttgcattaccttcaatatgttattggcttatgttagatatatcagaccattcacatggctttgctaaacagtaagcttttgagaattgagataattgaatcatgatgacatacatggtatcagagtttagagcttccatggcctagtgctcatgacttctatccttgaaactcattcttctaaataaaaaagtngaatatcagagcagggtacgtgggcttgtgcattatccatgctttgagcctaaaggacttttacgt

SEQ ID NO: 190243 - DNA, 399 bp, Glycine max
  unsure (1)..(399): unsure at all n locations
ggctctanatntacattgatgtttgtatttatgggaggatgttatatgccattnttgctttaagagtaatgtcccactggtaaaactaactttccaaatgtttgccttcgcaggaatggccccgaggaagcttgcctcaaagaggtccaggaaggacaaagcggccgaaggaactagttccgccccggagtacgacagtcaccgctttaggagcgttgtacaccagcagcgcttcgaagccatcaagggatggtcgtttctccgggagcgacgcgtccagctcagggacgacgagtatactgatttccaggaggaaatagggcgccggcggtgggtaccactggttactcccatggccaagtttgatccagaaatagtccttgagttttatgccaatgc

SEQ ID NO: 190244 - DNA, 420 bp, Glycine max
  unsure (1)..(420): unsure at all n locations
tgacctggccacgccaatagtagctncagaacgcaaccttggaacctgcatctgctcaaattccggcagggaactttcacttcccaagataaggccaaacagagctttcaaacactccgaaagaacagctggactagtgtcctccatctcagccaatggggtacccacttcattgtccccttccttgtggattgaattctggaagtgcggcatcttctctgacaaattacatcttcttaagattgcatcagcttctttttccacgagaacacacaaatgattatctatcattgctccaagtcttttcacgtaatcagcaacagcctcgtatccagatagaggttgttgaatggcacacaagcagttaatgagaaaaatctttgaaggggtttcactagtctgtcaaaacaaacatggcat

SEQ ID NO: 190245 - DNA, 419 bp, Glycine max
actaagcttgtgttggatcaccgactttggtcgtgggactctaacagtttgacagcggagatggttttgtgaactgacgatatttttgctctcttttgattgtggattgtgttgatgcatttattgatatatagtttgcatatttagggtgacaaattatgctatttgaaatcggaccacctcagtcttggaaaacttatttaaagagaattgccttatttatgcataatttcaagttgttaaaatgaggcaattatagtggcgacatgagtacaagttatttttattggaggacggttgtagagaactaatttgcatgaactgcttttaggaatttggatttgtgaatttgcaatgttgtgctggcaatttgtgttggctgtggtgggagacagtcacattggctttattttatatac

SEQ ID NO: 190246 - DNA, 448 bp, Glycine max
  unsure (1)..(448): unsure at all n locations
accagcttaagagttataacgcaaaggaattcattccaggancttttgttctaattcttttttcgttatctaagcattcattcttagattcctttcgggtttattcgctcgggagagggtaatccccaataaatatttaagattcaatgcatgcatcagttttatgggttatacgcttgggaaagggtaacgcctaacataacatcttaagaaaaaagaatccttgggttatcattgctaggcatataatgataacccattgcccatgcatttaagcaacatctataattgaccttaatgcattttaattattgaatcttcgcacaggcacgtgggagataagtagttaaaataggcttgccaacgtgaggcatcaggggcaagtagttaactgatatgggtagaactagtaccagtgcatttgtaatgaatatcatatttacatgca

SEQ ID NO: 190247 - DNA, 466 bp, Glycine max
  unsure (1)..(466): unsure at all n locations
tgaagaccaagtggtattgaacctaagtcggacggcacatattggagtcttctctattaaaaaatagagctatctgtagtcaacatattcacagctaatatgctgtattgctgttcactgccccatattctatcgtagatttaaataaaaatttatagcacgctgtagaattttattttattttcaccaaaataactataatcaactcgaactaaaaaatactaaaagataatggactgtagtacattaagataatcgtattaaatgttgatattgcatattgggtcatggtgatctatggtctatcacaactctgggtgcccctggacacatgtcaggataagaatttaaanaattgcattgaggggtagaggatttcattcacaagagaatcacgacgagaaatgtacctttaaagcatgtgagaaacctgattgataaactcgaatacnggcaatctcacata

SEQ ID NO: 190248 - DNA, 448 bp, Glycine max
  unsure (1)..(448): unsure at all n locations
ctaagcttcttatccaggcactctcttggtggngaaacttcattttctatggcttattctctagaggatggcgcctcctctcacctcttctcatttatcttccgctgcaactccatggctaaaaatcaccattgaaggaccttattgaagctcaaagatccagcctccatagaagcttctcaagcaagcctccatcaatgatgttcttttggtttctgaagtctcaagtgataatttccattcttaaagagtgagtgttatggacacaactttgggtgattgtgacatgatggatatgcaaaatagggtgcatgtcaggaaaaaaataagatagatgtctagcattactggattggagattttctttcccacatgcacttctggaattgtttcccacacactactctagtcattattcactcttcttaagttgttttcaagctcacac

SEQ ID NO: 190249 - DNA, 456 bp, Glycine max
  unsure (1)..(456): unsure at all n locations
ttntacaccttcaacctctatccgagtctntccattttctgttttccattctaaaaccctgtaatttcaccgcagcttccgccacctctcagacatggcgagtgagggtggcaacaagagcttcgcgtgtcgtgaccgtctgcgcgagattgaatcgaatgtccataaatggtgggaagagaaagatgtctttatagccgaatcatgcgagaagcccccttcactcggcaagaaattcttcggcaacttccccttcccttacatgaacggctacctccacctcgaccacgccttctccctctccaaactcgagttctccgccacctttcaccaccttcgcggtgccaacgtcctccttccctttgcctttcactgcaccgacatgcccatcaaggccttcgccgacaaaatcacccgcaagatccagcgattcggcgacccgcccgtcttcccctc

SEQ ID NO: 190250 - DNA, 452 bp, Glycine max
tactcagcttcccattatggaaagctaaatcctttggtggatcttccttgtaggtacttgatgtaaatatcttttttatctatttaatgatgttttgtgtgttcactgtgctatcagatcttcattctaccatgattttgccttgatcatgtagatgcatgtgtttttaggatcattcaatagtggaaactggtctaattcttagaacttgataggacgaggctagtttgtcgtattttcatgaggaatcggggtacggtaacctagttgttatatgtttgtcttaatgcggtcttggacgagtttagtccaacaagaggaatctgcggatgatgcttgatcaggattaggctagactatcatgaggaattggcgtttagcatttcaggagacaccatagaacgcaagagcattgttaagtagagaatatccttccaacatcaggcacctat

SEQ ID NO: 190251 - DNA, 410 bp, Glycine max
tattccctagtggatgacgcctcctctcacctcttatcctttgtcttccactgcatctccatggtggaaaatcaccattaaaggacctcattgaagctcaaagatccggcctccatagaagctccacaagcaagcttccatcaagtggtatcagagcacaagagcttcaagtaggtggtccttaaacctccattaatttttttgctttaccttctcttccattgatgtttcttcaatttttctccatgtatctcctcaaatgtcttgtgctaaatgttgttaacatgattctttagagttttcaccgattaaacttgctatagaagctagattttattttctatggttcacaattctcgttcttgttcttgaaccatgaatcgtgttgagtttacgttcctttgagtttt

SEQ ID NO: 190252 - DNA, 416 bp, Glycine max
  unsure (1)..(416): unsure at all n locations
tgccgcctagctcgcctaggcaagcaagggtgcttcctctataagcaacagccttctggaggaatcttttggagggcccaagtgggcatgattgctatttgcacccccatttttactaaatgcacccccttctatttttttggtaattctttttccgtaacgttacgaaacttcacgactttcgtaacgatacttatttccttccgcaaggttacgaatccttacggattatgtattttctcttttttagctnttgaagaagttacggaaacttacggattgcgcaaaaacacctcttttcgacttccgccacattacggaattacacggatcgcgcaagcctgcttcctttagatttctgagacgtctcgggacttcatttattgtgcaacaaaggacgccaagtatctcaaagc

SEQ ID NO: 190253 - DNA, 455 bp, Glycine max
  unsure (1)..(455): unsure at all n locations
tcgagtgtgcaacgtgactcccaaaattattacttttcccttntatatatcttttttattttggggtcgacaagggtattgcccttgcttctacgtatcctcaggtgcgatgaggaattcagacctacgtagttctttaagttcaaatgtttgtgtgttaaattgattttatgtttttgaaagattccttttaattgcaaacaaaaagtcatttaaggcgttagaccttgaaacgatgttttaaattttgaaaagcggagagaatcgttaaggtgttggaccttgaaacgatcttttaaatttgaaaagcggagagaatcattaaggcattggatcttgagacaatctcaagtgatatttgataaaaagaagntagttatgagttggttntatcttggttttgtttattaactttcaatctctttanagacaaatttacaacactagtgatcgat

SEQ ID NO: 190254 - DNA, 439 bp, Glycine max
actgtatcagctattcaaattctcacttatgctgatttgcaaacaagatgtaattgcaagtcgagagacaggctacgtaacatcgagtcagtgatgtacaaatgctaatatattaacaaattactttaacatgtgaaaaatgaatttgaacttaatattacctagatctgcgtggcatgcgctaactgacagcataatgcataacaacatgcaaactgcatgtttctacttctagtgcatcttaccggtcgataatatgtgggaggaaattttcttgttactcctactcagcaatatatgtatacacgtattacggatagaattcaagtcatagaataatattgacatttgacgtttgatcttgaatgattattgggcctggaggagtgtatgcatcaaggcatggttgaagtgtagcatacttgtatgattaaaatat

SEQ ID NO: 190255 - DNA, 455 bp, Glycine max
tatgagatgaacacagtactccatttcttaggctatggtatatcatcctcttgttgttggcacatgctatcagcaaaaccagaagtgctgaatgaaacctgttccagaggttcacatgtgccaagtctccctgttatgagtacaaccaaaggatgcactttgtggttgcgtggtcggtgttaaaattggttgaagctagccggattcaacaaatattaaagacccatcaactggcaagagagggctggttgtttggatattcttctcatcattcacgatgatatttgtgttgtctgtattctttaagcttatgctgtatgcactacggtttagtggttctgcatgggttgaagatggtgtattatggtttacgcttattgtttgaagaaccaaaaaatactcgatgcagtatgcaacaagttatcgtgctggctgagtcactttgtaaaattgat

SEQ ID NO: 190256 - DNA, 420 bp, Glycine max
  unsure (1)..(420): unsure at all n locations
tagagtacctattgccaattcggntcccaaggctagcaacatttatatttttgttaagtcaatgttgtctcgtaataaagaaatcattgatgtatggcatttttgtttaagtcatccttcatatgataggatgcaattgttaaaacaaacttatcctatgttcacttgtgataaaacttttgcttgtgacacttgccatagagaaaagtagagaaaactttcatttcccaatagcgactcctatgtttatagtctttctctttgatacatgtagatatttggggcccttataccacaattgctttgaatggacacaaatattttcttaccattgtggatgatcacactagatttgtatggatttttataatgactcttaaagctgagacttanactcatttaacagcctttgtttcctat

SEQ ID NO: 190257 - DNA, 284 bp, Glycine max
cccattcctttatattctatttgtgtgtaggaaaacctaatctttctgtgtcttctttaaataaagatctagtgggagagacccctactagtgggtctgtgttaacctctgatgtgtgtttgaaatggcctgtggagatttctggtagaacattcttgattgatttcatttgtttgcctttgagccaacattatgttaattctagtatggactggttatcttccaaccctgtctttgtaaactgttatgaataaagtgtggtgtttgatgattctggagtgagt

SEQ ID NO: 190258 - DNA, 424 bp, Glycine max
  unsure (1)..(424): unsure at all n locations
cctcantcatatccaaatatgcatgtgaattatttatcatcaacaagaatcaagccaaggctattgtgcaagcaatcaatggggtaaaacacaacaaatgattatgatgatggatggctcaaattctcacgaaggtaaactcatcactttcaaattgagctctcaaaactatcatgacatgtataggagaatcaaagatttcaagtcacaaaatgtcaagaacttttattttcaaaacaattacccatttcttgaacatatcctataattcaaagaaaaacatgtcaagtctcttccaccactacgtccactaaagaagggttcgtgaggaatggcttaagtcgatgtctgttgaccttgaagctcttgttgtggagtcgcttttgatctcaactgtaccataagggaaaacattagtaacaac

SEQ ID NO: 190259 - DNA, 454 bp, Glycine max
ctgaaagccgcatgaattaatggacaatccttgttgcggtttaaatgtcacggcacaactctgcgactaatcttgggaaatgaacacttgtcctcctgagttcagggggtgcgatgccaacgcattcgacaaaaccgtcagagcatttccacagcacaaggttgtcgggaacccatcgtcaccccacttggctaaaacctcattcacatcgccgcactcaccacatgccacatattgggacgtgttgaacttcagcacacatgtacctgcaccacagcaccagtaagttggtgcaaactactcaaactctattatattgtatggtctaatctaattatgagtattctcagtgatatgctatggactatatatcaccaacttaaataagcttttggttgatttctagataatatatttatgaacatattctcttgccacatcctttaccataatc

SEQ ID NO: 190260 - DNA, 386 bp, Glycine max
  unsure (1)..(386): unsure at all n locations
ttttatccaaggctcatcttggtggtgaagctccttctttcttggttattcnctagtggatgacgcctcctctcacctcttctcctttgtcttccgctgcatctacatggtggaaaaccaacattaaaggacctcattgaagctcaaagattcaacctccatagaagctccacttgcaagcttccatcactttacaatgtctcatgacacctaagtatacttatggagaatcttggatctgatcttggattagtgggctgaaccatagcagaaattcactaatcataattagtcaaattttggctccaaatttggctccacaaattcaaatttcaattccagtgaaatttgaatagaaatttaaatttccctccaattatatgtga

SEQ ID NO: 190261 - DNA, 447 bp, Glycine max
  unsure (1)..(447): unsure at all n locations
atagcaccccacctgacgtccccaagggtttcttatccccgcgacatatctccaggtaccactctgtggtcaacaataaaagcaggaagtttcacccttcaacactttctcatctcaagcttgtaggattatggggtacccatcacatgtggtactaagtggcggtcgggcgatggtgcacaacaagtttttccacatccacaatgcgcgcataaacccaccatccnctgttgcccacctccaactgagctcacgtactcccacgtagcccatatcctcgtttctctcaacaccgggtcctcatcaatccttccaagctttcacaacattcaagcaaaacaacattcacacagcacaagctatcacagtcaagcaaacagaacataggcagaaaactctgccaaaacaccaaccaaaaatacagcttttaccactcaaagacccagt

SEQ ID NO: 190262 - DNA, 406 bp, Glycine max
  unsure (1)..(406): unsure at all n locations
tactacgctggaagcgtaatgantacttgacttaagcacacaacactantttatagttngcactagaatcagaaggtacggtcaatagagtattctttatgaaatattcttttctatgagtcattgaactatagagtatcaccatcgctaagaacaagaatctcaaacaaccatactctttatgcaattaaggtaaaacaccatactacaagtatacatagaattataaggttcttataatgagtatacaacttacatataagaagtaagaattaaatagttaataaggatgtattaaggaatcataaacttcaactactacattcacgactacgcacaanataaagggagttaagtagtcattgcgttacacatcaagaaagacacacttatccaagacatatat

SEQ ID NO: 190263 - DNA, 439 bp, Glycine max
  unsure (1)..(439): unsure at all n locations
tactcacttgcgtacatacactatttggaatcgattaccattgctgctctgacaatcacagatgtactcttcaaaaggtttgacttttcaattggtttaagttttctaaaagtataactcttctaatggtgtcttgaccaacatgaatagtctataaaagcaacgctttgattttcttttcaatatacttttacaattattcaatcaatcctttacaagccatgaatctctttgaatttcttcttcttcttcttctttgtgccaaaagctttctaaagttttctggttttctaaaccttgaaaatttgcgctattcatctttgtcattcccttctccctttgccaaanagaattctacaaggactaaccgcctgaattctttttgtgtctctcttcttccatatccaaacgaacaaaggactaaccgtctgaattcttt

SEQ ID NO: 190264 - DNA, 456 bp, Glycine max
  unsure (1)..(456): unsure at all n locations
tgatgagtgaaactggcctataatcagatagaccttctggaaattccttcttctgtataagagcaagaaatgaggcgtttgtccctctaggaagcttcctaaanaagtagaatttagtcatcatccacataatgtctgactttaaaacatcccaaaaaagctttaaaaatttgaagttgtaactatttggactatgacttttggatccatagcattcctagatttttgatctcacctcttcttcagaaaacacttgcttcatggatctacatataccctcaagcaactaacaaaaacaccatttaacctcacccgcacatcagcctgttgctaaaatctctattgaaagaaatgttattaatcccccattttagagtttcagggtcatcaacccactgccatccatatgtaagcctcttatggtgttagactttcgcctctagttaaccatggtat

SEQ ID NO: 190265 - DNA, 361 bp, Glycine max
tgtagcctattcacaatatgcataatagatttatattgcgcttagcctagcagccatgcttaacgttgaacgaaatttttgaagaatactaagtgtctgaaacactagtctcgcttagcgcacaaatgcgcttagcgagctcatcattgaaatcaataacgaagaagaacgcgcttattgcgacagggtcgggcttatcgcgatcatctggaaatctaaaactatgtcagttgcgatgaaccggctaagcgctgctggcgcgcttagcaacgtcatcacaattttcagtagatatgagggggtttcacccctcttacaggcattggccctatttagctcttagacctaactaaaccctaca

SEQ ID NO: 190266 - DNA, 467 bp, Glycine max
atcaaactggttctccagttccacaatccaagtaatgctctgagagctcttttgcttcacgcatctgatatacccttgtgtacatcgctccatgctattgagaggacgaacacgattaataactcacacatacaaaaaaattccaataaataatttacaatttataaattaaaagaaaagaatgtaagaacaaacctgagagggtaaatgtggttgtcgaacctcaagttcgttgacctgcaaaatcattgcaatccaaatccttagcttcagaatgacctgcaaaatgtaaggcttggtcccacaaaatacatttatcctatcaacacaactattaactgcgaatataatgcattgtccaaaggctttggtccacacaaaatgacataatcaaatatgtatatttcatctcaaataattgtcaacaattgtatcaaatatggaatttctctttacaataatcatca

SEQ ID NO: 190267 - DNA, 467 bp, Glycine max
  unsure (1)..(467): unsure at all n locations
tgaatcggacatccgtgtgaaaagttatgagcattngaatttctcaagatcttccattgttcaatttcgagcatctcgatatattataagcctgaatcggacattcgtgtgaaaagttatgaccatttgaatttctcaagaggttccgttgttcaatttcgagcctctcgacatcttatacgcccgaatcgaacatccgtgtgaaaagttatgaccatttgaatttgcaagagtttccgatgtttaatttcgagcgtatcgatatattataagcctgaaacggacattcgtataaaaagttatgaccatttgaatttctcaagagctttcgttgttcaatttcgagcctctcgacatattatgcgcccgaaacggacattcgtgtgaaaagttatgaccatttgaatttcgcgagagattccgatgtttaatttcgtgcgtatcgatatattataagcccggatcga

SEQ ID NO: 190268 - DNA, 323 bp, Glycine max
  unsure (1)..(323): unsure at all n locations
tcctttcggtgaagccctctaacagangcagatgtatctctttttgngaaagacctcctaagaaaggaaatgatattaataatgaanatattgtggtagaacaaaattgcagttatattatctagaaaattctaccacaaatattctaggatcttggaagtgtgactattccatgctccatcangacggtgtctgtaggaaagactctcattgatatgggggcaagcattaacttgatgccaatatcgatgtgccgaaggattaggaatctgaagatagttcccaccaggataactttccaattagcatatcattctatcaca

SEQ ID NO: 190269 - DNA, 456 bp, Glycine max
ttaaaggacattccaattttatactaactttccccctttcaattacaagtaataaccttggtcaagaacttgttacttggcagccagaaaagaaaaaccctggattaactccaatggattgggtcaagtttcttggatcagctgtagttggtctggttagtcttttgacctcaatttagtgtttctgtttttgtgttattgtttttcttcttcctgaacaaatgcatctaatgttcttcacaggttgctgtagttagttcacttgaaatgccttcagctgattggtgggtcatcattgctgttgtctccacagtaattggttatattgctaagacttacttcacgtaagtatgttgattgtttcctatcattgcaaatatatgctatgcaatgattattgtgaaaattacctgcatatggctctgaaacttgatctattctttatgaacagtaatt

SEQ ID NO: 190270 - DNA, 415 bp, Glycine max
  unsure (1)..(415): unsure at all n locations
ttcctacaagtcctaattgacattntaaactaggatcaactcactttatactccaattaccactaaccccaaatttagcttttcaaaccctcaaaatctcacacttttccactcacatcactactgtcataccctaatttcgtccggggacctttgcttgatgacgtgcgaccattctttggtcctcgtgaggtgcttggcacccatcattaggcaatttgtgaaattccaggacatgcccaaaaaaaccaaaaaaatattgatgcacaatccgtaagtttccgtgacacaccggaaatcaaatggaagcatcgttgcataattaagtgaggttccgtaacattccgtaagtcaaaaaggggatgattatgtaatctgcaaggtttcgtaacattacggaaagaanacaagtatc

SEQ ID NO: 190271 - DNA, 327 bp, Glycine max
tactagctggggattggaaggatatgcggatatggattattaaagactacggtttgttttttgggggatgcgattactgggtctaaaaaaggcatggaccttctcttggaaccgattgtagctgacttttgccatgcatgccattgctaaaaatgtgaggaactcatgtgcaaggaagccaaatcatgtgtataatctgccaagactgccaaatcgtgttctgacgaatacattaatcaagttcattattaaaggcatacagaagagaaatgctctggaactagacattgggatattaccaccttcattaaattcaaatggacaact

SEQ ID NO: 190272 - DNA, 432 bp, Glycine max
aactcaagcttgctcatcttgcggtagaaagaggacaaccacatatgatgttgttggtgcaacaaaacactgtggcctaataggaactccaatgattctgcagcttctgacgttaagaatggatcggccacacacctccacgtgtaaagtcaggcaattacctctttagcctatgtcctatgacactgacttcatctacgaatctcctcctatatttcctaggccttcctctctggacctttttatgtggtggaacaggatgtgcatactgcgtctgggcccaatattgtggtcctacgactggctcaataaaacggcggtatgtcatattataaagcctctattgacagccactcgtgacacatcgtctcacgcttgccttccttgagaattattgctgcaatggcatgtcagtatggcatccacacatca

SEQ ID NO: 190273 - DNA, 460 bp, Glycine max
  unsure (1)..(460): unsure at all n locations
actcaagcttctaaacatattacaactatatacacacaaggcattcatctatctcctgtgtttacccaccctcacacagacctaaaatacataaaatcttagtagaatacatcttattcagacccttttatacttaacatggcaatacaattctaaagaacagttcacggaagtgtatccatgagagatgagcaggaagctaagttagctgaattgtaataaactaacaatcagttcatgtacaatttgaaaactagctaaattgtaaatttgtcaataaagaaaattatatttatgtgttgatattatcgttttgacaaaagcaccattatatgatatattatctatgcaatgtggtgaatctagggttcctccttttaaataggttaactattaatacatgttattctgcagtgggacattatantaaattaaccaatgggaaaataataacgtgcgt

SEQ ID NO: 190274 - DNA, 451 bp, Glycine max
actagctaaacctgaatactaattgaaaagaaaaaataatttttttagagtcttgactcctctagttccatttactcctcttcaagttaaaaaatgtccaaaatttttataataattaaattaatataaaaggacaaaaaagctttaaaaagtgtactcaaacgatagaaagcatgatttaattatttcttcttcataaaaacactttatttggagccacacccttagtcttttactatttgattcgatgcaattcgattagtgccacacccttagtcttttactatttgattcgatgcaattcgattagttatctatttgtatttataagatgaatattaaacgactttaactcttatgatatgtaaacgaatcagtatatttttatatcattgatatgaatcatacaattcattatttttttcttctaaaaaatacattatttgttctt

SEQ ID NO: 190275 - DNA, 446 bp, Glycine max
  unsure (1)..(446): unsure at all n locations
ntttggagtagaaacatgggacaactcatttatttatattaaggaagtcgtatctagtcaaggtctgagagaccatacaagtttcctaacgatttctaattatgtgggccattaagtctatcatatgctgacaatagccgagaagcccatgaatctcttcgggggtggagtaggtgtctgccattgccttggccttggctaacaagcggngaagttcttgactcccgttcaaggtaagagcaaaccggtccatccacatggttgcctcttggtgtaaagagtcgatcacccttcctctagcctctttntccgcatatacttgagcatactcatccgcgattctatgctcgtgggccatggctagacctaactcttcttggtacttggcgatgatagctagcatggtggtctccgtctcgcataaatgctgagacaagcttcttttg

SEQ ID NO: 190276 - DNA, 469 bp, Glycine max
  unsure (1)..(469): unsure at all n locations
actcagctcgtgattgagntatgcttgacaatgtgcgggcttgaaatgtgccatgggctgtgttgggattatttgaagataatagatacaagtcagaagcaaagaaatcaacacttaggtccattgatattatnggtcttgggatgggacctgaactggagaagaaactgaagtacgcacgagatgtttcttccggaattatctctggaagggagcttgtaaattctcctgctaatgtgctcacaccaggttcatatgacactttgaatgtatatgatatgtgattattgttcctagttctgtagttgcttgnggtgcagttggccagtttcatatctgtgagggaatattgtttctctaaaattgatcagtgcttgatgatttgtttacctcacgggtgttggcagaagaggcagctaagattgcttctacctacagtgatgttttcactgcttaaatattaaatgcc

SEQ ID NO: 190277 - DNA, 424 bp, Glycine max
  unsure (1)..(424): unsure at all n locations
ttccattattttcttctctaaaaaaaattggcacagagaaggactgattcaactgcaatctttgtgtaaaaggttatttactaacaaagccataaacactacttgccgactacatgtagagaagatcatttgctccatttttgggtatttgccaagggaaatagcaatttatatttcctagctaggtttaattgtatttgtagcaaattaatttatatataactttgaatgcatagttnttacttccattacgaaattaattcaattacaaattataatgagcatgcagcatataaatcaaaaacaatgtctcttagatcataatgaagaaaaaacaacaaaattaacacctaaataagaaaatctgaatctgaattcattntaattttctcacctgaagatcttcaatgtctgcttcactaca

SEQ ID NO: 190278 - DNA, 362 bp, Glycine max
gatgcaacatttggagaggttaatgaaacaacgagatgatgcgctctatgagaggttggatcatatggagaatagagatcataatgaataataaaggaggagaagagggaatgatggtgttcctaaacaaaaccgaattgatggtattaaactcaacattcctccatttaaaggaaagaatgatccggaggcctacgtggagtgggagatgaaaatagagcatgttttctcatgcaacaactatgaggaggactataaggtgaagcttgccgccacagagttttccaactatgctcttgtgtggtggaacaagctacaacaggagagagcaagaaatgaagagccaatggttgatacatgga

SEQ ID NO: 190279 - DNA, 213 bp, Glycine max
tatgcctatgttgctgtggatgatctctccagatatacctgcgtcaactttatcagagagagattagacacctttgaagtattcatggagttgagtcttagacttccaaaagaacaagactgtgtcatctagagaaacaagaatgaccatggcagagagttcgaaacagcatgttcattgaatttgcacatcttgaggatcactcatgagttc

SEQ ID NO: 190280 - DNA, 453 bp, Glycine max
  unsure (1)..(453): unsure at all n locations
ntgagaatgatgagaatcactaaactgcccatatacagggttctatgaccaggagtaggaccaaatagttagaggataccctccaacaaatggtatcagccatacttaacaaggctcaagtggagaaggatgaaggcccagaggcactaccaagaatcttgattgttgctgaaggcccaaactactttgaaggctcatgccaaatatgctattcttttctatttctatatttttcgctgtcattttggcctaaactaatttgaaggcccatgccatntttctctatcgttgttttaattttaaattaaataaaattattgcctttccagctgcacctcaaatacactatatgtattgaactcgatttcaatagaagggacttttggcattttgcaatattttggagagctctctttgggtccttgtcaaccaacttagatttataaggaaccc

SEQ ID NO: 190281 - DNA, 441 bp, Glycine max
  unsure (1)..(441): unsure at all n locations
ctaggagactaggagatgagtctttgttaattaattgttggagaagggctgggtccaagagagcctaagcccatgtgctatgccgatgttgttggtgcccaaaaaggatggtacgtggagaatgtgtacagattgcaaggccatcaacaacatcacgataaagtataggcaccccattcctagacttgatgatttgcttgatgagttgcatggtgccaatatcttttcaaaaattgatcttaaaagtggttatcaccaaatcaggatgaaaaagggtgattgttagtgtttagctctactgagctttaaaagattggctaagattntgttaaaacataagcacttatacaatgaaggaaagctggagttgctgcacatgatgtccaacgttatgtcaaggaataagatcgggctgcacaatgtacaaggcaagataaaatg

SEQ ID NO: 190282 - DNA, 462 bp, Glycine max
  unsure (1)..(462): unsure at all n locations
tcttagtttcagatgatgcagatgggtttgtatctacctcatgcactcctctaatgactatggcatcatttctagcgctaaactgctgggagttggaggccatcttctcaattaaatttctggcttcagcaggagtcatgtctccaatggctccaccactggcagcatctatcatacttctctccatattactgagtccttcataaaaatattggagaagaagctgttctgaaatctgatggtgagggcaactggcacatagtttcttaaatcgctcccagtactcatacaggctctctccactgagttgtctaatacttgagatatctttcctgatggctgtggtcctggaagcagggaaaattctttctaagaatactctcttaaggtcatcccagctcgtgatggaacttggagcaaggtaatacaaccngtcctttgccactccctctaatgaatgag

SEQ ID NO: 190283 - DNA, 427 bp, Glycine max
  unsure (1)..(427): unsure at all n locations
ttcctaggcctaagtcacattngggcacctattctatcttctacaagctgcccatacactcaagcatggcagccatatatgcacaagtcaaatccattaactaaaattcagaaattcatgtgcaaatgccattgaggcatttcatcgagcacttggtgggcgcatatttggacatgaacaaaatgggaataggggcaatgtggcatgcccattcattgcaaaatacaccataggcctatggccattccctacaactcactaattcaaacaaaacaagcatgaattcaaggatgaaatgcttcatggatatttgcaaaaatgagcaaataaagcactaaaatgcatcaatggaaagccaaagaaccaaaggataacacacttatttgtaggaatgaacctcaacgcaacaaatggnagcaaaatgtgc

SEQ ID NO: 190284 - DNA, 383 bp, Glycine max
  unsure (1)..(383): unsure at all n locations
atgagggcatctcttcattcagctttgaagagaatgtcatggatcactgtatataccaaaaggtcagtgggagcaagacttggttccttgtattatatatagatgatattcttcttgcgactaatgataacggtatgctatatgaggtgaaacaatttatctcaaagaacattgatatgaaggatatgggagaagcatcttatgtcatacgcataaaaatccatagagaaagatctcgaggcatttatgcttgtctcaagaaacctatatcaacaaaattttagagagatctaatatgaagattgtcaccacgtgatctcccattgtgaaggtgacaaacttgctntgagtcatgccccaaaatgatttgagcggacacataa

SEQ ID NO: 190285 - DNA, 369 bp, Glycine max
gaaagccttggaggaaagaggtatgcctatgttgttgtggatgatttctccagatatacctgggttaactttatcagagagaaatcagaaacctttgaagtgttcataaagttgagtctaagacttaaagagaaaaggactgtgtcatcaagagaatcatgagtgaccatggcagagagtttgaaaacagcaggttcactgaattcttgcacatttgaaggcatcactcatgagttctctgcagccattacaccacaacagaatggcatagttgagaggaaaaacaggactctgctagaggctgctacggtcatgcctcatgccaaagaacttccctataatctctgggctgaagccatgaacacagca

SEQ ID NO: 190286 - DNA, 397 bp, Glycine max
gcaacacaacgctggaggcggtaagggacaatgatccttcaaataaacctgttgtacatgaacagagaatatatcatgcggtgaccgtgtcaaatgaaccagcgaagtcattgcataattgttatactaactatattcaatgtacctgaacaaaatgatttacaaacacgtgaccgacacatatcatgcggtgcccagaagaatcaagttggggttgacttctaagaggaaaaaatgtcatgctttgttgtcgggacaacgatacaaggaatacgttataccgtgatgcaatcacatattccatctccgttatattcattcacttgtgcacactaacctgaatcaaccaaacatacacatgtaagttatttatagtttgttattaaaaaagtaacct

SEQ ID NO: 190287 - DNA, 396 bp, Glycine max
atcccctcataaaattgagaatattggtgctcctacctataaaatcatgcactgaagctgtatgaacttataaacttacacacattatacgaaatgtctcactggtttagatttagatttatgggtggatttttcaaagcgttattaattagtgtatttagatgttgccataaggtcagcagggaacattttaatgtatggagtgtccgtttgtaacgagtgagtttccaaaaaaattgaagttcaaatgcttataataataatgaaatgactttctattggcatctatgatattagtcgctgcacttatgtcataataatctagaaaaaaacttgcttatgtgaagaacattacgtagtatacataagtaagatggttattagactcttggatgt

SEQ ID NO: 190288 - DNA, 78 bp, Glycine max
tgagttgaaacgatggctagtttgcctgaacattcagttatcatagagagccatacaagcgtgctgaacagactttgt

SEQ ID NO: 190289 - DNA, 356 bp, Glycine max
  unsure (1)..(356): unsure at all n locations
atgggaggatgttgtatgtcatttctgttttaagaatagtatcccactggtaaaactaactntccaaatgtttgccttcgcaggaaatggccccgaggaagcttgcctcaaagaggtccaggaaggacaaggcagcagaaggaactagttccgctccggagtatgatagtcaccgctttaggagcgcggtacaccagcagcgcttcgaagccatcaaggggtggtcgtttctccgggagcgacgcgtccagctcatggacgacgagtatactgattttcatgaggaaatagggcgccggcggtgggcaccactggttactcctatggccaagtttgatccagaaatagtccttgag

SEQ ID NO: 190290 - DNA, 445 bp, Glycine max
  unsure (1)..(445): unsure at all n locations
tcaccttctggtcctcctcatagttgttgcatgagaaaacatgctctattttcatctcccactccaagtaggcctccagatcattctttcctttaaatggaggaatgttgagtttaataccatcaattcggttttgtctaggaacaccatcattccctcttctcctcctttcttcttcattatgatctctattctccattngatccaacctctcatggagcgcatcatctcgttgtttcattaacatctccatatgttgcatcaaagcttgcatttggaattgcgaaagccccactccatcattaggattagtacctgacatctcaaacaaacaaatcaaacgtaacaagacaattatagttgctggttgaatacctcacccactcaagtgtatcacacaattantggttttctctaatgaaacactcttgccttttaccactct

SEQ ID NO: 190291 - DNA, 440 bp, Glycine max
  unsure (1)..(440): unsure at all n locations
agagctacttttaagatggcatgtttattacactctgtccaaaatgggtcatggacacttgatgatttcctgtcagcccatacaaatctatgagttctggttaccattactgtctagcagatgccaagtatgctttagctgatccttccatcttatagcaaatgacatactcacttcaccacaaggctacatttaaagtaaaccaatatcagcaatagtgatgtgttatatcatgtcatgtttatttgagaatagtcttgaaattcttagcatgttccttaatatgaaccgcgtttacatnttctctgcgtttctattaatcttcatcactggcttaatcatttcattcaaatcttatgatcttcattcagtggttctaaatccatctacaatattaaagttactattattaaatggtgaagcataaataaccatataaa

SEQ ID NO: 190292 - DNA, 383 bp, Glycine max
  unsure (1)..(383): unsure at all n locations
aagagaataatgttttgttttttattttttatatcaaaattacgatttccatgttgtcacaacttatacgtcctaaaatatgaagatgccaaagatatacacccaagcgaattctttaatgccattttgttaaattaaattcgaaatactcggttatgaaatattattgttatctaattaagttataattgttaactttccttctttntattttttatcaatattgcctatttacattatcattccaactgcaatgccttttgcataaatctcaactttttatcccactgcagcacatgctaccagccaaattaaaaaagaatcaaagctagttgaacaaataatgcatcacgtatcaaaacaatgccgacagaaacttatca

SEQ ID NO: 190293 - DNA, 397 bp, Glycine max
cacacacctcgtgactgcacaccacaaaatctgtcactactcactactagaattgtctcttatgtgcgaatttcctgcgggtgttgatctgtagccaattactatgtagataactttttcatgtgaatctaaaatatgcaagaaatttcatgcgaaaaaatctgcaaaaaaaaaaataggaaacctcttgtggatttatttattcgcaagtatgatttctgcgagctttaaattcgcaagacagtccgcatgaaattcctgcgaattatgtttttacacgaaaattacatgaacttcttttgttacatatagtttaacaaatacagtttcattgaccatggtccttgaatatatatcatacatgtacacgacattcacataatcacataccaaaact

SEQ ID NO: 190294 - DNA, 476 bp, Glycine max
  unsure (1)..(476): unsure at all n locations
ntacatggagctacatcacaacctgcgcagaaacaagattataagcttgttcaacaaatcaaaggtgtaaccaacaccattgctagcagattntcctataaagggaagtccaatcagtcccgtaagcatcacctccataccatttgggacattgacatcaattgtgttgatgcaccatcaccacgaagtctccttcccatcatatttacaaaaagagacttcaagggcatcaaccctatcaaccaggacaaccctatggttatcgccatcataattgccaacttcatagtgtccaaggtcctcattgaccaaggtagctccatggacatactatactagaagacattctagaggctcgaagtctcatttgatatagtccagccacactctggaccactcctcggctttgctggagaaaaagtngagaccaaaggctacatcgacctaatgactaccttcgatcaaggctaactctc

SEQ ID NO: 190295 - DNA, 429 bp, Glycine max
  unsure (1)..(429): unsure at all n locations
aagctganggataccttgtgatcccatctttgtattaaaaatcttaattatgatgattaaaaataaaacttaagagcagctccaacgatacgttgttcactaacatggagatgcanaataaactcaaaggcagtttcttaaccattggagtactgtatgagtttctcacttcgtgctagtgagttctttgcaaagaaatagttttctaccgcacaagtaggtccatcgcaataaaaagtaatattattatattaagttaaagtaatgtgaagttctttttatcatgcatcaaattttctacctttaaaaaatatatccatttgcaaaatantggcaataaatgaatagtaaattttgttagtgtaaatggtacatttttgtaatttttcacacacaacatctttaatcgcgctaattgtctcttaaatt

SEQ ID NO: 190296 - DNA, 452 bp, Glycine max
  unsure (1)..(452): unsure at all n locations
gcttctttcgtgtggacctctcttttaaatgctaattcttaattgttggctttccctaccttgttttgtacaaactttcataattctcacggagagtaatatatatggctgttaaagtatgtttctgaattctgattaaattattggcagataaagatgtagtattagaaccggtggtagtgttgctgatttgatgagcgtgactgacgagccacttgatgagggtcaaatagcatatatctgtagagaagcactgaagagatagttgattgactttgttggcactggctgtttgacttctaccaaggttctcagcttaagtatcattcattgcttataatagaattggagagcaaaatacttcaatacgaatgtttgaaccaagttttctgctgagtctggatgttnttttctcttttatgcttntcctaatagtntcctaaattatgtgt

SEQ ID NO: 190297 - DNA, 396 bp, Glycine max
tatcatatttttatgattctatatgtgaagcttaccaaaaagggaaacaagtaaaatgttcttttacagccaaaaatgttgtttccacttctaagcctttaaagctcctacaccttgacttggttggatcaaccagaactaccatcctctttgaacatagatatggtatggtcatagtggacgattacaccaaatggacatgggtaaggctgctaacccacatagatgagtctttcgataccttctataaattctgtaacaagactcaaaatgaaaaggacatttgtatctcttcaatcataagtgatcaccgggagagaatgaaaatgatctctctgaactattctgtgaagagaatgacattaaccatatatttttcactctaagaacaccaca

SEQ ID NO: 190298 - DNA, 408 bp, Glycine max
agcttagctacacacacgcctcgtataactaagcttaccttcttgagaagcttccttaagaagattcctaaagaagctagagcttagcttcacatacctctctaatagctaagctcacctccttgagatgagaagctagaacttagctacacaccccttataatagctaagcttacccccatgacaaaaaacatgaaaatacaaaaaaaagtccttactacaaagactactcaaaatgccccgaaatacaaggctaaaaccctatactactagaatggccaaaatacaaggcccaaacgaaggaaaaacctatttaatattacaaagataagcgggctatactacccatgggtcaaatctacctagggtatgagaacctaggccttccttggatcttacccatctact

SEQ ID NO: 190299 - DNA, 470 bp, Glycine max
  unsure (1)..(470): unsure at all n locations
tgtggccatgtaaacactaaggtttagagtttgtttcctcattcacatctaaccagtgtttcaataattgctcttttatctagttatgcacacatccgagtccatttagacatttcgggaaaatatttcattgcgttcacccttttggtgcacatttcttttttcaaaaaccttcttgtgttttgatctgtgaattttccaaagaaaattggcggtcattctttttcaaaagcgtgttggccttttagttttcttagttttatttttcagttttatagaaaaagtttgtaacctgggaaaaattgttaccccagattacactttatcaaaggaacaaaaggcgtgtgaatgaaaagaaaaccatacacaacgcccacatatttttgcttagttattttcttgatttggacaaatcatcgcaatgcaatagtacgacaatacactagaaacaatanagtaaatcacaatga

SEQ ID NO: 190300 - DNA, 365 bp, Glycine max
gacctgcggcatgcaagcttggtactatataagttacccttggtctctatatagagattgagttaagctgtttgctcgttgatctttagaattcataatgaggtagtaacctatggaaagattcttttctcatatgatatgacggtctattgatacgcatagttcgctcttgaaagacacgacttgaggctacatgcgaggcttcttgattgttgctgaaaattaaaattaatatgctgattatattaataattgcagtttataggatcataatctctgatttagaggaaacataacatcctctatttatgtacaattaatgtaattaacctatataaacattcacccgctgtgtactctaatac

SEQ ID NO: 190301 - DNA, 468 bp, Glycine max
  unsure (1)..(468): unsure at all n locations
tgcatatgacccttatgtctccattcgagagggacatctagacacacacacacacatatataataaaaggttactaggaaaaaatatctgacctgatgccaattgaacattttcttcagctataggttcacttgctcctgctcccgtgtcaaaaagttcaagtttcttgttaccaagggtattcatgtacctatcaatatcattatcaatcatcaaatcaaagtaataatatcaagttataaatcctcctttcaaatggccaaaaggagtatgcttctacttaggtgttaaaaatcaaaaagaaaaaattaagtttgaattattggttcacctaataccaacagtgaatttttatcatgattttggaagttgaacatgctaacacagaanattggtattaatcataaaatttgttctaaaaccttcacccaaaccaagtacaactgtatgttaatgaaacagttctat

SEQ ID NO: 190302 - DNA, 257 bp, Glycine max
  unsure (1)..(257): unsure at all n locations
gaccgggatcttaagtcaccgcggcatcagctttcttttgagtaatctattactgactaacaantctaaatgcaagttcacattcttgttctttctttgtctaacatacaccacttgttaaactcatgaaaaggaacacaaactccatcacaatcatgcattcaattcaaaataaaagcatataaccatcttcataagtcaataaaagtgcttcactgccatatcattaacaacccaattaaactgttcaaaatgct

SEQ ID NO: 190303 - DNA, 466 bp, Glycine max
  unsure (1)..(466): unsure at all n locations
tatatcacaatatatgcatttatgatttctatctcaaattacaattatgcaaccattgcataacaatgtaataacacattttttattactcacagtgaagttaataaagaggttttgtataaaaaaaaaaagcacacacagggctttatttttggattagactttcttccgagaacaagagatatcacctatgtaataatctaatataatgactatgcatttggtatctattttgcattcaaaatatacaacaataataaatagaaaacaatatatttgtgtaccttgatgcgcattcttgaagcaacaaattttttcttcaatagtgtgaagactctacgtgtattcacactgagaccaatctctgctataactctntgatgagtggaactctaaagagaaaatactcttactacttttcaggtctaaaactagactcgaacttttctcatttgtgtgtgaccct

SEQ ID NO: 190304 - DNA, 371 bp, Glycine max
  unsure (1)..(371): unsure at all n locations
tgcggctgcagcttatgagaatgagggcgattcttatgtgtnttgatgataacaatgatgataacacaagatgatgacaaaggtgatcactaaaagctcaaagatcaatctaagaacaacttatgtgaatcaagaacaattcaagagttcaagataagaataaagaagaattctcgactcaagaaggaagtttagagtcaagaatcaagattcagggttcaagatctccagaatcaagatcaagattcaagactcaagattcaagagtcaggagaaggcttactcaagataagtatgacaaggtcttcttcaaaattgagtagcacatgagttttctcacaacatgtttacccaaatagttttactctctg

SEQ ID NO: 190305 - DNA, 468 bp, Glycine max
taagttctagttaaataatctatgagataagctaatctgttaatagattgatcctttaatgttgggtggaactcataaggcgaatgaagaatcctcgtcaaactggagcttcacaaaatcaagtaagttatataattctttcctaaaactggttcattgatactttggtttcttttgtttagtattttgtgattgggactttaagaggaaggtctttggtattgtattttgttgggtcttgtattccccttttaaacttctatgctcactatcttttagatggatattcttaaaatttgtttatctatcctaatgttgtagctagtttcaaaaagcgttaagttggaacaggaaatccatgacgcaaagcactctttaattaatataataaagtgcacagttgcaggacaaggtaaggatctaaactctgaacttatgaatggatctatatttgcatctttttccttg

SEQ ID NO: 190306 - DNA, 450 bp, Glycine max
  unsure (1)..(450): unsure at all n locations
tcgataggcagtcgattgagggaatgactactacagatttttttcagacctttctcttttccattagaaggacaatatcattctttggatgaagcatgcgtttgatatatttacttttttactcgtgtttacttatttttgtttacttattaattatgatgcatagaaaactctatttttgtccctccttctggttttgtcggaagtgtgccgtgaatttctgctgctgatagaataaaaatatttttaaatggacttggataaacgacaacagntgctgagtcttctaccgctacaaactcgttaccctcgtattgtttaacgttcattgctactgtntagttcataatagtcgtgcttttttacactctcttgttatctagttgtccaaggaccttgttcatgcagatcatgttgtctcgttctcttctctccatcatcattatatat

SEQ ID NO: 190307 - DNA, 455 bp, Glycine max
  unsure (1)..(455): unsure at all n locations
gatccttgagtcacctgaggcatgcaagcnttgganaatgatttctatacaaaagtttatcgtatgaagcgactaacaaactctcccaaatttacagttttgcttgtcctcaagcaaagaaagaacagttcacttgtcctcaagtgacaaagatagtggtcaataaaaagaaaatggtatttgattcatcaaggacatcaaccatatgaattgaatattatggaatgcttaaatcaatcacttctcacaagcatgcagcttttcaaagataggagcacaagtattagagtcacatctgaaataagctagtaagcatgacagaaatcaaggaaggatcatcaaccaaaacctcacagtcattgtttcactcaaactcaagtggttaggcttattccatcataaacaaccaacacatgttccaacctttgcatttcatctcatattatatagtaatg

SEQ ID NO: 190308 - DNA, 461 bp, Glycine max
  unsure (1)..(461): unsure at all n locations
tataannttttattttagaccaaaaccaaattattaacatctaggtcattaatgagttgatcgttatttgactagagaattttctcttaattatccttattctttctatactttaacttaaaaacttaaaagtttaaccatgcctaggtatcctatggtaacatctcatttttcaccatttcaatagtctaaaaatactaaacaatcacataacaaagcaataacattgtctaccacacacatggaaaatttggatgttacaatgtgtacgtaccatcgtgaacatttgttatttttctcattctctctttgtattacgtacattatatcatattatactcatactactatttttcctcttttgatacatatattactattagtgtactaacctcccttgggatatatgtacttatagtgaaccttgcacagagtctacccacacagacacaacatatact

SEQ ID NO: 190309 - DNA, 452 bp, Glycine max
  unsure (1)..(452): unsure at all n locations
cggatcttaagcgacctgggctgcgcttatcgaaatgaatatcttattggganctaatngggggagtggaataaaacctgaaggcatggtctaagggggaaaaaagaggaaagatcgatgaatattaaccaatacgcatgcagacatgaacctataggctatagctaagcaacaaccatatatatatgactcaataaataagtaatgttaatatactctcataataaataattaatacagtataaactcccaggctccaccttatatactaaaatatataattgcatctggaaaggacgtctaaacaatatacaaagatgaattaactgttccagtcaacaaagatgaattaactgttgcttcacattaattatacattaatcatgtccgtggcaactgccaagagaacttataaaataacaggatgattgttaatcagcaccttgatttat

SEQ ID NO: 190310 - DNA, 452 bp, Glycine max
  unsure (1)..(452): unsure at all n locations
taaatacaaacgagatatttccatatatttgcaaggattgtgctaatggacaaagccatacggacatctaagaacttataatgttccatataactctcttctctgtcagttaattgatggagaataatcttaatatgcagatgacttttccatatttttcctcttgaagtatatatactcttctttaatgctcttattatggatcttaacctctattgctaaactttcatcatctgtggccatatgatgttcacacaatattcgttcccagcaatttgttcccctagctaattgctccacttgaatttcaagattcttgatggaagctntggtgttcttacaacaactttgggtgacttaaatgacatctataaagaattattgattctaataatggtttaccacagaactagcattccgacatgttgatggattggattgtctgactgctc

SEQ ID NO: 190311 - DNA, 404 bp, Glycine max
  unsure (1)..(404): unsure at all n locations
attctaattttatgttcttggttgggtgaattcactagaactgtgcttatgttgagggacttaccgatttgcacgagatatataggaaattcgggatattattttttgcatctggtatgcataataatatggacaatctaatcattctttggaatacaataagacttgttttttctgaatattgtcaactgcgttgaattgttatattgcttcagcccacaataacatacacatcactgcactgtcctgacacttgccaagtatgaatgtcttggatgttgcaaaaccaggttgtcctctacagatattatatnataatttggactttctatatccatcctacaatcatatttaatgaataatatggcgataaatctcatggtgatgaatacatatttatttcc

SEQ ID NO: 190312 - DNA, 444 bp, Glycine max
  unsure (1)..(444): unsure at all n locations
actcaagctngtcttgtatgacattaattgaaacagatttgatgattnttgtatggctntaagcatagactcagaaaccagtgaaagcttaacacagctgacattatgcaattctaccatacgacgcataacctccacttgtttgttctctagatgctcaaacgttgagtctttggtactcgactggcgcatgccatttntataagatacaaattgcaagtaacaagttgaggaaacttgtcgcgaaaaagtgtttggaccttctagcgacagacattgaagctcccaatttgagctcattcctctttcgtcattatctaccctatggatattataactccaccaataatggtccaatgatgcattactttcatgaaatcagccatctctcacaatgcctgcttgacattaacacaatgctttggaccacaaaacatatggata

SEQ ID NO: 190313 - DNA, 411 bp, Glycine max
  unsure (1)..(411): unsure at all n locations
agctttangtatatatttcaattcagatttggattctctcatgttatgctatgagagagaaagatacaaaagaaactatagttatacaccattatttgtgtagggtccattaaacattctatagtgacttttccactcataacttgaggggaacatcgaataaggaacattacaggatccaaattntttcaattcacacgcaattactaactgctttcagctcacagtgcaaaactacaccaagcaaactacaaatctacctatagtatagggagattcaaaattatgcgaatctcttggaagttacctcaatcttctcttttctagcaactgaatcccaatccttggctgcaattctcaatttccaatcaagggttacattaacctcaccaactcgtngactatggctat

SEQ ID NO: 190314 - DNA, 466 bp, Glycine max
  unsure (1)..(466): unsure at all n locations
ctcagcttgcatatatgtgaaagtttgtatatatgtagagtcgtattttaatatcatgcttctctttccatccaaaattagatgaagcataatattaagatgggatcctacatatgtataagcattttggtaccgctctatttcttttcatctcttcttaatcattaatgtatgacaatttattttaattagtttttaattctttttattaattaaaaaatttatctgacagttgtgtaaataattttttttaataacttctaatgttttttaaacgttatttgaaataatattttttaaaatgttaatttctaatttttaatccttaatatatttattcaattctctagttattatttttaaataaattatgattttattatttcttttattctatatttttttactacttcaacgattaattntatcanatatttataatttaatanaataattcttgaacttg

SEQ ID NO: 190315 - DNA, 384 bp, Glycine max
actatgctacacgctgttattttctgtctttgcctctctggaaatgcttaaatgtgcctttgttcccatactctggcctattcacaaacatctttgtgcctttaatgtatatgttgttgagtctttccttcaaagccccttcatccctaacaccccagaaccttacaaacctatagctccacctattcttgtttcgtcgggaagatatgaagacatatgtgacttttccccaccttctgaagataccccacacattggatattgtacacttttagggaaatgggtgaaatattattgattgtcttctatccattatcccaacttcatgctaaaggtccttcaccctctcctcttgcccggttgtcctttcgccaccttctccta

SEQ ID NO: 190316 - DNA, 468 bp, Glycine max
taagtcgaagaaggagtctatagtgtttaattcgtttgtctctggttatatattctggaacgtaagttggaagcccgcatttgaggggttcatacagagcttggtgatctattttcctcttcgtcccttattgcccttgagaaggagcttcaagaatagcacaatcaggtcctttattcggaagaaatgttgtggtactagaagtctagagataatttgattaaatttggcaataaaaataccaaatttttccgcactcagatagtaggagaaggaagaataagatttccagctctatgattgatgatatttagtgttctgatgaggaaatcttgaaaagagaagctcacacctttctgaaagttcttttctaagtctatacttctttgcaacctaacaacttgatcctcaacaatatcccacggcttgcccaggatgcttctatgtcccttatagctctgatgttag

SEQ ID NO: 190317 - DNA, 404 bp, Glycine max
  unsure (1)..(404): unsure at all n locations
taattctatgcggccttggctttttttttttctattaacaaatatatatattgcattcttgcttttgattgtggcagaagatatatgatatatataatcattttgcaattaagattcgtctcgaataaacttgtatgtcagggagaaaatttaaggaaatggcacaggccacagagcacacagtttctgaaatattttgttgggggagggttggaatagttgggtgaagaaattgagaggtcattgcatttaagacattctgctggacagcangggcacaggagcanaanaaaaattatatctctcacacggaaaatgaatgattcatatttagtgtagagtgagtatgggaataaaatatcaagctgacgtaagaaatgcagtgacataattatcattatttt

SEQ ID NO: 190318 - DNA, 484 bp, Glycine max
  unsure (1)..(484): unsure at all n locations
tgtgacaatggtttatgagaacatcacccattgttattaaaatttacttgagaaccttccttccctttacccaacatttcaatttcattattctttgaaaaacaaaaagcatcacccatcgtcattcttcttcttctttgttttgcaaccatccttcgagccatcgtttatgacaccctcttccttaacttacatatagtgaaaggaaacatggaataacaagagtaatttaaaaatatttatttcactactcaaaataaaacttcacaacagagtaaaaggttcacattcacaatttaaccaagttaaaacttatcggtaagaatataaaaatgagttctagctccaaacaaagagcgtactggtattacaactganattccaatgagaaacataaaagtaaatcatggttaactacatatatcaaaatagcatatgataaaaacaacatanaaccctaatccccaatgtcacatcctatcag

SEQ ID NO: 190319 - DNA, 421 bp, Glycine max
  unsure (1)..(421): unsure at all n locations
catgcaagcttccttgagaagctagagctgagcttctctctcttctntaatnactaagctcacctccttgagaatctttcttgagaagcctctttgagaagcttcctcgagaagattcctagagaagctagagcttagctacacacacccctttaatagctcagctcaccttcttgagatgagaagctagaacttaactacacacaccccctataatagctaagctcacccccatgccaaaatacatgaaaatacaaaaaaagtcctactacaaagactactcaaaatgccttgaaaatacatggcttaaaccctatactactagaatggcctttatacaacgcccaaaagaaggagaaacctattctaatatttacaaagatgagtggactcaaccttgacccatgcgctcagaaatcta

SEQ ID NO: 190320 - DNA, 439 bp, Glycine max
  unsure (1)..(439): unsure at all n locations
gaatntggatacttgatccatttatgtcttgggtcttgcttaagttcactaacaacagactttcatctccatgttaggagggtctattctctgattgaagtttctagatccccttgctgaacttctcgtctcaggcatgattttgaaagctggagctgaaacaggttaccagaggtacctatatctctccccctacagtttatctttgcttgcaagtttgactaatattgaaactattttctttaccctggtgtatacatgtcaaccacattttgaaacctacgttaaacaaatgggaactaagtgtgatcctcatacaacgatacaacataatattgaacaaacctatgctagacatatatgacatgtgttatatacctaacaattagattatatttatccttttggatatagcatctaattaatgaaacaagtatac

SEQ ID NO: 190321 - DNA, 424 bp, Glycine max
cctaccctgacgggggagattgtattcgttaagtcaaatttatcaagcatgacagtgctatgcagaaagcttaaaggttgcaccttatcctcaccccacagtggctgaaggtactcaagtcataagtgtggacaaagagcctcaaacccgagccctgaccatttaccagataagcctggatgacaaattcaatataggtttgtgtgacgacacttctgatagaggcccaaagcctattgaagagctcatcaagttgtagctcgagcccaaacccaggcagtgtatgctgctcagtagggacctcaccagccatgagcacaagcgcatcactaattgtctacacagaaacacagacctgctcgcttgatattcatctaacatgccaaggatccaccctagctatatctttcacacgcttgccatt

SEQ ID NO: 190322 - DNA, 444 bp, Glycine max
  unsure (1)..(444): unsure at all n locations
atgaatctcatgccacagttccttggtggctgcgaattctttggtctatttgtnggtccattacatgttcaatccattttactatatctcacatttttcgtgaatggaatggtgtgctaatatgcttgctaacgttgggtgtatgttatgaacgctcaaacaatggggaaagaacaacctagctcttacggctatgaacctccatatgagagatagataaggaagaaactcgtattatgtcatactgtccaatagattcatgtttactcctatatatatgcatcaatgatgttgtgatttgaaaagaagataacaggattctagaaaatctagccaattctagccataacaaaatttagaccgcaataatagaaatctagacaagtatcagacaataatattccttgtcctggcacctcagcatttccttgacataatggatta

SEQ ID NO: 190323 - DNA, 190 bp, Glycine max
aacgcatttaacttctctcttcttccaaaccatttataagggcaagaacttctccatacccacaccaccttagcaccacaaacctcatttttctcattgaaacccacccgagggaaccctccaccgaacggaatcctccaactggctgggctccggagagaacaaaccctatctgacctgcatttctttc

SEQ ID NO: 190324 - DNA, 429 bp, Glycine max
  unsure (1)..(429): unsure at all n locations
ctgcctcaaagtccggaggacagtgtattcgattttctagttccgccccggagtacgacagtcaccgctttaggagcgttgtacaccagcatcgctttgaagccatcaagggatggtcgtttctccgggagcgacgcgtccagctcagggacgacgagtatactgattttcatgaggaaatatggcgccggcggtgggcaccactggttactcctatggccaagtttgatccacaaatagtccttgaattttatgccaatgcttggccaacagaggagggcgtgcgtgacatgagatcctgngttaggggtcagtggatcccgttcgatgccgacgctatcagccagctcctgtgatatccgatggtgttggaagagggccacgaatgcgagtatggccataggaggaaccgatctgatgggttcgatg

SEQ ID NO: 190325 - DNA, 154 bp, Glycine max
atatgccatgtgagtctaacacaatcgaagcccatggatttgatatccttggctatcccataccaagggctttcacctaagctctcggcccccatgtatatcatatgtgacacccaattcacacatgctagctttaccctatgtcgcttcccat

SEQ ID NO: 190326 - DNA, 452 bp, Glycine max
  unsure (1)..(452): unsure at all n locations
taatgagtgaaaatcagtncgcgccattataggatcattattaccctattacagccaaaacctgaggtacagttatggtcccaaacacactaaatcaagaaacattttctcctttcacgtctgaagagaaaacaatcgtctcgtaaggaataatgtgatntagttgaggaaggtcattaaatcaattgtctgcgaccattgtcaagatttggctatgtctgcttgatcaattattatagatccatgtattcttgaaactctctttgataatatgacctaatgtgtttgatgcttatatgatatggtatatgatttattataattccgacaaaaataatataaaacatattacacgtggatattacaaataaacaaataaacaatgccaatcacctgaaatgacggaaacacgaaacaattatgcaatatcatatattgttccaagtatgagt

SEQ ID NO: 190327 - DNA, 388 bp, Glycine max
agcttcttgaacgtgacaagtatattcattgtctcagaataaaggatgaagacgtggttcatgatatcttttggcgtcaccctgattcaacgaagttagtcaacgcatgccaatttggtgttttgatagacaacacctacaaaacaaaccggtattgactcccattgctcgattctgtcgggatgacatcgattgggatgacattctctgtcggtattgcatatgtggagggtgaacgcgttaataatttggtatgggctttacaatgctttcgaggccttttttagagcgtgatccctccctagagtattagctctggcgagaccaaccatgaataatgcatagaaagatgatttcctgaatcacaaatttttgtgcattttcaata

SEQ ID NO: 190328 - DNA, 346 bp, Glycine max
gacacttaaatactcaacctcgcattatccatatcagcggcacagagatattctattgttacaacacatacacccgcgctgagacagttgcactcacctcaaataatttatccaacattcgcacacattatctacaaaaaaaaccgtcttttgttttaaaaataaatcgtagattgtgtgcacctttctacttatattccttagcaaatctcacaccttaaagttcaagagtatataatcagcttaccaaacttttgaaaaattccttacaatttcatagaattattacgcgacttgcattcataccagacgtcaagtggtgcacacatattctcgaatatatatg

SEQ ID NO: 190329 - DNA, 353 bp, Glycine max
atctaatcagcaatcagacataattaactattgattcttacaaaattattttaaaagtaatatcaaggggtgatatgtgattaataacagtgtaaaattatacattgtaaaattctacattgtaagtgaattaccattaaactataaaaaaatttcttataacatgataacatcagtcaaatcacatggaataatttgtacacattttctttttctttatatagggactaaaatataacatcttttttacatagagattaaaataaaagataatattaagtgcaggggccatctttttaacgagtataataaactattactgttaatgaaccaattttaagaaatgacatgac

SEQ ID NO: 190330 - DNA, 284 bp, Glycine max
  unsure (1)..(284): unsure at all n locations
agcagaagcacgctgaatacttgttgtaactntgatgaatgaaagtattatcacacacacttgaaagctccactactctccctcttgtataacatttattatgtgcggcccacttatctcttgtcctttcctccattaacgcatcctttctaagcttctgatccaaagcatattcttggtggtgaaacttctttttccatggattcttccctagtggatgactcctcctcttacctttcttcgtctacttccgctgcatctccatggcggactatcaccattga

SEQ ID NO: 190331 - DNA, 392 bp, Glycine max
gtttatgcaacctatttcgtctgcttcgtcgtgcccttgctttttcgacacaagccttatgatagttccgagtggaagggtgagaaaactgaacaatatgtctatcaagtctccacttgcttcagccacaaccacacagtttctttctttgtccactagaagggtcaaagagagctttggttcttgcttggaagccatgcaaaataacacaaaaacaaggctagttaagaaactaataagcaggtttagtacaaaatgtggggatttctctcttgcattgttgttttggaaataccatatgattcctagtgagttatatatttgaaattgcaatggtgggaagaaggaaacaagtgagaagttcctttgttagccagcattattagtacact

SEQ ID NO: 190332 - DNA, 459 bp, Glycine max
  unsure (1)..(459): unsure at all n locations
nggaataaaaggatngattcatttcttattcagaatgaattcaccaagtgcacaatggaatatggtgtatatgtgaaaaggaaaactgagggaatacttctgatttgcctatatgttgatgatttgcttgtgagtggcagcaatagtgaagaaatagagaaattcaaaactaagatgatgactgagtttgagaattcagacttaggaaaactgtcatacttcttaggaatggaattcctaaaaatttcataaggtattatcttacattgtaggaaatatgtagttgatgtattgaagagattcaacatgattgagtgcaatcaagctaccacaccaatagaagtgaatntgaagctagatgttgcaagtgataatgatgaagaggttgatccaaccttgtttaagcaattaattggttgtctaaggtacttatgcaatagtagaccagacattgcattc

SEQ ID NO: 190333 - DNA, 426 bp, Glycine max
  unsure (1)..(426): unsure at all n locations
agcttgaaagactgttagccananaactatccatcagccaaccatacataagttggtagtgctaacaacttacataaaacttcaaactaggaatctagaaaaaatctagaaaataactgaagcaaaattcaagtcaaattttttttaccggtaacatatttaaaacagaatagtaaaaaaaactggcttgcattttactccctgttgtcattttccagatgaagacttcaataatcaataatgagtccaatccatgaccacattatatattgcaggaagctttggagcttctttatgttaaacaatgtcggacttagtatttcttgagttgcatcacttgcacgtacaaggacactggtgcaagtggcaattttttttcttacgtcatgatctcaggattagtcttcaatgcagggtaactcacct

SEQ ID NO: 190334 - DNA, 455 bp, Glycine max
  unsure (1)..(455): unsure at all n locations
ngaggcagcagcttcagtacttgcaagaatgccacaggttaaaaataaataaactaacacaaattagttgcatgaatgtactaaaagtaaacagagacatagtagaatcgaacaggttatttcatcagatttgattccagtaaagcaaagagatgtctgaagtgaccaagtaaaggttatcacttatcaacctttgatttaaagtgggttaagttcatgaggtgctcttttcaaatccacagtatgtatattttacttttccactttacacatctcgcttttcaggatccaaatcctacatccatgaccttttgggaagaaaaagaataacgagagggcataaaataggaaaaggagaaggcaaattttatcatccacctttcccagtgtccattaaatcatccaaaagggaaaaatgatatccatctttgcttanttttttctctcccacattt

SEQ ID NO: 190335 - DNA, 293 bp, Glycine max
catgcaagcttgtaacatgatgacagagtgaagtatttattgttacccctattttttgcttgcatacaattctgtgactgatctgctgcgtatctcatttgagattccaatgaatacaaatacaatggatgtggcttgtggggtggcaaatacaacgggtacggtgggagcataaaatacaccgatcaatgggccgaacggtttgtggatggtggatgggataaatggggtgacaaatgggatgaaaatattgatccaaatgctaatggtgtgaagcacggggagagcttgtg

SEQ ID NO: 190336 - DNA, 466 bp, Glycine max
  unsure (1)..(466): unsure at all n locations
gatggtnacagagtggtccacatactgaacagatggttcatatcagtgttcaataaaacananaagagattacaacaggagagagataacaaaagcaaataatagtacacatgcttttagattttttttccatcttagaatagaaaaagatactaaagaaaaaataacagcttttgcaagagctcatatagataagaggaaaccataatatgccaaaattcataaatactaaatccaacaaccaacccatcatattaacttgaatttgactcttctaaactaaggatgcactttaaacgaaaaggtgttgagttattattaaactctaataacttgattnttggatcgaaggatataactcagcatgtttcccttcatagcgcaccccactntaaaggagtcaaatcgctagcacataatgggtttatcctggccaaagccctaaagagaatggctcagtaagtac

SEQ ID NO: 190337 - DNA, 385 bp, Glycine max
  unsure (1)..(385): unsure at all n locations
aaaacacccaaccattgtttactacaaacaacttaaaaatcatttaaaagtgctcgggtatatccaagtgtcctcaaccttttactcttatgcatatcacaacaaataattttgtgcagaaaaaaaaaaactcgattgctattgaaatacatatgttcgtcaattgcatatccttatatccttcaaaagaacatctttccctacgaaacctaaaatccagtgagagtcacaatctccacaccttacatgatcaactcaaacctaagacttctataacgccntatgaaccataacacattattattaaaaaaatcggaatgagaacactgacaaattgaagaaaaaatgaacaatgttattcatagtcaataaaaagctccacatt

SEQ ID NO: 190338 - DNA, 470 bp, Glycine max
  unsure (1)..(470): unsure at all n locations
agtcacctgcggcatgcaagcttatgctaatctcttatgttgtgtcttatattttgcagacggcttctaagaaaagaaaggcaccctctacacctacccaagccagatttgatagatccagattcacttcctaagagggttgggagagatgcactgacattgtggtgccgcttttaccaaaaagaaatgtggtagtctacaatacaaagtttgatgagttcaaggaggaactcgagagatgccattgggatcaggagttgactgactttctggacgacaacattaatgttgccattgtaaaagaattctatgcaaacctctatgacctcgaggataaatcacctaagcaggtgtntaattaatgttgatgaggataagattaacacatttttgaagacacctcgtgttgtggaagaggggaaaacactttgtgcttactctagattacactcctgggcctaatctcagag

SEQ ID NO: 190339 - DNA, 477 bp, Glycine max
  unsure (1)..(477): unsure at all n locations
tgtgcatccaataccctgatgaggatgtcccatatgttcttaaaactggactaattcatttgcttccaaagtttcatggccttgcaggtgaagacccgcacaaaaatttgaaagaatttcacattgtctgctccaccatgaaacccccagatgtccaagaggatcacatatttctgaaggcttttcctcactcattagagggagtggcaaaggactggctgtattaccttgctccaaggtccatcacgagctgggatgaccttaagagagtattcttagaaaaaaatttccctgcttccaggaccacagccataaggaaggatatctcaggtattagacaactcagtggagagagcctgtatgagtactgngagagatttaagaaactatgtgccagttgcccccaccatcagatttcagaacagcttcttctccaatacttttatgaaggactcagtaatatggagagaagtatga

SEQ ID NO: 190340 - DNA, 436 bp, Glycine max
  unsure (1)..(436): unsure at all n locations
agcttatcaaaattcattctgccatgcgagctgttcaaatcgngttgaaaatgggttccaagccaccatattataagggctgctagaattgcatcagagaaattactgaggtaaatgaatttgttttttgcattcccccaacccctggttttatttattttttaatcccgacacaattttgtatggagtttaccttggacctttttatatatgtataattatagtagcgaatctcttaatatctcttggtttgtgcactattaagacaaagctaaagttgtgataaataaatagaatatttagtagtttattgttggcttgttggtctgctcatgagtagaatggtattattggtctttgaactgttctatcgggagactggaaaatactgaaaggtcatgacccttttgtataacttcttcatttggcatcagtg

SEQ ID NO: 190341 - DNA, 475 bp, Glycine max
  unsure (1)..(475): unsure at all n locations
nggagaaccataaanaagaatccgaagaagcagaatggtttaaataccttggcagctctggttgtagctctagaccaacggaaaatggcagtttcatgtttctcaatgtcaaagaaagatatagagttgtccttgagttcagcaaaatctaagagcttctacctatgtattaaaacaaaaagataaaattaaaactcattgagagtttagaaagaaggacagaggttctcattatagtaaataaagtaccagctttgttcaataagaattgcacaatttatcttcaatttgagctgtttaactccttttggatgtttatttttctgacagtgacttttctaccaattgatgacttctttttctgctaatgaccatttcagcagtgacttttctattggatggtgatntttttctcaccattcttcangtgattggacttggttatgactcactctagctccaaatataattcaca

SEQ ID NO: 190342 - DNA, 435 bp, Glycine max
  unsure (1)..(435): unsure at all n locations
agcttatgcgcatattttcttacaaacgttcttttcacaagacattctattaaccgaaaaaaatgcacccatatacaatcaaggcagcttctttacctagattatttacacgtacttccaaggtgtatgtgttacttacatcacacaccttcttggctaaattcacatacatgcatactcaaagcattttggggtaccaaaaattgcacatgtgcacatcttggtatttcacaaacttcatgatgaatcttgactatctacacaataaggtgctacattttatgctctgttcaagtttttgctacctaaagccgcatgcaaattccagtatattttcctttgttgactaaaattgttattcaaatcaaaaggtatacatttttttggcaatgtaacttctttacataacatgcaacatantatatgtatattttt

SEQ ID NO: 190343 - DNA, 436 bp, Glycine max
  unsure (1)..(436): unsure at all n locations
ntctcttttctctctttntatctcaactatttntcattcttcttcgtcatttcactttttttcttccattttattgcaaaaattttgtggattttccattggtgatgatcatggaaggctaaacacttcatcgatccaagcatccactccaagcaaggctgaatttgagttttagtttagtatttctaatctttgtgaatgttcatctttctctttaatcctattttcgattttcatgattatgattatggttaggattgaaaaaggattgcgttatggattcatttcctaattttgaaatttaataacagattgtttggatgattttccaacctaatttgcaatctcaaacaatttacggattgattcgattgaactatntctaatgcatttgactgaactctcacattgggcatcattcatagtaactgtaatg

SEQ ID NO: 190344 - DNA, 399 bp, Glycine max
tcagtacaattctgatatggctcccgaccgcactcaactgcagaatatgttcaagaaagagggtgaaacctttaaagaatatgcgcaccgatggagggatttggcggcacaagtaactcctcccatggttgagagagagatgatcaccatgatggtagacacttcgccagtgttctactatgagaagctagtaggttacatgccgtccagctttgcggatctagtgtttgccggtgaaagaatctaggtaggattgaaaagaggaaagatagattacgtttcctccacaaatgcaaatgccaaaagaatcggggcaacaggtgcaacaaggaatgaatgagatgcccatgccgtctcttaacacccgcgtggtcaaaccttacaacacctatggtacca

SEQ ID NO: 190345 - DNA, 442 bp, Glycine max
ggacctataaaactcagctctgtttcaattggagcgctcgattattacgggttctaattggacatccgaatataaagttatcttcgtttgaatttgctcagagcttctgttctccattccgtgtgtctcgatatattacgggactcaatcggacatccgagtaaaaagttattgtcgtttgaatttgctcagatcttctgttttcaatttgtagtgtctcgatatattacgggactcaatcggacatccgaatataaagttatcttcgtttgaatttgctcacagcatctgttctcaatttcgtgcgtctcgatatattacgggactcaatcggacatccgagtaaaaagttattgccgtttgaatttgctcagagcttctgtttcaatctggagcgtctcatatattacgggactcacatcgaaatcccaatataaaggta

SEQ ID NO: 190346 - DNA, 325 bp, Glycine max
gatctcacagcccagcagtgttgttaatatagcaatcaaattgttggtaatggaaacaatacaaatgaaaactatatttacttccatctagaatacctcatcaaggatcctctatcagctcctccccatagcacaaacaaatataagaaaaaaaccactcacactctgaatacagaaaagaacggcagttttatatcaccttttaccaaggtgtccccaggatgaggcattcataacaaaaccacagtaatgtttacatgtctgagagcatgaaaaaacgtgaatcactacaaacccatattatatttcatcttacttggtacac

SEQ ID NO: 190347 - DNA, 435 bp, Glycine max
  unsure (1)..(435): unsure at all n locations
tgaatgccagcttcttgctatctagtgttttcattgtgtcttatgaactgnncatttaaaatagaaaccctcttcataagttacaattaaagttataaaagttgggttgtttttaccaatttgtgtctctctgtcagttcaagaagttgagccatttgtatattggcctttttctcactcttttcaaaacctgctatttacaaatgcagaactttttcaatgacctgtgaaaatatatttcaagatagtttttgagaataactgaaaagcttttgaaaactaactattgatagttttcgaaggtaattgaaaaatgtgactataactagagtttcatgttggaaatgttgttttgctctctgggaataattgcaaaaacaataattgaaaatgcattcataatttgtntccaaactgtctcgtgctctgcatcat

SEQ ID NO: 190348 - DNA, 291 bp, Glycine max
ccctacttttgaggggcaactcccgccatatgacgactattccgggcaagacgaggaggaaggagatacccatcttggccccctgctccacctcaaagatccgtccccacatgaactaccccaaccgagcataatccgtcatatcccggcctcacccacacccgtaaaagaatctgttcccttcgcgcgaaaaagggaaagattgaggcgcttgaagagaggttaagagcagtccagggcctcggctattacccattctcggactcagcggatttatgtctcgtgcccaat

SEQ ID NO: 190349 - DNA, 428 bp, Glycine max
  unsure (1)..(428): unsure at all n locations
taatgacatttattttataaaataaattattctatttattatgatttaagacggtgcggatatgcaacgtctttgaagccaagagagacaacaacgatgattttataaacatcatctttaattggtattaaaaaataatgcccgcctctctttatctgcgcttacctttcactccgaaggttctagatcgagagaactagctgtgaagaaagaagaataccaagtgtttgaagaacttangcgaggccattttggcaccatgttctgctgcttccaacaacgaggactgccgctgcatcgaaatggaagccttggaggttggtggtggtggttgtcgccagcgaggaggcggaaaagaagcagtagtcgtttccgccggagaagaagtcgttgtcgtactcgtcgatgaagaagttgcggtctggtgg

SEQ ID NO: 190350 - DNA, 271 bp, Glycine max
tctcttacacacccatcaacaactggaccacattgcgaataatatctgcacactctttcatagccattctctcttcaggaagtgtcgacaacaccttatgaatatgaattgctatctccacacactcattattcaaacgtgggtacagctgaatctattgaggcacccgtactatgcttatatttgagcccctagtcgacttcaaccacgatacaattttgagcaatatgagtgcggttaccacactagcgcggcgtctctcatcgctcac

SEQ ID NO: 190351 - DNA, 416 bp, Glycine max
  unsure (1)..(416): unsure at all n locations
accgtacccttcgtgcaaatcagtttgaactctgaagttccatttttattctttattttgaatttcgtaattttatgtatttagtcataatgccatatattgtatcttatgtgtcaagctggaatcccctcgtgggttgggtccctatgcaaagaaacttcacatacttgaaacagaaaagcttaagaaacctgattaagaggatttctatgggtggcttcacttgatgtcataattcttgggttttgtgacagcattaattccatcttgttgatgcaataactactcgtatgggcagtactcgctgcattttgaggaaacaacgtangagtagaaattgagaaagctagaagcctagaaaaccatattgagattgataagtaaagacaaaataataatttgaatcagcgaaacat

SEQ ID NO: 190352 - DNA, 459 bp, Glycine max
  unsure (1)..(459): unsure at all n locations
tcagggtgtcatgtctttccatcagtgtgtttgaaatgttggagactgttgcacgtatcatacactactcattttaacttatttaattttgatgttgagaaagaaaaagcatagtcttggtcttagattgattttggatgggctattgtagaattgatttctaatgaaattgatttttattataattgattatgaaatatggggttaattacggaaatgatcaaatttttaaaaaattatcataataataggtaattnttttaagaattatgaaaatagataatgtactttgatatataattctataataaaaaaatcatgtattaaagtatgattttattctttatttgtctaacatattattcttttctctaagaattaaaatcatatgttaaaatataattctaatcttctctaatgaattatatgtanatataattaaaaatactatgttaaaaa

SEQ ID NO: 190353 - DNA, 400 bp, Glycine max
  unsure (1)..(400): unsure at all n locations
tcctcatggatcttaacatgcccaaaataatggttcttgtatgaccaaagaagtatcaaatcaactagacctcctccanatggcagtccaacgatcatatcaataattggcgttgcctatattgctagttgctattattgctgcttgtcttcacagngcactcatgctaacgcagacactctacgatgcctctctacaacatcttacccttcatacgatgagccttcatatggaccacatctagcagcgtacaatgtctactttgtgtgagccatcacaaatcttgaaaaaaaaactaaaaaagtaaatcaataatccttcgtaataaaaaaaatgtatctaactaagaatataaaatataaaaacactattctagtctaanaataatgataaaaatatc

SEQ ID NO: 190354 - DNA, 430 bp, Glycine max
  unsure (1)..(430): unsure at all n locations
tgtcgaaattgccatgtttgtgtgagttatacataccctttctgttntagggtttttgtgatgatgtttgtgatgtttatatgctgaaattgctaatggaaatctgttagagacgaagggtagaactaacccaaggttagaaagtgagaatgtgatgttatgagtggaaaaagagtgagactctgagagttggaaggctaagtcggaattctgtggtaaatggaggttagagtgagtcaatactagcttgaaatgtcatttagaacatgtgagaaaggttaggctgagctagagagaaaaataaatgaccaaagtgaaccaagagccatttctagggcaaaattgggtgttgaagagtcaaattttgatttggtggaattttaggtgtaattccagtttgggcaagtttagattgacgttatggactggt

SEQ ID NO: 190355 - DNA, 420 bp, Glycine max
  unsure (1)..(420): unsure at all n locations
tgttcgagaagagagaagataataggctntatgcggattagacacatngagaaaaagagagaatgcttacgggaagataaaaaatgctttctatatttataactgactggccaaaatgacctttcattgaattgctgggtgcaccagccatattggtgggtgcacctaacatatcccatactagtacccactattataaacacattaattatagcgtaaatcttctctttcacgagaactatatttcttaataatcatatttataatggacattctattaacggagtgcaaatatatttcggaatcttcgagggataatatacactctgagaaacaggtataatctcatgaaatgaaagatacgcgaatagaataattttataacttcttcgaattgttggagaaaactaaacaaaatat

SEQ ID NO: 190356 - DNA, 417 bp, Glycine max
  unsure (1)..(417): unsure at all n locations
agctttgatgacactgctttaacagcaatgctctgtccacaacaactttcaagtgaatcaaattnggtcagtcaacaataaaggtagtgtactatccattacttatagtgtaagcaagacaagtaaagatgaggggatccttgactcaggtgccatagatcatgtcacaacctttcttcatttattctatntatgcaagaaaataaatcttataattgttagacttcctaatggtcacacagtcactgcaactcatgcaggcagaattctgttttctcagtttatatacctataagatgttctgtacatancctacgtttcaattcaattgatttcaacatccaagttgatttcttccatgccttgcaaactgatttcatgaatgccaaatgttttatccaggattatacaaattta

SEQ ID NO: 190357 - DNA, 482 bp, Glycine max
  unsure (1)..(482): unsure at all n locations
tttaccaacacagtaaagtggtaatcatataaccaaccaatgtgacctccatagtccatattctattctctactacatcatcacctgcatgcctcagagcgagaaagaaagaaggtgcaatttccaatcctcctttntattttttcggttatcatgtttgtaccttttacaaaacttttgtttttatttagttatttactccccgtgagtgtcacagttttaccttgggaagcatataataagctatattgaattaaatgtaataatattttattagaagaacatatatactacacatggaacaagttgagtattttaccttattaaaattatggattactcttctctcccctttaccctatcatcttccttcttgttataattaccgataaattaaataattaaaaaaaaatgggaccatgcgattaaggtgctcgtgttgcttcacggtgtggtatgaaggtgatggtttacgtattact

SEQ ID NO: 190358 - DNA, 388 bp, Glycine max
  unsure (1)..(388): unsure at all n locations
gatcatttgtgttgtaatctcgtttaatcactgttaaaacaaaatctagccaatcgttcatgttgtaacctcagttaaaccaaaaaagggaaaataataataaaataatcaaaatatcttgaaaaataataataaaataatcaaaatatctttgaataaaataataaaaaaaatcaattgaacgtttttctttggaagtttccttagatcaatcgactaataaccaaagtgaaactaaggctaaaatcaactctttgctctaaacggtcctctttgcttttatcggttaacatggaccattcaaaagcataaaatcaacatgtaactntaccgcttttntgcaagaactacgtangtctgagttcctcatcacaaattgaggatatgt

SEQ ID NO: 190359 - DNA, 483 bp, Glycine max
  unsure (1)..(483): unsure at all n locations
tcttatctaagacactctcttggtggtgaagcttctcattccatgatttattntctagttgatgattcctcctctcacctcttttcctttattttccactgcaactccatggctgaaaatcaccattgaaggatcttattgaagctcaaagatccaaactccagaggaacttctcaagcaagcttccatcaatctacacaatttacactaagctactacacacaaataaaggtttgggtggtctcttggagactcccaatccacccctaagaatgtctaaacataagaattgcaataaaaaaaattcagcactcaattgttttattacaagaaaattacaaagcaattaaggtcttcaaatttgtcttcagtgcttgtttgttttcttaagtgtntaactcaaaatttggtgaggctttggttatttcacatccaatggtgctcctatgagtctagttgcttatgtgttactaatatttatat

SEQ ID NO: 190360 - DNA, 411 bp, Glycine max
gcttcaaattcaaagagatagttggttatcattgttcgctgctgcagtttgcatagcaaaccagttggatctttgtacgttgttgacgcaaatcgcgaatgaagagcatgaaggaatgctggccaagacgataattggccgtttcgatgcatccattgaaaccaagccaatgtctgtccttccatataaaatgatgcgatcgttaatctttcgtgatctggtgttgtatgatactcaaagaactgcgttatcttgaagatccagcctgtggcatcggaaccgtcgaatcttggaacatcgagcttcattcgatgtggtgctgtgtgcaatcccgatgctgagaacggtgtcgtctccagttgtgtttggtgtggattgcaccgatttgcttcgaggtgcgccattcgttct

SEQ ID NO: 190361 - DNA, 476 bp, Glycine max
agaatattatgcattgtccttctcttcacgtcaattctgatctgccaagaagcccgtcctctaccttccacattctcaaaaagtaatcaaagccatgcatttgcagggagtgccacaaaattgctgaaggaaattttgctaaggaaacaattgctaggtacagataattattatgagcctaatcgactcagtccaggtggtccagaccctcatcatcactaacgaatttccaattcaagaaacgtacatgagaatccttgattcagatgcaaaacaggaaaaggaatgaaagattgttattgccacagcatttaccttcccacatatgcattcctttttggattaggggtccataaatcatgtgtataacataaaataatttatgtaaccacttttagttgattcttaagaagaatcacaaagagggtagttggactgatcctagattctctgtagtctgtagctacaattttcaa

SEQ ID NO: 190362 - DNA, 438 bp, Glycine max
  unsure (1)..(438): unsure at all n locations
agcttgagcctgcaaggtccattcattattcttacaatacaaaggaaaggaatcaaagaggctntgcaccaccaccattctcctgagcattgttgactggagtcgaagaaccactctttctggagccactatgacctgtgattgtccttcccatgaacttccctgccttgctcagtccactaccaacggctccaagaccgctcccgacaatgccaactccagcaccgatgccgcttccaaccagcccggctccagcaccaatgccacttcccacaagaccggcacctgcaacaacaccagtaccaaccagtccaacaccagaccctaccactgatactgctccatctagtgcatccattgtgcttcctatcactcccgcttctttcagtttcttcctttcttctagnatctccttttctgcttctagcgcaaccagct

SEQ ID NO: 190363 - DNA, 479 bp, Glycine max
  unsure (1)..(479): unsure at all n locations
ctacgcttgcagtttgaattctccacaaggttcttagagattttatttgttctgtctttagaaggaatgctgctaagttggtcagggttatctcagaattttcccatcagggtcaggtttttgatatgcaagtgagtggttgtattttcctagaacacatagtatatgattgtggaaggattgaaatttttgttttgaattctgtttggataaactntttcacatgcacttatcagataagagaataagaaggtaaaatgaattaagtttcacccgtgaactaaaatcaacttatgcattttagtttctccaataaaaccattcaggtgtcttctactcttcttcagcttagtcttattaagtaagcttgttttgatcatggttntgtttgaacgatcatcaatgatcaattntaagctagtatttcatagcttattctttcatcaataagaaaagtggaccaaagaaatatgtatgtt

SEQ ID NO: 190364 - DNA, 471 bp, Glycine max
  unsure (1)..(471): unsure at all n locations
tcatgatgaatcaagactgatttaaagagttttgatgattacaaagatgatgacaaatagctcacaagtcaagaacacttgatgatgacaaagaggatgaggtttgtgctcctttgctgaccaccatacagacctttgcccttccatgcagcaacctggagcaattgagcagccagaagcttatgctgcaaatatttacaatagacctactcaacctcagtagcaaaatatgacactctataacaattatgacctctacagcatcatatacaacactgagatggacgatgaattcctctcataaccttttaccaaagagttnttactctctggtaatcgattaccagattattgcaatcgattaccagtagcaaaatgggtttcaaaaaactttcaaactaaatntacaatgttccaattaatttcaaaatgttgtaatcgattacaagtatttggaaatcgattaccagt

SEQ ID NO: 190365 - DNA, 453 bp, Glycine max
  unsure (1)..(453): unsure at all n locations
agcttgtcggtggagctgacccattatctccctaactcctttagactggtgattcctaggctcttgaccttgacttgatagaacctctttttaagcgaaggtgtttgactcgatcccactgtttactaaattgaaacaaaatctagtgcgaatcaaaactctgacatctatcatgggtggaatggatgaatgcatgaagaaatgcatatgatatagatgcaattcatgaatacgggagcccgggaaattgtctccttcttagatacaacgtcttgnggtagcacagtgcccgacgtatgtatttaagaaggtgacacgaccctccgttggttttccatagagaggggatcaagacagaacccgtgcatgatgcatatgcgaaaggcacaacacggngatgtacatagtacgacaatattcacaancaaatataagcagaggggtacatgacac

SEQ ID NO: 190366 - DNA, 462 bp, Glycine max
  unsure (1)..(462): unsure at all n locations
tgcttganaagctactatggaggttgcatctttgagcttcaatgaggtctttcagtggtgattntcagccacagaattgtagcggaagataaaggagaagaggtgagaggaggcgccatccattagagaataagccatggaagaagaagtttcaccaccaagagagcgccttggatacgaagcttagagaggaagcttcaatggaggaagagaatgagagggagagagagagaaagagagagaaagtggcatggaaaattgaaggaagaaagggagagaagttgaaccttgaagtgtgtctcataagtttctcattcatcaaagttgccataagtgttacacatactgctatttatagcctaggtagcttccttgagaagcaagtgttacacccctccaatagctaaactcaccccatgccaaagtacatgaagggaagaaagcttcttaaaagcttcttgg

SEQ ID NO: 190367 - DNA, 468 bp, Glycine max
  unsure (1)..(468): unsure at all n locations
acctgcggcatgcaagctntcttggggccatgtcctgcaaaaacaaacattcgaattgtttgtttacaaggaaatggccatttaaagcaaagtctagcaacaacggcttatgacccttttcgagtgtaaacctagagcaacttatacacttacgaacatacacgcatattcaaggtattttcgctacctaagaaatgcacatgcacacaatcaaggtatanttattattttgctacaaattaacaaggcatttgctaattgaatcaacaaggcattttgctacctaaattgaataaggtatcttcgctacctaatgcaacacacatacatttcatgagacatttgctacctacacgcaacatgcatacattcatgaggtactttcgctacctaacatgcgacatatatacaggaaactctgagggaaccacaaagacaatcatacaggactctctaatgcccatgtgt

SEQ ID NO: 190368 - DNA, 460 bp, Glycine max
  unsure (1)..(460): unsure at all n locations
tcttctnatatagccttcatctctaagtatccattgtttntcaacgactgaattcttcactttgttctttgtttgaggtcttgattccgttagggcatttaatgctaggcatcaaatgtgcatcctttcttcattcaaagtccactctgataggatggtgtgtcttgtactttagtagggaagtcacttctttcatcatagcaaatgtgcaacaacagagggcgccttttgatgaggataagtgtcttctatagttgcatttcccactaccattgtacgatggaagggaccaatttcaatggctttccatatatttaaatctatggcttctataaagatctgcattcgggttttccaatagtgataaccctcaccattgaaaataagaggcctattaatagaatttcccttaagaaatggaaagttagatgatgccataantattcttgaagttttaaac

SEQ ID NO: 190369 - DNA, 428 bp, Glycine max
agcttataataatgcgattacacatgttgtttttgagacaatgattgatttattcaggagtctttgctttaatcaactatcaggggatataatccattatttctcttttaaaaagtgcttcacaagtgattaagaacaatttaatcgattatattgagaatctaatcgattacatcgttcttgaaaggtttccagtttttgggaagaacactttaattgattgaaatggtaatataatcgattacttcttcgaaacaattgattacattgtatatttaatcgattacaaacggttataactggttataactattttctctataaatagtcaccttgtgttttcacttctaacaagttctaaccaacgtttctttgagttcacgaagacactcattcattcaaaaaagggtcttggaaatgattgatca

SEQ ID NO: 190370 - DNA, 462 bp, Glycine max
  unsure (1)..(462): unsure at all n locations
tcaacacatttaagggttggctgcattctgagnttgccttcaagtttactgaccacccactgtctatttgcttgtttgttgttcacttctctgcagcaattatggttatgcttaaatgtctttatctgaaaagagtttctaacttcattctttgcacagtagatttcccaatcacaaaatgccttcttgcattatgctctagccctctgtttatcattcttcttccacttgaactccctgcccatcaatatgctatactccctcaaggcagatttaaattcatctagagtaccaaactccatccctaattccaacttctgttcaccaactccactactttgactatattgaggataaacttcaacatcctcatcttcatcatcactactaatggcgatattaagctcctctgaatgataaccatctgtctcaacttcaagcttaacttcattcaacatacaa

SEQ ID NO: 190371 - DNA, 393 bp, Glycine max
ctctcccggatcttaagcgactgcagctgcagcttacaaagttgcacctctattttgaaatcttgtgatagagagccaaaattatggaagatcaacatggagttggaagatcccttaaggaagctgctgccacaaatcccacagttccttggtgatgatgtagatgacattcctgtcacaagtacaagaactttatctgagatttatcaaaagagtaatgtagctgtcctataacctgcagaacttgaagaagctgaaaaggatgacaagtggataaatgctatgaaggaagagctgaagatgatataaataaatgacacatgggagctagtggacagaccttaacacaaacatcctatatgggtataatgggtttatagaaccaaacttaat

SEQ ID NO: 190372 - DNA, 430 bp, Glycine max
  unsure (1)..(430): unsure at all n locations
ntaggagaaaccattaagactaagatagttcctaaacattattcaattgaggaagctccgccaagtgtccccattgaaaaacctttattcaaacctgtcaaagtcagtgataaggctaaacgaaaaattagggaacttagaaaaactaaatccataattgaaggcgtaggtgacaatcatagcgaattactaaacaagattggtagtttgcttaaggtcattccagacactccccaagcctcggaaaatacttccaaaatggtaacaagaagtacctccaaattaattaatgttattaatgaagatagtgaccaaaactcagataacacaactaagataggatcagtgtcagaaaagaatataaatccaatacactccacacactggaaaacccgctccaaaatatattatcaacgtccaactggccctg

SEQ ID NO: 190373 - DNA, 450 bp, Glycine max
  unsure (1)..(450): unsure at all n locations
agcctgtgctcacgcagggtgctgtttatttcttgaatcanaggtatgggggtgattatcaagggagtgatgatgaagatgaagaagaagaagaagagggatatgaagagggtgaggaggaaggtgtactggatggtgaagaagtaaatgattggtgttatgaattgttataaattattacacggtaaaatgtgtcttacgtctgctaattttttctattaaaattggatttagttcttatagtttataaatgaggatttatttctgagcctgtgggttggagtacatctgtgttcttcgacccacgtccaaaaagaaatgatgatgttggccattccttgtatttgtgataattggtggattttgttcttctccttagtatcctaagcaacggtttanattgaagtcatggttgcagctctgctgtgattcttgatattgtggatatat

SEQ ID NO: 190374 - DNA, 311 bp, Glycine max
tcttgcgcagccgctctaggtgctcagcatatcccaaattcaagccctctgactactagctctatatgaattctttacactcctgaatgtcaaccttcacatagttgctcaatccctctgagctctctgcacctacactatcattatgaaagataacatggacgaagccctcacgccgccacgtacatgggtctttatcaggatataggatttatattccatcatgcttacattggcgattgattgcgtgttatagaccatttgttacatgggtcccccacctcacaaatcagaagcccaactaccggtct

SEQ ID NO: 190375 - DNA, 372 bp, Glycine max
gaatgggtggggggtgttcaaccgtgagagcaaaaaattgaggggggatgggtttgtaagacataggagaaggggtaattttgtggcttcacaaatcacattatttgaaaaaagctagagtgagaatagcaactctcgattactttgctttccaaggcccaaattgtgttgagataaacaaatttgccttgtgaattgaccgagccttcctctacctgcagttccaattccatggtcattgtaatagtatcctccattagatattttcaattccatgcttcatatcttcctttgaaatgtcctactgatagtgtcattgctgacgacttgctccttacgtactccttacattcaaaatgttttgttattatg

SEQ ID NO: 190376 - DNA, 411 bp, Glycine max
  unsure (1)..(411): unsure at all n locations
tcctccttattttcaccttgttcttctctgtagctgctctcctccacctaccataacaggtacattatgtagcataatattagtttcaaactttcttcatccccgttaatcgcatttctcaaattgaaacaaacgattaagatttaagttaaaaaatagaaataaaagatggacgactgatctgtttgagagaacatgtggagtcactagtgatgaataagtgaattcaagaatcatcaagtgtcaagattcaagacttttgagttttgagtctttaaggtctttcttccaatactaacctaaatgagattttaaattatggtcgtggctgcttttttgttgccaattgtgaacaaaatatgaagatgagtccttaaaaaccttgatgttacatatganatcgtagtcatg

SEQ ID NO: 190377 - DNA, 426 bp, Glycine max
  unsure (1)..(426): unsure at all n locations
agcttggtgaggttcattgaaaaccatggaaggttcggtctaagttgtgagcctacacatgcagacaagagaagggtcaccttataaaggaaggaaagaagcctatcccatttacaagggcggtgaccatatatgtagagggtccctatctgccacattagccaaagctttgtcagcacagggtggatgcatgagaatcaagttgctgtgctagatgaagaaaccgaccaagagtagccaagttgggtgcaactgtgctccccangtttcaaattgaagaattggcggatcgtggagcgacccgatatttcagtgtcaaatccaatgtaatccattagttngaacacctattgtgccctacgctttagggtctgcttcttttggtggtgatgaatcaattatttctcttatttcttaccctttttg

SEQ ID NO: 190378 - DNA, 447 bp, Glycine max
cctgaagttgagagaacgtgattattaatcacgcgcgctggaactactaagtttatgttacctatgctgaatagaaaatacttatcacactacaaacgggtgttcactttcgacaagtgcaccggatcggacatgtagtataaaatggggagaaccgagtatgagactctcgacgaacttgtgtgattgggtaagctatatcatcacataggagtctggagtgtaaagataaatgcgaatatgaacaggtgtgtcaactatctatgccaaaagaaagaatatcatgcgagagagatgatgtgtggaaacaagcagaaaacacgatggccttcctaataagtgcctgatgctaatacgatattatatatctaacaatgcgcatgtgttcctatggtgtgtcttgagatgctaaatctcgagtgcttatgatagccttatctaatcctg

SEQ ID NO: 190379 - DNA, 398 bp, Glycine max
  unsure (1)..(398): unsure at all n locations
gatatggctctcgatcgcactcagctgcaaaatatgttcaagaaagaaggtgaaacctttaaagaatacgcccaacggtggagaagattggcggcacaagtagctcctcccatggttgagagagagatgatcaccatgatggtagacactctgccggtgttctactatgagaagctagtaggttacatgccgtccggcttcgcggacctaatattcgccggttaaagaatcgaggtaggattgaaaagaggaaagtttgattacgtttcctccacgagtgcgaatgccaaaagaatcanggcaatatgggcaaaaaggaaggaaggagaggcccatgccgtctcttatatgcccgcgtgggtcaaaccnccgcagacacctcattgtacccatcagta

SEQ ID NO: 190380 - DNA, 345 bp, Glycine max
tgcgattgagatacacgactttcaagcagaggctcgacgtttgggtgccattggccgatgaataaaaggatggttcatgcctgcaaagaaaaataaatgacaaattctcattgtaactggctgaaagtacatatgaactaaagtgaaattattgagaattatgtgattctcaaaacattcatgcaaagggtcatttacatgttgatagaaacttcatgaataaccagtgaaataatccagctaaagctttcataatacactaatggtgcatccgatctaatactcacaatttgtcatgctcaagtgtgaatttgaattattggatcgaacatatatcttaattat

SEQ ID NO: 190381 - DNA, 486 bp, Glycine max
  unsure (1)..(486): unsure at all n locations
tactaagcttgtctgagtactgcgaaagatgcaagagatngtgtgcattctgtcctctttaccacatttctgagcagctcactttgtaatatttctatgagggacttagcaacatggagaggagtatgattgatgctgtcagaggtggagctcttggtgatatgacccttggtgaggctaggaatctgattgagaagatgacttccagactcctaacaattcagtgcaataaatgaagctatttttcttataggagtccgtgaggtggccacagattcatcttcatctactgaaaataaaaagctcgaaggaaaacttgatgccttggtcaacctagtaactcagattgccatgaatcacaaatctacacctcgtgcaagagtctgtgatctatgttcttgtgcacatcaccatacacatctttatccttcttttgcgcaatctggagtcaaagagcgacttgaagcttatgctgcacacatttat

SEQ ID NO: 190382 - DNA, 459 bp, Glycine max
  unsure (1)..(459): unsure at all n locations
ttatatcttacttattntacaaaaggaacgagtattttctagaactataagcgtaactgtctgtgacttattccattggagtctctagttctattaaagtgtataataatcttgtaaatatatgtacgtcttttgaaaaaaataaatcagatcctctctgcctgttatgtaatataagtaatattaatatagttatattcaatagagatactcttttttttatcaattaagaacttgttgtaattaacttttaagaccgattattatttatatccaataagaattatgtctttttttctctaatataattttagtattttttttaagacaaacaaatggggagtattccttgctagctctaaaatttagctcaatttataaaagcgttatcctgttatagcatattttgattaaattgttgagcaaacaacaataaattgtggtcctacgaggaggagg

SEQ ID NO: 190383 - DNA, 352 bp, Glycine max
gaaattttttgagtttttgccccctcctcaaagatcaaattttctttatcataccaacacacctttttcctttggaatacaaaaccacgtgaatgggccccataaaaaaatttcgttcatgttaaacataaatagggacatttgcgttattcacttataaaactcatttcggcccacaaaacggagctaggctaccaaaaatcaaacccagggaatgcttttgcatcatgcaacacaattcatcctgaagaatatctccatttatttttaataattgagttggaagcaaaaacatatatagcccttaatctgtatgacgccaaaaaaagatctcgtattataattatgatgg

SEQ ID NO: 190384 - DNA, 470 bp, Glycine max
taaaagcaaggcatctcagtaattggaacctcaatctgttatctaaatatgtatttaggtaactctttaaatattcacactcttgttaaatatcttttcagtaagcctttgtcttatattttcactcattttcaatctcttttgtgtgttcggagatatgtatagttagtaacttagtatgttgacttggatgctcctatgggaaaagttgtacttttttttcccacaagcttgaggtaaaatagttgtaataggaagagaggggggaatttgttgtatttgagggagggggatcatacattagggggactgaaaatgagtctttcttttatgaaataggaggttctgtgccttgcgctaggactaggaggacatctccatacatggcgctcttgcaagttctcctatcgatttgcttggatcatatctctaattatctatcacaattcaatcttgtgaatgaaagctac

SEQ ID NO: 190385 - DNA, 442 bp, Glycine max
  unsure (1)..(442): unsure at all n locations
caagcttaatccagaacatggcatctttattctgatgaagnanggatcaacagccccaagcttctccttgacttgctnggagagttcaatgtaacattnttggacagacgtgcactcttttgaaagagtggcactttggaagaatggaatgatttcttcttgccagaagatgcccttgtactcctttttgagattgacaaaagggttgcttgctttgctgtgccagatgtatggaaggccagtcttcactcccaagcccaaatggtcacatataacctgaaaattcataaagagttgtgtctatcatgataaatgaataagctttttgaaaagaaagtttaactagcattgtggataatatacttaagaacttgataatagaaaataacacaataatgaaaactaaaactatacctaaataccacctaattaaatcacttga

SEQ ID NO: 190386 - DNA, 446 bp, Glycine max
  unsure (1)..(446): unsure at all n locations
tgccttanatgatnggccaatagagagatcagatttatttcttgtcactttcttactgctatatagcgttttgaagtattattctctacactagttgccatggattactattttattcatgtttgttaatatgtattgtattaattgctttgtttttaaaataatagcttgttgttgaagtccgtggcagaaaatatgcaaattgaagaacctagttcacaccaaccaacttcacaatcttcagaccatcctactccgctatcttcacaccaaccaactccagtagaaagttctaccggtacagctgaaggtcctaataatgaacctatgcaacaaccacctagcatggaggtggatgaccatggtgtatcattaacaaacactggaggagggaggctcaaaagtattgtgtggaaccatcttgataacaatataactgttgatgg

SEQ ID NO: 190387 - DNA, 360 bp, Glycine max
  unsure (1)..(360): unsure at all n locations
nttntgtganaggatgtgtctctgacatattaatntgtatttcaacgntcaaacacactggtaatcgattaccaaatacttataatcgattacagcattttgaaattaattggaacgttgtaaattcagcttgaaagttttntgaaaaccattttgctactggtaatcgattacaataatctggtaatcaattaccagagaataagaactctttggtaaaaggttttaagagaaattcatgtgctactcagtttttgaaaaaaactttttaatacttatcttgattgagtcttatcttgattcttgaatcttgagtcttgaatcttgatcttgatcttgattcttgaaacttgaatcttg

SEQ ID NO: 190388 - DNA, 195 bp, Glycine max
aacaatgttgaaaagaaaatatactttggtcccaaaggcggtcgatctatgccatgtgggaaaaaacattgagtggaattcaatcgggaccattagggagatcaacaaaatcactatgtgagacctgctaacaggccagggggcgctaaacaagacggaacagctctgtagtggcgcaaatgaaccacgggcact

SEQ ID NO: 190389 - DNA, 461 bp, Glycine max
  unsure (1)..(461): unsure at all n locations
cgagcttagctacacatacctctctcatagctaagctcttctncttgagatgagaagctagagcttagctacacaccccctataatagctacgctcacccccatgacaaaaaacatgaaaatacaaaataaaaagtccttactacaaagactacttaaaatgccccgaaatacaaggctaaaaccctatactactagaatggccaaaatacaaggcccagacgaaggaaatacctattctaatatttacaaagataagcgggctcatacttagcccatgggctcgaaatctaccctaaggctcatgagaaccctagggccttcccttggatctctagccaatctacttggagtcttctacccaatgcccttgcggggtaggattgcatcaaaaccttctcattacccaccacccagtcatccacaaaggccatccctaaaatcaaccacaaagtctaccta

SEQ ID NO: 190390 - DNA, 434 bp, Glycine max
agcctgaaatatgtgtatatacttgttttctaaaataagacaatttggtacatacattcaatcatggtcatcctcaaagttcattagttagtggaaatgtcatggacatacatatctcaatagggtaactgatagtatcatacatgcatgaattggtaagataaaagattagtgccaagggcaaagattgtttacaaactccacatattgaatctttgaacaactctttggatatctatgtacttagtcatgtaaattctccttaccatattttagtccataatcaagagggaacaaggggtcacatgaactaactccaactggttgatcaagttgttcaactcttctgaaccaagtcattggtagttgacctttgaagcatgatctccaaatataacatctgtgattcgctgtgcttcagtaactggcaacca

SEQ ID NO: 190391 - DNA, 452 bp, Glycine max
  unsure (1)..(452): unsure at all n locations
tcggcatccanatactgtcaagtggttgtataatgcattttntctacaccatattttcctatggaatctttccacccacaggtcttgatggcgagagatttatcaaaccaactgctgttttcacactttcacccccaaaaaatatttgagtactttggcatgagtcaacatgcatctgaccttctctgtagcttgaggccgggcgtgaatatcatgcatttgagtaaaagttttcgtataccagtttataactatcagcattttacttgaaaaatttgtttattattggaatcaaatgatacgtattacgatcttctgtttttctgttatataaagataattcaatttgaaatcgctttgaagcatctatttataaattctaaaatgtggactgatatagtgtcatttcaacattcttattcagccacataaacacttattatttgtgcatt

SEQ ID NO: 190392 - DNA, 435 bp, Glycine max
  unsure (1)..(435): unsure at all n locations
ntnctntgagcacagcaaaagctagctgttgttcttcattccaggntaatgccacattcttcttcactagctcattgagaggagatgcaaccgtatagaaattatgaacgaaccttttatagaagcttgccaacccatggaagctcctaatatctcccacactttttggggtgggccatatctggatggccttgattttctcagggtccacttggaccctatttctaccaactacaaaccctaataaaactatattatctacacaaaaagtacacttctctatatttgcatagagggtgtctttcctaacgactgaaagaacttgcctgagatgtcctacgtgatcatgtaggtccctactgtacactaaaatatctatcataacaaacaacttcaaatctacctatgaaataccttaaacatgatgcattagcc

SEQ ID NO: 190393 - DNA, 441 bp, Glycine max
  unsure (1)..(441): unsure at all n locations
agctntctaacaaaagaggagatgtaggttgttcttcnnctattatttaagacngacagcagcctcatatccctcttgcattcccacctagagccattccaaacaaaatgatggaagatgtggaaaaagagatcttggagaccttcaggaaagtagaggtgaacatacctttgctaaatgccatcaagcagatttcaagatatgccaagtttctaaaggagttgtgcaccctcaaaagacagctcaagggaaatgaatggattagcatgggcagaaatgtgtcagcattgatagggaaatatgttcctcacattcctgagaaatgtaaagacccaggtactttctgtataccttgcattattgggaacaatannattgagaatgccatgctagatctaggagcatcagttaggttcatgcctctgtcatcttcaattctta

SEQ ID NO: 190394 - DNA, 411 bp, Glycine max
  unsure (1)..(411): unsure at all n locations
ttcgattganacaatgtgactcttcacatttatatttgtatttcaacgttcaaggacactggtaattgattaccaaaacattgtaatcgattacagccttttgaaaatatttggaacgttgtaaattcagtttgaaaactttatcaaactcattgtgctactagtaatcgattacaacaatatggtaatcgattaccacagagtaaaaactctctggtaaaggttttgtcaaaaactcatttgctattcaatgttttgagaacacttgttaatacatatcttgattgagtcctttcttcattcttgaatcttgagtcttgaatcttgatcttgactcttgagagcttgaatcatgaatcttgatctttgattgtaggctttcttcttgagtcttgattcttcttgatcttg

SEQ ID NO: 190395 - DNA, 273 bp, Glycine max
gctctctgccctagaacaatttatatggagctgtctttaaaatgggtctaatagaatcctatttaaaatgtatcatgcagtgttaatggcctccgcccaaaagtattttggaagaggagtctcatttaataaagttctagcgatctcttccaaagatctatctttccgtttcacaacaccattatgttgaggggtatctggtgcataataatatgctcaatcctagcttacacaaacaattcaattcttatttcttctcaccccatgaccact

SEQ ID NO: 190396 - DNA, 409 bp, Glycine max
  unsure (1)..(409): unsure at all n locations
ntgactggagtcatnaagagattatatgtatgtgaccattgcatgaacttcataacaatctttttcaacatctctttcaataatcaagaatttatctntcaatcttctctctcaacatcattcaactttctctacataagtttctaattcttcttctcttcatctttctaaaagttgttgttcaaaactttttctttcgagaaaagatctttgataaaaaaacttgtgctattcatctttctttattctcttctgcctttgtcaaaagaacgaaggactaactgcctgaattcttttgtgtctctcttctcccttctcaagagaattcaaaggaccccgcctgagaattctttgattcttgccttctccttaaacaaaagatcttaaaggactaaccgcctaagatatc

SEQ ID NO: 190397 - DNA, 436 bp, Glycine max
  unsure (1)..(436): unsure at all n locations
agctgtgatttacatatgagggttcaggtacaaagctttgatttgcatattgaatatcatccaaatttttgacaagtcattgttacttccatgaatattgatattgtatcatgcttaattatatgcatttgcttattctgatcattgcgtgttgggtgattatttcttccatgcaggtacatgattcctatttgttgtgagagtgaaatgataggcagcagcaccaactgaggtgagtttatatttccttttttttgtctttatctttgttagtttgttatatagattttattttatatgcttgacgtttaaatgtgtaaaaaatagaaatagaaaggtctggtgaattcttaagaattccttgctgtttcatggcattccttttgaacctcaaaagtgcttatgatggcctttggntaaattctgatatatgtat

SEQ ID NO: 190398 - DNA, 406 bp, Glycine max
tcttagtttcagatgatgtagctgagtttgtagctacctcatgcactcctctaatgactatagcatcatttctggcgctaaactgctgggagttggaagccatcttctcaattaaatttctggcttcagcaggagtcatgtctccaagggctccaccactggcagcatctatcatacttctctccatattactgagtccttcataaaaatattggagaagcagctgttctgaaatctgatggtgagggcaactggcacatagttttttaaatctctcctagtattcatataggctctctccactgagttgtctaatacctgagatatccttcctgatggctgtggtcctggaagccacggaaaatttttctaagaatactctcttcaagtcatcccagctcgtgat

SEQ ID NO: 190399 - DNA, 449 bp, Glycine max
  unsure (1)..(449): unsure at all n locations
gcttttatccaggcactctcgtggtggtgaatcttctccttccatggcttattctctagtggatggcgcctcctcttacctcttctcctttatcttccactgaaactccatggctgaaaatcaccattgaaggaccttagtgaagctcaaagatctagccttcattgaagcttctcaagcaagcttccatcaagtggtatcagagcacaagagcttcaagtaggtgctccttaaaccgccaaatttcagctttaccttctcctccattgtttgttcttcatttttctccatgtatctcctcacatgtctcgtgctgaatgttgttaacatgaatttntagaatttccaccaattaaacttgctatagaagctgatttgattctctatggatcacaatccttgttcttgttcttgaaccatgaattgtgttgagtttacgttcctttgag

SEQ ID NO: 190400 - DNA, 449 bp, Glycine max
  unsure (1)..(449): unsure at all n locations
tgtggcagataatgctaggttgaattcttggcatgtcaaatggatgcctatcgaacaagtttgtgtttctatataggacataggcaaagcgtcggtgctcatggctggtgaggtccctattgagctgcgtacattgtccgggtttgggtccgagctgcaacttgacaacctcttcgatgggctttgggcctctatgataactgcaaaatttgagttaatttgatagtcaattttggctaagaatgattgtaatttctttactttattgttctttttagtgaaataataaagaaattaatatcttttcagttttttatcaacataagtcaaaagaagaagatttcaagtgctttggaggaaaattgatgcaaaaactggaagaaaaagccttgaagaaaagttgaagattgtgacagctcgcttagtgcacaagatangcccaatgcatc

SEQ ID NO: 190401 - DNA, 336 bp, Glycine max
tctctacctatttaacgcctcttttcataatcctcatatcccctgagttgttacagggattaaagcacatatcctcaatgatctcgatggcatcaatagggggttttaacatgaggttacccttacaagcaacatctaaacttgtcctattgtgtgaggacactctaccatagaatatatggatcagtatctattgagtaatgtcatggtgtggacaacttctggtaatttctctacgagccaaaaacctttgttggacattccccctgttatagaaggtataaaaataataaataatggaattctttgtaagagctacaaaactgacaactctat

SEQ ID NO: 190402 - DNA, 441 bp, Glycine max
  unsure (1)..(441): unsure at all n locations
nttangagaggatgtgcaagctggcttaggtggaaacattattcaagattcgtattcaccagaaatgtgaaatcttcctctgtgaaatccagggtctctttctgtatgtttgttcccacattgtttacctaaagccgtacataataaatgtaagcgtaatatgatatatatatataagaattccaattaaaaaatggatttcgaattagtcctcattcttaacattttacggttatagttaacctagtatgcaattgtaacgaatcactcacaaggatattgagtttgccattaaactcatttgagactctagctatgaggtcttgtctttctgcacgagacgccacgtcacggaccgaaccagntactctgtatccttttgtgttccattcatttaaggatttattgagttcagcttcgttgcgagcgcaagtgtgtaca

SEQ ID NO: 190403 - DNA, 474 bp, Glycine max
tgaagctatgacctatgatccataatttaccattgggatcatttgactaattaggcattttgttccattcaatggtttctttgaaattttatttagtgatagaattactaaaaactccaatataatccaaaacacaggtaccacattagcctctgcaatttccgaggccttcatcagacaacaccataaccccatgccactatgagcctagatgccatccatgagaaaggttctgcactatgtcctttcagtagcagtttggctaagatctagcacgctaccatttgccatggtggctatttaagaacattatacagagctcaacattataacagtaacaagatgactttgagacctagaagacacaggttattagaaggtcaaagtggacggaagaagtcttacctaggctttctagcatgcctctaacagtctcaggaattgcagccacagtagatccattagtcatttggc

SEQ ID NO: 190404 - DNA, 244 bp, Glycine max
cgtaatcttttgaaagattcatgctccttgttacacacgttttataactaccatctatccggagccatatcagaattgcactgctactacctaatgaaggaaaccattatgtccttcccagattagactcaagaaggttccaaatctatataccaggtgacggctttcccagacagactttcctggaaaaaatgcatcattaagttttcatctttcgcgtatgctcccatcttactacataaca

SEQ ID NO: 190405 - DNA, 441 bp, Glycine max
tatggtatgctaagcctcacatctcaggctaagcgcatattgcagaaaatttttgtgttgcagaaagcgctaagcgcaacctgctgcgctaagccctagatgctcactggaccttacaacttcaagttgggcttagcgcgaggctatgctaagcgcttgggttttaaactcaaacatcacatgggcacgctaagcacaactgtgcactaagcacaccatacaaattttagtttttaaaaaaccaaaggctgaggcacttgggtgttaccccaaataccttcagcttctgcctttgtgaaccttgagcaagagtgtatttctgttgcgtgtgtcctgcttgtctgcatcttctctgcttcatttcaagaacaatccaagtaagtgggtacgtttccatttcttatttataatccttcaaaccttaggatagatgatttctca

SEQ ID NO: 190406 - DNA, 447 bp, Glycine max
  unsure (1)..(447): unsure at all n locations
tctacaaaataactcacatcccttggatagttgaaaacttcaaccatcatctaccttgagggcatctcttcattgtattacaactcgaaaccctttttcttagcaatatgccaaatgggtagacaaggacacacttcatcggcaatgatcttgatatcaatggcctttgagatgtgcaaccatagtggggaggtagtggcttgatcattaagatacatttgcacatgaaggtggatgttgtttgggtgtacggagtgtatgcttatgaagaggagagacaaaagtgtcatcaatggactcactatctaaagaggatgaagcacaattctccttgttgtcactgaaggaaatcatccattctttcttaccaatcttgcgattggctntggtagcccttgtcttgatgtgtctttggatggcggacaaaatgacagattctttgggcac

SEQ ID NO: 190407 - DNA, 440 bp, Glycine max
gcttgcaagcgtgagagacaatattatattttaaatcagtataaataaaagactaataaaattatttgactgtaaatgaaatcatgtatcatctttaaaataataataccgaattattaaagaaaatattattaaaaatgatatctccatactttgtttataaaaaacaaaaatgcaattatctttccaataatattataaaaaggaaatgataaatttatccaaaaaataaaataattcatcttctttacactgataactataaaaggataataaactatttcatcaaaattatgaaaatgatctaaaatacttaagtattattattaaattaaaatcaaaccctatcaataacaatcattactataatattatattattgaaaaagaatatatcatgttgataccaaaagccgttaagctcatttaactagatgtatt

SEQ ID NO: 190408 - DNA, 441 bp, Glycine max
tatagaatatataatagaagaacaatgtctattgaagtgtctatacgtgtttcctttgatgagtctaatgccattcttccaaggaaggattttttagatgatatttcagattccttacaagatacacatattcatggaaatgactctaaagaaaaagatgaaggaagcaatgaagattctcaagataatggagttagagcaaataatgaacttccaagagaatggaaagcctcaagagatcatcccctcgacaacattattggtgatatctcaaaaggggtaacaactagacattctcttacagatctttgtaataacatggctcttgtgtctataattgaacctaaaaatttaaatgaagccataatagatgataattggataatttctatgcaagaagaactaaatcagtttgaaagaaacaatgtgtggaaactagta

SEQ ID NO: 190409 - DNA, 412 bp, Glycine max
  unsure (1)..(412): unsure at all n locations
catgcaagctnncttgagagaacttgcttgagaagctagagcttanctttacttacctctctaatagctaagctcacctccttgagatgagaagctagagcttanctatacccaccctataatagctaagctcacccccatgactaaaaaacatgaaaatacaaaaaaaaaagtccttactacaaagactactcaaaatgccccaaaatacaaggctaaaaccctatactactagaatggcaaaaatacaaggcctaaacgaaggataaaactattctaatatttacaaagataagcgggctcatacttagcccatgagctcgaaatctaccctaaggctcatgagaaacctagggccttcccttggatctctagcccaatctacttggagtcttctacccaatgcccttac

SEQ ID NO: 190410 - DNA, 377 bp, Glycine max
tcggaagaaagtgatgaggtacaagccctataggcagatcttgaaagagcctgggtagtcgaagagaagttcaagtccatagccatcaaagtctgaaaaaagtatgatgaactaagggatgtcaatatggccaccgatgaagccttggaatgagaaaccaagaaggcccgaaaggaagaacacgaccaaagcaaagttttgaggggctttatagggcagcaatagtgagctcaagctccgaagaggtgaaaggaatcatcacgggtcaaaggcatgatcttgaaggacgagctaaaggtttgccttatgtcgaaaagaaatttgtcccaacagttaagcgagactgaagggaatatgtgggccatcatcgataagtg

SEQ ID NO: 190411 - DNA, 411 bp, Glycine max
gcttaagctcattgttgctaccctatatatgtccctcaaaactgggtttggccatgttcttcctttcggagcctctttgtttcctattccaaagcttcagtggtggccacattgatgtctcagattgtcgcactctttccggaccttgatggtcgttgtcttgaactttcccttgattgcttgtgccctttcaggtttgcacctcctcactctcctcaggggtttcatcctcttcctcgcttgaaacctttagctttgggaaccaatccaaatcttgcgttcgagccttcagccacttatgatagccgttgatgatcccattgttgcttcccctaagctctttatctttccttagcactacaccacacgccttgcggactccttgagaatcctcgcatggggttactaaaa

SEQ ID NO: 190412 - DNA, 402 bp, Glycine max
  unsure (1)..(402): unsure at all n locations
ntaacctcatcgtctctcacagtctttagtattgggatctcaatccagtccttgtgttcggactctcagccacttatgatagccgccgatgatcccattactgcttcccctaagctctctgtcctttcttcacgccgcatcccatgccttgcgaactccttggagtaccctcgcgttgtggtcactgaaacctcgtgcgatgaaaggcgtgatgctctcgtatgttggcactcctctcatgggacatccttcgcatgaagatagaatcctgattcttccttccttctagcgagggaaccaattaacagacgcccctctatgctagccaagagttggtcccaattcgtctttctctttttcgacgcacgagcggtgaccttgtagcggatagacgagcctacc

SEQ ID NO: 190413 - DNA, 445 bp, Glycine max
  unsure (1)..(445): unsure at all n locations
agctntgatgatgtggtcttcaccgatgatttgatcaaagtatgtctaaaaagaggcaaatctgatcatcatgctttgatacatgccaaaaaanactagggcaaatgaagagggtgagaatgagggagaagcccatgctgtggctgccattcctatacagccatgtttcccaccaacccatcaatgtcattactcagccaataacaaaccttctcctttcccaccgcctagttattcacataggtcatccctaaatcaaccacaaagtctgtctaccgcactttcaatgacgaacaccacctctagcacatacctattacaccaaccaagatatgaattttgagcaagaaagccttagaattcaccccaattccagtgggccatgcttacttgcttccatatctacttgataattcaatggtagcataaccctagccaaggtcat

SEQ ID NO: 190414 - DNA, 433 bp, Glycine max
  unsure (1)..(433): unsure at all n locations
ntntggagtananacctgggaccaactcattntatttcttaaaggaagtcatatctagtcaaggtctgagagaccatacaagtttcctaacgatttctaattatgtgggccattaagtctatcatatgctgacaatagccgagaagcccgtgaatctcttcgggggtggagtaggtgtctgccatcgccttggccttggctaacaatcggggaagttcttgactcccgttcaaggtaagagcaaaccgctccatccacatggttgcctcttggtgtaaagagtcgatcacccttcctctagcctctttttccgcatatacttgagcatactcatccgcgattctatgctcgtgggccgtggctagacctaactcttcttcgtacttggcgatgatagctaacatgttggtctctgtctcgcatagacgctgag

SEQ ID NO: 190415 - DNA, 373 bp, Glycine max
  unsure (1)..(373): unsure at all n locations
agcttngaataccagaacagactcttttataaatctgatttcaggcataaataggtagccttgttcgtgctcgtgtgcttagcgcacttatggaccgcttagcgcacattagtgaattttggtttagcgcgtgccttttcttcttagtggatgaatagaaacggtgcgcttagtgagatgaagcggcgcgcttagtgagataaagtagtgcgcttaacgaacttgtacagctcatcttcttccaaagtcttcctcgtgcttaacccatgagtgttgcgcttatcggacgctcgctaagccagcagattggcttatcgagaaggagaaaaacaacactgttcaaagcttgccatataatcttgaaattgagata

SEQ ID NO: 190416 - DNA, 369 bp, Glycine max
  unsure (1)..(369): unsure at all n locations
tgaaccacaaccggcgagagtgtgaacttatactgtgagtgaatgactagctgtgagtaataatctttgcatgaatctctgaattttataatgaaatgtataaacaagaacatgatgaaggccatgattgtacatgcacaagcattttgaccaaaaagcttacttgaattataattntatcatttgcaccctttttgagcaaaatgagtttgtcaaaaaattgaacactgaacctgaatgattctctccagatactttgtttagattctaggatagcatatagttcaaggaaaatttaccccaaatttggggaagtggaactaattgggatgcatagaaagagagaaaacatcatcacacacaacaaat

SEQ ID NO: 190417 - DNA, 406 bp, Glycine max
  unsure (1)..(406): unsure at all n locations
cctcaatttaatggattttcaagggtttgagaagtgaaaatgagaatgggctaatttggagcaaactctcaccttacacaagtctatatcatcaatctaaacttgctcaaactggtctttacgacaaaaattctaccgaatcaaaatttgactcctcaacacccaattttaccctagaaatggctcttcccttcactttggtcatttgtttttctctcttgcacagcccaaactntctcataagtcctaaatgacatttcgaactaggaataactccctttaacctccaaataccactaaatccagatttggcccttcaactctcanagcatcactctnttntccactcataacagtacattcttactttctaaccctagggtaactctacccttcatccctagca

SEQ ID NO: 190418 - DNA, 359 bp, Glycine max
  unsure (1)..(359): unsure at all n locations
tcatggtgaatcaaaggtgattcagaggtggtttgatgataacaatgatgataacaaaagatgatgacaaaggtgataacaaaaagctcaaagatcaatcaaagaacaacttaagtgaatcaaagatcaatcaaagaacaactcaagtaaatcaagaagaattcaagactcaagaagaaagttaagagtcaagactcaagattcaagaatcaagagaaggcttaatcaagataagtatgaaaaggttnttctcacaaattgaatagcacatggtttttctcanaacatgtttaccaaagagtttttactctctggttatcgattacccgactggtggaatcgattacccgtagccaaat

SEQ ID NO: 190419 - DNA, 428 bp, Glycine max
  unsure (1)..(428): unsure at all n locations
agctngcagtcattataagagaaagaacatgtgattagaattatgaatganaatgttagtcagtttgtcagattgattgtgaaggaatgcattaatcgtaacctggtgagagtgtgatccttacttttttgagagaaaacgactatcattaagtactgacttttgcatgaatctctaaattatggattgaatgcatgaatctgaggatgatgaaggtcatgttttgatagtgatagccacttagccaaaaagctgaccatgtgcatgaatgatttatcccttgcacccagttttgagctgaatgaatgtttgattgattgaaccttgagcctatacaatattatctcctgctaccttgtcttaggttgtaagagagcatcatcccacagaaagcttggttcaaggcaaattgtccctatttggggagc

SEQ ID NO: 190420 - DNA, 290 bp, Glycine max
tgcttgtggagcttctatggaggctgaatctttgagcttcaatgaggtcctctaatggtgattttccaccatggagattcagcagaagacaaaggagaagaggtgagaggagacgcaccccactagggaataagccatggaagaaggagcttggttcgaggccgtacccgaatcaaataaacatgaaaatgcagtaactaggaagtgatcctaggtcgtttcccaacgagcagtgacaaagcaattgttcataatatacttgcagtaacagtaacgattggggggggggg

SEQ ID NO: 190421 - DNA, 474 bp, Glycine max
  unsure (1)..(474): unsure at all n locations
nttcgtanagcttacggtaagatctgtgacctagccatgtctaaggtctccatantggccattgcctccctcgcccagtattatgaccagccattgaggtgcttcacctttggggacttccaattatcacccacggtggaagattttgaagaaatcccgggatgccctctaggaggaaggaaaccatacctcttctcaggattctatccctctttagctagaatttctaagatagtccaaatcttgacgcaagaattagaccacaggaagcaagtcgaaaatggtgtggttggagtaccaacgaaatgtttggaggcaaaagcaagagtcttggcaggtaaaggtgaatgggccctgtcgcaaccttcccttcggcgggagggcgaggcggngctcacgggtgcattttccagaggatggaaatgcacggagtcgccaccaccggaaaggtgtggtctacatactctaaatgtg

SEQ ID NO: 190422 - DNA, 349 bp, Glycine max
caccatatctcttacagaaaccatgtcataaatggatcctacaattctcaatgaatttcgttgccaacaaacgagtacccatccatttaattaaaaaagcctaatgaattagagcctaaaaccaaaatatggaagagagattacactgaaataagagtgatcgtgtaacaatcaagtataggtgtgttccctttctacaatcctattctgctagggagtttcaacacaagaagttcgatgaacaatccttgtttcatcataaaaatcgttcataataaactttgagccattgttgatcttgaggtttatacctctgtgtcaaactgcctctcaacaaaataaacaaatc

SEQ ID NO: 190423 - DNA, 482 bp, Glycine max
tgaagacaagactatacgaggtatcttccttgggtatagtaatatctcttatggctaccgcgtctacaacttgcaaactaagaaactcgtcatcagtcgagatgttgaagttgatgaatatgcttcatggaattgggatgaagaaaaagtggagaagaacgttcttatacccgttcaactacctcaagaagaagatgaggaagaaaacccaggtgaaccaccttcacctccatcacaacaacaagatcaagaactatcgtcaccagagtctactccaagacgagtgagatctttggtagacatatatgaaacctgtaacttggccatacttgaaactggaagctttgaagaagcgtcaaagcaggaagtatgggtcaaggcaatggaagaagagatactaatgattgagaaaaacaacacatgggagttagtaaactgtccccatggaagagatatcattgtgggttaagtgggtctataag

SEQ ID NO: 190424 - DNA, 342 bp, Glycine max
ttgaggtgattcacagaaccaccctgtcttgtatcaaaaggaccttatcacaacctttgtggtgttgccctcgctggaaaagagagattcatctccttcctctcatcttcacccttgttctctcaaaccacaattccagaaaattcacctctgcccagaattatctcgtggccataactcccattttacgcactcagattaagtgattcttgagcctaaattgaaattcaagacgagacctttcacctcctcttggaatcacctcatttggagccctgtagcttcagttattgccatttctatatatctgtccagccaccacttaacctacattttaccatc

SEQ ID NO: 190425 - DNA, 374 bp, Glycine max
tcattgcctaacaagccaacttacaacaacgagccccattagactcagcttaaggatgcacaggtcaaagttgagtatgtgaaaagaatgtatgaccaagtgaaggtgcaaattgcaaagaagaatgaaagctatactaagcaagccaacaagaaaaggaaggaagtggtacttgaacctggtgatgatcctggacatttgagggcaaatgttttccaacaaggagggaatgatgatcttgacattggccacatacaagctaaaggccgtactggagaacggcgaacgcccacgtggagaaggatcacaccccccaatggagaatgatgaatgctctcaaacagacacactatcaagactatctaattgttgct

SEQ ID NO: 190426 - DNA, 373 bp, Glycine max
  unsure (1)..(373): unsure at all n locations
gacttgtgatgtactattacattgtcaagtcaccccttattaattaaagtattgggntcatctttgtttgataaagatgtcttacattggagaagtgcattggcttcattaagagaaaataaaagtaaatattatgaatgcgtgaaggatagtctttgatcaattagaggacacataacgaaatctttttagatatttcttgcttcttcaatggtgaaaatgtggattacgtgaaagataatgtagacttttgtggattaatctcaatatggcctacaagttctcgttcataaaacactcaaccatgattggataattaatagcatgacttgtcgaatgaattggaaagtcattgttaagaaaatacaccact

SEQ ID NO: 190427 - DNA, 459 bp, Glycine max
  unsure (1)..(459): unsure at all n locations
tggagaaggtggctatggtcccgtatacaaggtgataattaaaattgatatccttaacttctattttccttaaaagctttctaaaaatagtagaagattatttttcagggcaaactgttagatgggaaagagttagctgtgaaaaggctttcaaagaagtctggacaagggtaggaagagttcaaaaatgaagtggcattgatttccaaacttcagcaccgtaatcttgtaaagcttcttggttgctgcattgaaggagaagaaaaaatattgatttatgaatacatgtccaatcacagcttggactactttgtctttggttggagccctcatgatttattctaatttctaaacacagttacaattgacaatattcttatttcttatttgtagtgtatggaattatggagagtataacagctatgctaaatatatttntctattgactagatgaatcta

SEQ ID NO: 190428 - DNA, 447 bp, Glycine max
  unsure (1)..(447): unsure at all n locations
ttaagtcacctgaggctgcagctatattcaaaagggaccttagtgctgggtgtcttanacnctttttctggggtgagaattgtagattggttgtgattacttgtaaggattcttaatgcatagtgaaaatctaattctagtcttggattagataactggattagcttctctagaaataaagaatgaacccagttaaaaagaacgtgcctgtcttctttgatctgatatattgctctcattcaagtattgttcatgtgttgcatacagatcaagttttataattgtgaaagaaaggatgtttatgaacgaccatgtttaacgaaggattgattaagtatcgattacatttgattcatattcgtgtttgtgatacaatccatacaatacttttgnttgtaactctatctataaaggtaaatctttgtttaataaccaactcacccgttt

SEQ ID NO: 190429 - DNA, 450 bp, Glycine max
  unsure (1)..(450): unsure at all n locations
tcacttggaagaacccccctgctctctcatcctagggtattatnggaaatttccatcctacgtcaagggtatggcaaaaagtcgatgtttggctcaaaaggcctacaaatggcagaacataatgtacgttgggacatctatttggtcaatgattcagaaagaggggaatgcccagatcatttccatgaaacgcatatcatgataactagaaattcatgcaaaactaatcctagcaaatatccatgtggacactcaaatataaggctttgtggccacacaaacactaaggcttagggctcatttncaaattcacgccaaaccagtgtttcaacgtttttatcaagtcatgcaaaatgtctgagtccattttggcattctggaaagtctttctttgttntcaccctctacgtgcacattttctttttttcaaanaaactttcgtgttttgat

SEQ ID NO: 190430 - DNA, 259 bp, Glycine max
aatatgcattgcccttctaaacctataattcggaataacaatcttgtatacctatagcaccaatgatctttcatttcctattcaataatctacaaccatctcttggatcttatacaaatgctattggtgtgaatgccgaaacaagacagactacctctgggattgtgaattcttgggataatttgatccgtggtcagctaacaacaggctactttgtcaggtctattcaaaggatataaccgaggggtgcccatgagtt

SEQ ID NO: 190431 - DNA, 444 bp, Glycine max
  unsure (1)..(444): unsure at all n locations
ntaagtgtgaggatcaaggatatagagtgtttaccagattatagatcatccaattcttctcatgaagaagacgaggggtatgaagaggatgagggaggaaggaggaatgagaggtatacggagagaaaaaatcatataagatatggaggtaggcaaagagaggaagggattgacggagtgaacgtgaagatccctacttttaaagggattgatctacaagtgtatcttaagtgggagatgaaggttgagtaagtctttatttgctacaactacaatgaagagaaaaagatcaaattggcctccttggagtttgagggatatgccttagtatggtggaatcaagtgaggagtgatgctgagacgatgagaatgcctttgaataatacttaccaagacatgaagagggttttgagagagagatttatgtcctcctattatgggaga

SEQ ID NO: 190432 - DNA, 325 bp, Glycine max
gttctttcacaaggtggattatctactaatataaagaagaagtgattacttttaactcccccgacagaaaattaactcaaattatttattgataaatccttgacaagagagacagaaatgacagctttcatagatggaaggaatttgcatatatacaggactttagtattgggttggccccaccccactatcattatacgactacatatagatgttgatggccttaacacaatgatcatagcaattcctggcttttgttcctgtcctcccattctgttttgccctccaattttcaatgggctataaccttgcttttcactttcat

SEQ ID NO: 190433 - DNA, 452 bp, Glycine max
taacgaaacaaacaaaagcatacaaaggatgaagaaaatgtgacgaatgaagaacaaaaagaatgacgaagaatataacctgtgatgctaacaaaggaagaagataaaatgacaaaggatgatcggaagagatgacgaaggagatcggaagcatgggagaaaattttcgaggaacgcacagcacggcaagttctcaggaacgagagaaaattttatggttcagaaaaatgaggaggatatgcttgtcattttgaaattttcttgaggacattattgtccaagccttattttgggatcagattcccgaaaaagagaattgagaagctggaaatcagagcttaagagaaagatctgctgagagcctttgcttttgttaaagctaacaaaaaataaccaaacactcttaatacatacaaaagatcttttttcagtagataagatgataaaagatc

SEQ ID NO: 190434 - DNA, 239 bp, Glycine max
aatactaactttccaaatgtttgccttcccatgactggccccgaggaagcttgcctcaaagaggcccatgaaggacaacgcggccgaaggagctagttccgcttccgagtacgacagtcaccgctataggagcagtgtacaccaacagcgcttcgaggccatcaagggatggtcgtttctccgggagcgacgcgcccagctcatggatgaccagtatactgatttccacgaggaaatat

SEQ ID NO: 190435 - DNA, 459 bp, Glycine max
  unsure (1)..(459): unsure at all n locations
tctttgagnaaactgccttgagaagctatagcttagcttacacacccctctcataactaagctcacctccttgagaagcttccttaagaagattcctaaagaagctagagcttagctacacatacctctctaatagctaagctcacctccttgagatgagaagctagaacttagctacacaccccctataatagctaagctcacccccatgacaaaaaacatgaaaatacaaaaaaaaagtccttactacaaagactactcaaaatgccccgaaatacaaggctaaaaccctatactactagatggccaaaatacaaggcccaaacgaaggaaaaacctattctaatatttacaaagataagcgggcttatacttggcccatgggctcgaaatctaccctaaggctcatgagaaccctaaggccttcccttggatctctagcccaatctacttggagtc

SEQ ID NO: 190436 - DNA, 400 bp, Glycine max
agcttgttgaataagcgaagccattctatctatggcttaagataattgagccattcccgcgggatgaaacttgtgaacaagccttcttagtcttgaagaagaccattgccacatcgccagtcctgagtcgacccaggctaggagtacccctactcctatatctttcagtagctgacaaagtcgttagcttagcccttgtacaagagaaatggaagcaccagttccctatctatttcaccagccgcatacttcatgacgccaagaagtgctatcaaatgataataaagatggcgctagcactcattacatcggcccaacatctcaggccctacttcctgagtgatcaagtggtagttaagatgaactacctcatcaaatatgttttgcgaaagcctgaact

SEQ ID NO: 190437 - DNA, 423 bp, Glycine max
  unsure (1)..(423): unsure at all n locations
tgtncaagcccccaacttggacaagtgttgtccgagctttttctgtctagttgtctggggtggacatacttttggctttgcaagtgagatctgatgtgtaaggtgagaaaagccattgcatttgaaaactttccctttttctaaccgttggagagtgcattaaagatagacattacattttgtccattgatgcaggcgtgtgcagcacacgcgcaatacttttgcgtacatgtcactcgtggagtaggcacgcactggagacgtgatgcatgggtaagtggggctgtgtcgtggtgcaaaaaattagggtaccacttcatctccttccagttaccaaatagtgtgtctcctctttaaatggagtagacgtttgatttgtagccaccatcacttcaaaatatttctcttctttctcccacaatc

SEQ ID NO: 190438 - DNA, 359 bp, Glycine max
  unsure (1)..(359): unsure at all n locations
agcttgtatgttaattatgtgactcttcttatttgaanttgaatttcaatgttcaaaggcactggtaatcgattaccaaaacattgtattcgattacaactttttgaaattaattggaacgctgtcacttcaatttgaaaactttttcaaaacaattttgctactggtaatcgattacaacaatctggtaatcgattaccagagagtaaaaactctttggaaacatgttttgagaaaaatcatgtgcttctcaatttttgagaaaaacttttcatatcttattttgattaaaccttctcttgatattgaatcttgatcttgaatcttagatcttgaaccttgaatcttgatgttgactc

SEQ ID NO: 190439 - DNA, 310 bp, Glycine max
acatcactcctacagggatgtgcatgaactctctgccattaccacaacggttaacaaatggcgacaagacatactaggtgcccattctaccattcctaccgatcacctgacccctccagagtgaatgattccaggagcgcagaccccatatcactaaatgtgctgggcacaatcaatcggatatgactactcgattcattatcattcaatgaagatgaatgctgcaccccacactctatctctaattctatagacgcttgcctaagacatgctcatgctgactgtgcctaacttaacattattacaagac

SEQ ID NO: 190440 - DNA, 345 bp, Glycine max
  unsure (1)..(345): unsure at all n locations
actctatngggcatccgagnaaaaaggtattgtcgtttgaatttgatacgagcttnccatttcaatttggagcgtctcgacatattacgggactcaatcggacattcgagataaaagttaatgtcgtttgaatttgatacgagcttccaatttcacatttggagcgtctctatatattacgggactctattggacatccgagaaaaaagtcattgtcgtttgacattgatacgagcttcccttttcaatttggagcgtctcgatatattacgggactcattcggacatccgagaaaacttattgtgctttgaatattctaggagattctgttttcaatatccgcg

SEQ ID NO: 190441 - DNA, 406 bp, Glycine max
  unsure (1)..(406): unsure at all n locations
ggcctcanagaggtccaggatggacaaggcggccgaatgtactagttccgctccggagtacgacagtcaccgctttaggagcgctgtacaccagcagcgcttcgaggccatcaagggatggtcgtttctccgggagcgacgcgttcagctcagggacgacgagtatactgatttccaggaggaaatatggcgccgacggtgggcatcactggttactcccatggccaagtttgatccagaaatagtccttgagttttatgccaatgcttggccaacagaggagggcgtgcgtgacatgagatcctgcgtaaggggtcagtggatcccgtttgatgccgacgctatcggccaactcctangatatccgttggtgttggaagagggccacgaatgtatggcgcctact

SEQ ID NO: 190442 - DNA, 449 bp, Glycine max
cctcatcgtgcctgacagactttatattgggagccaatttattccttgtgttcggactctcagccacttatgatagccgccgatgatcccattactgcttcccctaagctctctgtcctttcttcacgccgcatcccatgccttgcgaactccttggagtaccctcgcgttgtggtcactaaaaccccgtgcgatgaaaggcgtgatgctttcgtctaatggcgctcctctcatggggtagccaagctgtcttatggtgagaacgggattataattaatacaaccccttgttccatcaagggaacatttggacatccttcgcatgaagatagaatcctgattcttccttccttctagcgagggaaccaattaacagaaccccccccccatgctagccaagagttgtcccaattcgcctttctttttcgagcacgagcgtaaccttgtag

SEQ ID NO: 190443 - DNA, 478 bp, Glycine max
  unsure (1)..(478): unsure at all n locations
tctcaagcaagcttccatcatgcttccttnggactccttacatcatcataaaaaacaaacacctttcagatnttaggggattagactcataaaaaacaacatggataaattcttcaatctttaatgaattcttattgaaaactctatatctcttgctagtagatgagtatcctagaaataaaccttcataagcttttgcatcaaattcaccaatagattccttgccattttttagcacaaaacattgctaattcttctagagatctatttttcctctccataacaccattttgttgaggaatttttggagtggaaatattgtgattaatatcattctcctaaaaaaaatcaaattcctcattttgaaattcacctncatgataacttctcaaagctntgaaaggatngttttttataggtaaaaacaaagtccatgtaaacatataaaatagttatctacaatcactaaagcataata

SEQ ID NO: 190444 - DNA, 300 bp, Glycine max
caaaaagaggggggcttgggccctgctgctcccatgggtccatatttatctattagcaagtcaaaagaaactattatagtgtgttgttcaacactttcttctcactaagataccacttataaatttaaaaagcttttgaattaaatatattacacaatatttttatcttatttctaaagctttcatcatcctattttactaaatagtttatcatcttttgttctggtttattgaatggaaaacataaataatgtgggaagatgcagaattttttcttctatatttattgttgaagcatgt

SEQ ID NO: 190445 - DNA, 471 bp, Glycine max
ctgagcaccatcaaaagtgttgtggaggcttctgtgcagtatgagcgtcttatgggtgcttcattgctacgcttgcacttccatgattgttttgttaatgtaagacattctacgcttgtgggcatatgcatacacatatatatccatgcacgtgtacatgtatacacacatgttaatatgataacaagtagttattttgagtgatgatgataagctgattccttacaaattaaatgtggtcatggaattcaaatcctgacttttatatatgagaaaaaaatcaagttagaaaggaattactcatttttgaatgcctttagatttttcgaaaaaaagtagtgtcagtatgtgacacaaaatactctttagtctaaaaaaataaattcatacggattaatgaatgtatatattaccttaaagaccccattatttaaaatgtggggattaattcttagatgatgtgaaaatgtg

SEQ ID NO: 190446 - DNA, 443 bp, Glycine max
gctgcagcttcttgagaggatgtggagaagctagagtttagctacacactcctctctaatagctgagctcacctccttgagaagagaagctagagcctagctacacactcatcataatagctaagctcaccctatgacaaaataaatgaaattacaaatgaagtccctactacaaagacaactcaaaagccctgatatacaaggctaaaacagaatggccaaaatacaaggcccaaaagaaggagaaacctattcaaatattcacaaagaagagtggatccaaccttggcccatgggctcagaaatctaccttgaggttcatgagaaccctagggcctactttagtagctctagcccaatcctcttggatgcttctatctaatacacttgggggggaggattgcatcactagacaacctctttcgctgcaagccagctagagc

SEQ ID NO: 190447 - DNA, 485 bp, Glycine max
tacggtactatcaatactcagcttttatccaggcacattcttggtggcgaagctccttcttccatggcttattccctagtggatggcgcctcctttctcctcttctccttttccttccgctgcatctccatggtggaaaaacaccgttgaaggacctcattgaagctcaaagatccaacctctataaaagctccacaagcaagcttccatcatctagtgtcaagggaaattgtcttgcgttaagggagattgttcggtgtcaagggtggtaacctcgactagtgtaagagttgtaggtttgtgaggcatgtcaagctcccctagcttggacaactgctgtttaggcttcttctggcaagttgtctggggtggacaagctcttgatcttgcaagcaaaatcagacgtgtcaagtggatgatgtccttatatatgatgattcagccctcttctgatcattggaggatgcatagatgacaaatgtttc

SEQ ID NO: 190448 - DNA, 445 bp, Glycine max
  unsure (1)..(445): unsure at all n locations
aagtcacctgacgcatgcaagctgncttcacaacaaataaaatcaattttctgatgctcaaaacctaactctagcttcctcttccccatatcaactatgcagcttgcggtcaacatgaatggcctttccaatattatagggatgtcagtatcttcagagatatccattaccacaaagtctgccagaaagataaaatgttttactctgaccaacacatcttcaattactccatatggcctggtaatggagcggtcagctaattgtaaagtcattcgagtaggcattatcttcaactctcccaagtttctgcacatggagagtggcatcaaattgatactagctcacacgtcaataagagctttttcacattgaattctccattgacaaagaatattacactccctgatctttatgcttgggtggaagatcttttgatcaagcactg

SEQ ID NO: 190449 - DNA, 473 bp, Glycine max
  unsure (1)..(473): unsure at all n locations
tgaaggcaaactggatgcattggttaacttggtaacccatctggccttgaaccanaaatctgtacatgttgcaagggtctgtggtttgtgctcctctgctgaccaccatacagacctttgcccttccatgcagcaacctggagcaattgagcagcccgaagcttatgctgctaatatttacaataaacctcctcaacctcagcagcagaatcaaccacatcagaacaattatgacctctccagcaacagatacaaccctggatggaggaatcaccctaatctcagatggtctagccctcagcaacaacaacagcagcctgctcgttccttccaaaatgctgctggcccaagcagaccatacattcctccaccaatccaacaacggcaacagccccagaaacaaccaacagttgaggctcctccacaaccttccctcgaagaactngtgaggcanatgactatgcagaacatgc

SEQ ID NO: 190450 - DNA, 438 bp, Glycine max
  unsure (1)..(438): unsure at all n locations
agactgngcttatcatgtcactcccgcattttatctctagcatgcatcgtatgttggtctcgtcctctgtcacgggaagccggaaggtccatatcacctttttaattgtacacatggggcactgcgcccccaaatgcgcaagtaaaaagagataattttccgggctctcgtgtccgtaaaatgcattcatatcatgcatcgcataagcatctcttcataacatcataatggacatatcctgcatttgtccgttatcatattccggcctcacattttgcatgagtcatggcattatcatgcatatgcgttcaacaaactttttgatctgcanaattgcatacccattgttttcatgtntgctcatccttgtgtttcctctacanaacaaaacaaataaggggaagcgtgaacttcacactacattctagtttcatgtgt

SEQ ID NO: 190451 - DNA, 410 bp, Glycine max
  unsure (1)..(410): unsure at all n locations
tgaagcaaactggatgcattggttaacttggtaacccagctggccttgaataagaaatctgtacatgtcacaagggtttgtggtttgtgctcctttgctgaccaccatacagacctttgcccttccatgcagcaacctggagcaattgagcagcctgaagcttatgctgcaaatatttacaatagacctcctcaacctcagtagcaaaatcaaccacagtagaacaattatgacctctccagcaacagatacaaccctggatggaggaatcaccctaacctcagatggtccagccctcagcaacaacaacagcagtctgctccttccttccaaaatgctgctggcccaagcagaccatacattcctncaccaatccaatagcagcaacaaccccagaaacagccaacagt

SEQ ID NO: 190452 - DNA, 442 bp, Glycine max
  unsure (1)..(442): unsure at all n locations
agcttccttttagtgcgtgacgtttaatatcgagctcgatggttgtacgagcctttgatggtactcggcgggaagtgatgggggaaatcgacattcccattcagataggcccccacacttgcaatgtggggtttcaagtaatggacataaatcccgcctatagctgtcttttggggagaccttggattcatgcgctaggagtggtcccttcgacacttcaccaaaaattgaagttcgcgtgggcggacttttagtaatagtgtctggtgaagaggatatgctggtgagctgcccctcctccgcaccatacgtagaagcggtggaagaatcatttgaaacggctttccaatccttcgaggtggtgagctgcgcctctgtggaaccaagtncgttgctaccttctctctccaacgcaaccataatggtggcacgtgttatgctc

SEQ ID NO: 190453 - DNA, 430 bp, Glycine max
  unsure (1)..(430): unsure at all n locations
tgctctanantacattgatgtttgtatttatgggaggatgttgtatgtcattnttgttttaagaatagtatcccactggtaaaactaactttccaaatgtttgccttcgcaggaaatggccccgaggaagcttgcctcaaagaggtccaggaaggacaaggcagcagaaggaactagttccgctccggagtatgatagtcaccgctttatgagcgcggtacaccagcagcgcttcgaagccatcaaggggtggtcgtttctccgggagcgacgcgtccagctcagggacgacgagtatactgattttcaggaggaaatagggcgccggcggtgggcaccactggttactcctatggccaagtttgatccagaaatagtccttgagttttatgccaatgcttggccaacagaagagggcgtgcgtgacatg

SEQ ID NO: 190454 - DNA, 385 bp, Glycine max
  unsure (1)..(385): unsure at all n locations
agcttggaccttttggttgctccaaagatattggattcaacatcctcaactctcctccattcagcttctgaatggagtaaccggagtcagtgttaattccattacccacagggatgttttggccattatctgaaattgacagcacctcttttttattcatgtcaaccaaggcagtcacaccctcaattggtttcatgtagaagttcacagtgccttctttggaatagcactgcaccttaatcaaccttgtattctcctccacttgtgtcccataccaccctgaagagattggcaagcatgccacgtctgctaaattgacaccgcgtttagtgatggagcggttgaattcngtgctcttgaggggaacctcaagtactcccaccat

SEQ ID NO: 190455 - DNA, 469 bp, Glycine max
  unsure (1)..(469): unsure at all n locations
tctatgtgaaaggatgtgactcttcacattttgaattgaatttcaacgttcaaaggtactggtaatcgattaccaaaacattgtaatcgattacagcttttttgaaatcaattggaacgttgtaaattcatttgaaaactttttcaaatccattttgctactggtaatctattaccagtggtaatagattaccagagagtaaaaactctttggtaaacatgttttgagaaaaatccatgtgctactcagtttttgaaaaaactttttcatactaatcttaattaagtcttctcttgattcttgaatcttgagtcttgaattttgatcttgattcttggaagcttgatccttgaatcttgattcttgattcttgaaatcaactctcctcttgaatcttgaagtgttcttgattctatcttgaacatcttgaactcattctttgattgacctttngagcttttgtcatcac

SEQ ID NO: 190456 - DNA, 437 bp, Glycine max
agcttctaaatggatctcatctagctcacttagttgcaactttctttcctctccaacctgatcaatagagaagttgcaggtctttacagcccagtaggctgtatgctctatttctacaagaagatgacatgccttgccatagacaacccaataaggagacattcctatgggtgctttgtaggcagtcctatgcgcccaaagagcataattcagcctggtgctccaatcctttatgttcgaatgcacaatcttctccaggatcctttttatctccctgtgtgaaactcaacctgcccataatatgtgggtggtaaggtgtggaaattatgtgcacgaccccatacctttttactaagctacatggatctgtacaaaatgaggccttgacaataacatcggtctaggacctcaacctgtaaaaatttatctacaaatac

SEQ ID NO: 190457 - DNA, 453 bp, Glycine max
  unsure (1)..(453): unsure at all n locations
ngttcctctntacctgtgacgacccttcatatgttatgtgtaagggtgtcccacagntgtttcatacttctaaagttacatagaaaaacattttatgcttttgagttaagcaaaaatcattgtttttgttcatccttccactggcttttaggaatctcatttaactcttcatcaataggaatttgatctccatttcccacaacatcccacatgttgatgttcatagattcaaaatgtgcaatcatcctttccttcaagtaaccatatttgattcctttgaacaaatgaggcttattggtggattaatcttcttccatttcttgctttgatagtatctttttccttgtatcnagtaaatactcaacccaagaggctaaactttgataccaattgagatagtagaaatcactctaagagtggagggggtcgaataatgtgatcgatataatacat

SEQ ID NO: 190458 - DNA, 416 bp, Glycine max
  unsure (1)..(416): unsure at all n locations
agcttgattattatgggctcccatcctttgtggactaggnggcggtcgggcgatggtgcacaacaagttnttccacatccacaaatcgcgcataaacccaccatcccctggtgcccacctcccaactgagctcatgtactcctacgtagcccatatcctcgtttctctcaacaccgggtccccatcaatcctctcaagcttgcccaacatccaagtgcaacaacattcaaacagcacaaactatcacagccaagaaaacagagcaaaggcagaaaactctgccaaaacaccaaccaaaatcacaccttttctcacttaaagagcccagaacaattccttcgttccaattcgttaaccggtggatcgactccaaaattntactggaacgctctagtacataancctacattttgacc

SEQ ID NO: 190459 - DNA, 266 bp, Glycine max
  unsure (1)..(266): unsure at all n locations
taaggatggaatacttgttggtgatgaataanagcgcataacggaatccaaaaatgcgaaaaatagtgatcctacggctgcaaactcgaaaatcccgtgggtattgcttttgaatggggggaaaaagcttatgaatgcaaaaacgtccccctccttcttttattttttattttggtgcaggggggtgatcacccaggctagctaacatgcactttttgttttaaagtttgatgattttaagagactacttgacactggaatgactc

SEQ ID NO: 190460 - DNA, 415 bp, Glycine max
  unsure (1)..(415): unsure at all n locations
tctactattcagtttccttgtttataatngggaaacaaaaacanaatagtanaatcattaatgaatggctagacaatgttatgcatattggtgaatacagatttgcacaattttatgcatgcattgcatgatttgaagtcatttaccaattcatcatatgatatgaatcggtggcttgctgaattgtatctaattgggtgattgagtcgtaaatagtgtgactctaacaactaggaatttggggtaactacatgacagcatactgtaatttttttccatttgataatattaaccaagtacagggaccagcatttgatttcatctacgatctccttagcttctaacctcgtttcttttgcaagtgttgggcactggctcactgaattctataattaagggtnggttctcttcaatt

SEQ ID NO: 190461 - DNA, 407 bp, Glycine max
tcaaggctccaaatgatgtgattccaaaacgaggtgatttctctcattttgagtttcaatttaggctcaagaatcacttaatttgaacgagtaaaacgagagttatggtcaagagataattttgagcaaaattagattttctagaattgtggtttgaaaggcaaggttgaagatgaaatggtggaaggaaagaatcactcttttcggcgagggcaacacacaaaggatgtgaaagacctttgatatagccagggtgttcttgaatcactcaagaacttaggagaatcactctcactaagataaaagagataaactctaatttttctaaataaaactcaacttgtgtttattgataaaatggttcagcttataaagaagctttaccatcagattctacatatgcttca

SEQ ID NO: 190462 - DNA, 411 bp, Glycine max
  unsure (1)..(411): unsure at all n locations
agcttggaattgcatttgggcacctattttgaatctcctatgctgtacctacatataagaaacagtcccactctcccaatnttacaaaatcatattcatatatcattggggcatttcaccgagcacttggtgggcgcatgtttggacataaattgcaagagaatgggggcaatgtggcatgccccattgcttcagaaaacaacgcaggcctaaggccttctcacacaaatcctcaattaaacaaatcaagcatcaaagcaacccaaaactgcctcacaaatataagcacgttctcacaatttagagcatcaaaagatgaagaaaacacatcaatgggaagctaaaaacttaaggatggaatacttacttgttggagtgagtagaaacaccaaaagtgaaagcataatgcaa

SEQ ID NO: 190463 - DNA, 439 bp, Glycine max
  unsure (1)..(439): unsure at all n locations
ggagctcactgttgctgccccacanagctccacgaaatttgacacggccatgctcttccttgcaagccctcttggcttcttgttcaagggctcttgcggtagctgcattntcttctcgtaactcggcacactctttctagacgtctgtagtgaccaacttgaatttttctttggcaagtcttgcttttcctagttctgtttttagagctcggacttcttcatcctcttccggagcttcgaagttctcttcgttgataatctttaacttggagagccaatctaacccttgtgtacgaactttcagccattcatgataaccactgatgatgccattatgaatgcccctaagttctttatctttccttaacgggctttcccacgccttatgaactctctgtataatcttgaaactttgcgcaccgaaatctctcacaagaaa

SEQ ID NO: 190464 - DNA, 394 bp, Glycine max
taatattgtttcatcttgctaaaatgacttctcaaattatttaaatcagtctatcatgtttttccttttaactctgctatgacttactgagtgaaggtttttgcaattttccaaactcatgtttgaagctttaatgcaacttctcaatttatattgtggatgatgttgaaactagattttataatgatagcatcaatggtgaagctaaaagcattcgagagatatgtatttgtcatgatggtatgacatcttacatgattttacaaccatgattagacaaagttacttagcgatgcaagaaataattaaactcaacattgatggtgtttttctactcttgataaaggactaatttctaggacttgtctactacatcataattaagagttttatt

SEQ ID NO: 190465 - DNA, 439 bp, Glycine max
  unsure (1)..(439): unsure at all n locations
agctagagcttaactacacacactcctcttatttctaagctcaactccttgagaagattcttatagaagctagagctagctacacacacctctctaataactaaactcacctctttaagatgagaagctagatcttagctacacaccccctataatagctaagctcaaccccatgccaaaatacatgaaaatacaaaaaaatccctactacaaagactactcanaatgccttgaaatacaaggctaanatcttatattactagaatgggcaaaatacaagcccacaaagaaggaaaaacctattctaatatttataaagaagagtggacccaaccttggcccatgggctcaaaanatctacccttaggttcatgagaaccccagggccttcttagcagctctagcctaatcctcttggagtcttctatccaataccctt

SEQ ID NO: 190466 - DNA, 431 bp, Glycine max
agcttatcgttagtttaatggttctatactacatcttataaaatattgttttaccctgattttataagatctttaaagttatatatttttcctaatgtttgtcaaagaacattatccaacttttgagattgagtaaggttatgtgaaaaagtaaactgtcatcgtgtctcatacagccttttatatcttatctcgttttatcatcttatccagccttttgtatattaatttaaatttaaatatgaattatttttaaatcaactaaaatactatactattttttgttgttagtcttctcaaccttaatttatatgtgtaacaacctaaattgaattaaggattaggatttttgttcatctggatatgatgatattgaatccattcttgtcctcgagataaaatatctagaattgatagttgtgtgtaaatta

SEQ ID NO: 190467 - DNA, 308 bp, Glycine max
  unsure (1)..(308): unsure at all n locations
atgtgacaacatatggtggtgttgctttgttaatcnngagaataaatgggaataccacacgcaagcaatgcaaattaagacacagtattcatcaagaccttaaaacagatattaaagaacgaatgatgattcaatgtaagtacagactaaggtacactacatttctggactcgtttttggcggactgaggttagatgataagatgcacccaattactaaatgttatatacttaaataatgctacgcacattctagcaggtcgtcgacactttgcctactgtctaacgttccatgtcaacactgttgaa

SEQ ID NO: 190468 - DNA, 430 bp, Glycine max
  unsure (1)..(430): unsure at all n locations
agcttcctcctccgtctctcatttctcacttctccttcttacttttcatgttcctttnntcttgaaggggaggtctaagttcctacatctttggtggcttatttcttcttccttatagcttctttgattgccatggagtgggtaggctctcctccttcctccttcctcctttcatctctttgctccatttcttttctctttacctttccttggagtgacccataacgggttttgatttaaaattcatattgagtgttgcttttgggatgttttccatgagtttgatgtggtagagctaataattgaaggaaatctcttattgagctcaagatcttctcctcttatctgtctcaaaacatagcttggagatgattgttggtaagggaagcttatcctcttttcttattttatggtgattntgaaatgcttg

SEQ ID NO: 190469 - DNA, 416 bp, Glycine max
  unsure (1)..(416): unsure at all n locations
agcttgtacctctggtactcaattaatatattatttatttttgctgagcattaaaaaagnttatttcaataagaacagacatgaaccatatcaagagacaccttgaagactcaaaaaacacaaaagatattctcattgacccaatatttgaacaacaagacataccgaatactcccaaccatgtttctctgcaaatgcttttgctgcttgttcgctatcaaaagtcaaggcagaatcaccaacatgagagtaggggtccccagtggatgtccagcccatcagtggattttcccacctataaacacattagttgaaaattactatttgttgagccatcattaatgattacaaaataattggttgaatttagaatattatactgaaatttctagcgagtccttaaactatccagggat

SEQ ID NO: 190470 - DNA, 331 bp, Glycine max
gctctagatggcactcaagaagcaagtttcttttttgtcttttcttctactccgtggctcttgaccagaccacctaagacaacgacattgttttgctttctctctttaagcgtgggtgttactgaatgtgtgtgagaaaagagagaattgtagtgtaagtcaccaaatgggattcataatgtgaagttgtgtggtggtggctgtgggactcaaggaagagggaaggtagtggattccacatgtccacttgtgggcatgtggagtgacatttgtattgtgaggtgtcaccgagcgaggcgttaattgcgcaatgtaattttacactattgta

SEQ ID NO: 190471 - DNA, 355 bp, Glycine max
tttttatttctcggtgaatatctcatgtcctttggttctgacttccaaagtgagcagagacagtaataatccgtgattcatatggttgtaccttaagttgtcattctctacttaaacatctcaatactttatttatgagatcttcattttgaaatgttttccctaaggatgcaagatgatttactatgtgtgtgaaccctctttgcatgtcttgtatactttcatttgcattcatcttacatagttcatattcatgagttaatgtgtttatcctaaatcctttaacatctggtgtgtcttcatgtgttaccttgaggggatcccacatatacctttgacttttacagtttgatac

SEQ ID NO: 190472 - DNA, 343 bp, Glycine max
agagaggacctggagatatgtcacgggggtcaggagaccttggggacgtcaggtggggtgctattgcccacaaccaagcttgaccaatcccgacccaacccgggcatagtcggtcagtgagaacctgtgatgtacctaagcaagcgagcttctggcagtcaacagataataggaacaaagaccacaaagcaaggaggcttgtgatggctggccagctgtgaattttgtgtgatatgtggattatggcctctggtaatcgattaccaagggtgggtaatcgattacaaggcttaaaagtgaagacagaaggctaagatggtctctggtaatcagataccactgg

SEQ ID NO: 190473 - DNA, 372 bp, Glycine max
agctttccgcaaagcctatggtaagaattgggacctagctttgtataagtctccatggaaccgattgcatccctttcccagtattatgaccagcctttgagatgcttcacgttcggagacttccaattggtaccaaccattgaagaatttgaggaaattctatgatgtcctctcgggggaagaaaaccatacctttcctccgggtgtctcccctctttgagtagaattgcagctgtggtcaaggattcagcaagaaggtttggaccgcataaaacagactcggaacggcatagcgggcctaccacggaagtacctagaagacaaggcgaggggtatggccagtccaggagaatgggtcccgtttatggatgt

SEQ ID NO: 190474 - DNA, 385 bp, Glycine max
  unsure (1)..(385): unsure at all n locations
caaggaagctacctagactataaatagaagcatgtgtatctcttgctttaactntgatgaatgagagtcttgtgagacacaactaaaggttaacttctctcccccttttgctccttcaattttgtgctcccacctctctatttcttttcctccattgaagcatcctctccaagcttcttatccaaggcatattcttggtggcgaagctccttcttccatggcttattccctagtgggtggcgccatcctctcacctcttctctttatcttgcgctacatctccatggtggaaaatcaccattgaaggacctcattgaagctcaaagatccagcctccatggaagcttcacaagcaagcttccatcaagtggtaatcagagcacaa

SEQ ID NO: 190475 - DNA, 425 bp, Glycine max
  unsure (1)..(425): unsure at all n locations
agctnttacccttggcacaatgtctgaaacatatttgtatattcctgacttcattaggacccttgtcttcaacggcaatgcaaatggaccctttatgatgtcagaaagtgaaatgcaaagcatgctagagcttatagatcaagtgattagaatatggggacttcttcgatcctccagtgattatgatccagctatgctgttaccaatactacaggtgattatattattttaacagagcattttgtaaatatcattgcatactaattgaaagggagttggtggaacatttctatcttggagcatctaaagatgttgtatgatggagtaatggatcaaggaatttgatagttgaaaagatgtgtccgtgcaatcaaaatatagcaaacaattactatagcccttaatcaacattaaaacataagcaa

SEQ ID NO: 190476 - DNA, 434 bp, Glycine max
  unsure (1)..(434): unsure at all n locations
atgtcatcagaaaatattaaggggtcgcacattgcattatcagtaagtctcaaattgtatttaagtcaagtaacatgtagatcaaggaattaaacagtgtgtggtagagctaaaacgggcctaaaacaagctacttttacgctatgaaagaataaaaatgcatttgctcttanaaatgcaaatacataagttggaattctgcattaactcctagataaagacctttatggtgtcaatcaaccaaattcctgcaccagcaaaataattaactttaacttctagaataaaggagaaagaaacaaagatacaacacacaatcacaataggagtttttaatagtaccagagatacctcactaattagaactgcaatagtaggtgatcacatgaatgcttcatgctcanaccttgtatacaaggtcccattttaatctt

SEQ ID NO: 190477 - DNA, 426 bp, Glycine max
  unsure (1)..(426): unsure at all n locations
agcttatacggcctaggatgtggttntgtgacttttttcattttaaacacaagtcttgcacttgccacattggtacaactccctccatcaatgatcaccatgcaaactttgtcattgatcaaacatctagtgtggaaatttttttctctttgactttcctccatagacttcaattgatggccaagtaaccgtctaatcatcaacaattctccctccagtgttttctccacttcctcttcatcatcctcactctcttctcccttttcaacttcggactcactaatatactctccatctctaagaatcatggctttcttgttagggcactcatatgcataatgtcccaagccttggtgtaacatcccattttttcgtatataaaatnttagagaataatgatgttttataattaaataaataaagaaa

SEQ ID NO: 190478 - DNA, 378 bp, Glycine max
ctctatgaagccttaatacttgctcttacgaggccgggcgttggctactataattttcactcaaatatttatactggcccttattgactgaatgatgtgcttgtgtatgtaagcttactattaatctccactaataaataagatgaatgctaacatattttacattaaaacttactatcatatataaataaataaatagtcactgaaaataaaattaaaactaaatacaaatatttgagtaatgataacattaaagataacaaaattgattatatgtatgtatatttaactccaatatataaaacaagttagccaaggaaaatgttcacaaacattaaaatgggacaataaaaatgcgttccttcatatttgagagag

SEQ ID NO: 190479 - DNA, 427 bp, Glycine max
  unsure (1)..(427): unsure at all n locations
agcttgacatctttcaaactgttattatcagaacatcctactctnatnnatatagctttaatatacctaaaggcgcgaatggaaagatttaagatcttaagttgtccgaatcattcatgagaggcggagtcgacattatgaaagtactaaatgtttgaaaactaatagttatgctactgcaaaatctaagactaccacaagagaattaaaagaagataaagtaatcaatgactaagatgtttcatatcattgaatgatgactcttcaagtgtccttatctagttntaaggattaaaataaaaattatataatattacaaataatagactaattaagtccaaactttaaattctttaaccatttaactttanttattttgggcttggagcccatcctatcatcctacctcaattnttactcatatata

SEQ ID NO: 190480 - DNA, 376 bp, Glycine max
gccactcacgaggtggaggttgagccatatttttagaatgctcaaaatcaggatgttcaaaatcaccaaccacagaatgctcagactcaccaataacagaatgctcaggatgctcaaaaggtacaaaatgttcaggataatcaagatgcacactatgcctaactaatatatgaaatgtcctatctatatcaggatcaaagggttggaagtcacctggattgcctctagtcatgcactatatgcagcagttcatgtgtttctcaaacaaggcaaaagaggtgggttaaaactacaactatactcaaacaatatccaaatgagctaaaattttgtgagaaacaccctaaaatcatgaaaagatagcacaaaaattttt

SEQ ID NO: 190481 - DNA, 418 bp, Glycine max
  unsure (1)..(418): unsure at all n locations
naagcttgaagnnngggatctgctgtttatggaaagctctggngcagtaagcacacactatacccaaaaggtatgccagtaggatcttttctgggtttatattttattagattatctatttcttggaacttacttgtccagtttttggtatacttttgaaggattcaagactcgagttaatttctttagcattcttgatccaacaagaatctgtacctatatttctgaagtcattgatgctggttttcttggacctcttttcaaggtatcattcctaaccttgtttctgttttaggtttgaaaaggaaacaatattgacaagtcactgtttcttgataatactggaatccatgtagtcaacccaccagaatatggtgtttgttgctggtgttgacattttcagttgccaaattccatt

SEQ ID NO: 190482 - DNA, 329 bp, Glycine max
ctgacccccgcgacatatcctcaagtaccactctggggcaactaatataagttggaagactgactctttcacgctttctcacaccgggcttattgggttatggggcacccgtcatatgtagtactaggtggcgatcgggagatggcgcaaaacaaatatcccatttccacaagcccaagcataagcacaccatccccagttgcccacctttaaatttagctcatgtacacatacgtagcccttctgctcgttcctctcagcaccgggtccgcatcaaccccttcaagccttcacattgtcaatcaattcattccatttgactgaaacta

SEQ ID NO: 190483 - DNA, 449 bp, Glycine max
  unsure (1)..(449): unsure at all n locations
catgcaagcttcattctacacctganaaagaggatgagatagttgcacaaaagagaattctttctaacaaaaaatttcatgtaggtggaccttcttctagtaattctgacatacaacagcctcttatccctcttccattcccacctagagcaattccaaacaaaaatatggaagaagcggaaaaggagatcttggagaccttcagaaaagtagaggtgaacatacctctgctagatgccatcaagcagattccaagatatgccaagtttctaaaggagttgtgcacccacaaaaggaagttcaagggcaatgaaaggattagcatatgcagaaacgtgtcagcattgataggtaaatctgttcctcacattcctgtgaaatgtaaggacccaggtactttctgtataccttgcattattgggaacaataaaattgagaatgccatgcta

SEQ ID NO: 190484 - DNA, 301 bp, Glycine max
atcaaatgaagaaatcaagaagcatctagccaagtaaagtaggtagtaaaaagtatttttcaaaaaacatcaaatagcacactttctgtgaagtgctgattttcatcctctcactaaatcaatcttctggcttaccgagccatccgctgagcacaacactcctcggctgagcacgaggaagaatctggaagaagtatgagttgtgcatgttcgctgagcgaaggattatcccgctaagcgcaccgctttagtccatccgctgaggaagaaaagcatgtgctaagcccgaaatcactaatgc

SEQ ID NO: 190485 - DNA, 441 bp, Glycine max
  unsure (1)..(441): unsure at all n locations
agcttggaaaaaatggtggcaactcccacaatatttttatgaatcttgtccttaactgggagtgcattaagcactngatagtcgaagcacaagcactaagaactgtccttattcaacaataggactgacaggaaatcaaggtggtgctaggttgaatcctcccaatggatagaagcttagcaacttgacactcaatcttaagattctagcatgaggataaatatatggttgcacactcaccaacactgaattaggaaaaagtggtctgattgacattgngggaggcaaatgtgtagggttcaacaaatagacctttataaagtggtctgattgacattggggttgggttgtgtgaaagacccaatttgtgaaccacctcttattggatgaagatatgtgttcactcattgtccgcaaggatggaagcttggtggtaggata

SEQ ID NO: 190486 - DNA, 359 bp, Glycine max
  unsure (1)..(359): unsure at all n locations
cgcgaaatagcatgacttaattactaagaaaagtgccgaccattatgtattcaaataaagcaaagtcaaagatataattcatacgagaagtcatacaatacttgaatttgaattctcagtctgtatatgtaagtatgtctgctgttttactntaagaagcaacatgtacgtagttggcaagccacaaaaacaagttatattattttcttcctgaaaaacatcatcctgagattaaaagaagacacaaaatttcttgtgggagtaataatttntgcaattcatccacttccccaacctcacaaaaagcaaagcatgaanacctatttaaagacctataattagcaattcaacatgatagt

SEQ ID NO: 190487 - DNA, 432 bp, Glycine max
agcttccatcaagttatgctcgagatcttccgtgtgtcatatttctggcgtctccatatgggatgtgcttgaatcggacctccgtgtgaaaagttatgaccatttgaatttctcgagatcttccgtggttcaatttcgggcgtctccatatgtgatgtgcttgaatcggacatctgagtgaaaagtaatgacaatttcaatttctcgagagcttctgtggttcaatttcgagcgtctcgatatattatgcgcctgaatcggacattcgagtgaaaagttatgaccatttcaatttcttgagagcttccgtttttcaattacgagcgtcttcatatgcgatgtgcttgaatcgaaccgtcgtgtgacaagttatgaccatttgaacttctcgagaggctccgatgtttaatttcgagcgtctcaatatctgat

SEQ ID NO: 190488 - DNA, 360 bp, Glycine max
  unsure (1)..(360): unsure at all n locations
acttacatcacacacctncttggctaaattcacatacatgcctaactcaagcattntggggtaccaaaaaatgcacatgtgcacatcttggtatttctaatacctatacatacacaaacttcatgatgaatcttgactatctacacaataaggtgctacattntatgctcttttcaagttttgctacctaaagccgcatgcaaattcaagtataatttcctttgctgactataaattgattacaaataagagagataccatttttggtaatgtattctcttacataacatgcacatcattatgtatatgttttgtgagacattctactaccacaaatatatgtacatacatccaagtatt

SEQ ID NO: 190489 - DNA, 429 bp, Glycine max
agcttgatgtgtgagttgattttaaccttagattctctttggttatttctcaatccattcaaggaaacttccaaagaaaaacatccgattgatttttttgattattttattcaaagatatttttattattctattattatttttttaagatattttgattattttattattattttgcttttttttttgtttaaccaaggttacagcgtgaacgatcggttagattttgctttaacagtgattaaacgacattacaacacaaatgatcgattgaaattcattttatcatttattaggcgagataacggcttaaataaacggttaaagtacgttaaaaatggaagaaaagaaaatcgaaaaggaacgagatgaagatgaaagcaaacaaaacaagaaatgaattgaaagtctcggattcgaacacttacc

SEQ ID NO: 190490 - DNA, 323 bp, Glycine max
  unsure (1)..(323): unsure at all n locations
gttcaaacctcacacaggcaagtgtttcaccctaattttgaccataaatatgtcatgacttgaatttgcaaatcatttcctatcaaataaaaaattacatgcgtgatcatggatcaataagaattttttgggaataagggttttggtgggaaatttggctctgagtgattgggcattatccttttctgcttttgtttaatacggggcgaaaaagtcgtccgcgcacaagaatttgggtggtaatcaaagagagaggactacttcaagtcgtggtttcctttgttttntgctttcttccaaatcttgattgggaatttcttctt

SEQ ID NO: 190491 - DNA, 431 bp, Glycine max
  unsure (1)..(431): unsure at all n locations
agcttgttaacaattaaataattttgaaaaaatatttattatctagaggtctttccttgatgaaaatattttttttttatcaaactttatttacgtcctgaccaaactacgaatgaatcagaatctcttttctctaatgaatcagaggattaagacaaaaaaatattaaatataagtttaaataaaactataaaaatgttggatccattgggagacctacaanaagtaagctttcaactcaaagtaagttttaccattagaaaaaaatgaagatgagttctagtatctcatgtgaaattgcatcacccacaaaaaataacttttgaattcaaatgggtactaccactaagaatgctctaatattctaaacacgacccaacactcatcaaactctttgcttttaattgtctaatgaagtatttttatttatt

SEQ ID NO: 190492 - DNA, 184 bp, Glycine max
tcaccatgctctatccatttaatataaagtcggactgatccccttacacataagagatgatctaacggcggacaatgactggcgactcccattcacacattgaatacaaggaaaaaaatagtgccccccattacgcgtgcgatttggtgagcaaattgcagaaatctgtaacacccttctcata

SEQ ID NO: 190493 - DNA, 413 bp, Glycine max
agcttggcggtaaccacctccgtcttttctcctattaataggggaaagagggcaaagcaaattcgttcagcccttctggtatttaagattcacttgaaattagtgacaaaaattgttttcgtgaagaaaatccaagccgaggtgcttccgtaacgcttctgagacgtttccgtgagcgatttcgtgaagattctccaccgttcttcatcgttcttcgttcattcttcgtcctacttctgtcttcaaccggtaagttcccgaaatcaaacctttcaattcattctatgtgcccttagtgagccccacttgtttcgcgtgcttttattcttatttcgtttgttttccgtacccctttattgatgtgttctaaccatttatttaagacgttttctcgcctaatcaaaaataaaata

SEQ ID NO: 190494 - DNA, 417 bp, Glycine max
  unsure (1)..(417): unsure at all n locations
agcttggatntccttttagtagggaatctatccttcctaagatggagccaaacccagtcacccttattaagaattatctattttcttcctttattgcctttagntgaatacacctttgtttgattctctatttggtttttaaccctctcatgcaacttctttacaaactatgatctcgattccccttctttatgtataaaagaagtgtccagtggaaggggaataaggtctaacgatgttaggggattgaacccatagacaacctcaaaaggggattgcttggtgggtttatgaccccccgtgttgtaagcaaactctacatgaggaagatactcatcccaagacttatggttgcctttcagaagtgcccttaaaagggtggataacaagtggtagagaaaagaaatttagttccta

SEQ ID NO: 190495 - DNA, 332 bp, Glycine max
actcttttttcgaatgcttctttatatccgctgaggggttatagctaaccatacttccacgatttctttggatttataagctagttatgccgccgtgtctttgcctaacccttccgggttcgaaccgttcccaactaactcgggcatattactgctgatcggacaggcagcttgccagagaggagtctcggaggaaatgcttacacctaaaagactggaagcggttctaatgactctctcggcctcaataggcataagagggagctaccaatgcttttcgctgaacgatgacgatgccttcatacaattcaacttgtggagtgaaggacact

SEQ ID NO: 190496 - DNA, 415 bp, Glycine max
agcttgcactactctctataagttttatcttgatatcacgctaagcctcacatctcaggctaagtgtatattgcagaaaattttgtgttgcaaaaaccgctaagcgtagcctgctacgctaagccccagatgctcactggaatttgcaacttcaagttgggcttaacgtgaggttaggctaagtgcttagtgtcgcaacctacccttttgcgggcgagcgaggcgaggctcacgggtgcgtctttcaaaggaggaaaaatgtgcggagtcgccaccaacgtttatttgtggaaaacgtctgaaaaactgaaggaaaccggtcataaagaatattccaaattcgggagttgtatttacattcgaggaaggtattagcacctctcacgtttgtcccaaaggacaacaaccttaaatt

SEQ ID NO: 190497 - DNA, 422 bp, Glycine max
  unsure (1)..(422): unsure at all n locations
agctnttgagcttgaagaagncnngncntnntactttcccaactctnngaggggnatttgtattgattgttgagatcttagtctttatctttccatatgtacatcatgcatcatcatgtagaggtaggaagattgtttctaaagttagaaactgatggaagcttgcttgaaaagcttctatggaggctggatctttgagcttcaataaggtccttcaatgatgattttcagccatggagttgcagcgaaagataaaggagaagaggtgagaggaggtgtcatcaactagagaataagccatggaaggagaagcttcactaccaagagagtgtcttggataagaagcttagagaggaagcttcaatggaggaagagaatgagagagatgggggtgtaggaattcaaggaaattatggagagaa

SEQ ID NO: 190498 - DNA, 425 bp, Glycine max
agctttggttcaagggagcaaaacatagttatttttttattgaggtctccaattatgaggtgttgaccatgaaactggcgcatgatatatattctttttattctttgacgtttaaaatatggaaaaaatgtgtcacgagtattaatactgtgttggacatactttacaaaagaggaaacaaggaaaaataataaaagtaacgcgggagttggatcacgagtcatgggaagcacctgctaagataaatggggcggattgagtttcaccacgccaatttcgtagcacaccagctattaacaggtgagttgacgtcaatatcatcgatttgcgcccgcagtttatatctttagttactattatccgaaaacatgcctgattgtcacaataaagtggatgtgtatgactagtaatagcatgcagctatt

SEQ ID NO: 190499 - DNA, 429 bp, Glycine max
  unsure (1)..(429): unsure at all n locations
agcttgtaggattatggggtacccatcacatgtggtactaggtggcggtcgggcgatggtgcacaacaaatttttccacatccacaatgcgcgcataaacccaccatcccctgttgcccacctccatctgagctcacgtactcccacgtagcccatatcctcgtttctctcaacaccgggtccccatcaatcctcccaagcttccacaacatccaagcaaaacaacattcaaatagcacaagctatcacagccaagcaaaacagagcaaaggcagaaaactgtgccaaaacaccaaccaaaatcacagcttttctcacttaaagaccccagtaacaattccttcgttccaattcgttaaccgttggatcgactcanaaattntactggaagtctctagtacttaagcctacattntgaccgttgggatc

SEQ ID NO: 190500 - DNA, 314 bp, Glycine max
  unsure (1)..(314): unsure at all n locations
agacttgcggaaaattgtgtacccgttatatgtgttaccacgggcgcgancgggcgatggagcaaattaacttctccacatacacaaatcaaacatgaaccacccattcccagttgcccacctctaactgagctcacttactactatagaacccttatccttcgtcattttatcaccgggtccccattaacccttccaagcttccacaattccaagcaatacaattcaactatatgaactaccctaaaccaaaaaaagggcaaggcagaaactttgccaaaacacttccatttgcattttttactgaaccccag

SEQ ID NO: 190501 - DNA, 443 bp, Glycine max
  unsure (1)..(443): unsure at all n locations
agctntttctacaaccaacattgttctacaaccaaccttttctccttctttggcaacatcaaaaagccaaagaactagggaatcaaaacagatataacaaaggagtagaaagatataaatatcagagtataaaacacaataatccaaactcacaaacaagaaataatcaaaccagaatccaaataacttaaaatgtcaacaaccacaaaatatccaagactgaaattgaaaaaccacaagataaataagcaaagtacttagcataataatgtaaattctaagaaactaaaagccaaaatacacggcttataaaagacatataatcagaaactaaaatctaagaagacgaaggtggtggaggaagatcgaaactctgaagaatgtatccgacatcctcttcaagctgtgtaaggcgaatgtccataccggcaaagcgtgaatct

SEQ ID NO: 190502 - DNA, 456 bp, Glycine max
  unsure (1)..(456): unsure at all n locations
acaccaggcatcggcgttttctattttctcatcacccttacagatgaattgaaaaatcttttatggaagtcaagagcacaaaactgcgtcgataccattgactggtgagaaggttttccagtgggttgaacacctgaatactatatttggaaagacccaaaagatggataaaagtaacacttgcatatggaagaagaggtccattttctttgatcttccctattggtttgaactaaatgttaaacattgtattgatgttatgcatgtagagaanaatgtatgtgatagtggcattggaatgctccttaacattcaaggaaagatgaaagatggtctgaatacccgtcaagatctatctgacatgggtatacgatcgcagttgcatccaaggtctaatgggaaaaaaaatatacttgtctccagcttgcatactttgccagaaggagaaaataattt

SEQ ID NO: 190503 - DNA, 373 bp, Glycine max
tattaacaacttccgtttgcccatcggtttgtgggtgacaagtggttgaaaataacaatttagtgcccaacttgctccacaaagtcctccaaaaatggcttatgaacttaaagtccctatcactaacaatgctccttggcaaaccatggagtctcacaatctccttgaaaaacaaatcagccacatgggaagcatcatcaacttttttacatggaataaaatgagccattttagaaaacctatcaacaaccacaaaaatggaatctctaccattgcttggttttggcagccccaaaacaaaatccatggataaatcaatccaaggatactccggaattggcaatggagtatacaatccatgaggctttacctt

SEQ ID NO: 190504 - DNA, 376 bp, Glycine max
  unsure (1)..(376): unsure at all n locations
agcttgcatgcattggatcttgcatccggcattgtaatataaacaaagtgaaaatctcacatgacagtttctagaaatattaccgcactaatatcctctcaagtaaaactaagcagataccataggcttaacagttgatattctcaaatgaaactataaaccaattgttcacacgggatgatgcacaattgacacccatcaaaatttggaatatgcttaatgacacttctggaccctgaactccaaggcccatgagttaagacgacgatatttacatctaattcccttccatcatgttattctgtagntttaaacaacaattttagcataaaactcactactgacgtagttgagaagagataaaaagaaaactata

SEQ ID NO: 190505 - DNA, 431 bp, Glycine max
  unsure (1)..(431): unsure at all n locations
agcttcaacaaaatcattggagactattaaatcagcatcctctactggatttgnataaacttgttcatccccaaaactatcattgttttgaacatatttccaagaaagcacttcaaactgtcgaagaacaactgcaataatttccataagccagttggtttccatttcagacaagcttcttatttcttcctcaaaaaagcagtcattatccattgaatcatcttgtatgggcttgctagaatcattttcagcaattttcatctccaaaaaatccacggcatcactccattcttgcaatttaatccaaatatatctggcagcatttattaacccacacactctaactatggcaacatcatcagaactatccggacataattcagttgccttgaaccgaanaagtaattgcttaaagaaataccagaggaatc

SEQ ID NO: 190506 - DNA, 441 bp, Glycine max
agcttaaacaaaggaagtggcatcatgcaacatatgtgaaacaattctacttatgtctgcattacctttcacttgttggatcaagtggcctcggaataattaagaaggggggttgaattaattattaatgagcctttactaattaaaaaatctatccttcttaatgttactaaattcaattaagcttttaccaaaaagttaagaaagtaaagaatagtaattgaaacttaaccaaaagtaaaagcgataatgaaagtgcatagcggaaattaaagagtgtagggaagaagaagacaaacacaagagtcttatactggtttggcaataacccgtgcctacatccagtccccaagcgacctacggtccttgagatttctttcaaccttgtaaaaacctttacaaacaaagatccacaagggatgtaccctcccttgttctctt

SEQ ID NO: 190507 - DNA, 430 bp, Glycine max
  unsure (1)..(430): unsure at all n locations
agctntgaagttagatatatnntattattattattatacatgtnnatctaattattaagtatattttgtagttagttaatatgtgagatgttaaattgtggacataagatatgattgtgaataagtgtttggttaatacttgatgtgacaatatttgtgttgtgagttgtgaattatacaataatttgactggtgtttaccttgagaaaaatatttatgtgtgaagtgttaaaaggaaagtgtagggttccaagttaagaacctgaagtgttaaattgtagcgcaatatattaagcatgtttgaaaacaagtgtgagatcatgggtattgtataagtcattagcagtgtctgcatgcaaaagttattttaggggttgaacttgaatcaggaaggtaaaaccctaatggattatttggagtctaggctttg

SEQ ID NO: 190508 - DNA, 428 bp, Glycine max
  unsure (1)..(428): unsure at all n locations
agcttgagatgaggaagtgnngaatggtgaaacttcctgcttttatgggggaccacagagtggtacctggagatatgtcgcgggggtcaggagaccttggggacgtcaggtggggtgctattgcccaaaaccaagcttgaccaatcccgacccaacccgggcatagtcggtcagtgagaacctgtgatgtacctaagcaggcgagctcctggcagtcaacagataaaaggaacaaagaccacaaagcaaggaggcttgtggtggctggctagctgtgaactttgattgatatgtgggttatggcctctggtaatcgattaccaagggtgggtaatcgattacaaggctaaaaaaatgaagacaggaggctaagatggtctctggtaatcgattaccacggngtgtaatcgattaccaggcttgaaaac

SEQ ID NO: 190509 - DNA, 426 bp, Glycine max
  unsure (1)..(426): unsure at all n locations
agcttcataaaaggttatatggcgttgtaataagcatcgagatagagggacaagaagtctaatgagtttatgagaaacttatgattcaatagatgtgacatggaccattgttgctatgttaagaaatatactaatagctatgttatccttgttgtgtatgttgatgacatgttgattttgcaagatctagtatggcagattaacaggttgaaacagcagttggcaaaaaactttgaaatgaaggatcttggtccagctaaaaaaatccttggtatgagaattcttagaaacagatcagaaggaattttgaagttgtctcaagagaaatataaacacaattntcttgacaggttttaccttgaagattctaagaccaggaattgggatctcatttgaagttttcatagaacgaatctttgtagacag

SEQ ID NO: 190510 - DNA, 410 bp, Glycine max
  unsure (1)..(410): unsure at all n locations
agcttgaaactttngctgaggtccaagattgtgtttcatgacagaaatttgctatagtttcaacagcattgtcctctagttgaggcttgtcttgacgaaggattaaagtctgcagttttgtgaatttatgagaaagggataggaccaagttattcatgttcttgctacacctgaaaggaattacgaaatggaagttattacaggtataaaaattcccccccataatatagaacacacatcagtttttcttgtttaaattttttaaaacaccatgcataactacaaacaattcatgtcattgaaccaaattaaagactttggaaagccatccagcaactgttttcatctagagttttgagaagggtgcatagattatagaaacaaatgaaacaagtatatcaagtcatcaa

SEQ ID NO: 190511 - DNA, 409 bp, Glycine max
  unsure (1)..(409): unsure at all n locations
agcttgaatcggacatccgngtgttaagttatgtatatttgaatttcncaagagcttccgttgttcaatttcgagcctctcgacatattatgcacccgaatcggacatccgtgtgaaaagtcatgatcatttgaatttctcgagagtttccgatgtttaatttcgagcgtatcaatattttataaccgtgaatcggacctcagtgtgaaaagttatgaccatttgaatttgacgagagcttccgttgttcaatttcgaatatcactatatgtgatgcgcctaaattggacattcgagttaaatgttatgaccatttggatttctcaagagattctgttgttcaaattcgagcctctcggcatcttatgggatcgaatcggacattcgtgtgaaaagttatgaaccattg

SEQ ID NO: 190512 - DNA, 97 bp, Glycine max
aagctcttgagaaattcaaatggtcataacttttcacacggatgttcgattctggcaataacatatcgagacgctcgaaaatgaacaacggaagctc

SEQ ID NO: 190513 - DNA, 426 bp, Glycine max
  unsure (1)..(426): unsure at all n locations
agcttgcctcanagaggtccaggaaggataatgcggctgaagggactatttccgctcctgagtatgacagtcaccgctttaggagcgctgtacaccagcagcgcttcgaggccatcaagggatggtcgtttctccgggagcgacgcgtccaactcagggacgatgagtatactgatttccatgaggaaatatggcgccggcggtggacatcactggttactcccatggccaagttcgatccagaaatagtccttgagttttatgccaatgcttggccaacagaggagggcgtgcgtgacatgagatcctgtgtaaggggtcagtggatcccgttggatgccgacgctatcggccagctcctgtgatatccgttggtgttggaagacggccaagaatgctagtatggccagaggaggaaccggtctg

SEQ ID NO: 190514 - DNA, 307 bp, Glycine max
atggtgaatttccaccatggtgatgcgcgggcgacaaacgagaagaggagagaggaagcgccatccactatggaataagccatggaagaaggagcttcaccaccaagatgagccttggagagaatgcttcaatggaggaaaagaatgagggagagaaagagagaggggggagcacgaaattgaaggaagaaaaagggagagaagttgaactttaagttgtgtctcacaagactctcattcatcaaggttacaacaagtgttacacatgtttctatttatagactaggtagcttccttgagaagcttt

SEQ ID NO: 190515 - DNA, 410 bp, Glycine max
agcttgcacttgaggagggaaggatatttgcatcttatgaacaactttcttaactatttgtccttcagatattactatctctttttgctaatatgtaaatataaatagtataagggtatggcttatggacatggtctatatttacttcttacagatgcagatgctccaattcctgtacccactgatgaggtttacttagtggggcaggcacttcacaccttccttgcttggccgacacatctggtcaagtctttatcacagcaggtacttattatccttactatatgtgccttctttataaaataattcattaagtgtgcctcaaattaggctatttaactttgtttcatgaacaggtagctgtgtcttcgccaaaaccaccttcgaagcccgatccggaggtcaatgat

SEQ ID NO: 190516 - DNA, 439 bp, Glycine max
  unsure (1)..(439): unsure at all n locations
agcttataagaacaaaattgccttaatcatttcttaatatgcatgtgaattangacgcatcaacaagaatcaagccaaggctactgtgcaagcaatcaatggggcaaaacacaccaaatgattataatgatggatggctcaaattctcacaaaggtaaaatcatcactttcaaattgagctttcaaaactatcatgacatgtagagaagaatcaaggatttcaagtcacaaaatgtcaagaacttttattttcaaaacaattacccatttcttgaacatatcctataattcaaagaaaaacatgcaaagtcgtacgtgcacatgaaattgacccaaaatattaaactgaaaatccgacgaaactaacaacattaacaaattaacacaactaacaaattaacaaaaccaacaaaactagcanaaccaaagaacactcccc

SEQ ID NO: 190517 - DNA, 461 bp, Glycine max
  unsure (1)..(461): unsure at all n locations
ctaagcttgtgtatgtacaacatggccttatcatgccccagtattcttttattttataattcaaagattcatgcanagattatcactcacagctagtattcactcacagtttaaggtcacactctcaccggttttggttcaagcttttctttcacaatcaatctgtctactgactaacaattctaattgcaagttcacattcttgttctttctttctctaacatacacacttgctcaaactcatgaaaggaaacactaactccatcacaatcatgcattcaacccaaaatacgacatacaaccattttcactgtcataccctaatttcgtccagggacctttgcttgatgacatgcaactnttctttggtccttgtgaggtgctctgcacccatcattaggcaatttgtgaaattctgggacatgctcgaaaacaaaagaaaatattgatgcacaatccgt

SEQ ID NO: 190518 - DNA, 434 bp, Glycine max
  unsure (1)..(434): unsure at all n locations
agctntactaaatcaatcacacaagcgcgcgcacacacacacacatacatagcaaaaaattctatgattaaaaacatataactattgaaattaaattcatacatgcacaaatgacaaaacacaaagtttcttctgtcaatcggagttgtaatttttcagggtgttacagctctaacttattttaattattctacatcatataattatacactttaattagtcaccaattaattaaactaaaattctatttttaaactagttatatagtcatttatgaaaatgccctccactttaaactcttatggcttaattatccctttctaattctatggaatctagatcaccattaatcaaccttaattatccccacttaatttctaactttacttacagtaattactaattttctttcaagcttctaattcctatttcta

SEQ ID NO: 190519 - DNA, 412 bp, Glycine max
  unsure (1)..(412): unsure at all n locations
gtctgaagaccgacgcgcgctatctctggtcatactgtcggcgatgaagccgtgttgtctgctgtcagttttgggtccgccgccattgcttgcagatacagtggcggcgctgtgactgaccgcggcgaagccatgtaactctcctccaaaagcacttccttcgatgagctatcctcctttccgcgcctgcaataaggtgggtctgctagacttacactntcctcgacgatgtgcacgttgaagatcttcccttgcatgtgtacgctgactgtatggttgattatgggactcgcacgatgtttgatcaacacccttattacatccagctggcggagattctctacatcgtcttcaacatccaccatgtcgcctacacctgctataatcttcttaatatgctgagtatcccaca

SEQ ID NO: 190520 - DNA, 435 bp, Glycine max
  unsure (1)..(435): unsure at all n locations
agctngcataactgatggaagcttgcttgtgaagcttcaatggaggctggatctttgagcttcaatgaggctcttcaaaggtgattttccaccatggagatgcagtggaagataaaggagaagaggtgagaggaggcgccatccactatggaataagccatggaagaaggagcttcacgaccaaaagagtgccttggataaaaagtttagagaggaaacttcaatggaggaaaagaaagaaagagagaaagagagagaggggagcacgaaattgaaggaggaaaagagggagagaagttgaactttgaagtgtctcacaagactctcattcatcaaagttacaataagcattacacatgcttctatttatagcctaggtagcttccttgagaagctagagcttagctacacacacctctctaataactaagctca

SEQ ID NO: 190521 - DNA, 343 bp, Glycine max
  unsure (1)..(343): unsure at all n locations
gagaaagaaaattacaattgattagagatccaagaacaaattaacaaggagaaggaacattgggagaaggttttggtagggattataactataattaaaaatctttctaaaaaaaatgtagcttttcgtgggacaaacgaaaaaatataccaaaaaggaaatggaaacattgagtttaattgagttgttagcagaatttaatccaattatgcaagagcatgttaagcgtataaaaatggtgactttcataatcattacttgagtaagactctacagaatgaaattatagaaatgttggctcctcaaataaaaaatatatactanaaaaagtaaagatgcaaat

SEQ ID NO: 190522 - DNA, 444 bp, Glycine max
agcttgcaagcagcaagtatattgcaggatcacatggatgaagctcaacaattcatctccttgccatatcttcttccggtggcacgtttccatgtgcgttgcaagcatttaataaggttttataaattacagaatccggcttgaaaggcattgtttcaataactcccatagcttcctctaggcgaccacctctaccgaggagatcaactaaacacacatggtgatccaactttggtgttatatgatatgttttttccatggaatagaaataatcaagacccagattcaataaactaccttggctgcaagcaaaaatcagtgataagaatgtgaaagaatcaagtttaactcccgctaacctcatgtcatcaaaggcagaaagggcatcggatatatgtccatttgatgccaatccagagatcaaaacattccatgacactgtat

SEQ ID NO: 190523 - DNA, 300 bp, Glycine max
  unsure (1)..(300): unsure at all n locations
ttacacgggttgcggagttggatttgttgaaggaagaatatggttggagccttgggtggtgactaatgtggggtgagaattgtgtatgaatacaatacataacctaaattggtggaacgagtgaatagttacaactactagtatgacacatacttaagcccatattaaataaaatccttgagcagtgaaaacttcccagcacttaattcatttgggtctagttgattccaacttttcaagctgaacttcatctggggttggatcatatatcccctatacactntcttaacaagggatgat

SEQ ID NO: 190524 - DNA, 431 bp, Glycine max
  unsure (1)..(431): unsure at all n locations
agctntcataggtgaaatcaggtgcatccatttcccttagagtcctctcacgaggtggaggttgtgccatgttctcagaatgtgcaaaatcagaatgctcagaatcagaatgctcaaaattataatgctcaagatcaggatgttcaaaatcaccaataacagaatgcacagattcaccagttatggaatgctcagaatgatcaaaaggtataaaatgatgcctaactaatctatgaaatgtcctatctatctcaggatcaaagggttgtaagtcagatggattgcctctagtcatacactacattcagcatgcacacaactagttgccttgtcatgtaaataaaggtgtaggtttgaactacagctaccctcaaatgatattcaaatgacttgaaattttgtgagcagccttataaaatgatgagaagata

SEQ ID NO: 190525 - DNA, 430 bp, Glycine max
  unsure (1)..(430): unsure at all n locations
agcttaaagtatgcccgagtcattcatccctatgagatgttgtcgaagnattggcgatcagaattgccattccttggattatagggttgaaccaagctcatgctttttcgaaaaaagttcatcaaatcaagttgaagaatggaagtaactatcttgcaaaaattggggcaaaagatgaatcgagtcacatcactgcttcgtctactgccaaacatatttaggattgttgatgtccttgttacttccagtttcaccttgacaaagatgtcatagaccatgtggaaaatctaaattgattcaaccccataccctgcacaatacttcaactgtacatcattcgcatacatccatgcttttcattggttgcattgctcattgcattctttcctctgaaaagaaaataaaaataaataaataaataacataaaat

SEQ ID NO: 190526 - DNA, 420 bp, Glycine max
  unsure (1)..(420): unsure at all n locations
agcttccattttcaatttcgaccatctcgatatattaccggactcatccggacatccatgtataaagntattgtcaattcaatttactcagggcttcggatcttaattttgagcgtctcgatatattacaggactcattcagacatccgagtaaaaagttattgtcgtttgaatttgatacgagcttccgttttcaatttggagcatctatcgataaattatgacactctgtcgggcatccgagtaaaaagtaattgtcgtttgaattttctaagagtttccgttttcaatttggagcgtcttgctatattacgggattgaaacgaacattcgtgtataaagttattgtcatttcaatttgctcagagcttctagtctcaattttgagcgtctcgatatattacctgattcaatcggaca

SEQ ID NO: 190527 - DNA, 425 bp, Glycine max
  unsure (1)..(425): unsure at all n locations
agcttgcttgtggggcttctatggaggctggatctttgagcttcaatgaggtcctttaatggtgattttccaccatggagatgcagcggaagacaaagtataagaggtgagaggaggcgccatccactatggaataagccatggaagaaggagcttcaccactaagatgagccttggataagaagcttggaaggatgcttcaatggaggaaaagaaagagggagagaaagagagaggggggagcacgaaattgaaggaataaaagagggagagaagtagaactttgaagtatgtctcacaagactctcattcatcaaagttacaacaagtgttacacatgtttctatttatagactangtagcttccttgagaagctttcttgagaaaacttccttgagaagcttctttgagaaaacttccttga

SEQ ID NO: 190528 - DNA, 432 bp, Glycine max
  unsure (1)..(432): unsure at all n locations
agcttataagaacaaaattgcctcaatcatttcttaatatgcatgtgaattaggaagcatcaacaagaatcaagtcaaggctattgtgcaagcaatcaatggggcaaaacacaccaaatgattatgatgatggatggctcaaattctcacaaaggtaaatcatcactttcaaattgagctttcaaaactatcatgacatgtagaggagaatcaaggatttcaagtcacaaaatgtcaagaatttttattttcaaaacactaacctatttcttgaacatatcctataattcaaagaaaaacatgcaaagtcgcacatgcacacagaattgacccanaatattaaactagaaatccgacaaaactaacaacattaacaaattaacacaactaacaaattaacaaaaccaacaaaactagcaaaaccaaagaaca

SEQ ID NO: 190529 - DNA, 381 bp, Glycine max
  unsure (1)..(381): unsure at all n locations
cctcaatttaatggatcttaaggtttgagaagtgaaaatgagaatggggtaattttggagcaaacactcatctcaaaaagtctataacattaatctaaactcgctcaaactggttttacgatgaaaactccaccgaatcaaaatttgacctctcaacacccaatttaccctagaaatgactctngctttcactttggtcactcattttccccatttgctcagcccaagctttcccacaagtcctaaatgacattttaaactaggattaactcactttaacctccaattaccactaaatccagatttagcttttcaaaccctcaaagcatcacactnttccactcatatcactacattcacacctttaaaccctaggttaac

SEQ ID NO: 190530 - DNA, 168 bp, Glycine max
aacacctaatatgtgcatcagtctcctcccttactattaactcatcttcatcactgttaaattgtgtaagcttgatattacagttgcgaataaatcatgttccttgtctatacatgtgttggaaggtacattctcaacatcaaaacatattggtgaaaattggtgggg

SEQ ID NO: 190531 - DNA, 414 bp, Glycine max
agcttacaatctggtttatatccaagcccatatttaatattaaattccaatctagattaaataatatctatatgagatcaaatctaaataatatctagataagataaagatcagattagatctaattttgtagaataaaatagtctgccctcttcaagtccaagcccaattctggattcaagtccaaacccaattctggattcaagcccaatgcttcattaattcctgaaattagattaaaaacatcaaattagttgaatgggcccaaataataaaactgcctaattaatctgacaattaagactaatcagtacttaaaatgatgcacaaaagggttaagaaataggagaaaataatggcacatcagagggtgacaagtcagtcgagcccccaagcatggacaagtactgtctg

SEQ ID NO: 190532 - DNA, 340 bp, Glycine max
agcttgcatgcgagtattgctcaatgggcgagagcttcactatattatccttttataatagatcgactcaaacccatgatagaactcttgaacatactagataacgtgcctatcacagagactactcaataagccctgtgatacaaaggtaaagtgctgtgctactacaatgaccaaaacacaacgcccaaaagatgggaaaaccagttctaacgttgacagaaaacagaggatccaaccttgacccatgggctcaagaatctaccgtaatgataaagagaaccctacggccatcgttaatagctctataccaagcctcttgaagtcttctatccaatac

SEQ ID NO: 190533 - DNA, 441 bp, Glycine max
tgcaagcttggcctcaaacttccttataataggcggtcttttctttctgtttttagagctcacccctactagaattccaagataagagaagggaaattccagttgactacagttaagagaaagagttgcatccctacaccagccttcagatttacccaggcacccgaattggcttttattgtaatttatcttaagaccagaaaccaactcagagcatctcagaatacatcttaaaactctaacattatcattagtggcaaccccaaagaacaaggtatcatcttcatattgtagtatattaacttcctctttttgccttcccacttgatagctggtgaagagattcttagctacagctgacctcatcaacccagtaaggccgttcactactatattgaagagcaaaggtgcaaggggatcaccttgtcttaaacctctctt

SEQ ID NO: 190534 - DNA, 412 bp, Glycine max
  unsure (1)..(412): unsure at all n locations
agcttttaatganttgtaataagaaaacataatgcatttttttttatcgcctgtcttttaaatttaaatttaggtatggaattatattaaatattcttaatgttatttatagaaattgctctgataaagcatgataaaggaaggagtgaagtatgcacctgtcctgtatcaattttatattggttaattactccgcgggtttccaagtttttattaaatatttaattaagcctatatttttttaattgtgtccttgagcttttatttataattggatcttctattcatttttgaaaaaaaatctaaattaatcaaaatatattggtccgtgtttttttgggttaaatttaaatcacactaacttgattaataaaagcaaggtttgatctacatcgggtcatgggatatgatt

SEQ ID NO: 190535 - DNA, 367 bp, Glycine max
  unsure (1)..(367): unsure at all n locations
tttttagctcangtgcttggaggtctttcaatatgtagtaaagtaaaatgagcatacttctcttccatgggtattctccctataaccgactgctctctttctaccctggaccctcaagtcaatcttctctctctgtatcccttttccatagctagtctccctataaccatcgtctctttttctcccctcaggcctcctgtcaatcttctatggctctctcactccccatttgaatcgcagntacaaactaataatacttatactgcttctatgtactgtatgatacctataatgtgagggctacatcgtatataaccatatatggaaatgaattggatctttcatatatatatatatatatatatat

SEQ ID NO: 190536 - DNA, 435 bp, Glycine max
  unsure (1)..(435): unsure at all n locations
agctttatccatggcttcctatggaggagagcttgtgcttgactcatcttcaccttgaagtggggtctccaatcatctttctttcttctccattccgctgccattgaacttcaagaagcaaaggactccattgatgaagaagatccaaggcctacaagctctacatagagctacatcaggttgtctcttggagaatctttgaacacaagggtgagggatcccaaggtgtgttcaaagtctgtaaaggaattacagagatagttaaaaatctcaagtgggttgcttgaggactggacgtatgcatgggaagtggccacaccaatataaattaagtttgcatttctctcttcccttatctcaattatgttattgcaatcacatttgtcttgcatgtttanagaacattattaaattgattgatgcttcttcttctgc

SEQ ID NO: 190537 - DNA, 437 bp, Glycine max
  unsure (1)..(437): unsure at all n locations
agcttgtggattttctgaaagaactagnnaacatatatggctgtttatatttgancngangaatactaaacatctttgatttatttatgaattcaaaatattaggaatattttaagttttaattcactattcttgaaatgcataaatgaatatcttgttttcctttataactcattccacatggcatcaagttatcagtgtaaaactgtaaatatggacttagaccagaatgtgtacgatactaatacagcccaggcttctgtgtggaaatttatttctctacactcaccgtttcgctgctttaagtctttgctttacttgatctatttaatggttctcaccattaggaacgagataccccttattattggtatgttctatgacctcttcatctatctttgttcacaattctcacatccacaatgtttaaagactct

SEQ ID NO: 190538 - DNA, 474 bp, Glycine max
  unsure (1)..(474): unsure at all n locations
aactaagcttgccgccggagtttccgacatgctcttggtggaggatctttctatatattgagagagcaaganatgaagagccaatggttgatacatggtcgaaatgaaaaagatcatgaggaagcggtatgtgccggctagttactcgagggactngaaattcaagctccaaaaactaacccaatgcaacaaggggggtgaggaggatttcaaggaaatggatgtgctcatgattcaagcaaagatcgaagaagatgaatgaggaactatggctctattcttaatggtttgacaatgatatccgtgatattgtgagtcgccgagcttgttgaatggatgattgcttcacaagcaatccagtagagcaatattaaaagagaggagtgctttatgattttaccactttgttctttatggaagacaagtagaaatggctgtctttatattccactatccataaatcctcaagccaag

SEQ ID NO: 190539 - DNA, 431 bp, Glycine max
  unsure (1)..(431): unsure at all n locations
agcttgcctgtccgangcagcagttatgatggtctgatttatgnncgggaacggttacgaacccggaatgggtttaggcaaagacaacggcggcataactggcctgataaatgccaaaggaaatcgtgggaagtatgggttaggctataagcccactcaggtagatataaagagaagcatcgcgggaaggaagaacggtagtcaaagctcgcggttgagacaagaaggtgaaggaagcccgccctgccacataagtagaagctttataagcgcgggtctgggggacgaaggtcaagtggtcgcgatatacgaagatgatgttccgagtacattggatttggtacgaccatgccctcctgatttccagctgggaaattggcgagtggaggaacgccccgacatttacgcaacgagcataatgtaaaccttta

SEQ ID NO: 190540 - DNA, 61 bp, Glycine max
accaagatgtacagagccgccaaaaaaatggcacagccaggcccgaattaatctaaacacc

SEQ ID NO: 190541 - DNA, 395 bp, Glycine max
  unsure (1)..(395): unsure at all n locations
agcttctcccccaattttctatatatatgggaagatgcngattanaaaagggnngagccccttaggcacttctctctctttagaatttgctcaagaaaatagttttcgtgaagaaaatccaagccgaggcgcttcaataacgtttccgtgaatgatttccccaaagtttttgaccgttcttcgacgttcttcattcttcaacgggtaagtaccctataccacacttttcattacttttatgtacccgtggtggtccccatttggttccaagacttttatccttgactcattacatacataccccctttgaatgttcaaccctttttttaagcatctctctctatccacaaataacttatctccccgctctctgattgattaccgcaactctggta

SEQ ID NO: 190542 - DNA, 443 bp, Glycine max
  unsure (1)..(443): unsure at all n locations
tatttcaccactctggcacagacatggagtgttctcttctacaacaacctgactcccacttnccacacctatgatctaatatggatagagccaggttgggttacagcttagtcacaggcatgtacatgaacattggagccctaatctcaagtcagatttcttccattgcccagagtaactcctctaggctcggattcccagccttgatcactactctatgcaaagctagaggaggtacttctcatagtctgacctatgagagcctaagcccggccattaacttggactacattaagaaaaactgttggaatgtggatgatctgacagttaacttcagaggggccaagaagggaagggctcgactagcagatgttccttcttcttctgcaccaccagatcctctacttctaccacgcctacaccagctacccatgactctcagc

SEQ ID NO: 190543 - DNA, 408 bp, Glycine max
  unsure (1)..(408): unsure at all n locations
agctntgtctgcaagaatcactgataatcgtgttaaggtccaatgccttaaacggtcctctttgcttttatcggataacatggaccgttaaaaagcataaaatcaacacatcactttactgccttttgcgagaactacgtacgtctgatttcctcttcaatggaggaatacgtatgagcaaaagccccgcttttgtcgacctcataagatggttaaaggttcaacgccttagcttttctcaccaagtaaaatggatcattttaaaggtccaaacgccttatatgaccgccttacaagtaaaaagaatcacttgaataaccccttttgaaagaactatgtaggtctgactttcttatcacaattgaggaatacgcangagcaaaggaaacacccttgtcgaccacaaaa

SEQ ID NO: 190544 - DNA, 402 bp, Glycine max
  unsure (1)..(402): unsure at all n locations
ctgcagcatgcacttaaggtgaattactgaccaacgaatattgcatgattaanaaaaccttaagaacgannacgaaattcgtgagtgtatatgtacgtcgcaaggatcttgatgtctggtttgcgtgggaggttgtaacctgtactatgatcggttaaataaaccatttgtcatagatcggtccgtaatcaagctttgaactataaaacaattagtcctaatctttttgggtttgacccatttaattccacgcttacccgatttatattatataataaaatataatactttattagcataattttaaattataatatctttttcaaaataaaacatattcattaaacatacaattagtatttatataacgtgaatatcctcaaataatattattaatctgac

SEQ ID NO: 190545 - DNA, 425 bp, Glycine max
agcttttatggtgttgtgtactgttgtaattgattactactctcttttaatcgattacatgttgtcgtttatagcttcttttggctttgtgttttgttttaatcaattacaaaggtcttagggggagtttttttgccatatttaattgattacacctacattttaatcgattacttatatcaacttttggttttgggtgaaaacaagtgtcaacttaattgattactatgtaactttaatcaattacttatgtgtttttttgtgtgtaatcaattacatctcttcgtcttcacctcatcaaccaccgttattactgcatttactcccaccacccatctcaaccaaccaaaatgcctcagcctctctttataagccagccttaccctatccacaaatcacaccaacacatcctctaaaacctcttg

SEQ ID NO: 190546 - DNA, 329 bp, Glycine max
  unsure (1)..(329): unsure at all n locations
attcttgggattacctgtagaactccattgcatagcaaaatctaattccggttgaattagataaccggattaatataaatcttggtctctatcctctctttgactctcatctctttattacattctttatcaatttcctaagtttcaaagatacttcgaattgatgcaccttaacaaaagtgtactatgtttgcgtgaatgattcaatattggtttaaaagaaagttgtgataagatcctttangcaacaaaaagtttaaaactctattttggaaaattttgatttacaccaattcacctgatgcaatctaccccctacggcactggat

SEQ ID NO: 190547 - DNA, 420 bp, Glycine max
  unsure (1)..(420): unsure at all n locations
agctntaaaaggtttttgtgcaaggcggngtcttataggtgtaatataaaactattcatttgtctaaaccttaacagcttaagctnttggaattgttagtttgtaactagttctgataaaagatttagttatttggagtagaacgtcatgttggaggccataccttgggttttagggtcataactgtttccttgcttctttattgagtcgtttgcttatatggtgtacttggagcactgtctacttccaagagttaacgcttattcaaggtctgcagtacatatctagtgacagattttttatttacttaagtttgtttgattttgcatcttgttttagtatttaaattcttataattccatcagatatttgcaggattgtcaatggccttctgaaaaccgctttgggaccacctacagg

SEQ ID NO: 190548 - DNA, 281 bp, Glycine max
tatcacgacactaatactattcttatttttccagttatgaataacaccgagatcgttatgttatcgccattaacggctccgtggcacaaaaccgtttttatctggcttgccaagataacgaactcttaagggtcccaaacagccgaactcacattcgacctatatccaagctaatggcgggacactggaccacaatgtgcactatgcatactggtatatccatagacatatcccacttgatgctgttgtaccacatgatcacatgacccacttgcttggtg

SEQ ID NO: 190549 - DNA, 421 bp, Glycine max
  unsure (1)..(421): unsure at all n locations
agctntgagacgcatgtgaaactntggcatcatcaaaacattcagcttgacccttngtctacaataatagtttatgaatgtataagaattntattatctcattttcattctaatttttcaataactttcttgagcattctattttaaaagtaacaaaattattttcaaaaagatgatatctaattctacagtgaaactaaacctaagaaattttagatgtgaagttgaacatgaaaaatggctaaatatcatctttaaccgatcttctagaataaaaaatttacaatgacaatgcaatagacaacactaacaaagtcagtttggattcttcagtttattacttgatcttttcttccactactacaaaacatagtttttacgatggtgattcgactatggttntatcaaaaccgttgtcatt

SEQ ID NO: 190550 - DNA, 343 bp, Glycine max
aaaaagcatgcatcttgcattgtcaattttactaccagtgacaatgactgtgctgagacattctcatactttctcgtcttgagtactttggtacttgaagatttttctttgcataatgatgcataagccctctgcatatttaatcataccctttggatatataacaccctttcccatttgagaataatacaacgacaagatttcaaacttgtggtggctactctagatcttagagtgtgttccgataagaaaattaaaattctgaaaaaatttaaaatttaagaattttaaatatttcaattgaaaatatttattttataattttttttgtgttaaaaatata

SEQ ID NO: 190551 - DNA, 438 bp, Glycine max
  unsure (1)..(438): unsure at all n locations
agcttggaggtgttgttgtatccaaagaanactcttggttctgcctttttatcaagnttgncccttttaacctgtggaacataagagaaacaaacacaaccaaagatttttagattttgtaaatctggtttgtaaccaaaccagccttcaaatggagtttttttgtgcagaactcttgtaggtagtctattcagcaaaaatactgcagtgtttgtagcctccgcccatagctcctttggcaactccttttcatgcagcatacaccttgtcatctccatgatacttctattttttctctcactcacaccattttgttgtggggtgtaaggtacggtgaattggtgctcaatgccagcttcttcaaaaaatttatcaaaaacatcattnttgtattccttcttgttgtcagaccttattgtttgcaacctacaatcactt

SEQ ID NO: 190552 - DNA, 336 bp, Glycine max
ttttcttaccttcaggatactcacacgcccattggactttgagtgcctctagccctgtacaggaagatatgtcaagtaaccacaaaatccaaaaattagctacaattctcaattaagctcaatcacttgcctaagaccaaaactgagttaaaggtagaaaataaggatcaaagagatgtcaattgagctaagaagaatggaaaaatattaaactacaaatgctcaatcaatgtagtgactataggttttcaaaaacttcttttcttttggttgcgaatcaacctattactattattacagaactaagtgaagccaattactaaatgtatccatgga

SEQ ID NO: 190553 - DNA, 434 bp, Glycine max
  unsure (1)..(434): unsure at all n locations
agcttgaaattgaacaacgaatgctctagagaaattcttatggttataactngtcacacggaagtctgattcaggcgcatactatatcgagaccctcaaaattaaccaacgaaagctctcgagaaattcatatggtcataacttgtcacacggaagtccaattcaggcgcataatacatcgagacgctcgaaattgaacaacgaatgctctcgggaaattcaaatggtcataaattatcacacggaggtccgattgaggcgcataatatatcgagaaggttggatttgaaccacgaatgctctcgagaaatgcaaatggtcgtgacttgtaacacgatagtccgattcaggcgcatactatatcgagacgctcaaaattgaacaacgaatgctctcgagaaattcaaatggtcataactcgtcacacggatgtc

SEQ ID NO: 190554 - DNA, 489 bp, Glycine max
  unsure (1)..(489): unsure at all n locations
catttggagaggttaatgaaacaacgagatgatgcactctattatatgttggatncaaaggagaatagagatcattatgaagaaaaaggacgagaagagggaatgatggtgttcctagacaaaaccgaattgatggtattaaactcaacattcctccatttaaaggaaagaatgatccggaggcctacttggagtgggagacgaanatagagcatggtttttcatgcaacaactatgaggaggaccagaaggtgaagcttgccgccacggagttttccgactatgctcttgtgtggtggaacaagctacaaaaggagagagcaagatatgaagagccaatggttgatacatggacagagatgataaagatcatgatgaagcggtatgtgccggctaagtactcaagggactttgaaatcaagctccanaaactaacccaaggcaacaaggggggttgaggagtatttcaaggatatggatgtgctcatg

SEQ ID NO: 190555 - DNA, 388 bp, Glycine max
agcttggtggaaggaagctgttgagacgggctatggtgacttgaaagacaagccgtggtggcctaaggagaacactcctcaagacttggttcacagtcgctccattatcatatggatagcttcacctctccatgcagcagtgatatttggacgatacccttatggagggttgatcctaaaccgagcaactttcaccagagaatctctccctgaagcacgatacaaagaatatgatgagctttcaaccaatgatcataaggcttacctgagaacaattacgagaaagattgaggcccttgtggacctttcaatgatagatatagttgcaagacatgcttctgatgagatctaccttgggacgagggacagtgactattgtgctgatgac

SEQ ID NO: 190556 - DNA, 239 bp, Glycine max
ccaaaatgaatttaaaagaatagataacctataatcacatgcagaaacaactgaccaacaacctacatttggacagatacatagcccttaccactactttttaaaaaaaagaatgactttacgcctatttaagattttatattgttgtagaattgaaccttattatcactatgttactttgcttcgcctgttgaaaaaaaacattatggaaaaacagtgttcatttgataataaaacat

SEQ ID NO: 190557 - DNA, 422 bp, Glycine max
  unsure (1)..(422): unsure at all n locations
agcttgcccnttgggggtttgctatctttatgctgtcaaatatttattttgatgctctctggaggttgaatttgatgttaacatgtgcaagttaatggctttccttctcatgcttctcactttcaactgattttttttgttnttttttggtgcgtgtgtgtgtgttaaaagttggtggagtttatttagtatgttgaagttggtaacttttttttttattttgtttaatcactatggctactctttttgtcaattggtctgtatccactcttcctagaatagtatgattaacaagccaaaatctatgtttgttcactgagtgttttaatttgcgttcgttgagagttctctgatcgtttttattatgtaaataacttaaaagtctgtattttctaaaacacagatgtgtggtggctgttatg

SEQ ID NO: 190558 - DNA, 351 bp, Glycine max
  unsure (1)..(351): unsure at all n locations
agcttggttgtgggcaanagcactttatctgatgtccccaaggactcccgacccccgggacatatctacaagtaccactctgtggtcaacaaataagagttcgatgactgactcgaccatgctgtctcacaccaagctgataggattaaggggcacccatcatatgtggtactacgtggcgatccggcgatggcacccatcaactatgccatttccgctagccaggcataagcacaccatgcgcagtcgtgcacctttaaatatagcgcatgtgcacatacgaagacttctgctcggtactttcatgccggggccccatctaccccaccaaactttcacaatatccaaaca

SEQ ID NO: 190559 - DNA, 362 bp, Glycine max
agcttcatagcatccgaaaatatttttgtttcatacaagtgagctgcggaaatataatctcctcctcatgtgattcatcctcgtccttagagactactacctcttccattgaataacagcagcttatcttcatttgattgagctgacccaaacttcttgctgtggaggatgtgaacaaatatggcgagctgatcccctcttgaacttgcccatgtgtcctataggataaagacactgtctacggctccccgtcttttatactaaaacagtgtattactttcacggctactagatatcccagtaagggctgaatccaagagttctctagcccaatggaaacaagctctggaagggactccttg

SEQ ID NO: 190560 - DNA, 425 bp, Glycine max
  unsure (1)..(425): unsure at all n locations
agcttccatcactttgnggatgagttatggtggtctctggaggtgggggcggtgcgtctgttgcccgttgctggcagtccctatgctgttgtggtgcctcaccctacgcttgcctaagagcacagtacttcttgatgaaagccctgctaatagggggcctgatgaccttgctgggggtgacgggcactccgtagaactgatagaggcccataatcagagctggaaaccccaggaccctattggacttctccgagtgcactgggtgtcttgtgggcgcgatccactttggcagggggagatcagagttgtggtcattgngaagaatgttgctaagtaacaacgtcattcatatctgggtaagagtggtcatgtttgtgcgcatgatccacacttgtccncctgcagtggtccaggtgaaattttgc

SEQ ID NO: 190561 - DNA, 424 bp, Glycine max
  unsure (1)..(424): unsure at all n locations
agcttaacaatntgttttaagatgaatatatatttcttaattatcaatttaaatttgtgttatgctgatctatatatatatatatatatatatatatatatatatatatgatgtgtccctatgtccagtgttttagactttttttgttgtgtcttgaagttcatccgtgtcagagtcgatgcttcatatttagaaatcaagtatatagtgcctacattcggtgtatagcttaaccaaaccatgctattttggcaattaggatatttgtgatccagtatttataattcttttgcatatattattcagtctctgtggtccagtggatcatatatttgatcatacacctctcattttcttttctcttaacatggtatctacaacccaacaagaagttatcctcatcatagttgaccactgccacttg

SEQ ID NO: 190562 - DNA, 412 bp, Glycine max
  unsure (1)..(412): unsure at all n locations
agcttatcacattttataaggggtaatatcacaagtatccattacgaaaagcaatctaattcatttgacaaagttctccatcataacattgaacacacttatatactaaaggtttgaattcgagatcatacgttgaaaatgaataattaactatgattacttatatccacgagctcaacaatacgtaagaaatcactgagcaattgaaaaaagtaataaaggatgaaagagatgcagagaaataaattcaatttcagattaaatcttgtgcattttgatgtagttaacataagtatacctatcgctatacctatcgctaaaaattcaccaaagaaattggaattttatttttcttaatcggggtagttgttattttttctaatntttcctaatatctttttatatttatctc

SEQ ID NO: 190563 - DNA, 391 bp, Glycine max
  unsure (1)..(391): unsure at all n locations
cttctatcctcttcttccttatattctttatgtgctggccncgaatccagcagtttttcacgttgtgtcaacacagaacttgatataaagatctatttaacacaaagtggcattacagagagggtttatcacccctcaaatttataaccaacattcacggaaggaaattcaccatgaaattctaatgttggtgatatccaacacctgaattgagttgctgctgcacaatagacgtgggtactgctaactgcttgcagcagaatcttgtgtacagtgcggaacctatggctagggctaactttgacaatgcatttnttactctgcaaataaatgataaatgtattatatagtatataaaattatcagaggaaatgcaattataaagtggtat

SEQ ID NO: 190564 - DNA, 420 bp, Glycine max
agcttgtaggattatggtgtacccatcacatgtggtactagggtggcggcgggcgatggtgcacaacaagtttttccacatccacaaatcgcgcataaacccaccatcccctgttgcccacctcccaactgagctcatgtactcctacgtagcccatatcctcgtttctctcaacaccgggtccccatcaatcctctcaagcttgcccaacatccaagtgcaacaacattcaaacagcacaaactatcacagccaagaaaacagagcaaaggcagaaaactctgccaaaacaccaaccaaaatcacaccttttctcacttaaagaccccagtaacaattccttcgttccaattcgttaaccgttggatcgactccaaaattttactggaagtctctagtacataagcctacatcttgacc

SEQ ID NO: 190565 - DNA, 350 bp, Glycine max
  unsure (1)..(350): unsure at all n locations
aatagtgatcctatggctgcaacctcgaaatccccggggtattgcttatgaatggggggaaaaagtttatgaatgcaaaaacgtccccctccttcttttattttttattatggtgcagggggttgctcgcccaggcgagctaacctgcactttttttttaaagttgattgattttaggagacgactggtcacgggaatgactcccgtgaggggaccaaagctttngatgcttcgccagccactccgtaaggtactgatcgaaaccccccaagatagattatgcatctaacaaaggttataattactatgaatccaaaggatactgggctgcttacagcagcgtttttact

SEQ ID NO: 190566 - DNA, 384 bp, Glycine max
  unsure (1)..(384): unsure at all n locations
agcttgatgtaagcaagtaaangatgttggctatgtctccgctgngcataggacggacagangtcctgatatcaatacatttccaaagcaatcatattaagattatctaagtctaattcccagattattaactgcattatatattgtgacaacttcatgacatctacattttgcacaattttatagaagacaaactttgtcacagcttcatcatcctaagcttgcaacatgagttctataaatatggtttatttatttggtttcaattgaagactacatgtgttcattaattactgcgcgcaatattagatagatagggaaagattttggtgttgctcattgaattaaaacatcgctgtgatgactaattaaaaacaactgatg

SEQ ID NO: 190567 - DNA, 382 bp, Glycine max
  unsure (1)..(382): unsure at all n locations
agcttgcggngaagaattaaggaagaagaagagtcttccactacttgtattttaaganagacgacgaatcattttaaatatattaagccacaacacagaataatatttggaccaaagagtttcatcactctcagaatatattagactcctctagacatcaaaattgagactggataacccacatgataatgagcccgactcccaatgcagaaattcacgccatggattgcagaaggtacacactgcgtattcaacgaaaagtcctttctgtgaacattatagaaaccatgggactttgctcgtaatttggtcaactaaaatagtcgtcgattaaaatatgacttatacaaccgtctaagatgtattaggcaaactttctttg

SEQ ID NO: 190568 - DNA, 433 bp, Glycine max
  unsure (1)..(433): unsure at all n locations
agctntatgcaacttaagatgctacctgaagctttaccgtgtctttatcttgatcggaggagctcgaggtcaggctaaatgacataataatatatttgtattattagtttaatatgattttaattatttgtttcaattatgtgtttttatttttaatattgtaagatcttagtgatttgtgtattaaatataatttataatatatacgttagataagtaacggtttgtctaaaaaatattgacaaacaagaacttattaagcatgaaatttgaaataactttattttacttgaagaaattttcaagtaaaatgttcaaacaactatgattntatttttaatgttttaaatttaattctaaattttaagtcattaaattttaaaataaaagaaaaacatactanaaattaatataaaattataaattataaagt

SEQ ID NO: 190569 - DNA, 261 bp, Glycine max
cgctgaaaatcgacagatcacttttactaccgaaagggatcattttatgcgacaccgcagcgccattaagacgctaaagactttggctcctgcccctcgggattttcacaacttcccttttgggtatctcaaattggaaaaccacatcttaaccacataggcttgggtcgtctcatgactcacactacgacctactcaaactattcagagcccactctttgtgctcgcgggtacgcaactcttgggatcacgattgggaca

SEQ ID NO: 190570 - DNA, 402 bp, Glycine max
agcttccctttctttggccaatgctggactcgtttggcagtgattttcttgttaatttgatgctcacaaacatcaatatctatcactccatcagtaggtctgcccatatatttgttaatcacagcaggggagaatctaacacactttcctctgacaaacactctttgataatcatcactttttctgtttgatatgtcagagggaatgttgacaatgaattccctgactaagccttcatagcaatctcccaacttgctgacagtcttcagcagtccagcagccttgatgaggtccatgatctccttgcaatccaaggcagctcttcccaattctctttgcaaggccagtcttcgttgatacacgaattttcacctttcagcattgccaatggagtggaatgaa

SEQ ID NO: 190571 - DNA, 390 bp, Glycine max
  unsure (1)..(390): unsure at all n locations
tctaggtatctaaaacccctcaatttaatggacttttcatggtcgagaagagaaaatgagaatggggtaaatnggagcaaactctcacctcaaacaagtctatatcatcaatctaaactcgctcaaactggttttatgacgaaaactctaccaaatcaaaatttgactcctcaacacccaattttaccctagaaatggctcttgctttcactttggtcactcatattcctcatttgcacagtctacactttctcataagtcctaaatgacatttcaaactaggattaactccctttaaccttcanataccactaaatccagatttggcttccaacactcatagcctcactcttttccactcataacactacattttcactgtctaaccct

SEQ ID NO: 190572 - DNA, 433 bp, Glycine max
  unsure (1)..(433): unsure at all n locations
agctttggttntgacttgatagaaccttttcttaagcagaggtgtttgatttgatcacgtgtttactagaatgaaaaattctatttgaatcaatactttgatatcctatcatggaggaaatatgatgaatgcatgaagggatgcttatcctatgcatgacacaaatgcattttacgggcacgagagcccgaaagatcatctcttcttacttgtaacatttggcaccatggtgccctatgtatgcatttaagaaggtgatatagacctttcgacttcctgtgacaagatggcgagactaaatgcacgatacatgtgacgacgtaatatagatatagacacataagagtgcatggttgatagcacaaaatagaaacgtgccagtatggcaatatcatcaagcaaatcatacagcagagatgaacatgagcatgag

SEQ ID NO: 190573 - DNA, 412 bp, Glycine max
tcgaataccctaaccatgtaatcgaatacacaagcattttatgaaaagatatgactcttcacaatttgaattgaatttcaacgttcagatacactggtaatcgattaccaatatattggaatcgattacactatttaaaaatcatgtggaacgttgcaaattaagttaaaaacctttttgaaatcaaattttatcactggttatcgattacaggaaactggtaatcaattaccagagagtaaatactctcgtaacttagaaaaatttgagaaaactcttttgaaaacaaaactgtgttattttggttgtgaaaaatcttttcatatttccttgtgaagctgactgtgcttttgattcttctttgatcttgatcatctctttgaacttgatcttctgtgtctttctgatctga

SEQ ID NO: 190574 - DNA, 456 bp, Glycine max
aggaacctgcagcatgcaagctttataaaggtaaattgaatttaagggttgtaatcgatttccaccatgggataaacgattaccacttagaaaatttttgaaatttaaactgaaaagacatgacccctcaattattagatatgtaatcgattaccatagatctataatcgattactagtggggaaatttcaaaaataactctgaaaagtcacatcccttgatgagttgttgaaaagccaccaaaggccaataaatatgtgacttgtgttcgaaaatctacagagtttttcaaaacttcattgtcttattctctcaaaaggaaacctttggccaaacacgtgcaaaacaattaaggattcttataagttcttcaagttgtattattcttctcttaaagagagaaaaacatattttatacctttaatggaaaatgctgttaatcaagaggcagtgggt

SEQ ID NO: 190575 - DNA, 425 bp, Glycine max
  unsure (1)..(425): unsure at all n locations
agctntaagagcaattcccttctttttcttattattttcttcgngnngatttagtctcaatagttccatttcgtgttcttgtaactttccaaatagtgtagcaagagacattttagataaatcccgtgatttagtaatggctgttaccttaggtttccattctctgcttaatcatctcaatactttatttatgagatcttcattttgaaaatttttccctaaggatgcaagatgatttactatgtgtgtgaacctcttttgcatgtattgtatactttcatttgcaatcatcctaaatagttcatattcatgagttaatgtgtttatcctagatcttttaacattntttgtgccttcatgtgttacttgtagggtatcccacatatcctttgcactnttacagttngataccctaaagtattcat

SEQ ID NO: 190576 - DNA, 384 bp, Glycine max
agcttgtcacaaggtaagaaaggtcttcaaatgtttttctatatattcagataccttgcaggatgactttaacaatagatatatgattcttcatatattatcactgtgtcgtgtgagagacatttgaatgtctactgttaaagacttcataactacaccttgaatagtatgatgctattcaccagcaaccttaagatgttgtgcgctccgttcttacaaagaagttttgatacactctctttccaaacatgtgtgagcatgagtaaacttatcctgctgctactgacctacaaatgtccaactatcagatcgtgaaatggataaattggattgaattatgttcttgatgaagaaaccatataatgtgatctctatggataggta

SEQ ID NO: 190577 - DNA, 398 bp, Glycine max
agcttcttatgcagagctcatcttgcgggcgattctcttttttcctggcttattccttaatggatggcgcctcctctcacctcttctcctttgtcttccgctgcatctgcatggtgaaaaatcaccattgacggacctcattgaagctcaaagatccaacctccatagaagctccacaagctagcttccatcaattatctgtttccttaattattctttgaatcaagacacatactctattgtaatatttctatataagcaatactcttactgcttgaataaaaataagatagtcttccctattactttctattgcatcaacagctctaggtttaccaatctagggcttttctctctcttgcctaatgatggcatgcccagatggcagcaccaacgac

SEQ ID NO: 190578 - DNA, 243 bp, Glycine max
gttgcaaaccatgcccaaaaatactatattcggtggaactccatgaactaagattgaatgcgatccagcatacatgatatcaccagcggtatcaatggaagacatgctgcacctcatggaccaataaccggtctaacaaacggttctggtggaaattctactgccaaagcagtcgaaacggacaccccggcatcaacaggggtgccaggtgttggtatctatgctgcaccaaccattggacaa

SEQ ID NO: 190579 - DNA, 424 bp, Glycine max
  unsure (1)..(424): unsure at all n locations
agctntaggatcaaaccttttcctctctttntctctcatttgttcttcattcttcttactcttttcacttttattcttcctttttcttacacagattttgtggatcttccattgatgatgatcatggaaggctaaacaattaatcaatccaaggatccactccaaggaaggctgaatttgagttttgatttagtatttctaatttgtgtgaatgttcatctttttcttcaatccttttttcgattttcatgattattaatatgcttaagattgaaaaagaattaggttagggattcctttccaaatttcgaacttaatcacaaattgtttggatgatattccaacctaatttgtgatctcaatgaatttanggattaattcgattgaattaactctgatgacattgattgaacattcacaactt

SEQ ID NO: 190580 - DNA, 351 bp, Glycine max
  unsure (1)..(351): unsure at all n locations
agctttgcgactgaanaactatattgcttctctcttgttctagattaggctctctctccgatgctccgtttatagatatacactctctctctctctgctctgtatcttgatctctctcctagtatcgtcttcagctataaggcggacatagacaactctttgttntgcaatgtccagatgagacttcttcattatagcaatcaaattgcgctcttcggtctataattacgatctctattgactaatggaaggctatactttctggtgttgctccttatgacgacgaaacccagctctctatgacgtttcgcttgcactgaggtttcctcgcatgattccctataccaagtg

SEQ ID NO: 190581 - DNA, 421 bp, Glycine max
  unsure (1)..(421): unsure at all n locations
agcttggtgggagtgaccgacactctatataattgtcttangcctgngatcaaagcaggaaaccccagtgccctgttggacttctccgagtccactgggtgtctaagcggtgtgatccctgcaaactgatatatagcgtctgagatcaattgggctacatggacactcacctgngtcaggatggcatagaccagctggcacttcggcaaggggaggtcaaaattatggtctctggagaggatgttgttgagcagtaacgtcatccaaatctgcatgagggtggtcatgctagtgcgcatgatccgcacctgttttcctgccatgctctgggcaaagtcctgccccggaacacacaacagctagctgatggcctcttcgtcgaaccccaaggcctggctcctcctctggctaaactcacaat

SEQ ID NO: 190582 - DNA, 358 bp, Glycine max
  unsure (1)..(358): unsure at all n locations
gcaccacactatctgttttttctaataactaggagagaggattctaggcttgcagaaagtcactgccttcgcaaaccagtaccctccctcttcagttcacacaaccctgtaataaagatgagtattggttctcttgcttacctgcaaattacatcaaaacagcctttaagaagaacaataataacaacacctgaaaacatgtgaagttcgctgaagttatcattcatgtcatgccattatttgagcaaataagacaaataagctttaatcagctagacaagaaattatgtgcgtgtgtgtgattatttagaccaactcctattatcctatangattaactattaaatgacaaacaaaa

SEQ ID NO: 190583 - DNA, 420 bp, Glycine max
agcttgactatccgatgctgcaatattttattttttattcatgtggggaacgagtaccaacccggaatgggtttatgcaaaaacaacggtcgcataactatcttgatatatgccaaaggaaatcgtgagaagtttggtttacgctataaacccactcatgcggatataaagataagcatctccggaagaaagagcggaggtcaaagctcgcggatgagacaagaaagtgtaggaagcccaccctgccacataagtagaagctttataagcgcgggtctgggagatgaatgtctagtggtcgctatatattgaagatgatgattcgaggacattggatttggtacgaccatgccctcctgattatcagctatgaaattggcgagtgtaggaacgccccggtgtttacgcaatgagcataat

SEQ ID NO: 190584 - DNA, 427 bp, Glycine max
  unsure (1)..(427): unsure at all n locations
agcttaanattaanaaatagaaacgatattagccgtttacttgtttgtatggatagttattagcagttatgttcttgcaatgagtatttcttatgtctatttgaagttgactagttcatctcattatgtatacgactagtgattatatattttaatatttttatttaaattaaatactaaataaaaatataaaaaatattaaatataaaaatacagaaaatattaaataaaaaacaatatacatgagtatagaaaatattaaataaaacttaaaaagaaaacaaacataaattcattaataattaaaataaaaaaaactatttacgattttgaagtcataaatagtttacaacttctaaaaaaaatacttacaatttaaaagtggtattaaaaaaattgaagtcttaaactnttttacaacttcaat

SEQ ID NO: 190585 - DNA, 446 bp, Glycine max
  unsure (1)..(446): unsure at all n locations
tttctttttacgggtatagacaattaaaattaaagcaatgatattttctgaataatcaccataattagggcttgtgcctctatggtggaaccttgggatattcttacaagtgttgatcttttgagtaagctataaaactaatactcaaagatttagtcacacttaagagttcattggttctctttaaggatgtattatgtgagaaaaagtttaaagttgataaaaatatttgaataaagaataagaacataccttattaatttagggataattctaaaaacagaatataaattttgaaaaaaatatattattaactaaatttcttaatcattgtgaattagttgttcctttcttaataaacaaatatatagcggacttactatttgagatttnttggtttggttanaatacatggcctaattattnttagctactgtatatatata

SEQ ID NO: 190586 - DNA, 434 bp, Glycine max
  unsure (1)..(434): unsure at all n locations
agcttaaaagaaagaaacaagatgttgcaccacttacagttatatgtcatgaataaaagtaagaagaaaagntaatactactatattataaaatggtaatgaacctttaagtaattgctaattctcctcattcctcanaaaatgatagtagaaatttaagtactttgcttgtcaattcagtttgcttctttgccaacttgttacttattatttgcagtacttgtcattttctagttctcattatcttcaatgtttatatccaaatttacagcaaatataactgagggagtgaagtttggacgaatgattgggtacactcagaattatagcataaaaaacaacatcaccattgtcaaataaaatctcgaattctcacactacatttttttttttaaatcatatatccatatgaagggtatcacctacaataacat

SEQ ID NO: 190587 - DNA, 386 bp, Glycine max
  unsure (1)..(386): unsure at all n locations
gagacatcttcttcgatcttggagatccttgactccatcttatttaatcgcatgtccacttgtaactccaaagtatcaaacctacaccaataaaggtttgaagaccattaaacctgtccaaaatcttttgaagaagagaggaatcttctccaccatgtaagagtccttcttcatcaatggtttgagcaccctttttcacccaagagccatcatgctctttacggtaaccaaaggatgcaatcactgcagcgcctattagaaaggatctcttgattgaacataatgttcagaatcaagagggatgttgaagtgttgaagaaagagggtgactangtgtggatatggncatggagcatttaatcgcaatgccttatgcatgcgatatc

SEQ ID NO: 190588 - DNA, 438 bp, Glycine max
  unsure (1)..(438): unsure at all n locations
agcttgaagatgttttgatttttacatgcctaacttccttgagtggcatttgnatnggnngntatctggtatgtttcatcttagtacatatgatattagtattgcatcattcatcatcatggttagtgtgaagaaaagtttcttcaagaggcaaaaactctctgttttaatcgattataggtctatcataatcgattacagcaagatgtttgaagcttaaagagttgagtctcgtatcattttaatcaattacagttgtttcaaaatcgattacgttgttgtttgagacaatgactaatttatttaggagtctctgctttaatcgattaccaagtggtttaatcgattacttctctctcgcttagttgttcaaaagtgaacaagaacacttgaatngattactttgagtatctaatcaattacattgttcttgagtta

SEQ ID NO: 190589 - DNA, 247 bp, Glycine max
  unsure (1)..(247): unsure at all n locations
atgtgaggcttaatcacataatgatgccttatgctaaatttcacttagtaatttaatttaagggtggattaagtggttgaactgataaaggataaactctcgtaacctatgataagaaacatgcttgtgaatcaaggggaagcaacatgttttaattctgatattntctaattcacatctattcactggttaatttacaaaagcaaacaaccctccccgcccaccacccaatatggtactattctct

SEQ ID NO: 190590 - DNA, 400 bp, Glycine max
agctttattgactttcactgcccttcaagattcttatggttccttgtcatttggagacagagatgaagtaaggtttctctatgttgtacatgttcaaagttggcagggtaaatttccttcaaaatatggagtggatgaaacaaataataataatagtactacctttggtcaacaagtgataatgtattttattttagactaaattataattttgatcttcctataattttgaatcactgattttggtttcctatttctaaattaaaacatttaattcctctattttccaaaataagtaattgtgatccttctgtccattatgtttaatatgacatattggtgttgatgttgagtttacgtagactatacacttatgtgaaaaaaatataatgaaataaaa

SEQ ID NO: 190591 - DNA, 430 bp, Glycine max
  unsure (1)..(430): unsure at all n locations
tatcttcatctgggatatcgacncaacttggctaactgatttatcatatcaactggttgaatttggctaacaaatattttctgggtaataacaataactaaaggcacaaagctctctaaaaaagcaattaaacttgtgagttatgagcagtggcatggcaattattataacttcttcgtaatagcgagtttagttgttcaagagtctgggaggatggggaacctggagattagaaatataagagatggagagtcaaagaacaaaagttcgagatttttgtattgctaacgttgaaggagcaagggagattcattgtgacatgtgaaaagtattaaaccacanatgttcacatttntctttttatgttagcattcattgtcacaattgcccatcacatgtcataataaaatttattaactctttcgtacta

SEQ ID NO: 190592 - DNA, 428 bp, Glycine max
  unsure (1)..(428): unsure at all n locations
agcttccttttagtgcgtcacgtttaaaaccgatctcgatnggggngcgagcctttgatggtactcggcgggaagtgatgggggaaatcgaaattcccattcagataggcccccacacttgcaatgtggtgtttcaagtaatggacataaatcccgcctatagctgtctcttggggagaccttggattcatgcgctgggagtggtcccttcaacgcttcaccagaaattgaagttcgcagtgggtggacttttagtgatagtgtcgggtgaagaggatatgttagtgagctgcccctcctccgccccatacgtagaagcggcagaagaatcattggaaatggctttccaatcattcgaggtggtaagctgcgcctctgtggaaccaagtccgttgctaccttctctctccaacgcggccataatggtg

SEQ ID NO: 190593 - DNA, 423 bp, Glycine max
  unsure (1)..(423): unsure at all n locations
agctttcaaccgttcttcgacgttcttcattcgttcttcatcgntcttcgatcttcaacgggtaagtacctcgaaccaagcctttcgattcattctatgcacccgtagtggtccacattgtgtttcgtgcatttttattctcgttttgtttactttttataccccctgttgacgtgcttaagccattttacttaagtcatttctcgcttaacttaaaaataaaataaatttccaccgaacgtttgaattgtattatccattaacttcggttaaaataaattccgaccgttcggtcatgccgtaaccacgttggaaatcaaaaagaggtgaaaaataatataaataatcaaaaaaacatcttttagtaaaataaagcggaaaatcaatcggacgttttctctttgggatttctcattcttaatc

SEQ ID NO: 190594 - DNA, 377 bp, Glycine max
  unsure (1)..(377): unsure at all n locations
tgggagacgtgagctagttgaggtgggcactggcgatggtggatttatgtgtgatttgtggatgtggagagtcgacttgcaccatcgcctgatcgccacctagtaccacatatgacgggtaccccataatcctacaagcttgaagtgagaaagtgtggaagagtcagtcttcctacttttattcgttgaccacagagtggtacctggagatatgtcgcgggggtcaagagaccttggggacgtcaggtggtgtgctatntcccaaaacgaagcttgaccaatcccggcccaacccgggcatagtcagtcagtgagaacctgtgacgtacctaaacaggcgaagctctggcagtcaaccgataaataacaaagaccac

SEQ ID NO: 190595 - DNA, 408 bp, Glycine max
  unsure (1)..(408): unsure at all n locations
agcttcaanggataagncagccttctgctcaagtttatatttgctccaaaagtcagatgcaagggttcaaaatctgaaaccagagacaaggattcaaaaatctgacgatcgattgtttacacttgctgctattgggcttactatagcaattgtggttcttttgctgaagaagttcattaaatctacagaatatggtgctgttttcatggatgaatcttatatgaattatttgctcgtgttagcttcaatatcaagattcttagcccaggtatagtcgataggaaaatatagaacttctctgatattttatgaactttgaattgtacgattggcttgtaattatggtaatataaatatatactacagctatgagttcgtgagcaagggtctactatgtggtaggtacag

SEQ ID NO: 190596 - DNA, 409 bp, Glycine max
  unsure (1)..(409): unsure at all n locations
ctgcaatcagaagatacgaaantacgatgaggccgtgtgcatgtgcaggccaagaacttatgttattaaattttgtcactgaattatacaggccaattacttggattcattacaatgcggctggtaatctaacctaacaaggagaatataatctgttcatgtagaaatggtatagaaggacaacggagcccatcaatntctactattagtgcacaaaatcattaatggtgctattatgatcttcacataagtgacaagtcttatcctatcctacccctacgaaacgatgcacgactcactatctangtgatgactccactaatcacaaaaagtatatgagcatatagtgcacaccatgtgagaatattgacattttttataatgttctgcctttttatttcccgttcat

SEQ ID NO: 190597 - DNA, 428 bp, Glycine max
agcttaagcacaaatatcaatgacttttggaattcgtgcttttaggttaagcttaagaaaaaattcatgttgaacactttattaaatggtttctaaatgatttttgactaatgtatgaggactatgataaatgccacatttggattttagaactatgtttggaaactcttattttctaagaattgataatgttgtgagatggatgaatgatgtttctttaattacaaatgattatgttgagaggtatttatatgtacaagaggatgtataattgttattgagaagagtatggtgctttgaaatcttgttgatatgttgatgatgatgcatatcttatatgagaaccaaccctatgtattgaaaggagttagctatagcctctgggaatatttttagttgttgaaaacgatatacttgggagagtgagt

SEQ ID NO: 190598 - DNA, 315 bp, Glycine max
ttttataaaaaggggagaaaaagaggaaaaggagggaacaaaaggggggagagagaaggaagagaagaaaagtggagaaagaataagaggagaatgaagaagcgaagaaaaaaaaaggcagggagaaaaagggggcgggaggaaaagaccgaagggaagaaaaggaggagaaaaaagatggggaaaaaaggaaaggggagaaaaatgggaagaagagagaaggggaaaaaaaggggaagaaaagaaaagagggtgagaaaagaagagggaagaaaaaaaaggggagaaaaaaggagaagagaagaggagggagaa

SEQ ID NO: 190599 - DNA, 423 bp, Glycine max
agcttataagaacaacattgccttaatcatttcttaatatgcatgtgaattaggacgcatcaacaagaatcaagccaaggctattgggcaagcaatcaatggggcaaaacacaccaaatgattataatgatggatggctcaaattctcacaaaggtaaaatcatcactttcaaattgagctttcaaaactatcatgacatgtagagaagaatcaaggatttcaagtcacaaaatgtcaagaacttttattttcaaaacaattacccatttcttgaacatatcctgtaattcaaagaaaaacatgcaaagtcgtacgtgcacatgaaattgacccaaaatattaaactgaaaatccgacgaaactaacaacattaacaaattaacacaactaacaaattaacaaaaccaacaaaactagcaaaa

SEQ ID NO: 190600 - DNA, 362 bp, Glycine max
  unsure (1)..(362): unsure at all n locations
ttcattggtatttaggaaatccattcattggttttcattctcaatgtttccaaaaaaaaatcactttgttgtgttttgatcatcaaaagtaagtttcaaaaacatcagttgcttattcttttcacagcatgttatgtccaagaaaaaatattgtttgcgtcccataaagagttatatataatctacaactatgcttacaaaacaaaatatataaaagcacacgtaaattagtccagaacacgaactcgtgtaagtttcccaaaataaatccaaaacaataaataaggtaataaagtacttaaatctaataccaaagcgataatgaacatanagaccagtcacgaaattttgagatcatgact

SEQ ID NO: 190601 - DNA, 416 bp, Glycine max
agcttcagaccaaagcaactcaaaatctatgtatctaacacccctcaatttagtggattttcaaggtttgagaagtgaaaacgaaaatggggtaattttggagcaaactctcatctcaaacaagtctataacattaatctaaacccgttcaaactgtttttacgatgaaaactctaccgaatcaaaatttaactcctcaacactcaatttaccctagaaatggctcttgccttcactttggtcactcattttcctcctttgcacagcccaagctttcccacagtcctaaatgacatttcaaactaggattaactcactttaatctccaattaccactaaatccagatttagcttttcaaaccctcaaagcatcacacttttccactcatatcactacattctcacttttcaaccct

SEQ ID NO: 190602 - DNA, 335 bp, Glycine max
  unsure (1)..(335): unsure at all n locations
ataaagtctatattagataagataagatctagataaaataatatctagatgagataaaatctagatatgataagataaaatctagatgagataaaatctagactagataagatttggtagaataaaattgtctactctcttcaagtccaagcccaattccggattcaagcccaattacttataattctcgtgaaattaaattaaaaacacaaaattaatccaataggcccaaatgataaaactgcataattaattcgacaattaaggcaaatcagtaattaaaatggtgacaaanaagggttaagaaatatgagaaaatgatggcacatcaagta

SEQ ID NO: 190603 - DNA, 407 bp, Glycine max
  unsure (1)..(407): unsure at all n locations
agcttcanacaaacttattcaataacattcgttgttattctatacactaatttcagtaatttatataaagttcacacttttaacaattccatagttactttctttagttgtaggtttgggaaaaagacccagtaacatccaacatttgagttttaagataaagataaaaatatagaaaacaaatcaatcatataagtgccgtcaaaattataaataaatgggaaaactttaagaatggcgttgaaaataactaagtgtgagggaagttcttttgctgctgatgtttgttcctaatgttggtctgatgtttcctgatattggttgtagggaagacacaggtgacaaattatgtgttgctgaacaacagctactaggctgcaaatgagccattggcaactgctagtagt

SEQ ID NO: 190604 - DNA, 323 bp, Glycine max
agcttcggagagaggaaagagaccaatcacgagtcttatcatggtcttaaaagaagagttagctgcttgctcaagatccaagaagagtttggcccaacacttagaagccacggagcaaagcattctatctataatatggcggcacaaagaagagtttaaccagtctttgacccatgagcaaaagctagtagaggacttcgcacaagcatatgccgagaaagaagcaagagggagggtgattgatgcattgcatcaagaagcgaccatgtggatggataggttcgccttgaccttaaatggaagtcaagatcctccgcgactac

SEQ ID NO: 190605 - DNA, 473 bp, Glycine max
  unsure (1)..(473): unsure at all n locations
nnntgaatcttcgaaaaccatgatttgttggcagcccaaccgtattacaagtctagaaagtccttcggattcattttgtgtgtttatttctgtatggtatgagatgaaatgcaaaggttaggacttgtgttagttgtttataatggaatgagcctaaacacttgggcttgagtgaaacaatgactgtgaggctttggctgctgatccttccttgatatctgtcatccttactagcttatttcaattgtgactctaatgcatatgttcctacctttgaagagttgcatgtttgtgaaaagtaattgattgaagcattccatgatattcatttcatatgattgaatttttctgtgaaacaaacaccattttgattaaccactgtattttgtcacttaaagacaagtgaactgttctttctttgcttgaagacagcaaaactattaaatatggggagtntgttagtcgtcttatac

SEQ ID NO: 190606 - DNA, 317 bp, Glycine max
agctttagcatgtttagagatttctagagagtttttgtctctttttcaaggtatttggccattttctcaaagagcttttgcatgtgagagattctagagagagaaaggtctgaatccagagagttttgagagattttcctgtacgataacctgcagagaatagagtctgaagaggaagtcatcctgagagcttgagatgagtctgtgagtgattgtgatagcctagaagtggaggagacatccccactacttgtatttctccaatccttcatctttctcttctctttagtagaaaggaagctctccagatatggaga

SEQ ID NO: 190607 - DNA, 445 bp, Glycine max
ggcaccaacattcattagtccaatacacactcaacaaatagtcatcatccatccacaattccaatcattcatgctcaatatgatgcatgcacctgacctcaactctaatatgcaatgtggtaccatccctaaggaaatagccttagcatgtccacacgacactttcacttaagaaaactatggcagaagtttcgaggtcaccttgtcgtgcacaggcaactgcccccccccccctcccacagtgatcagctcgagtcttaagggagttccaaaccgagtgacatgccccatagtacaagtattcctcctcacgagaaactacaagtacttactgacaaagtttatactatttccatgtcatatgaagtatgaaacatgggcaccatcaaatgcactgaccatgaataattaaagattctaagccatcccactctagagatgctta

SEQ ID NO: 190608 - DNA, 319 bp, Glycine max
tagcttcaagcgaacctaagggctaacaagaatttctcacccgataagttgaaaacccaaaaaggcggcctatgcaacaattaagataataataaaaaaataaaaagaagaaagaataaagagcgtgtttatcaaaggttttgtcccaaaatccatactgcaaaagtatctaatcaagatttgaaaagacacatggtcgtctctcaacatcccaaacactaacttatcctttgctaccccctccgagccaaagcatatctagtttctaaaaaaaatacaaaaaataacaaatacaaaatcaattgtgtcacataaacat

SEQ ID NO: 190609 - DNA, 347 bp, Glycine max
  unsure (1)..(347): unsure at all n locations
tgctgtgctaatcccaaaactctctagaatttgaaaatttggaattgggcttaacgcgaggtcgggctaagcgcaaggctttgttaaaaccaaacgtcatattgactcgctaagcgcgactgtgcgctaagaaagcaatacattttttgcttaaaaggaaattacttaggcagtttcattcacccagaagcttttatctcttgtgcttgtgcctacattcgttcttttgtgcatttttctgcctgtgcttcaagttatcttctgcatcctttntgctctcatcctgcatttcaatcacaatctaagtaagcttcttggtttatattcattttcttttcaaagcttaa

SEQ ID NO: 190610 - DNA, 312 bp, Glycine max
  unsure (1)..(312): unsure at all n locations
agcttatcaaacagaagagtttcttgcgttatggaagatctttttatggctaccactatgtttgttacaataagtatgtggntatgaaacaccacttcattcatgaaagcctcattcttaataatgacacccttggcattcatgattctataagtctgaacaattgtatcctcataggatatatataagcttccaagaattccagcaatagctcccaagagaagaactacaaatgtatcaacaacactatatgtaatattaggtgaactaacatcgtacattatcaaacaacctttcccaaataacacacgt

SEQ ID NO: 190611 - DNA, 472 bp, Glycine max
  unsure (1)..(472): unsure at all n locations
taacaacttctatttgtgtaaggaatgaaattaataaaattttctcttttcaagtctaacatacaaatgaaaatgtacactagcatgacaatattctagtttgaaagataaatccaagtacacattgttgtatctgcatgtctaccaaattgaccacccattttatgtttagagtcaagatgtaggtgtgatatctattaaaagaatatcaattttttctctatctcaaaaagacaaaaaacacctaaattgagcagcttagacccgaaattaaataccatggtttgaaaatggtgaacaataccacctggatcaatcattaccactacttttaaaaaactgtgacatcatntcaataatctcaatgaaaagagatttcaaaaactgttatccataagataaacaagcatcaacgaaatacacacagacataatgacatacactagaaggtatgcaacaatcatgtaacact

SEQ ID NO: 190612 - DNA, 317 bp, Glycine max
acactaccacagagaaggagctagtagcgatagcaactgctctcgagaaatatcggacacaactgcttggtactccgagctattggttatactgaccacgcagctctaaagaacctggtgaagaaggctggaccaagcctagatcgatcaggcggatgcgtgggagccaagagttcgatatggagataccggatcagagcgggacacaaaacctcatggctgaccacctgagtaagaatgagcgagcgcctgaggactcacccattcgggaggagatttgagatgaccattcgcacattccgataagacctctgatc

SEQ ID NO: 190613 - DNA, 327 bp, Glycine max
ctctaatcacctgcagctgctactagttagggacttcttgtgtgctgtttctttgagcttcaatgaagtcctttaatggagatcttccaccatggagatgctgcggaagacaaaagagaagaagtgagaggaggcgccatccattaaagaataagccatggaagaaagagcttcaccaccaaaatgaccctcggataataagcttggagaggatgcttcattggaggaaaagaaagagggagagaatgagagaggggggagctcgaaattgaaagaagaataaaggagagaatttgaactctgagttgagtctcacaagactctcat

SEQ ID NO: 190614 - DNA, 448 bp, Glycine max
  unsure (1)..(448): unsure at all n locations
tactaagcttctcccatttgcttatgtgggggagaatttttaanataatggtcaaccccttaggcacttctctctctctctcgaaattactgaggaaaactagttccgtgaagaaaatccaagccgaggcgcttccgtaacgtttccgtgagtaattacgcgaagattctcgaccgttcttcaagattcatcgttcgttcttcgttttcttcagtcttcaacgggtgagtacctcaaaccgagtttttcaattcattctatgtacccgtggtggtccacattttgtttcaaagccaaaggtgagcaaagtactaggtcaatgaccgacaagccatcacgcgtccagctcaagacgttaaagaagcactactaggaggcaacctagtaacttttaaatctttgcttgtgtgatcacctctgtntctcaattaatagtaggacacaccta

SEQ ID NO: 190615 - DNA, 438 bp, Glycine max
  unsure (1)..(438): unsure at all n locations
acacttgatactcaagctgcttatgccgaactncgcgttattgtttatacattcccgnatagaagaaatggaaagcattgtttctctacaatcaatgaataaagtttctctgatgagtgtaatttatacatattatcaatggagagcattctttacacagatatccaataagaattgattattttatcacgtcatcgaattcataaatataatatggtgataaagtaaattgttattggatgtttgtgtaagactgttttatagggtgtatataaatgaaactaaactctggctgaattaaattatggtaatatacatcaatggattctgtaaagaaccaagcagaatgaatntgaaatcttgttaacataaacataagggatgctctanatcgttatgtaatgagaatttntcttgcagtgatccaacatcttggat

SEQ ID NO: 190616 - DNA, 305 bp, Glycine max
agcttgtctctctttttggttgccgtcgtgattcacaccagcactgtcgtgagtagtcgcgacgattttacacttctagttgtgaatatatataccctagggtattattgtatactactgatgctgcgtatttgatacagaaaatcgaaaagaaaaattggattcgaggccagcacctccagacaaagtaagagtggaagagaagcttaagttttcatatctccattgtgccttacaattgctttatttatactatatccttaggaacataatttgacattttgagcaaaggtatatctaaagaa

SEQ ID NO: 190617 - DNA, 397 bp, Glycine max
  unsure (1)..(397): unsure at all n locations
tggccatatgaaggatattctcttgcatgctgagttagtgcttgttattgcaactgatcgcagagaggatgaagggccacaacttctaatttatcggtttcttggtgatgatcttgacagtatggcgagtgatgctatgtggactgatgctaatggcgttgttgtgggttgtgaggattctaaacagagaaaggagctaaaggggtttctccttgattgtgttatagaatatctagaatcaaattgctgccaatattttaactctggatccaaggcatggacaaagctgcccttatgcatgaaagctgagatgttggctcaagaggtgaagagggagatncaatgagtggtatctatggttgcgatggtacctgatgaaattatagaatgggaaatg

SEQ ID NO: 190618 - DNA, 224 bp, Glycine max
cctgacacgtatacactgtgggcatatcgtcccatctggtatgagcattggtatattcactgcaccaaaacatatacttcgtagtgcagacttacacggatccacgcatttttgaaccaatctttgacgacccggttgtgccagcataaaaaaggtagatatcatgctctataacactctgtacgtattactgaccatccgaagctctaacttacccgacatta

SEQ ID NO: 190619 - DNA, 267 bp, Glycine max
  unsure (1)..(267): unsure at all n locations
tttagccttgggagccaagttatcccttgcgttctagacttcaaccattngtgatagctgccaatgacgccatagctacttcccctaagctccttatcttttctttccactctatttcatgctctctggattctctaaagtatcttcacattatcttcattgaaacctcgcacaatgaaaggcgcgatgatctcctccgacggtgcacctctcattgggtaacctaactgtcttatggccagcacatgattataattaatacaaccc

SEQ ID NO: 190620 - DNA, 252 bp, Glycine max
acatctttttatttggttcttgaatggctatcaaaggcctatatatatgtgacttgagacacgaatttgccaagagttttgaagaacaaaaaggtcttatcctcttaacaagcaaaaattgtttatcctcttacaaattccttggccaaaacacttgtgattcaataaggaattatttgagtgctcaaattgttcaatctatctctctcaagagagatttcttcttctcttcttctttattctgaaaaggga

SEQ ID NO: 190621 - DNA, 370 bp, Glycine max
  unsure (1)..(370): unsure at all n locations
agaaggagaaagatgaatggagacgcctcttcaagtagaagatgagtctataaaaagctcaccaccatatgatgccatggataagagcctgaatgtagaagaagatgaatgaagggacaggaaaagaagagcacgaaatttagtgcctctaaagaagtctgaactttgaagtttaattctcaaaatgatcaaagttcaaaaaaatgcacacacatgacctctatttatagcctaagtgtcacacaaaattagagggaaaattgaatttctattcaaacttcacttaaacttgtggagccaacatttggagccaaaagttcactacatatgactagtgaattntaagtatgggttagcccactaattcaag

SEQ ID NO: 190622 - DNA, 321 bp, Glycine max
  unsure (1)..(321): unsure at all n locations
agcttagagggtatagctagaacaaaattgtttttgcaattcattatccagccaaaatttaatgcaagactctntattttctttttaatttaagaggagaaactacgccccaaaatggaccagcagttgaatgatttggcccttgcttaagtcaatatctctagctgcaagagttgcttctaattttaagttgttctttctagcaaatacataacccaaggtcaccttgttggctcacccataatgaatagaaagctatttattgcacaatacgcaatttaagcctcaaaatgaaatcataacattgaaatattaatagct

SEQ ID NO: 190623 - DNA, 309 bp, Glycine max
catcttgagtggtgagttctagaaggcttctctttgttggtgcatatgtgcaatcacaaagaatggcgtgatcactaaccgccaataaataagaggctgataaggtgaacccccttagttgaagttattacctggataagatatccaatagtggtcctgcaaaaaattatctctttgatagaatcctaatggtccttcttggtggtacccttggaatccatgccaatttggtatgcccatgtagtttacttccctcgaaggatcttgttggactacgcattgccctagctcgtgtgttcctccacatat

SEQ ID NO: 190624 - DNA, 319 bp, Glycine max
  unsure (1)..(319): unsure at all n locations
agctntagattaatagagatatcatcaaggctttctattactccgcctcataaagacctacaaaaaggcagcttggtcgaacaaaaaacactttatcccatcgacgtagcttcccatggcgaatacaatgtatttttcaacggatttggtgcagacaaaatgaaatacacaaatatgtatatttattctcaaataattgccaatatttgtacaaacttatttttaatgtttacagtaaccatcaaattcaccatagtaggttgtcctatatcatctagacctttatacatcggatgtttttaacttttacaaaatatgc

SEQ ID NO: 190625 - DNA, 250 bp, Glycine max
  unsure (1)..(250): unsure at all n locations
tctactctctcgcctataaagcccaagagtggactgtcgtaaagatggacagtgtcaagggaaaccttaagtctttggaaagtttttcaatacaagatattattggaattgtcctagtcgatgacgaccttggacaccatgatatttgctatgatgatggagacaaccactgggtcattctggttaacggngttgatacccttgaagtccctatccgtgaaagtgataagatggagacttcgctgcgatg

SEQ ID NO: 190626 - DNA, 405 bp, Glycine max
  unsure (1)..(405): unsure at all n locations
tatgacttcaggcttagatacgcggctgatgtgtcattattttctcctatttcttaaccctttttgtcaccattttaatttctgattaaccttaattgcaaattaattatgcagttgtatcatttaggcctacttgactaattttgtggttttaatttaatttcaggagaaatataagcaattgggcttgaatccggaattgggcttggacttgaagagagcanaacaatttatcttatcaaatcttatcttatacaaattttatttcatctagattntatttcgtccagagtttatttcatccaatcttatcttatcnttgtcctaatttattttaatttcgttatgggtttggacataaaagaagatntgtaagctttggagctgaggacctatataacaaca

SEQ ID NO: 190627 - DNA, 307 bp, Glycine max
  unsure (1)..(307): unsure at all n locations
tagctagaagaagagctagtttttttttgncttttacatgccaacnctcttagagacattagtattgcttgttatattgaatgttgcatcttggtccatatcatatctttggagcatcatgcatcatcatgtgtgtgagtgagaagaaaatctctaaagttagaaaatttcttcagaaagcaaaaatctctatcttaatcaattacaacattatcataattgattacacaagttgccttaagcttgcagagctatgtctcgtatcagtttaatcaattacaaccttatcgtaatcaattacatatgt

SEQ ID NO: 190628 - DNA, 468 bp, Glycine max
  unsure (1)..(468): unsure at all n locations
taagcttgacgacatcttgcagagtcctaggcttttattcttatcttgctttgcagagcagngacactcaccccagaggtgagagatgacttatacgntagaacatcgtcccccacccactcatagccaacaacagcaagtggggacgatggcgacctatcgctatggcttcgtcacacacagggaaatgccctaacatccccaccactacctttcctcactcccttagaagtagaagagggagaatcacattaaccgggataggctcctcggaagcaatggaaatccacgccctcccacgaaggtgagaagtgcctncaccaatacagcgtgaagccttcaccctctttgaagaggatgactcgccaacggaattgacctctcggtccatcatgggttgctcaatcgagccccagaatcgctgttacccatgttgatggtggaatcagacaagaatgaatacattat

SEQ ID NO: 190629 - DNA, 303 bp, Glycine max
  unsure (1)..(303): unsure at all n locations
tagctagcacggaagactcttcttatatcgttgaacnnagcacccaccaacacaaattaggttaatttgtacgctcaaatctattagctcatgtgttcaacttgaaatatgaattttatattttacatctttgattggcattatgtaaccttgtccagcacatcacaaatttttctttgatttctcttggccatagattagacctgttttatataggtctactttgttgcagtaaaatcaagattatagttgcgtaagccatcaatgaagtgaaaaattgctactgatatatcgaacacatga

SEQ ID NO: 190630 - DNA, 313 bp, Glycine max
aggggagaattagtaataaggtcacccctagcacccctctcctcaaaagctgggaaaatacgtccggaagaaaacacagccgaggcgctccgaacggttcgagaggactcgcaaggattcaccgtcctcacgtcatccacggcttaccgccatcagcttcacgggaagaccccaaccaactttaaccactcatgacccgggcggccacatctgtcggcaccctcccccacttcattactttaacccccttacggccaaccataatgaagcaacccccacaacaaaaaaaaaatcccccgacgctgaacgatca

SEQ ID NO: 190631 - DNA, 309 bp, Glycine max
  unsure (1)..(309): unsure at all n locations
agctgagatagatagaacattcttttctctctctcttatgagaggctctttatggatgcacataatcttatcatatcctcacatgttccgncaaataattattgtttggccataatggaaaaattggctagtttgctacaactccatctcttactcttactcccttattcctctcttaattcctcctttgcttgagaaatttttaatcatacattcttttaaataatatggatgagatcttcagcttgcttcataagtataaagataaaagattttactttctagacaattttagaaggcgctctcacc

SEQ ID NO: 190632 - DNA, 327 bp, Glycine max
  unsure (1)..(327): unsure at all n locations
tcaactntgtcaaattatcgttgcggtgggtttattgtttatatgcttgaagggacccgngatggttntatccattgtgaactgtgaagccacaatcatggagcaaggtttcaagttgagctacgcttcgtcttattatcttggcgggacaagaagatgatttggttttatatataataatttgatatttttctttcaaattggaacttgaatgagacatattgaggggtgtaattggggtgatggcaaatatactactttcaaggtatgtatacgtagtaagtatcatcattgctcataacacaattaagttcaaagtaatatatg

SEQ ID NO: 190633 - DNA, 269 bp, Glycine max
  unsure (1)..(269): unsure at all n locations
agctntccaaagttctctagatgcntatgacttcaaagcgagagacgatgaggactttaatcctcttcgacgctcaccttatttattcatcatgactaatcaactgaactcttgttgggcatcgatgatgactgattcaacataacataggtccatccgtctgacatctttattcactgtattacccgttgtgcaggactactatatgacaggatttgactattaccttgattcttcccggcacgatatacaagacagtgagggaccat

SEQ ID NO: 190634 - DNA, 190 bp, Glycine max
  unsure (1)..(190): unsure at all n locations
cacccactagcccttacatgaagcatctgatgggaccatgtccttaaagaactctggagcttcgtaattgttttaacattaacctgggggagaatttngttcacagaactataccagattgtatgtatatcatcatcacgtatttagtggcatactagagccatgacggataatgtatagatgatgaacc

SEQ ID NO: 190635 - DNA, 332 bp, Glycine max
catgcaagcttccttgagaagcaaagaaaggagcttccttatgaagcaattgtgatagcttccttgagaagctagaggggggcttactcacacccctccaatagctaagctcaccccaagccaaaatacataaaaatacaaaaaagaccatactacaaagactactcaaaatgtcctgaaatataagggtaaaaccctatactactaaggtaaccttaacttgtataggtagggtgcctttaatttgtaaggcaccctataaacctaaaaatggtcaaaatacaaggcccaaaagaagaaaaacatattctaatattcacaaagataaatgg

SEQ ID NO: 190636 - DNA, 388 bp, Glycine max
  unsure (1)..(388): unsure at all n locations
taggtaatagtctgaattggttagctgatactgatactaattaatatttattggattttatttacctcaatttaataatacggttttagntaatatatttggtgtggtttatttaaaataattagtgcactgatactaattaatatatttagttaataataactccaacattaaaaaaaattcattacaaaaactagcgcactggaatttaaaattaaaatttcattctaacaaaaaagtaattagttcaaataaaaatagtgtcaaaactttaaaactcaaggcccaggtcaaatttaaggtgacaaatatcaaacaatagtttaagtttatataataataattactagaaaagagaaacgactccatctccataaacttattaaaa

SEQ ID NO: 190637 - DNA, 259 bp, Glycine max
atatactaatgaatcacatctagaaagcctaacaaaaagtgttttaatcgtgttatcaataaatactaaatgcctttcaacaaaatttgctcatcattttctgctcaaaatttgtacaaatacacttcattgtcagtctcagataaataaataggcgctattctatgctaaatgttatatcatatataaaaaaatcaatattttctctgtaatattaagttattctgattcactatcctaaagaagcgttgatgactta

SEQ ID NO: 190638 - DNA, 424 bp, Glycine max
  unsure (1)..(424): unsure at all n locations
ttgggnttgaggtatttggaagactttgcctgcgttgaatcgaanaccgctagtgaaaccgattcaattcaattgtttcttttcttgatgtgtcgaattggggtgggttttgtgttgtaccttgtccacgtggaaaatagagaacaagacaataaaactcgttcataactaaccccaaacgcggtctttcacgtgtcacgtgaatttttttggttgtgggttttgttgtagcgtcatcaccaccacctacgccattttcgncattctttgnggattntcttagctacacgatatcagtttcttatcgaatatgggattgnttnttgtttactgtgggtgcggnggtcctaggtttggttaccactgttctgcttctggacctgtattgngtattcttggttgtatttcaggttcctaatgttta

SEQ ID NO: 190639 - DNA, 324 bp, Glycine max
agcttgtaagattatggagcacccatcacatgtttttctatgtggcggtcgggcgatggcgcacaacaaagttttccacatccacaaatcgcgcataaacccaccatcccctgttgcccacctccaactgagctgacgtactcccacgtagcccatatccttgtttctctcaacaccgggtccccatcaatcctcccaagctgtcccaacatccaattaattcaacatccaaatcatcacaaactaacaaaccaagcacaacaaagcaaaggctgaatactctgcccaaaactcaaaccataatcacagctttgtctcacttaa

SEQ ID NO: 190640 - DNA, 487 bp, Glycine max
  unsure (1)..(487): unsure at all n locations
ntacttcactggcttcagtagtacacgatatgcttccagaggtttacacattgtctaatagttactattaggcgaagaagatactgtgtccgataggtatggagtattagaagattcatgcttgcccgaatgattgcatactgtacaggcatgaattttaattaatgtccaaatgctctaggtgtagggcgtcacggtacaacgtgaaggatgatgaggactgcagttctgatgaaaactcaaagaagggacctccagtgaaggtgttgtggtatcttccaatcattccaaggtttaagcgtctttttgctcatggagacgacgcataagaccttacctggcatgcaaatgggagaaactctgatggaatggtccgccatccggttgattactcgcaatggaagaagattgatgctctgtatccagatctcgagagagaggcaagaaatcttatgcttggactatccagtgatggaatgaatacata

SEQ ID NO: 190641 - DNA, 479 bp, Glycine max
  unsure (1)..(479): unsure at all n locations
ctcagctntcctcttgaatctggcagcaagaatttacagcttctttcttaaccaattntggttgctgaacccatatactttgaatgaatattccttgaattgcattataatgtcttctgaaatttatggatttatgaaagaagcctgtcaatatgtgctagtatctcaattgcaagcctctgcatctcgctcgtctccttttgagccaagttggcttcagccctagctttgtcagctacttcagtagcccttacaacttctttttcggcaatttcatatctttcctgaacttcctcaaattttaaaaagtcggtgttgtacttcttctttagatggttaatctcctgttgaattaccagtacatccttctcatatatacgactgagccctagcattntcagtttcaatctcttatcaacttttatattcaagcctcagtggtatatctctgagtcatatttcttattttgactaacacc

SEQ ID NO: 190642 - DNA, 373 bp, Glycine max
tgaaatcatcacatttatgtcctcaatactaaaatgtactatagcctacaccatatgaaatattaagtttaatggactgactaggcctccattatattataaattgtgtgaagatctgccaccttagtcttgttaatgaaaactctcacttcacgagttgaaatactacacgcttttttccatcaaaagttattagatgtgtagatctacttaatatcacactttatgctcactaatacacatacggagagagagaacaactcattatagaaatctgtgaattgtacatctaccggacttaataatttatcagtggtgcacgattaatccttaatcatatatcataccacttatacaatatcatgcacactat

SEQ ID NO: 190643 - DNA, 314 bp, Glycine max
agcttgtagaacaccccataagataatctgttgttgatgcaaagagggtgttaagaaacaagctggaagaaatatgtaaggatgtgaggaacaagcctatgcttgtggccaaaggttactcacaacaggaaggtatagattatactaaaacttttgctcttgttgctcatctaagggcgatactcattttactatcctttgctactcatcatggtatgatgttgtatcaaaaggatgtaaactgtgtgttcctcaatggacttatcaaagaagaagtctatgtgaaacaaccccctgagtttgagagttctatc

SEQ ID NO: 190644 - DNA, 438 bp, Glycine max
  unsure (1)..(438): unsure at all n locations
aagcgcgggtctgggagacaaaggtcaagtggtcgctatatactatgatgatgttccgagtacattagatttggtacgaccatgccctcctgatttccagttgggaaattggcgagtggaggaacgccccggcatttacgcaacgagcataatgtaaacctttacggttttaaaagctctatagttgggcctaggctttagagtttttccttttgttaaggctttgtgtcttttgtttttgaatatataatacaaggatctttcttcatctgttcctacgtctctacccattctcattcatttgcatgtttacttctttttctgaaacggcagatccgttgacgagtcccccgaaggtactaatacttgggaacccgctatcgacttcgagcaagaaatgaatcanactggagatgaaggaaacgaggatgtgggact

SEQ ID NO: 190645 - DNA, 315 bp, Glycine max
tagctagaagatcggagagtatttatgtgttcttaggctatgatgcaagctcataaagctacaaattgtacaatccaaacaatggaaagacaattgtgagccgagatgtcaagttctatgaagaaagcacatggtattgggaggagaaagaagacacttatgatttttttcccgtactttgaagaaatggatgataaagccttgactccaaatgattcaactccagcactttcaccaactccttcaaccaatgaagcatcatcatcttccgaaaggagttctagtgataggccaagataaatgagatatattcat

SEQ ID NO: 190646 - DNA, 313 bp, Glycine max
agctttggaggagacggtggtgttggtgaagtctctgctttaatcatgactagaccattaggataacacctagaggatgatgatgctgactacgaccgggaggaaaaactcggctcatcctcacgcatctcgtgtgccacactagaaagcataagcttcctatatacgatgaatgattactctatattaaaccggcatatcttctagagaaaaaaatacttttttctttgctagatgaaaaaaaagacacttcatcccgagtgatagcttctttaaaaaataatatggtcaaagtctacccatactctatttt

SEQ ID NO: 190647 - DNA, 350 bp, Glycine max
  unsure (1)..(350): unsure at all n locations
ttttaatgctggcatgttcagagatcctggaagtgctacgattgtggtgacgaaagacataaatgaaagctntagaaatgtcaatgactcacacgaaaaaatgtaagggcaaaactcgaaactctgtctgaagcttaaaatgaaagatactcgaaactgctgaacattgtgcagggcagcgtatttcatcaccctattgaagagcttgggctcccataccgcgacgcgtgaatttcagattgatcaaggaaactgaaccatctcggtcaaacagaacgcgagacactagatttgtgaatttgacaacattgttgaagagggttgtcttgaattcaagatcaattacacgc

SEQ ID NO: 190648 - DNA, 256 bp, Glycine max
gctgacattactcatgatatgcaggttggaatggatacactcttatccctttttatcttcaatgattccaataaactgtctacatccacttcttccgaagaaagacctgttgccagaaaggcatagtaaatgaaactctgtttacatgaaaaacaaataatacgaggagcctaatatgctcactatcatctatacataccatcaacacttctctccagcattatacaaccatctttccccaaagatacaatcacaa

SEQ ID NO: 190649 - DNA, 362 bp, Glycine max
  unsure (1)..(362): unsure at all n locations
aagctataaccagntgttgcccccagctgaaaagcttttcgatctactggaatgtcaggtgttttaaacgcttcttaatctttgatgattacgttagcacgtgaaaatatttctttggattcaaaagtcaatccttagtagtatactgaaatataattcatattacagggtaacagacagaggactacaacatatagtgaagaactgcaaacacataattgacttgaacataagtggatgtaagggacatgctgccttggatttgaattntatctttcagtattattaattcaatatcgagctgaaagaattgatcccatgtatgtccatttaattgatgcatcccttccgttgaagtctat

SEQ ID NO: 190650 - DNA, 289 bp, Glycine max
  unsure (1)..(289): unsure at all n locations
ttcttaatcaatggtgtnctttgcttcttgatgatcaatgacagaagaatggagaaagaggaaaagctattacagacatcacttcaaagagaagatgagtcacgaacatgcttaccaccattggaagccatggattagatcttgaaagtaggagaagatgagtgaaagaagaaagtgatgtatctccatgtggagcttagaagccttggatcttcttcattaatggagtccttttcttctttaatatcaatgtaagtggaatggagaatatagaaaggcgattggagac

SEQ ID NO: 190651 - DNA, 451 bp, Glycine max
  unsure (1)..(451): unsure at all n locations
tatgtccacaagctgctatatcttttccccattgatctttatgtctgctggatttctcttttcactggacaaggatgtanggtaatatcaaagtttgaatgccttttagcttaatttcaatggttcaaagttgtcctcatggatctcatatatggcactgcaaataatatttaattttctgaacatgaatttctggagcactaaaatgatatgtcatatgtgtatacattactgataagcctgttcttgttccatgtcaatctataatttttcttttctgtataaggccatttaattaaactgtctacaaaaaaagaacttttctgatactaactgaagtttgttccatcttcaggaaatcatccgcagaatgcttctattggcattggatgaccctcataagaaaantgcacggctattggtatggctgtggcatccattgcaatgcatg

SEQ ID NO: 190652 - DNA, 302 bp, Glycine max
  unsure (1)..(302): unsure at all n locations
agctagaaagagtgtatcccaccatctnttcttctttaatactggtaatgagtctactatcattgtcatcatttttttcttcgtcattgaggagccacttgagctaccaggtttctccacttttgggcgtattcttttgaaagattcgtgccccctttttgcacatgttctgtagttgcatcctatccgaagacattatactgacactgcctaacgaaggcaaccactatgtccttccaagaatggactcgggaaagttccaagttagtgtaccaggtaacagctaccccagtaagactttc

SEQ ID NO: 190653 - DNA, 232 bp, Glycine max
atgactcgtatcaaatataaaatcatacgtggagcaaaactggccctggctctgattaatggtaccctcagttggtgcaagcccactctccatttataacatctgcttgatcactaggttaacactatgggaaactatgtaagcaacacattggatgaatatgcttcattgggggggaacttttgcctctgacttatacttgctcaatactttacttgccaattttctatgc

SEQ ID NO: 190654 - DNA, 294 bp, Glycine max
gcttcttatccaaagctcatcttggaggagaagctccttcttcatggcttattccctagaggatggcgccgcctcttacctcttctcctttgtcttccgctgcatctccatggaggaaaatcaccattaaaagacctcattgaagctcaaagatccaacctccatacaagctccaatggagcttacatcaagcttccatccaccttggaaagagattgacctcaaatcctgaggttcttcataccttgggctccttccctcaacacctgtaaaaaaaacaaaaacatatgtatt

SEQ ID NO: 190655 - DNA, 432 bp, Glycine max
  unsure (1)..(432): unsure at all n locations
tggagatatgtcgccggggtcaggagaccttggggacgtcaggtggggtgctatttgccaaaaccaagcttgaccaatcccgacccaacccgggcatagtcggtcagtgagaacctgtgatgtacctaagcaggcgagctcctggcagtcaacagataaaaggaacaaagaccacaaagcaaggaggcttgtggtggctggccagctctgaattttgtgtgatatgtggattatggcctctggtaatcgattaccaagggtgggtaatcaattacaaggcttataaatgaagacaggagactaagatggtctctggtaatcgattaccaaggggtgtaatcgattaccangcttgaaaacgaagtcaggaaactaagggagcctctcgtaatcgattaccagccagtgtaatcaattacacagagggatggg

SEQ ID NO: 190656 - DNA, 292 bp, Glycine max
tagggggagaagtgaagtgttaataggttcagccccttatgcacttctctctctttcgaatttgcttggaaaatatgtttccgtgaagaaaatctaagccgaagcgcttccgaaacgcttccgtaacgtttccgtaaagaatttcgcgaaagtttcgaccgttcttcgacgttcttcattcgttcttcatcgttcttcgatcttcaacgagtaagtacctcaaaccaagcttttcgattcattctatgtacccgtggaggtccacattgtgtttcgagtatttttatcctcg

SEQ ID NO: 190657 - DNA, 419 bp, Glycine max
  unsure (1)..(419): unsure at all n locations
gaatgttatgagctgaaagatatcaacatgatcgcggatgaagcactatagcangaaatgaagaaggtcagaaaagaagagtggagcagaaaaaagttctgaggggctttgctatgcagcagtaatgagctcaaacttataaaggccgagagggacaaatcaaggatggaaagcctgatgttagaggataagttaaagaggtttcagaggttgaagagaagtttgaaagaaaattgagctaaacagaagaaaatatgttgataatcattgaccaatataaagagaaggtgaacctagctgctaatcacgggcagatgctataagatgaacacgcaaaggtgtcggccttgtgggttgaaagggaagcgagagaangngtgatanagttattgcataaagaagcaatgaaatggatggac

SEQ ID NO: 190658 - DNA, 320 bp, Glycine max
  unsure (1)..(320): unsure at all n locations
agcttncaccatgcttcagacagactgagttatctctggcgccagctttatccttagacagccccaagtgaataggagcacgtattcctttatggctgacattccccatcccaaacttcttgacaatgctctttgcatacttgctttggcagaagaacatgaagtcctccatgtgctgcacttgaagtcccacacaataaatcatctctccaacaagactcatcttacattcagattgcagtctgtggaccaaatgtcaaatcatcgtattcgacatccctcctaacacaatgtcatgaacatatatctgcgctatcatc

SEQ ID NO: 190659 - DNA, 378 bp, Glycine max
  unsure (1)..(378): unsure at all n locations
actcagcttgattagaggcttcctccagaagctanctgcgggctacactgataagctttctctagaggctcctctgagaagctagatccttgtctatacaaacccctctattaactaaattaacgttcttaaaaataattacggatgatgataacgcggccaataatcgaacctcaaacatagttactgattatatatagatatatatatcagggtgttacatatattcacatatatacacatcatgtggaggtatgtgacatgctacctatattcacacacatatatacataccattagaagggattttccgtgctacctagatgcaaagaattcctcatggggcagccaaactctagtagaaacgctctcaagcat

SEQ ID NO: 190660 - DNA, 312 bp, Glycine max
  unsure (1)..(312): unsure at all n locations
agcttatatcagccatgaccaatagntaacatctatcctgcctctggaagaagatcaaagccccataaaaaaaaattcatagttatctaaggagttgtgcacgggaaaaaattcctattgtccactccaactataatgttgtcccgaacgatctgaagatactaatttgggaagatattttggtaagcggttttaagtacacgtatgtttatgattgtctttataagtcactttaatatgaatcattcatgcactcttacataacaactttcatgttcggcgcaaatttgacatccctgaaagtgaagatgc

SEQ ID NO: 190661 - DNA, 398 bp, Glycine max
  unsure (1)..(398): unsure at all n locations
ntggcgaagaaaaaatgggtattnntttggaacaaaaacacaatccatatgttctatactaatcaacaattcttatggactatacgaattgctaatccttatgggtttttctttgaatctttntaattctaaatatatatttgcgaattattttttaaatttttntgtagggtaattttgttttgtaatagttagtgtaatttgataatttgttatgatttatttgttaagtattgattttttttttataaaaacaaaacaaatatcttagttactactaagattagattagattgctaagactaagattagattatattatattacaaaaaaactaatataaaatattgtattttgttaactttttaaaaacatcgaacanatatttaaaagatatt

SEQ ID NO: 190662 - DNA, 308 bp, Glycine max
ctgctagcttggagaggatgcttctatggaggaaatgatagagggagagaaagagtgtggggggagctcgatattgaaggaagataataggagagaagttgaactttgagttgtgtctcacaagactctcattcatcaaagttacaacaagtgttacacatgcttctatttatagactaagtagcttccttgagaagctttcttgagataacttccttgagaagcttctctgagaaaacttccttgagaagctagaacttagctacacatacccctctcataactaagctcacctccttgagaagctt

SEQ ID NO: 190663 - DNA, 312 bp, Glycine max
agcttatatgactccgcatgctcttcaccctgtcttataaagttcgatttcttcgttcttccacaacgttctgatccggagaaccagacatagtgtatggggcaacaatcccatgttcttgaagaaatttcgctaatgaacctgaggcctggccatcctctagagatgtaccatagtactccacacctctatctgatctcacgatcttaatttgttttccacattggttctcatcttcagccttaataactctaaaggcatctaaagcttcattcatagaatgaagtaagcagagatgcttatatcgtgaat

SEQ ID NO: 190664 - DNA, 398 bp, Glycine max
tgtgtatctataccagcagcacaaatacagcttaaccatgaaacccaaccatcatctgctgttgacccttcgtgcgtatatttctaagtgtaaagcaaataagcaagctatacaaaaaagccaacccttaccaactccttcaacattcacgtaagtcctgtatcatcatatcaatcgatctcctttccttcacaaagagatcgaaacaatcataacgttaaacaattcaaacaagccctgggattcatctcccattcacaataagagaatttactttcttccctttacattaatccatgcccaagctctatgttttgccggatcccttgcgggcacacaacacagcttcccatcgacattggccctctaaaaagcatagttgttggggaggacttgca

SEQ ID NO: 190665 - DNA, 311 bp, Glycine max
agcttatgatttagttacttatcatacattcttatactgtaagtttgcatatcagacaggttaagttggtaattagttttacctgatgcacaatacttactctctcacatcttttgctagctctttataacccaacctattctccatttcatgtttggaggaaccacttggtgttgacaagttactgagcatgaataccattgataggatttagaggttctcgtctggttattgccatcctataattgataacttgggcatgggaaaccgctagattgatggacgaatttgcagcccatctcacaggtgca

SEQ ID NO: 190666 - DNA, 224 bp, Glycine max
tttgattgatataaaattccatgtgaaagacatttttatgaaaatatatctatctttaactagccatatagtttatctatcttaatgcccattttttacctatttcagtatcacattggatcatataaacctttttctaaattgtcaaacatagatttgtgattgacgaaaacatactatgtagttaaaaaatggctaatgggcgtatagcggttttatttatc

SEQ ID NO: 190667 - DNA, 311 bp, Glycine max
agctagcacttcaccaaggttttaccttagcatttcaagaagtgcaacaataaatctttcaactataataactagcacaatagaatcaatattgaacaatgactaagaataatgataataatgcactaaaaaatcatgatagaaaataacaataaatgtctagcaaatagctgaaacaattaatatcaattacacttgcttgcgtctacaacattttgaggaggcatctctttaatcccaatttcaagaacaaaagctcttgaacgatcatgcacctataatcagaaaaaagctagaacttacattaatat

SEQ ID NO: 190668 - DNA, 478 bp, Glycine max
  unsure (1)..(478): unsure at all n locations
tatccagaaagaatccanaatataacatactatgcttgtgcatttatactagntaagnnattttggttgatttagtatttaataccccaagtgatgtacattaaatatataaatgcttgaatggagaattangaattattatattatcttgtaataaatctagaagaaaaaaaactctgtatctaacaaaacaattatttaagatttttgtttttctattattgttaggaaattatttataatatgtcctcttaaaatatattatcataaatattatttattttgattcagattccattctttaaaatgttaattggcattgggttaggaatttacatctaattaagaattatttattatntattatatttggaatcataaatactctctatacacctttgtctcaacttagagtatatgaaatcctagttaattagaggaatanctcttctaaaaaaaatagtacgtactaattaat

SEQ ID NO: 190669 - DNA, 311 bp, Glycine max
agcttcaacattcaacttcgagcatctcgttatattattcgactcaattagacatccgagtaaaaagttattgtcgtttgaatttgctcatagcttcaacattcaatttcgagcgtctcgatatatgacgggactcaatcagacatctgagtaaaaagatattgtcgtcataattggctgagagcttctacattcaatttcgagcgtctcgatatatgacgggactcaatcaggcatccgagtaaaaagttattgtcgtttgaattggctgagagcttcaacattcaattttgagcgtctcgatatgttac

SEQ ID NO: 190670 - DNA, 472 bp, Glycine max
  unsure (1)..(472): unsure at all n locations
ntgagcanattcaaacgacgaataacttttactcggatgtctgtttgagtcccgtaatatatggagacgctcgaaattgaatgttgaagctttgagncaaatcaaacaacaataactttttactcggatgtctaatagagtcctgtaatataacgagacgctcgaagttgaatgttgaagctttgagcaaatttaaacgacaataactttttactcggatgtatgaatgagtcccgtaatatatcgagacgctcgaaagtgaatgttgaagatctgagcaaattcaaacgataataacgttttactcggatgtctgattgagtcccgtaatatatcgagacgctcgaaattgaatgttgaagctctgagcaaattcatacaacaataactctttacccggatgtctgactgagtcctattatataacgagacgctcaaagttgaatgttgaagctcttagcacattaaacta

SEQ ID NO: 190671 - DNA, 299 bp, Glycine max
agcttctccacttgtaacttgtgcctaaattcttataacaaagttaacacttgttgaagagcttcctttgccttctttgttctagcccttgccataagtcctccaagtccttctaaaggttccttgccttgtcctcatcagacggggctagcttatcgtattttcatgagacatcggagtacgataacttagtttttgagatgttatgtcttaaagcggctctggttaagtttagtccaacaagagacatctgaggatgacgcttgattaagattaagctaaacatgcgtgagacatcg

SEQ ID NO: 190672 - DNA, 345 bp, Glycine max
  unsure (1)..(345): unsure at all n locations
ngcctcanagaggtccaggaaggataaagcggtcgaaggaaccatttccgctcccgagtatgacagccaccgctttatgagcgttgaacaccagcagcgcttcgaggccatcaagggatggtcatttctctgggagcgacgcgtccagctcagggacgatgagtataccaatttccaggaggagatagttcgccggcggtgggcatcactggttgcccccatggccaagttcgacccagacatagtcctcgaatnttacgccaatgcttggcctacggaggagggcgtgcgagatatgagatcctgngtgaggggtcagtggatcccgttcgatgcggatgctat

SEQ ID NO: 190673 - DNA, 307 bp, Glycine max
  unsure (1)..(307): unsure at all n locations
agctaggntcgttgttcttatcccgtgaagatcgtagaacgatgaagaacgaatgaagaacgtcgaagaacgtcgaagaacgattgaaatctttgcgaaattcctcacggaaaacgttacggaaacgtttcggaagcgcctcggcttagattttcttcacggaaacaatttttccaagcaaattcgaaagagagagaagtgcctaaagggctggaccctttccttcttgctttcctcccctatttatagcaaaataggggaggtggttgccgcccagctcgcccaggcgagctcagctcgcccaggc

SEQ ID NO: 190674 - DNA, 477 bp, Glycine max
  unsure (1)..(477): unsure at all n locations
tccttaagaagcaaggaaggtagctttcttatgaagttagaggaagaaagcttccttgagaagctagaggggggctaaaaaccctatactactagggtaaccttaacttgtagggtaggatacccttaatttgtaaggtatcctacaaaccttaaatggccaaaatacaaggtccaaaagaaggaaaacctattctaatatttataaagaaaagtggacccaaccttggcccgtggactcaaaaatctaccctgagattcatgagaaccctatggccttcttcagcagctctagtgtggcgtccctaaattaatgactggtttaatagtaataatttaaataacaaanaccactggaaattnttttcttcttctttttcttntatatttctttctcttttcaccataactaggtttagaaggaaaatcctcactatagagtcctgaatggccagttcaaacctctattcggagtcat

SEQ ID NO: 190675 - DNA, 288 bp, Glycine max
tagagctagtgcttattatagaattaacacatacatacatacctttgaaaactccacatctaaaacttgtaactttttctatattcgctatttgacatcagctaattctcactgtcatatataacaaataaaaaaggatccccaaaattctaattttggaactgtatatcattaggtttaatgtctgcattgactaaacaaataaaaaacttgaaatctgggaaaaaaaatgttgaatctcaagtacccgagaaatgtgcttgttctaaaaaatagaaactttttggg

SEQ ID NO: 190676 - DNA, 398 bp, Glycine max
ctttgctcatgagccaaagaatggtttagctcctctttgtactaccctattatagctagcatgctttactccgtggcttctaagtgctgggccaaactcctcttggatcttgagcaagcagctaactcttcttttaagaccatgctatgtacttgtgattggtctctctcttccctttgaagcttgagctcattgttgctgccccacaaagctccatggaatttgtctcggctatgctcttccttgcgagccctcttggtttctcgttcaagggctcttgtggtagctgcattttcttctcgtaactcggcacactctttccagacgtttgtagtgactaactttgaattttctttggcaagtcttgcttttcctagttctgtttttagagctcggac

SEQ ID NO: 190677 - DNA, 245 bp, Glycine max
  unsure (1)..(245): unsure at all n locations
gaagctttaacctcatcatctctcatagtctttagaattgggagccaatccagtccttgtgttcggactctcagccacttatgatagccgccgatgatcccattactgcttcccctaagctctctgtcctttcttcatgccgcatcccatgccttgcgaactccttggagtacctttgcattggggtcactgaaaccccgtgtaatgaaaggcgtgatgctttngtctaatggcgctcctctcac

SEQ ID NO: 190678 - DNA, 279 bp, Glycine max
tgtagaccacagagaggtacctggagatatgtcgcgggggtcaagagaccttggggacgtcaagtggggtgctattgcccaaaaccaagcttgaccaatcccgacccaacccgggcatattcggtcaatgagaacctgtgatgtacctaaacaggcgagctcctggcagtctacagataataggaacaaagaccactaagcaaggaggcttgtggtagctggccagctgtgaaacttgattgatatgtgagatatggtctctggtaatcgattaccaag

SEQ ID NO: 190679 - DNA, 344 bp, Glycine max
gatatgtcgcggaggtcaggagacctttggggacgtcaggtggggtgctattgtccaaaaccaagcttgaccaatcccgacccaacccgggcatagtcggtcagtgagaacctgtgatgtacctaaacaggcgagctcctggcagtcaacagataataggaacaaagaccacaaagcaaggaggcttgtggtggctggccaactgtgaattttgtgtgatatatgggttgtggcctctggtaatcgattaccaagggtgggtaatcgattacaaggcttataaatgaagacaggaggctaagatggtctttggtaatcgattaccaagggggtgtaatcgatta

SEQ ID NO: 190680 - DNA, 257 bp, Glycine max
caaaaaaaaactacatattagatgaccatagttacacttaacggtcataaagatgggtatagttacaacctatataggttttatgctgaaatttcaaagtcattcggaaatgaaagagaacaatcaacttaaacctaaagaaaactctcaatatataatagatcatgttgattaaacttcaagatgcaagtcatcatatataaagctctagccttttcatataagtagtgctcatagtagcattatactttagtttt

SEQ ID NO: 190681 - DNA, 459 bp, Glycine max
  unsure (1)..(459): unsure at all n locations
ctcagcttaagtttatgtttntgtctcaccgggaatgaatggggaaatataattgttcaaaatgtcaacaatcttggtaagtgctaaaattgctctattttgaaagaatgaagaattatttaaatctttcaataatgatgaataagtgcttccaacaatataagtaatagggccacctaaattctttattagcatatcatttgatatttgaatgccaacctttcatcattggtttctctaatgctttcatccccaatactcaatatctaacataagaattgaattatttcattgatatcagaacttgaaggtgtagtttagaatcttgtatttntagttaatattaaaactcgacaaaattgcacaggtaagatgaattgatgctacgtgtacaatttgttgtcttgtcacctttagaatgattggaagaattttcctanaatcactctctaagacaaa

SEQ ID NO: 190682 - DNA, 324 bp, Glycine max
  unsure (1)..(324): unsure at all n locations
agctagtcaacagttctagtcctnccacttttgatanttgtttacgagttctgattccatcacttaacaacttagtgggagaggaaaagtttatattttagcattcaaataaaactccttcacacagtcacatatatcctgaccaatgacttcccagtattcccaatgactattagttcaaacttgaacatgtggaagatgtatttgcccgattcattatttcttggtaccctgcaatatttgggagtacatgaagctttgtgggacgacaagaaagacttgtcaaattgggatgcttttggttcttcacaccaaatcctttat

SEQ ID NO: 190683 - DNA, 476 bp, Glycine max
  unsure (1)..(476): unsure at all n locations
acactatcaatactcagcttgnaggtcatggtgattgtgaaggtgacattgacattcttgttatgtnaacattatcaccaacattnttgccagaaatgatttcagctgccatgacatgtttggctagtctaataactattaatctagtaccattacagagtccttgggtttggtctaagtttcttagcaacattataggactaccgattnttagcttgatacgatgatttggcagaccaaatgtgtntagtgaattgagaaattcaattgtgattgattggaaatgccaactgtcaatggtttttgacttctctatataatcagagcttaagtattccatttgttcacctattatatttanttgaggtaccatacaaagcctaatagagaataaatactaagtataccttagtntttattaaattcagatatgcataaatacctggaatcaaggaaagtatataatcattgacctc

SEQ ID NO: 190684 - DNA, 319 bp, Glycine max
agcttttcattctcaacagttttcatggaaaccttcttctcatgatctgcaatttcctgctgaataccatcaatgatctcaatcctcttgatcattaacgagtttttctcactgagagaattggccaatttcctattttcctccaaactagccttggactttatctacaacttgacatacctagttctccaatggtgaatagtatcagcatacctatagaggaaaatctcaatggaatccaaaatgttttggccccaacaaaatccatcatcttggagtcaacctttataagtagcttatcattagtaatgaactcgga

SEQ ID NO: 190685 - DNA, 487 bp, Glycine max
  unsure (1)..(487): unsure at all n locations
tgcttctacaatctcttcctttttatgatgacaaacctgatatcatgaaactcatacacattcnttttcctagtcaatcactcacttaattctccatattctccccctctggttttgattttaagcttcacttgaaattaaattacttaattgtatgagttcttgatttaatccctattttctctccccctttggcatcaacaaaaagccaaagtgcataaaacatacatgattttagaaaaatcatacacatagcatccattgtaaatcaatcatagaagattctaaactaatcatgaagcangacatgaataaaccaaactaaaatataaaccacatagtcatataacataattcataaatgttcagtcttactaagagaatattaaaagacatactaaatgttcaaatgtcataataatatagcccaatacacggctcgaaatcaaagtactaataatactagagataatatattctaagacat

SEQ ID NO: 190686 - DNA, 316 bp, Glycine max
  unsure (1)..(316): unsure at all n locations
tagcttactcggagccatttcttttaatgctttctattggaaagntaggcctaccagtgggacatcactcttaaagcaaaaatggcatataacctacgtccataaatacaaacatcataggaaatttagagcaagcttatgcgcatattttcttacaatacgttctcttgcacaagacattctatcaaccgaataaaataatgcacccatatacaatcaaggcagcttcggtaactagattatttacacgtacttgcaaggagtatttgttacttacatcacacacatctccttgggtaaattcacatacaagcat

SEQ ID NO: 190687 - DNA, 309 bp, Glycine max
  unsure (1)..(309): unsure at all n locations
agctntatataagctctaatttagtgacgttgcgcttatcgccactctcgcgtttagcgtgagtaagtggattaaagcttattgccaatctcgagcttatcctggctgaaagcacctactgcgcttatcacactgatctcgcacttagcacacggctttgatgctgatgctttgccaaattctcctttgcgctaagctcgctgaagctgcgcttatcgatggatatgcgcttagcccaactgctaagcttatcccaactgctacattttgcaattcaaaacttagcctctttttcacctgaaaatgcac

SEQ ID NO: 190688 - DNA, 489 bp, Glycine max
  unsure (1)..(489): unsure at all n locations
actaagcttggaggatgcttcatggaggaaaagacagagggagagatttatagatgggggagcacgaaattgaggaataaagagggggagaagtagaactttgaagtgtgtctcataagactttcattcatcaaagttaccacaagtgttacacatgcttctatttatagactaggtagcttccttgagaagttttcttgagaaaacttccttgagaagcttctttgagaaaacttccttgagaagctagagcttagttacacacacccctctcataactaagctcacctccttgagaagcttccttaagaagattcctaaagaagctagagcttagctacacatacctctctaatagctaagctcacctgcttgagatgagaagctagaacttatctacacacccnctataatagctaagctcacctccatgacaganaacatgagaatacaaaaaaagagtccttactacaaagactactcaaaatg

SEQ ID NO: 190689 - DNA, 259 bp, Glycine max
cttcgacctctcttcggtcaactacaccttagaagttcacgccatgaggttaaagagtttgaagccgtggtggcaaaagccaattcctcagcaaaccagagagttgagtatgaaaccaaaggtagattctctcttcttaatcttacaatttaatacatccgtattactcagtttagcgcgcactaataagagatattatcttttatgtgcaactggattctttattattcaaaaacctgtacctgggtaatttattcta

SEQ ID NO: 190690 - DNA, 227 bp, Glycine max
  unsure (1)..(227): unsure at all n locations
tatgctctagctgcattctcagcagtttcaaaagctcctagccatatcctagatctcctgcaaattagaagaaacgttgaatcaatcatgctntcgagacactgtcagatactatatgtaaacacctttntaacggagattcaaacattaggtttgacatgctgtcacacactaaatgtgaacatcttttatttaacggaggttgatacatcggcttccatggacta

SEQ ID NO: 190691 - DNA, 312 bp, Glycine max
tgcttcagaggaagatgaagattttcgagctcttttattagagctagggaaggcttgactcgccaaggagatattcaagtctgctgctacacacatccggaaagagtgcaccgatttacatgaagaaaacgcggccactgcttgagcccttgaacaagaaaccattagggcccgcaaggaggaatatggtcgagagaatttccgaggagcattgtggggctgcatcatatgagctctaactccgaagagaggagagagatcggtcacgggtgcatagcatgatcttaaaagataagttatgtgcttgcgtga

SEQ ID NO: 190692 - DNA, 397 bp, Glycine max
  unsure (1)..(397): unsure at all n locations
actaagcttatagggagccatgccaatggtagagagaaataatgttgttgttagtgaactctatcaatggaagaaagctctcccaactacccttntgctctaagacacacaccctcaaaaagtcctccagggactgaatggtccgttcagtttggccatcaatctgaggatggtaggctgaacttattctaagctttggttcccaatgctctgttcaggctctcccaaaaccttgaggtaaacctaggatctctatcagacactatgctagatggcacaccatgtaatttgacaatctcactaatatacagggaggtcaactnttccaaggaaaatatgatattaattggaataaagtgagcagacttggtcagccctttaacaataacccaaatag

SEQ ID NO: 190693 - DNA, 304 bp, Glycine max
agctagagataggtataccttatacctatatgtggcgatcactctcaatcgtcattcatgtggttgtgtaagaccaccaatacctatgatgcttggtggaattgttgggccatgttatgtatcgagtgtgacagtcacactactacaaaaatgtgttttaacaacggttctagaatatttttaacaaagtttttcagctattgttaaaggtctatgtcttttaatgttgatttaaaacaattagtgaatgtcaactttcaaagacaattttcaaaaccatcttcaaatagttatcttaaatgtc

SEQ ID NO: 190694 - DNA, 466 bp, Glycine max
  unsure (1)..(466): unsure at all n locations
nntgtacgtaactactgtacaagtggttataacggacctaactttcttctaactaactaacggccatgctagtttgtttatacgtaatcacctaggtaactaggtctcgtaacgttccttcgtggcctctctgtggtggcttccctgttcaaggtatcttctgccctagcgtctctatcatcatcccgccctacaaaactcaccttgtcctcaaggtgatgagaccgcagaatgtcatcccatacctcccatgcagaatcttcgggtgctaagccaacctactgtatcaatacaacgcgagttgggggtttggtggaggagtccatgcgcgagtcgaggatcgtcaagggctctaatatgggctggttctgaaccacatctggtggaacggtggaaactggaaggtctaatggaccgtggtgaggccgtaacatggagcaatggaagacnggatggatcttatatg

SEQ ID NO: 190695 - DNA, 191 bp, Glycine max
cctagccaaaaagaagacgcgaacacccgcggagaccccgacgaaagagaacccagcgagacacaacccaaaggtcaacttctctcccccttctcccccctcaattgagagcgcccctctctatcattccctctctccttctcttcctccatagaaacatcctctccaagcttcttatccaaagcacattc

SEQ ID NO: 190696 - DNA, 463 bp, Glycine max
  unsure (1)..(463): unsure at all n locations
tggcgaaattgccatgtnggggagagttagacatactcattcttgtttanggnnnntgngatgatgtttgcgatgtttatatgccgaaattgctaatggaaatctgttagagacgaagggtagaactaacccaagggtagaaagtgagaatgtgatgttatgagtggaaaaagagtgagactctgagagttggaaggctaagtcggaattctgtggtaaatggaggttagagtgagtcaatactagcttgaaatgtcatttataacatgtgagaaaggttaggctgagctagagagaaaaataaatgaccaaagtgaaccaagagccatttctagggcataattgngtgttgaagagtcaaactttgatttggtggaattctatgtgtaattccagtttgggcaagtttagatcgacgttatggactggtgtgaggtgagagtttgcctcacattcacctcat

SEQ ID NO: 190697 - DNA, 307 bp, Glycine max
  unsure (1)..(307): unsure at all n locations
tagcttcgcccacttcgtcatatttcagctactatagcttcttattcaaaaatgaccaagcatttgtatggcccatttcaaatcctctctcacatacttacagattgcagcttccagaggggtcgtgtatccatctggttttctattgctccactcttaaaccctttcattcttcgaccattgacaacccactggctntgccttcatagcacatcaacaataatcctattatcataccactgtcatttctaagaactcgttgggagatgggagaaggtgaacctcaattgcaagtactagtgcaatg

SEQ ID NO: 190698 - DNA, 352 bp, Glycine max
tgagatgaggaagtgttgaagggtgaatcttcctgtctttattgttgaccacagagtggtacctcgagatatgtcgcgggggtcaagagaccttgcggacgtcaggtggggtgctattgcccaaaaccaagcttgaccaatcccgacccaacccgggcatagtcggtcagtgagaacctgtgatgtacctaagcaggcgagctcctggcagtcaacagataaaaggaacaaagaccacaaagcaaggaggcttgtggtggctggccagctgtgaattttgtgtgatatgcggattgtggcctctggtaatcgattaccaacggtgggtaatctgatacaaggcttataaatg

SEQ ID NO: 190699 - DNA, 319 bp, Glycine max
ctgcagcttcttactttagcatagtagagacatccttcttgagcatgtgtcttactaatcaaaacacttcctatgttctattcttcacatatctttcattgtatcatttctagatcttgcataactttcctgcatatttgatgtgatccttactaagaccgacttgcttgatacagggcacatagtttggatgatgccactttcagagagggaagataagccagggtagatgccacaaagattaccttgataagtccgagattggttcagcgaggaacccatagagaagttctcacataattttatcaaatgccaaaag

SEQ ID NO: 190700 - DNA, 330 bp, Glycine max
  unsure (1)..(330): unsure at all n locations
ctctctttatatatgcncnggggtataataattcataatatgttgtatgtgtcngaacctaaccctttggtaagagggcgaggcgaaaagccaaaggagcttcttccataaaggaaaacccgcgggagtcgccaccaacgtttactctaggaaaacattataaaaaccatacaaaaaaggtcgaaggtctgcaaattttgaaaatgagggtttgggagttgttacacaccatagaaggtatttgcaccccacgcactcgtcacaagggatggcaacctttaatcgagtgtgcaaaacatgacttcaaaattgggatttccccttcatatg

SEQ ID NO: 190701 - DNA, 259 bp, Glycine max
caagaccaatcaactttagacataaaatgttactaacacctactaatataatttacataatttcaaattaagtcaacactcagacaactattatggtcttgatagacaatgaagacgaagaatatacattgagatagtaatggaggcaagagccatttgtgcaaatgaaagatggactaattaagggcatcattgacctgaattgctccaaaactcttgaatcaaaaagttgtcacaaatgatactagtagctacttat

SEQ ID NO: 190702 - DNA, 366 bp, Glycine max
  unsure (1)..(366): unsure at all n locations
cttcttcaccatcaaagatgacaggtcattaagctgagaatcctcatcatctgaacttgcgtatagtgcttggtttgctttaccgggggacgtatcaaccatcagatataggttggcttctttctcactgccctcgtcaaacaatgagtcattcatgtcctcccaagtgctcatgaggctcttctttntggacttgaagaatttcttcctcttatcctttgatgtttcaaggctaggacattatgacttgaattttcctggcttcttgaactcattacaaaagaatgcacctttctctttcttgtgaaaggatcttttacacacatggtaaacctaaggagttctttgtttctaaatcttctaatc

SEQ ID NO: 190703 - DNA, 297 bp, Glycine max
  unsure (1)..(297): unsure at all n locations
tagcttggaaaatgatttctatacaaaagtttttcgtctttagcgactaacagaagcattgcgcanagcgggcatgatctgccttgacagagacaaaggagattcttgtttgatacatccaagagcatcacacgatgtagaggcatgctcggtggcagaggacctgcttcaggggatgatggataaaggcctgattgaagtttgtgatgcgagaaaggggggaggagatgtgtgtttgcaatcggctgataaagagtgaatcatgtgatgcaatcctaccacgcaagggcattggat

SEQ ID NO: 190704 - DNA, 455 bp, Glycine max
  unsure (1)..(455): unsure at all n locations
taagctcttatgtgaactgaagactcaatattggnntttatatattaacatgtcccatctagcatggacaaagcacatgcctgttttatcttgtgctaaaatgccatttttgctagaataacggggaaagcaagaataaatcctgaatactttattcaaggaggtttgaggatcaattatctcaaaatattaagctgttagggaagtttagtttagtatctctgataggaatctatactttaatgaatgtgtgtaaatcatcctttaatatgattacatttcttagtcagagggtgggtttttntatgtaataggtttaaatacctcttgtattcccattcccatatgatagactgagggaagtaaatgaggtatataactgccaagtgcatatggagtgctacagaaggatgatttacacacattcagaatgccttgtgtgttgcaatatatat

SEQ ID NO: 190705 - DNA, 320 bp, Glycine max
agctctagatctaaatcttcttccaaaatattgtttagaaaatttacacaaaatctaagagcatatcacttaaaccatgttgtcttagaatcatgtttaatcatagtaattgtcacattatgttctaagtttgagttgaatttttatcttgcttattgaattctagataaatccgttaagacaaagttctcacgcggttagtcctttgaaactttgtgaaggggaaacaatagatatatcaggcgggtagtcctttgaaatctcttgttctaaggaaagggaagaatcaaaagaattctcatactgagtcatcttgaatt

SEQ ID NO: 190706 - DNA, 462 bp, Glycine max
  unsure (1)..(462): unsure at all n locations
ctcaagctntgatgcgccttctatangagaaggatgagtgacattggtgtgtggatttttcattcaaancntgaccgcgggcagtctttgtcttctagttgcagctggaggagagagatgaatctacaacaggacattgacatgagcgactcgttctttgctgcaagaatgatctttaacatattctttcaaaatctgtccttcacattcttaattcaaacattggccatttataaaggatataagagattgattcatagaatattctatttataatcaaatctctctttcacaatagaataaacggatcgcacttaataatataaaagatttgcatttaagtgtttgagttacattggacctgtgtataaaacgggcacaatgttgagaacactggttttcanagttggatgcgtgcttaactatagtgcatcggatgctacgataaatntatcataaaac

SEQ ID NO: 190707 - DNA, 272 bp, Glycine max
  unsure (1)..(272): unsure at all n locations
acacaacanaacctccttctctactttttggttcttcaatagaaaatccaccaatagattcacctgctagaggaaaaactgactcttcttctttcttgaacccttctaaagcctagttgacctcctctttagacaaaaaggagttcactttcgatgtctcaattgaggccccaatcatcatgatttgcatgggttccacatagttagcttgaatgtgaaaagagtntttccttgaacttcaatcttccttcatcaatagcctttaggacatg

SEQ ID NO: 190708 - DNA, 409 bp, Glycine max
  unsure (1)..(409): unsure at all n locations
taatcctataatgcaacgtggcggacaaaagtgggcagctaacttgaatggccattattgtcaatgcggaagggattcttgcgttcactatccatgttcacacattatngcagcttgtggttacgtgagcatgaactactaccaatatatagatgttgtttacaccaatgagcacatcttaaaagcatacttcgcatagtggtggcctcttgggaatgaagcggcaattcctccttctgatgaggcatggacactaatccctgacccaactacaacttgtgcgaaaggtcggccaaaatcaacaaggataaggaatgagatggattgtgtcgaaccatctgaccaccgacaaaaatgtagtagatgtggagcagaagggcacaatatgcgccgatgtcaaatgcaatct

SEQ ID NO: 190709 - DNA, 308 bp, Glycine max
  unsure (1)..(308): unsure at all n locations
agctagcccagctgaaagatttcttgtnactttattgccaagaagcatcataagtagaaagtatggcaattactctattgtaccatatctgacagtagtagacaccaataattaacaggttaatagaatatcactggtcttaatcctaacttaatctttatatttttctgtcaatgcatagcatgccaatgagacgcatatatctaatcaacacacatattacacataacacataagagcagaggcgaagaggcaagatgaagaggtggcagatagccagatgcaatagaagttgcgcttataacaca

SEQ ID NO: 190710 - DNA, 151 bp, Glycine max
tttgtaagttgccaggtgcatgcacttttatttgcagacatgtaggtgagaaatcttatattgacaatttacctttttatcattggagatgaaatagattttcttgctttgtgcggaatgtaccacaccactatttgcttggtaccaagag

SEQ ID NO: 190711 - DNA, 313 bp, Glycine max
  unsure (1)..(313): unsure at all n locations
agcttatagaacctaaatatacttctccttatataagaganaacagctaactgtccaattgaaaatggctacaacaaatagaataaaacagaaatagttacaattaatagttgcaacacaacctatgttaatgaaccaccagactggatgttcccctctatgtgactagacacttcaccatattacaaaagattggatgaccaaaacaaaatacaagaatactggactagacgaccaaaacaaaatacaagaatacttaggcatattattctttcttattcttttaatatatatcaagtcaaaccagttcaac

SEQ ID NO: 190712 - DNA, 389 bp, Glycine max
  unsure (1)..(389): unsure at all n locations
ttgtatcaatctctggaatttagaatgaaatgcatgaatttggatatgatgatggcatttgttgtgttggaagccacttgaccaagcttacctggttatcaatgatgatatcaattgcacccatccttgagctgaattgtaattgtcaaattgaaccttgagctttgaaatgtcatctccattcaccttgcttangttntaagagagcacattggtttaagtcaatttttccncaaatttgggggagtttgttgggtggttaattctaaaggtaagaaacaacaacacacacagcaaattaacaaaatgttttatgtgttcatacaaaagaggagttcacataagtgtgtgtgctgttagaacaaagtcaactgaaaggctagtgagtg

SEQ ID NO: 190713 - DNA, 269 bp, Glycine max
  unsure (1)..(269): unsure at all n locations
agctagctcactaacacttctctgtattcgcttnagtacctagcacatcaacacacttcactctttatattcacatgccaacacacaacgctgtgcggtcgagagagatgatgctttctgtctctctttgcatcccatttagttacaccccccgaaactcggggtgacattgcttcgaactacttgctctcctagaatctacaacaaggcatcgcgagatgtactatttacgttcatggtgcattttaagacaaaatcattcacctcaa

SEQ ID NO: 190714 - DNA, 231 bp, Glycine max
agaacattcaccatagactcttgcgataggtgtccatgtacatctttgattcatggcaagcgatgcaagccccataggagcttgtctgcctacgatcttcttcatcaatggagtccttcgcctctcggaagatgaatggcatcggcatggagaaaggaacagagagaggagacgcccctctaaggagaagatgagtctataagaagctcaccaccatatgaggtcatggat

SEQ ID NO: 190715 - DNA, 315 bp, Glycine max
  unsure (1)..(315): unsure at all n locations
gagcttccaatgcacaccacctttctttatgacttgagctccaaacgaancaggaccgtgcgcataaagacatatagtcaatgtttcttccatccagagaaatctgatgtcatcttatgacaatcgaaaaaataaaacaactgctgtctacatacacttgccaagccagttatcgtcattccaatatgacacagtctcacattcatatagagaattcttattgttatgctattatcatatatctacatacacacattctatgtattattacatccttttcaaatttaattctacagtcaacttatatataggatg

SEQ ID NO: 190716 - DNA, 440 bp, Glycine max
  unsure (1)..(440): unsure at all n locations
tgcttgtggngcttctatggaggctggancttttattctttttgagttcctttaaaggagaaaacccatcatggagatgcagcggaagacaaaggagaagaggtgagaggaggcgccatccactatggaataagccatggaagaacgagctctaccaccaagatgagtcttggataataagcttggagaggatgcttcaatggaggaaaagaaagagggagagaaagagagaggggggaacacgaaattgaagagaaaaaaaaggaagagaagttgaactttgagttgtgtgtcacaagactctcattcatcaaagttacaacaagtggtacacatgcttctatttatagactangtagcttccttgagaagaattcttgagaaaacttccttgagaagctagagcttagctacacacacccctctcataactaagctca

SEQ ID NO: 190717 - DNA, 196 bp, Glycine max
ctcacagaagtgcgcctttcgcccagactagatcgcgaccctcgtaattgatctacgagtgctctcgaggagttcttatggccttcacttgacacacggttgtggcttatgtgacctgcatgcattccgaaacctcaattaagaacccgaatgcgcccaagaacaccaggtggtcttagcttgtcccacagataca

SEQ ID NO: 190718 - DNA, 305 bp, Glycine max
  unsure (1)..(305): unsure at all n locations
agctntaaaatttgtattataacgttctgtatctgctggtaatcgattacgtaatcgattacacattagaaaatttgaattcaaatttctaaaggctgttataaatagtttcaaatcattttggtcactggtaatcgattacatcctctggtaatcgattaccagagagtaaatatcttgaaaaaaacattttaactcatatggccaaacctcttgctgtttcaacttggaattccattcctatgtctctagagattttcttgatgttgtatcttgaatttcttggattcttagcttgaattaaa

SEQ ID NO: 190719 - DNA, 462 bp, Glycine max
  unsure (1)..(462): unsure at all n locations
tccttggggccatttcctgcgagatctatatattgtgaagttatttntacaagataatgcttatcttaacataaaaatgacatgctaatccctctgattntagaacgaactcatgtaatctatttatgcacacgcgtatgtgtagaatatcctactatttatgccaacatacaaggacatccgacacattctaattgtcacacatacatatgcattttgaaaagaacatacacttttatgctcaaggcattgcgtcaaaatttacacttaattacatcctaaacatttgctattacaaactacctacacatatttgaaatatatatcatacaaacttttattgtttcactcacacttatgcatattggcaagctatttacattatgccacacttgcattcaaaagggaattccatgctatcatacattcatttangaagcgacctcaatattcagtcaccct

SEQ ID NO: 190720 - DNA, 322 bp, Glycine max
agctagatgtttagatgatcgcgctaagtcgaccctgtcgcacttatcgcgttcatcacttctgatgaacatgaacgatgaagacgctaagtgcttgttgagctaagcatcactaatattctggatactctgagtagttaggctctaagcctggccacctaagctaagcgccacttagattcagtttttagtcatgttaataaggctaagcttaccctgtgtgctaagcccctgctttgttgcataaaggtcaagctaagcgcgccctgctgcgctaagctcgaccctcttgcggttttgaagtttttgtattcagagctaa

SEQ ID NO: 190721 - DNA, 474 bp, Glycine max
  unsure (1)..(474): unsure at all n locations
ctcagcttgggtcgaaggacttacccggtggagatcggagaacgatgaagaaccaatgaataacgtctaagaacgggtgaaacctttgcgagaatcctcacggaaaacgttaccggaacgtttccgaagcgccctcgcttataatttctttaccggaacaattttttccagcaaaatcgaaagaagaaaaagtgccaaaagggctgaacccttttcttcttcacttccttccctatttatagcaaaataggggaggtggttgccgcccaactcgcccaggcgagccaggttgcttcctccagaagcaaccaccttctggaggaatattctggagggcccaagtgggcctgggtgctattttcacccccattntactaagtacacccctctctgcttgttttggtngatcttttttcgtaaaagtacggaaacttangagatttcgtacgatacttggtttctttctgtaatgta

SEQ ID NO: 190722 - DNA, 268 bp, Glycine max
  unsure (1)..(268): unsure at all n locations
aatttgatcatcctactangacgactgagaaaattggggccaatgaatatggtgagaaagatggagaaacccatgctgtgactgccattcctatacggccaagtttcccaccaaacccaacaatgtcattactcagtcaataacaaacctcctccttacccaccacccagttatccacaaaggccatccctaaatcaaccacaaagcctgtctaccgcacttccaatgacgaagaccacctttagcacataccaaataaacaccaaca

SEQ ID NO: 190723 - DNA, 361 bp, Glycine max
  unsure (1)..(361): unsure at all n locations
ttctatttgatctctttaaggaaatgtttacgacccattatgttagatgagtatgttatagcactaattagtcatgggctatgagaaaaagagttagaaactatgtattagagattattgtgattttctcgaaaccttaggtttgccaaaattggggattttgtctaatcccttgttctattatgtaaatgcttaggttctgtggaaaatacagtggttgaccttcctaacagcggtagaagtcagtgattgcgttatttaagtgagtagctaatatacttagcgatttccttaaagttcatttatggaggaacaagtatacttcccgacatatnatattttggtgagctttgatatatat

SEQ ID NO: 190724 - DNA, 372 bp, Glycine max
  unsure (1)..(372): unsure at all n locations
accagctgcctaacacacagcccatacaccttagagctatcgttcgtcttgttgnnncagacatgcacgattggcaaagccctatacttcccttctctggagtcaggatcctaacgttttatgtctcctctttgaacacctaatttttttccaaattttgctcaaaactattaaacaataaatatgcggacacacgtattaactttaattttattttaagtggaaaaatctcataatttttcttttataacggatcaataaataagtcaataatgggtgcttgaaacataagtttgctcgcataaatctagataataacgagattataatacaaccttgtcaaaaaaagaaaaatattacgagagaattgat

SEQ ID NO: 190725 - DNA, 254 bp, Glycine max
aatgtaaaaaggcatgaatattatgacatgtttgagagagtgttattaaaatttaaatttggctgccccatgaagaataccttgcacctatgtagcatggaaaatacctttcaacggtatgtatatatgtgaatatatatagcatggaaatgccttgcaaaatatgaatatatatagtatgaaaatgccttgcataatatgaatatatatagtatgaaaatgccttgcataatatgaatatatatagcatgaag

SEQ ID NO: 190726 - DNA, 438 bp, Glycine max
  unsure (1)..(438): unsure at all n locations
actcagcttctccccattttttattatagggggagaagtgaaagggtatttcttttttcctcctggtaattcaagaatcacttgaaattagtgaaaaaaattggttctgtgaagaaaatccgagccgaggcgcttccgtaacgttttcgtggggattttcgcgaagattttcagctgttcttcgacgttcttcgttcgttcttcatcgttcttcggtcttcaaccggtaagttctcgaaactgaacttttcaattcattctatgtacccttagtggtcctcatttgttttcattagcttttattttcatttcatttactttccgtaccccttntgacgtgctttagtcattggcttaagtcattttctcacctaaatcaaaaataaaataaatttccaccgatcatctgagttgtaatatccgntaatttcgtttaaa

SEQ ID NO: 190727 - DNA, 306 bp, Glycine max
agctagcaataagctcattcaatcacttagtgttcttttatgtttggatccattccttaaaagcccgaaggagttatgaaacaaagtattaatattttgcttaataccatatcaaagagaagaaggtatatgtgcccaaaagaaatgatgattgtttgcaactctagctcacaacgttaaagcccattgcacatctgtagaaactagctcccaatcaagttgccttggtgatatccaagaccaatgataaacctgaatttgactatattgtgatgtgaattttcatgtcatatccatgcatattga

SEQ ID NO: 190728 - DNA, 397 bp, Glycine max
  unsure (1)..(397): unsure at all n locations
actatcaaactcaagcttgcatgaatatcacctcttccaaaggacaatcaatctgtgggttctctatttaatttaattaaatcaaaatcaaaatcacaaaacaaggaaagaatgacatgaacattgtacaactttccattacattgcattatttcatatgaagtgcgcatttaccaaatttcacaacaaaggttgcatgcatctgcatccctaanaatcatgttaactacatagaattgctacatctaatgtccaatcttgtgaatttgggatgaccggccctctcgatgagtcgatctcttgctttctcataagggtggacccttgggtactagtacctatcttcttcagaggactacgcgttctcacctncctgatattggagggggccaactgt

SEQ ID NO: 190729 - DNA, 297 bp, Glycine max
gctagtgcctatgaagatgcctaggcttacattcatgaaaaaacccttcaataataaggatgtatgtaaatatgtagcatgaaatgccttgcaaaatcttgaataaaatgctgcgcaaaatatgaatatatatagcatgaaaatgccttgcataatatgaatatatatagcatgaagagccttacaaagtgttggatgggtagcgtaaaagagtttttcaaaatatgtgtatttgcgagtaagtagcaaaagaagccttccaaaaaatgtgtatatatataggatgtaacatgaaaa

SEQ ID NO: 190730 - DNA, 327 bp, Glycine max
  unsure (1)..(327): unsure at all n locations
tactcaagctggctggctggctattcaccctagtgtcgcctttcttaaagagtgtcatgctagaagatcgttacttggnttaaaccaaacgggactgcaaaaagcacacttgaccgatttttcgtctccgatgaatggatttcaaaatggactggatctacgcagtttattttgaatagaaattttttggaccactgtcctattttgcttagggctacaattgtggattggggacccacaccctntanggttatggactgctggctgaaagatatggcattccagaatctagtcaaggagacctggtcaaatacacaaccaaggggg

SEQ ID NO: 190731 - DNA, 315 bp, Glycine max
  unsure (1)..(315): unsure at all n locations
agctagtaagattagcaagatcatcttccttgtcttcttcgtgaaaaagatcgccgncaatatgaagagataacaatttagagagagatcgaagactcgcaaatggatttccactgaacttattcatagagagatcgagatatcttaatgatgaaagttttccaaatgatctaagaagagcaccaccaattgagttgttgaaaaaatctagcagctcaatatttttaaatgccccaatatgatctgtcagattgcctgaaagtcgtgaactctgaactgcaagtgttgtgagtccatgggaaatacaaagagcat

SEQ ID NO: 190732 - DNA, 418 bp, Glycine max
  unsure (1)..(418): unsure at all n locations
tggattccctaatttcaacttacctatttggaagtgacatcatggcagttaggtcccagctttccattgtggattcagtcacaaaacaaacttaaatatgttggactatctaacacggggaattttcgattctattcccacttggttctgggaagcacattctcaggttttgtatttaaacctctctcataatcatatccgtggtgagcttgtgactacaataaaaaaatccaatatctatccaaactgttgatctaagcacaaatcacttatgtggtaaattaccctatctttcaaatgatgtgtatgacttagacctttcaaccaatncattctctgaatccatgccaaaatntttatgtaacaatcaggacaagccaatgcaattagaatntctcaatcttgcatccaataatct

SEQ ID NO: 190733 - DNA, 307 bp, Glycine max
ctcgacccggatcttaagtcactgagctgcagcttattatagtaaagttcttcttgtatggctggctaaacacccttgttggggatttctaatgaacaacagatgtaattaatttcatatctaattgattttgtttcttgtgttcaaagcttctttcagagcctaaattttgtatgctcttggtctgatcaatcatttgtgtgcctagttaagtgattttaacattgggaaatgtattgttgccttataacttgaatgaagcagaattgaaacttactcttacaagagggatctgcggattaaattt

SEQ ID NO: 190734 - DNA, 408 bp, Glycine max
  unsure (1)..(408): unsure at all n locations
cttccccaccataaagctgtgaaataagtttctagacactgcttccctcatcaatcctgttaacctttcagcaaccaagacaaataataaaggggccaagggatccccttgtctcaatcctctccgaggcttaaattcatcagttgggcttccatttacaaggatggatattgaggctgatgtgaggcatcctttaacccaaccaatccacctttcatgaaacctcattcttctcatcatataaaataggaattgccaaggcacagagtcataagatttttcaaagtccactttaaacaccaagcaagatttctttagcctcctagcctcctcaacaacctcactagcaatcaagactccatgtagcagttgtctacccttaacannatgtgactgtctttcatcaat

SEQ ID NO: 190735 - DNA, 307 bp, Glycine max
agctagttgagccataagattatcttaactactaagccgaaacttaaacattgaattgcatcataagctgtgaattcaaagaaaataggcgcataagaacataaatatctacatgcctgaaatgattcacagcgatcatactgatcattatattatggtgaagtgcggaaaaataagagccaaatttctcttctataaatgttgtccctataatgataaggtcatcctcctgcacatgataaattgagaacattggctgttctgaagattaaaaatatcacattctccctatcttgagataaatatg

SEQ ID NO: 190736 - DNA, 403 bp, Glycine max
  unsure (1)..(403): unsure at all n locations
attaaatgttggcataactcatatctttaaaacctttagcggcacangttattcataatagttaataaaatgttgccaacacatattaatatttattcatatttgggtgacattctttaaatcttgcaaaaaacctttagcaacatttntactaaatgttatgaaaaaataatgttgctaaatgtctaatgtgtagtagtgtatgacccttatcacacgagacttgaattcaaatgtatcttatggtccttatcacaagagacttaaatgagcattgttatgctatacatttcataatatattgagatgaacagcgtcatgtcaaaaagtattgcttacatgtattatttaaattagactcacagacnactcaagagctatctccataaatctgatatatata

SEQ ID NO: 190737 - DNA, 306 bp, Glycine max
agctttaatactcttttcttcttaggtcaccaaatcaaaagatcaagcagttttgataccacttttgaaggaaaacacacacctcttcattatgcacaacgatgagaaaacaaatccatctctacatctacaatcatcatcacaagtttttttgacaaacttgccaatcctccttcatgacccccctctcctctctcacttaaggagatgaccatctctataggtagaatagttcttcttatctcatgaatatttatttttataaacctaagatcttaatctcaaaagagaaaacaaatcgctaat

SEQ ID NO: 190738 - DNA, 449 bp, Glycine max
  unsure (1)..(449): unsure at all n locations
tctctagaagttccctaggattcctcaagcttttcctctagttgctctgctaaggattccaagtgttagagagaaggagaagggattgaagccttaatttcactatcttcgtgtgaggaatatttctttcaccaaagacatcatttcacaaatcccaacggtgggcacgtgcaagaatgagttctacacttggtgctcaaatttcatggtgatttaacatttaacgagtccgggatcatagttttactgggacaggtttgggtgtatacgagaaaaagagagctccgtgtgaagaacatttctctcaccacaaacattatatcacaaattccaatggtggggatgtgagaaaatgtgttctgaatctggtgtccaaacttcgtgatgatccaacagttaacgagtatggaatcatatgtntactaggacaggtttgatgcaatcctacc

SEQ ID NO: 190739 - DNA, 298 bp, Glycine max
cttctacacgtataaagttcttttttttatagctttattcaacggataggtttcgatagacccgcataaaatacaagcttcacgagttgggcctctaatggctagaaaatgtttgtatatccacacctaataatgacctttattagtaatgttaaaaaaaaacataaaaaatatatgtgtaatttcacaatgttgtaagagtagttagagaaacttactttagaaaattatcaatggaaacaaagggcttgtaacttctttatcaaataatgaaaaaaatatcgtgctactaacaata

SEQ ID NO: 190740 - DNA, 473 bp, Glycine max
  unsure (1)..(473): unsure at all n locations
tgtaggattatggggcacccatcacatgtggtactaggtggttatcatgcgatggngcacaacaagttttccacattcacaaagcgcgcataaacccaccatcccctgttgcccacctncaactgagctcacgtactcccacgtagcccatatcctcgtttctctcaacaccgggtccccatcaatcctcccaagcttccccaacatccaagtaactcaacattcaaacaacacaaaccatcacagccaagaaaacagggcaaaggcagaaaactcttgccaaaacaccaaccaaaatcacagcttttctcacttaaagaccccagtaacaattccttctgtccaattcgttaaccgttggatcgactccaaaattntactggaaggctctagtacataagcctacattttgaccgttgtgatctactatagaacatccagaactcattctacattactcttntcacaaccag

SEQ ID NO: 190741 - DNA, 310 bp, Glycine max
agcaagcttgaaagagttgctgcttcaaatttagattatcttcccttaagatttgagtcaacagattcatcaaatctgaaagactcaactgttgtccgtattgaactgcctattgtcgtattgctagatagaacttgaagaatgattactccaaatgcatatatgtcacttttctcagtaaagtgtcctgaggtgatgtattcaagagctaagtatcccattgcagcactaactttttgagccgagaaaagaacatcatctgcaacaagcttatgtagtcctgcatccatgatcaatgggttaaattgag

SEQ ID NO: 190742 - DNA, 467 bp, Glycine max
  unsure (1)..(467): unsure at all n locations
tctagccaaatggacttaccttgacttaattcctttgatagtctctttgagtcatgtttccctttccttgttttgaagctcactgtaagccttaagtgaaaaaccatgatatcaccatatccttaaggaattttggagctttggaattgttttgggaataagtgtgggggtttttgtttcattggataacatgttttgttggccatgcttcatgatatattttgagccatacttgatgtacattgcatattggttaaatgttggacatgctgaatatgatgttgtttctcanaggctatagactaaaaaatatatatattattaaaaaaatcgaanaagaaaaagaaaaagcagtaaagttgagtgaataagatcttaaatgacaaaagaatgatgagactctnggtatgcacttattcctcattggctctctatcctttgggattcagcacttatttcttaatgac

SEQ ID NO: 190743 - DNA, 321 bp, Glycine max
  unsure (1)..(321): unsure at all n locations
gctaggtagctagatgactagtcagaaacaatttcttgactagcttcaattctgagaantaaacctggacatcttttagaaatgcttgctgaattaagacaggcagaaatccagtgtctccatttgggacaaaaacccattctttgcagcatataatccaaaaaagcccatgagactgagtcataggccttttcaaaatccaccttgaaaaccatagctggccttttgcttctacaagcttcctcaatcacctcattaagaactagtacgccatgcaggatgtgtctggtttttatgaaagttagctgcctctcatcaata

SEQ ID NO: 190744 - DNA, 458 bp, Glycine max
  unsure (1)..(458): unsure at all n locations
aacacgtcattggnttctttcattgtaaatttttatccatctaaaaattaaaatgaatattcttgatctgcgaagatcagctaaatttagttttaatagctttttaaaaacacctcattggtttctttcattttaattttttttatccatttgaaatttgaaatgattattcttgatctatgtaagatgagctaaatttagctggaatggcttttaacaaatacctcattgctttctttcattttaattnttattttattcttaccctgcgttagaaaccttaccacaagtgtctacttggtcattaatctcactcactttttactaccggtagctcaagtcaattttacaaatgtaattgtagtgaagccttatactacttcccttaaaaaactgagattattaatttgtgtctattattactttatgcatgttatgatattaaatagttacttatt

SEQ ID NO: 190745 - DNA, 269 bp, Glycine max
cattccactagaccagctccgatagtcttgagccagatagttgcagagagatgccaagcaagtgcccccaacacaagaaacaacagcgcgaagctcatctaaagaatggcagccccaattaactcctctacatgctgttccgatatgtgtttcccatgacttaataagaaactcctcagccatgccatcacgaatttgctgcagatgggattctatgctactctttcttgcagtataaaagtcatcagcgccgaaatctaaaggagcat

SEQ ID NO: 190746 - DNA, 391 bp, Glycine max
  unsure (1)..(391): unsure at all n locations
ttgaattgctcattccccaagttcccactcttctggatagtattattaatgtggagaatgcgccggggatcacggggtttcatgcgaatctttcctgaatcatcttgaagggtttgtgtctgattgtgccaaccacgtgcaaaaatgtaaactacagttagcttgacgggattttcaaaacactaaattgtgactttcaaattccacaactaagttcattcataatcaaggatcatgatgttaaaatnttcaattcacattttagaagaaagtaacagataattggatattaagaccatatgcacaagtgaatattcaaaaattgacttcagtagtgtatacttaagacaaacagcattttaccatggaagttgattgtgatgaaactgga

SEQ ID NO: 190747 - DNA, 218 bp, Glycine max
tgtgccaacaatctatggggcaaaacacaccatatgattattatgatggatggctcaaattctcacaaagagaaaatcatcactttcaattgagctctcaaaactatcatgacatgtagagaagaatcaaagatttcaagtcacaaaatgtcaagaacttttattttcaaaacaattacccatttcttgaacatatcctataatgcaaagaataacat

SEQ ID NO: 190748 - DNA, 392 bp, Glycine max
atttgcaccccctgtttactaaatacacccacccgcctttttttgctgattctttttccgtaacggtacggaactttacgaattccgtaacgatacttgttttctttccgtaatgttacagaaccttacggattacgtaatcatcccttttttggctttcagaatgttacggaacctcacggattttgcaacaatacttccttttgatttccggcatgttacgaatcttcacggagtgtgcaacaatgctttcttttgacttccggcacgtcacgaaacttcacgaatggcctaacgatgggtgcgaagtacctcgaagcggtcaagcaaagggtgcatgccatcaaacaatggtccccggacgaaaatatggtatgacacatatgacggga

SEQ ID NO: 190749 - DNA, 321 bp, Glycine max
  unsure (1)..(321): unsure at all n locations
agctagaagatgttttgattnttacatgcctaacttccttgagtgtccttgtataggnagntatctggtatgtttcatcttagtacatatgatattagtattgcatcattcatcatcatggttagtgtgaagaaaagtttcttcaagaggcaaaaactctctgttttaatcgattataggtctatcataatcgattacagcaagatgtttgaagcttaaagagttgagtctcgtatcattttaatcaattacagttgtttcaaaatcgattacgttgttgtttgagacaatgactaatttatttaagagtctctgctttat

SEQ ID NO: 190750 - DNA, 392 bp, Glycine max
  unsure (1)..(392): unsure at all n locations
tctacgcttaatntacgttcattttattgatcgtttatgaataattgatgtatgtgatgcttaatcacataatgaatgccttatgctaaatttcacttagtaatttaatttanggttggattaagtggttgaactgataaaggataaactctcgtaacctaggataagagacatgcttgtgaatcaaggggaagcaacatgttttaattctgatattttctaattcacatctattcactgtttaatttacaaaagcaaacaacaccccccccnccccccccaaatgggtactaatttctactatctggtatgaacattatggttatcattgctcgatgggaaacgacctaggatcactcnctagttactacattttaatggttatttgaatc

SEQ ID NO: 190751 - DNA, 299 bp, Glycine max
agctagcttctactctaattctacatgaagatgatactcatcccaagacttatgagtgccttttcaaaagatcccttataaaggaggataaagacctattcactacctctatttgcccatcagtttgtggatgacaagtgagagagaaaagaagtttaattcctagcttatcccataaggttttccagaagtggctaaagaacttagcatctctatctgacacaatggtcctaggcaaactatggagtctcacaacttccttgaaaaagaatcttgagatgtgggaagcatcatccacc

SEQ ID NO: 190752 - DNA, 379 bp, Glycine max
  unsure (1)..(379): unsure at all n locations
tctgtccctgagagactggntcccatattacaacatggagtgaagatggctgaanaccctagccctgcaacaagtcctatggaagtagacccggagatggattacatgatccgcatatttgcgagtagcattaagtatgacgcctctgttcctgatgctgagaaagatgttccaacatcttccaccccgaatgtttctgtgtctgatgttgataaagatgttccaacatcctccgctccaaatgctgaagccctcccttcacccagtgaagaggaatcaacagaagaagaggatcaagccacagaggagacccctgcaccacgggcaccagaacctgctccaagtgacctcattgatctagaagaggtagcatctgatg

SEQ ID NO: 190753 - DNA, 273 bp, Glycine max
tgttagacgccatctatcttgatgcacgatgatgaatttggagcacaaagaagaactagagaagtcttctatttgtttcgcaaacatatgtgcatctagacatatatgcaatgacatattattagttattataattgtcttttgtatacttagcaattcaggtcttataattagaatgttggcttattaatattcaattataatataagagaggccgacagaaggagtagtgcctatagtcttgagcttttcgccagtcagattccttcttgg

SEQ ID NO: 190754 - DNA, 466 bp, Glycine max
  unsure (1)..(466): unsure at all n locations
tataagaacanaattgcatcaatcatttccaaatatgcatgtttattangacgcatcaacaagaatcaagccaaggctattgtgcaagcaatcaatggggccaaacacaccaaatgattatgatgatggatggctcaaattctcacaaaggtaaactcatcactttcaaattgagctttcaaaactatcatgacatgtagagaagaatcaaggatttcaagtcacaaaatgtcaagaacttttattttcaaaacaattacccatttcttgaacatatcctataattcaaagaanaacatgcaaattcgtacgtgcacacaaaattgacccanaatattaaactgaaaatccgacgaaactaacaacattaacaaattaacacaactaacatattaacanaaccaacanaactagcanaaccaaagaacacttccncnnccnctcccatacttaaacaacacattgt

SEQ ID NO: 190755 - DNA, 242 bp, Glycine max
taaaaagaatacaacaaaccataaaaatttcatcacactcatagcaaatcaaaaataaatggcgtgaatggtttatcattacagttacaacaaatcaaacacaagtggtgcacaaatcaaacatgaatggtgcgaatggtttttctttgcaactactatccacaaagtgagatagaggttaaggattaaacaaatcaaagcacaaaagtaataatgttatttgtagtgtgagaaaataacaa

SEQ ID NO: 190756 - DNA, 467 bp, Glycine max
  unsure (1)..(467): unsure at all n locations
ttgtccctgaaaccctatatgtaaatttgacagcctcgtctctccctttcttttacccactaaaaactgcctaaccccccctgttgttactccataatttattttgccataactgcttaaggcaggtacatatagtcctaaatcactacagattcagttacgattaaccctttatgcctaactagggtttcgaaacatcacaacagagatagaccattgaacaatggattttcatcattaacatacaacagagacataccttcgatggaagcgcagacacgaactccacaaacgccaactcgacaatgtggttgcagtgacggaagcgcggcccagtttgcgacaaacacgaactcatgaagaaggagaaacacaccctgtgagtactctttccgagactcntttcctttctacttttcttcgacctgcgaaagtgagcacatggttaaacgacgaacgcctaatgt

SEQ ID NO: 190757 - DNA, 310 bp, Glycine max
  unsure (1)..(310): unsure at all n locations
agctagnttagtagagtagagctaagtttgtttcctctattctatgatgggatgagagttaatcctaaattctttattgaggaacttgtatttgtctatgctatagatgcttatacctaggagtgagaaggagttgttattgggccacctgcttttgtccacatactagatatccagtccagtccctagtgtgaaggagtgtgttgagatctcacatcaactagaggtatgacttggacaatcctcactttacaggctagtttttgttgggttgaattacccaaattctaataatagtataatataattt

SEQ ID NO: 190758 - DNA, 461 bp, Glycine max
  unsure (1)..(461): unsure at all n locations
tatctcgccattgcacctagcgagaactgttcttttctcataaaagctgcacctcctgcgccatagctagctagcctgcacctcaactatctcgccattggcactggtgagacagtgtccaggtcaacccgtgtctcgctgctacgactagcggcatccatgtgacacctgtctcgccattcctcctggcggcatcatccacgtgtcgccacaccactcataccatcatgcatgctggcgggataggttggggttacgtaaaaaaagagactcagcttgaaaatagttttgaaacagacttattntaaaaattagtttataaaactaatccaattaggtcaaaatgccgaatagtgattttatttacggaatatagtgtcattaaaatcgtcattaaaatcgtcattgtttgtaataanatctgtaagaattataatcacaatnggacgaaaggacctact

SEQ ID NO: 190759 - DNA, 306 bp, Glycine max
  unsure (1)..(306): unsure at all n locations
agctagtcaagcagagaggcttgatactntgtttctggtactgaagatcaaagaagaaagtccagctgagctatatgtagataacaaatatgcaatcaagttagccaaacatccaattgcacatggaagatcatagcacattgaaaccaaatttcatttcataagagaccaagttgcgaaagggaaattcaagttgaagttctgcagatcaaaagatcagcttgccgatatatttaccaagtccttgaaatctgaaaccttcaaaaaacagagaagcatgctgaatattgttgatagcaagaaact

SEQ ID NO: 190760 - DNA, 467 bp, Glycine max
  unsure (1)..(467): unsure at all n locations
tatgccatactcagttgttcttctttattagacaataagcaagatgcattntgatctaatggctcaccaattctaatcttgtatagatttcccttcctctttgcagtaaaagggaaggagttatcaccgctctggatgatgcattcaccttgggagacaatagcattggccactttaggatgctccactcacgagacagtctgagttgtggccctccatttggcagccttagcctctaaggacgtgatcttgttcaaagcctccttatgcctttgcccattcttctccaagataggcaaactccattgaaggaaggcctttgcagcattagttgagttttgtaccccgactgactaaataaggttttcgtaaaaatgggacacanagtcagtaggagtcctctactccggtctgtagcccatgctccatattgaatntgtatctcaagaattgaaacatggtcgagt

SEQ ID NO: 190761 - DNA, 308 bp, Glycine max
agcttcttaaagaagcttctcaaagaagcgagcttatttattagaagggagagtgtagctaagctctagcttctcaaagatacttctcaaagaagtttctcaagaaaaattctcaaagaaacttctcaaagatgtttctcaaagaagctacctatgttataaataatatcatgtgtaacacttgttgtaactttgatgaatgaaagtcttgtgagacacaactcaatagttaacttctctccctcttttaccccttcaattatgtgctcccccctttctctttctctttagatttcttttcctccatg

SEQ ID NO: 190762 - DNA, 307 bp, Glycine max
  unsure (1)..(307): unsure at all n locations
tctagttggtattgttttggtccttttttttgtatctcattactcattagcctttagcccagcactagcgactaccttgtgctctgttcagatctcacggagttctcacatttagctctgattggtcatgagtgatctgacttaaaaataaaacacctnctcttaaataaatcaagttgaaaatagtcaaaagaatctctaattttcaactggtgcgcgcaagattaggttatgggaaaagctaaggataacaaaaagagagtgagaaggagtatgtagccgcatatataagacgagagttgaagag

SEQ ID NO: 190763 - DNA, 213 bp, Glycine max
cgcttcttgggaagatttgactgacatccatttattctgttcctaagctgtacatcctcaatactaagatttaaggcactttcaatggccttgggaaaagggggagcctgtcatcgcaaccatgtgcttgaatgtacatctggtttaagctgggaaccgcttgtcatgtggcgcgcattacgtcatgttactaataccaagcatggccaacat

SEQ ID NO: 190764 - DNA, 385 bp, Glycine max
accgctcatctatggagaagaaggaaagtcattccttctctggacatgaaagagatgtagttcttccgataagtcaggaaaagctcatatctatttgtactgaaacaaagggtaaaaataatgcacatcaatcatggagtgaacccactgccacaagaatgccaatgccccatgacggtccagctaaatggaattcatcttgcctatcatcaaggaccctagacgatgatgcatcttcttctgccttagaacacaaaactcaaacacaagaacatatgttaagcagtgaaagatattcatctggatctacaacaagcgatatgcaagtaaaaagggtattgtcatctatgagtgctgtgaatggaactaaagactttgttgctat

SEQ ID NO: 190765 - DNA, 305 bp, Glycine max
agcttcagcctcatatacctctagttggacttagctcaatttagacaaccctgctaggtttaaactaacttaaactaagcttcatcctcagatccttcttgctgaactaggctcagcttaaatagctgacaaaagtttagactaattcaacctatgctttgtcctcagatccctcttgttggactagacttagaccagacaacattattgtaacaacatacttaaaaccaaaacttaatccgcagatccctcttgtaagactaagtttcaattttgctttattcaagttctaaggcaacaataca

SEQ ID NO: 190766 - DNA, 393 bp, Glycine max
  unsure (1)..(393): unsure at all n locations
tcanacttgcaacacaggagttgagcatgtaaanaagattcttcttcaaactcttagaggtgactctgagcgtttgtttatggaggagtccgagttaatttctgattatttttctcgagtattggccgtagtcaatccacttataagaaatggtgaagatgttgatgaggtgaaggtcatggaaaaaatacttcgaactttaaatccaagttttgacttcattgtaccaacattgaagaaaacaaggatttaaagaccatgactattgagcaactcatgggttccttacgagcgtacgaagaaaaacaaaagagaataattaaacaaaaggaggctacggagcaactactacaactcaacgtataggaagcaaactatgcatattacaagagc

SEQ ID NO: 190767 - DNA, 389 bp, Glycine max
  unsure (1)..(389): unsure at all n locations
agcttagccgctttgcanaagcctcgtgaatgtgtcccaattgatttactttgaanaacaaaagccttgttctagtttttcagatttgggtccatctctcaagttttctacaaattttacaactgcacatacgtactcttgtgctcataaaaagtataaaaatatttaacagttacaattcaggaacttcagaatatttgtaaaatggataccacataacaaatccttccttcaaaaacaaagttattatgataacaaatgcactattgcttcgatgtctatagtctgaaacgattttggaataatctatctaaattttatgattgacttcctccagcttattctctcaacaacctaatataccttctaaaagaaattacttgattttc

SEQ ID NO: 190768 - DNA, 364 bp, Glycine max
  unsure (1)..(364): unsure at all n locations
acactataaaactaagcttcnacacaatcatnctcatcccaattagttacagacttgtttatactgccacccaacatctttttcttccgctaaattgcatgtctcattatctttattgtcctcgtcactgttaacttatcggtgtaccatactattatatacataattataattatgcacgttatcgatgcgcctaaacattttaaaatgttttaatcaagagtaattttgtcatctacatacatgcgtactgtatcaaaaattatttttcaatgactattctaaaacaattgttatattttntaataacatggtcatgaaatgctgaatattattataagaataagcgtaaaaacaccaaaat

SEQ ID NO: 190769 - DNA, 325 bp, Glycine max
ctgcaagctttcatcggtgggatttcatgggatacgacggaggacaagctcaaggagcatttcggtaactacggcgacgctttgagcacttccatcatgcgggagaagaacactgggaagccaaggggcttcggtttcgtcgtttttgcagatcctaacattctagatagggttttggaagacaaacatgtcatagatggcagaaccggaacgcttctatcattttttttgtcatttctttacttcatgttccgattgaaaatattgtattgtactttttagcgtgattggtgctggttctgaattggggataatcttgaaaccc

SEQ ID NO: 190770 - DNA, 449 bp, Glycine max
  unsure (1)..(449): unsure at all n locations
cgtagaatggttggacatggtatatgttaggggttggccatctgttcggggataaaggagacatcccacattatttccatgatacacatgcaacaataatgattaggaaattttatgcaaaactggtcatgcatgcacctatgtggacactcaagcatcaaacttttatggtcaagtgatgctagggatcatgattcattttctctactttagtcaacccggtgtttccaaaatatgttcttttatcaatttgtgcattcatccgagtctattttgggtgttcgaaaaaactttcacagcatttacccttcaaatgtatacacatttnttttcaaaaactggttatgatcagtgaattctttcaaagaaaagctggaaattatctcttttcacaagcatgtcgttttaagctagacaactttttatctttattattttcctttntttct

SEQ ID NO: 190771 - DNA, 452 bp, Glycine max
agcttggagaggatgcttcaatggaggaaaagatagagggagagaaagagagaggggggagcacgaaattgaaggaagaaaaagggagagaagttgaactttgagttgtgtctcacaagactctcattcatcaaagttaccacaagtgttacatatgcttctatttatagactaggtagcttccttgagaagctttcttgagaaaacttccttgagaagcttctttgagaaaacttccttgagaagctagagcttagctacacacacccctctcataattaagctcacctccttgagaagcttccttaagaagattcctaaagaagctagagcttagctacacatacctctctaatagctaagctcgcctccttgagatgagaagctagaacttaactacacaccccctataatagctaagctcacccccatgacaaaaaaacatgaaaata

SEQ ID NO: 190772 - DNA, 392 bp, Glycine max
  unsure (1)..(392): unsure at all n locations
aattccttcatctgacttatcatcaaattttcctaattnttcttttccattgtttaatacaaagcatttgcaaccaaaaacatgaaggtgtgaaatgttaggttttttttatcattaaacagttcatatagagttttctttaaaatgggtcttattaaagccctattcatgatatagcatgcagtattaacggcttcagcccaaaaatatnttggaagaggagtgtcatttaataaggttctagcaatatcttccaaagatctattnnttcctttcaacaactccatttgttgaggggttctaggtgcaaaaaagttatgttcaatgccatgcttatcacanaataattcaaattttttattttcaaattcacccccatgatcgctcctaat

SEQ ID NO: 190773 - DNA, 393 bp, Glycine max
  unsure (1)..(393): unsure at all n locations
ttacatggggacttagagcagctgacgtaattgcattaatctgttcattcttttctaatcagattgccgaattttcaaatttgataaaatattcaggatttcttgaaatgcatttgccatggaggtgaatcagatagtgagttttctcatagaatatactttgcttaaatgaactgtcgagagagaaacaatcatgaggcatttaccgaactgtatgtacattgtacaatcacaatatatattaacctaataataaatacatggatcattacttncctaattatatgaacttactaacttatataccatgaatttggacctacataattatatgtagntatgtacaaagaacctggacacaaatgtaaattataaggtcaattacatatccaa

SEQ ID NO: 190774 - DNA, 296 bp, Glycine max
tgagatgtcttctatctggtcattcgagtagacacaagtcttgacaatgtcatgtatatggatcttcgttccttatagaacgttaataagatttcaatatgtgtggttttgtcgagcatgattgtgttcaaggtactatgtagggcaactatattatcacacaggtcaattcagcatctgcacaatgtgaatctttgaacaactatcttaaccagactagcttatatgtaggtagtgagctgtccaagtgagccaatttggctcatccaggttagctaaaatgtgagttgaagcca

SEQ ID NO: 190775 - DNA, 480 bp, Glycine max
  unsure (1)..(480): unsure at all n locations
tggctgactcggatcttgagctaagagccgcggctgcagctatccaatggtcggattttactttttcccncgcgccgaccatgtaggattctaccgcgacgctattatcgatgggctcctgccaccttaatgactactgaggccgcccaagagccttgggaacgagatacctgctctatgctccctgttacatctggagatggcggaccaccatgtctaccctggccgaacagagaccgccatatcaccggtctcacccacacccgtaatagaagctgtgacctgtgaggaagatatggagatgtatgaggcgctcgaagagaggtccagagcagccaaaggccttgacaacttctcattctcagatttggtgcgattatgtcttgcgcccacatcggattcctctcaaggcaagcaccaacctcgtaagtacagggacgacaagtccaaaggcattacggacagctgcgtatattcacg

SEQ ID NO: 190776 - DNA, 398 bp, Glycine max
caatcaatgaaacttccatctttaatggagaggagtaccaccaccggcaacctgaatgcaaatttatattgaagcgatacacttaaacatttgggaagccatataaacatggacttatatagccaccacagtcgaaagaaccacaatagatgggagcacaacaagtgaacgcatagcaatagagaaacctagagatagatggtctgaagaggatagaagactagtacaatacattttaaaagccaaaaacataattacatctgccctgtgaatggatgaatatttcagggcttcaaattgtcagagtgctaacgaaatgtgggacactctacaattaacacatgaatgtacaacagatgttaaaagatccacgataaacacattaacctatgaatatg

SEQ ID NO: 190777 - DNA, 255 bp, Glycine max
gactacggcgacgctatgagcactctgatatgccgaagataaaaactgtgatgcctaggggcttctgtatagaagcttgtgcatatcctatcattctatatagggacttggagcatagttatgtggtaaagggtacactggagacgcttggctagattacctagacacctcttttccagatgccacgcttgccacaatgagacttctattgtccttagctgttgtcactagatgtgatctcaggcaattatatat

SEQ ID NO: 190778 - DNA, 323 bp, Glycine max
  unsure (1)..(323): unsure at all n locations
gtattattggtataattggcctgttccattatgcttttaatgtctatagaggctacttcctcgttgacatcttttgtcttgaatggaattgccatgacaggtttattgttactgtctttgatattcggcagttgatattgtgttgcgggaggcaattccgattggattaactcaccatccttcacttgccaatntgttatgacatattgtcgttgaatcacctatgatgtcttgattccaagggtaatctatatcctttctgatggcataagcatgaaaccaatcaaagaaaaggacattcattttgactcttttgacaaatt

SEQ ID NO: 190779 - DNA, 304 bp, Glycine max
ctgcaatttcttgggagaattatattttaaacttcttcgcagacgcataaactactaatgtaactcgtgctctggtaggactggggatcctttttcaagaagataactggccagtgcttgtaccatcgcagaccgtcatgaataccctagacgacctgttgcgatacaacttcttttgcaagctggaattcatttcagaacctcttggacaaccttaatatattagctacattgaatgaaatatactactatagccggcctatttttgatgagctagcaaggtaaccaatcacccccagtgaag

SEQ ID NO: 190780 - DNA, 484 bp, Glycine max
  unsure (1)..(484): unsure at all n locations
ngtagcctagacgcggccaagataccagcttgcatgaaccctggaatggccccccattttctgctatgaacagatatacaatgacatccttactaaccccacatgagcgacgaagccggctactgggtgagacgctgagtgaacattatggagcaccattgcttatcacagatgacttataactgggaccccatcatgaacaagatcctgcagagcatgtgccatataaagggcgatgtaccatcaatcaatggggacatgtaggtctatctcttatgatgtatcgcaaaccaagtgggatatatatgcgcctctcgacatcgaccacgcgtaattgattgactgagctgcctggttacaggaacatccagacaccggaaccagttgcttcgatagggtgatatccatttgcctccgatgatgctgcagaaagcactatttcttctacattaacagttatagtaccctgtgagttgaccgagcg

SEQ ID NO: 190781 - DNA, 404 bp, Glycine max
  unsure (1)..(404): unsure at all n locations
agcttgtaggaggaagaaaccagcaatgattttcaaggtggactntgagaaggcttatgacacagtctcatggtctttcctggactatatgctgtatagattgggcttttgtcataaatggagaaagtggatctcagcttgtcttcactcagcaaccatctctatccttattaatggcagccctacaaaggagtttaccccatctagaggcttgaggcaaggggatcccctagcccctctactctttaacatagttggggaaggcatctcaggcctaatgagggaagcagttaggaagaatctatatagcagctacagggttggtatgaattatgagcccacaaatattctgcagtatgcagatgatactgtttttgtgggtgaggcttcttgngaaaatgtct

SEQ ID NO: 190782 - DNA, 437 bp, Glycine max
  unsure (1)..(437): unsure at all n locations
tgtacttaactntgcttgcatattctgtgtaactctggcctatagtctcaaccatcaaatcctcttccttctctgccttctgcttataatacaacaagcatactgccacaataaatagcagactcagaggtgctcgaagcgcaatgcagtatgttacaaacaaaagcattgttgatgaatatattggatgacggacccaacgataaggtccaaattgcactacagaagttggctccaccacattttctgaatacttagcgagatacaatgtagcattatactgcattagcagagttgtaatgattaaagcccagattccaagattgctccacccacccggtatgaggtgaagctcangcccttcaaatgctgcaagccaatggccaaccatgactcctgtgctgaacaataggcgagaccacattggcaagttcacg

SEQ ID NO: 190783 - DNA, 286 bp, Glycine max
  unsure (1)..(286): unsure at all n locations
agcttaagctcctttttctgcacttggctcttataanncgaagagcatccctgtggaacctttacccgacgaagacactgacaaaaacttatcttcttctttgtggacaaagtatggtaagctgggggcaacgaaatcttcttcccatcaaaccttggatgcaaatgtgatcgtatgcccatatcagctagaacttgacgggtattcaagccatccttcgtctcgccttgaatgttaaggagccgcccaatcacactgtcgcacactattttcttcacatgcataa

SEQ ID NO: 190784 - DNA, 191 bp, Glycine max
taatgttcatattattacacatatattccctacaacatacacattagtgactctcttgcgtccttaacaaccactggcgtttgaccactagtggtggccattggagaggaatttcgccaggggcatttttgtgatacttcatccgaaaacccagacacccactccccacacgaaaattcatctaagaccat

SEQ ID NO: 190785 - DNA, 524 bp, Glycine max
  unsure (1)..(524): unsure at all n locations
ccctgcaccgcacnngaccataangngacacgcgcaccactataccaggggccnnnnnnntagtgactcgagacccannacggaanaagacannagcnangaaagaaaagagaacagaagttctgtcatgacaagagacgaaacacccggacaacgcaaagcaactaccggcgccggcaccgggctctcaacgtccacccaagaacaaaaagagcaagaaccagggaacatcatacgagaacgacaacaaaaacccaaaggcgaaacatttctgcacaccccaccacaagatgtgatctcttacagcccgaacaataatgcaccagctagcacacgccgcaacaccgtgagagctggagaagaaacagaaaaactacaccgcagtcaagcacggtaaaaagcaaccacggggaccaacaaatgcgaaaaacaaaagaccttgaagagggcactgcagaaaagagacaacaagattcctgggggctgaccttggcataacacaacacacgaggcgcacggtcgcc

SEQ ID NO: 190786 - DNA, 446 bp, Glycine max
  unsure (1)..(446): unsure at all n locations
ggaagatggtgctntaatggaggaaaagaaagagggagagtattattagatgggggagcacaaaattgaaggaaaaaaagggagagaagttgaactttgagttatgtctcacaagactctcattcatcaaagttacaacaagtgttacacatgcttctatttatagactaggtagcttccttgagaagctttcttgagaaaacttcctagagaaacttctttgagaaaacttccttgaaaagctagagcttagctacacacacccatctaaaaactaagctcacctccttgagaagctagagcttagctacacacccctataatagctaagcttacccccatgacaaaatacatgaaaatacaaaaaaaaatcctgctacaaagactactcaaaatgccctgaaatacaaggctaaaaccctatactactagaatggccaaaatac

SEQ ID NO: 190787 - DNA, 401 bp, Glycine max
agcttataagaacaaaattgcctcaatcatattcaaatatgcatgtgaattaggaagcatcaacaagaatcaagccaaggttattgtgcacgcaatcaatggggcaaaacacaccaaatgattatgatgatggatggctcatattctcacaaaggtaaactcatcactttcaaattgagctttcaaaactatcatgacatgtagaggagaatcaaggatttcaagtcacaaaatgtcaaaaacttttattttccaaaaaattacccatttcttgaacatatcctatgattcatagaataacatgcaaagtcgtacatgcacacagaattgacccataatattatactaagaatccgacaaaactatatcacattaacatattaacacaactatcatattaa

SEQ ID NO: 190788 - DNA, 513 bp, Glycine max
  unsure (1)..(513): unsure at all n locations
aggcacncnnnnnnnnatagtagggcttgcacnntcttcgaatnaganaaaanccaagcgaggangaagggtngaattgtgatactacccgcaaaacatgnatacctcnaacgggcaccaccagcggatgctgcggngacaacgactgcatcacgtcgtcaactggattggtctagcccgagggagaacatatacacaatgtagcctgggctctggaacggtgtcaaagtattcctgtaagatgcgatgccatgcctcctgctgctgttcccgctagagattgagcattgataactgcaatgaaagctgtgttccttgacgcaacaaacttgatgtgttgggatcacattgatacgaatatgagagaaaaatgtccaacccttgtgggtcaataaaatgcatgacattatgtcatgggagcctgggagagtctggtggattgccttctgacaagagtcaatgactgcttataagttgaaatgcttgtcacatggcaatgtagtgactatttct

SEQ ID NO: 190789 - DNA, 440 bp, Glycine max
  unsure (1)..(440): unsure at all n locations
agcttcatctcagagagactgatccaacaattatcaaatggagtntaatataataacgcaacaacctataataacacaaactaatcaagtggaaaagtgcgttttaatggcataagataacaaactaaccgacaaagcaaaaagcagttaaaaattttaagcaagctttagctctaataatcttctttttagntggactatatgaagtcgatcgcaaactnttctcataatctttgccattagtacggcatacatacaagttatacataagctatatgctgtaaaccccacttgtaatgtcggcatgcaaattatttaactccggaataaaccatttcattagtactaattacttaagcacctaacatttggtatagatcacattgatattctccttagtattggttgaactaagtagaattattataagacacaaaatc

SEQ ID NO: 190790 - DNA, 410 bp, Glycine max
cttcgccgtgagtagtatgagatacttaaatcaagagtgacttgtttacactatgtaacggagtaggaggtaaaacttgcaatgatgtcaactaatgttgctatggcactgacatgccaatttccattttcatcctatagacataaaagcatagaatctgcatgataagggaagataaatgcttgaagtaaaaggagaatcacattattatcaatctattaccaacaagccactgtgtatgatcaagtcacaaaggatgaaacctttgtgtgcctttactatccggataacccttagggtggaaagaaactcttgaccataagttccatctgacaggccttttatccatgtccggatcacttctagactgggatctttcatctctatctcaaccatgcccacaaaccaga

SEQ ID NO: 190791 - DNA, 434 bp, Glycine max
  unsure (1)..(434): unsure at all n locations
gctntgaccatttgaattgctcaagcgctttctttgttcaatatcgagcgtctcgatctattatgcgcttgaatcggacctccgagtgaaaagttaagaccatttgaattgctcaagagcttccattaaccaatttcgagggtctcgatattttatgttcctaaatcagacctccgagttaaaagttatgtccatttgaatatctcgagagcttccgttgtttaatttcgagcgtctctatatgtgatgctcctgaatcggacctccgagtgaaaagttatgaccatttgaatatctcgagagcatccgttgttcaatttcgagcgtttctatatgtgatgcgcttgaatcggacctccgagttaaaagtaatgaccatttgattttcttaagagcttccgctgttcacattcgggcgtcttgatattttatgc

SEQ ID NO: 190792 - DNA, 441 bp, Glycine max
  unsure (1)..(441): unsure at all n locations
ggtctaaactnttcactcggagctctgattatgcacatcacatatatagacgctcaagattgaacaacggaagctctcgatatattcaaatggtcataactnttaacttggaggtccgattcacgcacataatatatcgagacgcccgatattcaacaacggaagcacttgagaaaatcaaatggtcattacttttaactcggaggtccgattcangcgcatcacatatagagacgctcgaaattgaacaacggaagctctcgagatattcaaatggtcataactcttaactcggaggtccgattcatgagcataatatatcgagacgctccgaattgaaacacggaagctcttgagatattcaaatggtcataacttttcactcggaggtctgattcaagtgcataacacatcgagacgcttgaaattaacaacagaagc

SEQ ID NO: 190793 - DNA, 337 bp, Glycine max
  unsure (1)..(337): unsure at all n locations
taatgccataaacctatggaattaaataaaacttaatggctgagtgtaactgaaattgtggcaaccaaaaggcacccacaacaggcaacaagtcagccaccatttggtatcacaccaggctgatgcctaggttgccaattgggcccttaatacaacttgaactagacctaactaaagcccttttagtngagtaacccaaaacatatttatggtcaaccaactttacgaggattgtgccattatttagacaaactaaatactttataattgaaacaaagcggagagatttagacctcctccattgcgccatgatacaactcacacacttggacttttc

SEQ ID NO: 190794 - DNA, 285 bp, Glycine max
agactagatcgtggatattcgcgttctgctctgttctaggatcaaggcttctatatatggagaaccagcttgtcacacctgcatatgtatgagtctcgctagtttcttcatgttttaaaatgagttatgtatatggttatgtatctacaactgaaagtgatggcaaaccttctcttgtttgagattgtcttgtgtctaaaagcaatcaactaacagattatatctaactcacaatgaatagtgttttcttctctaagccttcataccacattgtatcaagtacat

SEQ ID NO: 190795 - DNA, 421 bp, Glycine max
  unsure (1)..(421): unsure at all n locations
ctgcaagcattgcaagcatcgnattngtgctctaccatatcttaatatgcatgagaattatgaagcgtcggagacaaactgacattttatatatgactccactttaatcatttttttattatctatctagacacttaacatcaatgtctggtttggaatctcttttgtctatatcaaacaatctcgatcttttttcattcctcatatactttcattcctattcatgcatatcagccaaacacaccttaaggagaaccagctcttcaacgctcctactcagtgagaggtatatcctatcctttctttattctccatcatccggcgattaagtgagaagcaattctacattgggcttttgtcctcaaattgtggcacaaaaagtatgatagttggtatacatgcacttcgatgtctcacactc

SEQ ID NO: 190796 - DNA, 416 bp, Glycine max
  unsure (1)..(416): unsure at all n locations
acctctncatttgtatgaataggagnaccataatatcatagcaaacacaacacaccgagaggcactggaactaagaaatttcacagtacatatgcaaaaattgaaaaacaagtggaagaagaacgcaccgagatagatctcctagaaagatccgctactgattttctgaaaaatcagaatgtccttctttacctcctccgcgacgaagtccaattggccaccacaaagacggtgctctcgtcggcggcctcggtggtcaccaccgcaatggtggtccactctggggcgagcaacctccttccttcgaagctccggtcctacatcaccaatggcatccacaacatgttcttgtgcttctcctcggagataaccctaatattgatgagttcgacggtctcgtcaacaactaaatctac

SEQ ID NO: 190797 - DNA, 175 bp, Glycine max
agcttctagccaaatggacttaccttgaattatattcctttgatagcccttttgagccttgtttccctttccttgttttgaagctcactacaagccttaagtgaaaaaccatgatattaccatatccttaaggaattttggagctttggaattgttttgggaataagtgtggggg

SEQ ID NO: 190798 - DNA, 457 bp, Glycine max
  unsure (1)..(457): unsure at all n locations
gaatntggatttgtcatagatagtacctacaaattatttagatatagattgtctttacttgacattgttggtgtgacaccaactggataacattttcaactgcatttgcctatttggagggagaacatataagcaatgttgtttgggctctggaacggtttcaaagtatttttctaagatgtgatgcaatccctcaagttactgttaccgatagagattcagcattgataaatgcaatgaaaactgttttccttgaggcaacaaacttgttgtgttggtttcacattgatacgaatatgaaggaaaaatgtaaaacccttgtgggtcaaaaaaatgcatgagattatgtcatggaagcatgggagagtctggtggattgtccttctgagcaagagttcaatgactggcttatgaagtttgaaattgcttgctcaccatggtcaatgtttgttgacta

SEQ ID NO: 190799 - DNA, 183 bp, Glycine max
cgcttgcattcgacagaggagcttattcaatgtagttattaacgctacgaaaattcaggctctaaagaaggagctgaatgctttggaggctggtatctctgacagaattctgaatcaatttgaagcggagctcaagaagtctcttcaggagcaatcgtggcacgctcgctatgcctatgaatg

SEQ ID NO: 190800 - DNA, 415 bp, Glycine max
  unsure (1)..(415): unsure at all n locations
agctcgcactaagcacttagacccctgactagttggctgtttatttagctaagtgcacatcactacgttaagcccaacatcttcattggaagtaaacttcaagcagtgggcttagcagacatgatccgctaagcaccacttcttctctggaaaagcttattatagcagtgctaagcgcgttgtcctgagctaagccccagatccattctggaattgaactttcatacttgggcttagtgcggcaggatgcgctaagcgccaatccttcattgtgntttgaattcttggaagtgtgcttagtgcacctgttgcactaagcctaaactactctctgcaagtcgaagcttgattgcgcgtaagcctcacctctatgctaagcgcctattcagaaatttcgcgtcgcataagcgctata

SEQ ID NO: 190801 - DNA, 281 bp, Glycine max
cgcttgcctatcatcctgattgactctatatctttatagctgtacccagcacactcgtttgaccactgtgagaagtaaattctcatgctgagaacagtcaacacatctaagctggaacatctataaaactataagcatttaagcatgttcaggctatagattcccaattcagggatgtcacctaacatgagtgaactgaaattacaggagcgtgctgcttatataattctgaagctgttacagggggaagcatagctcacacgagaatgcttttccctgtt

SEQ ID NO: 190802 - DNA, 448 bp, Glycine max
  unsure (1)..(448): unsure at all n locations
agtagggttaaagtctcacgattgtcatgtgttgatgtaacttcttgtcatacaaagtcaggttagccataactcgcctgtgctatntcttccatgccatatatagcanagtcgttgatcctgtcaagtatgatgagctggaaaatgaggccgaaattatactatgccagttggagatgtatttttcccctgctttctttgacatcatgattcacttgattatggatctggtcagagaaatcaaatgttgtgggcctggttatttgtggtggatgtacccggttgagcaatacatgaagatcttaaaagggtatacaaagaatccttatcatctagaagcatctattgttgagaggtacattgcaaaagaagtgattgaatcttgttcagaattcattgagaaggctaaacctattggccttcctgagtctcgcgatgatgacagaac

SEQ ID NO: 190803 - DNA, 300 bp, Glycine max
  unsure (1)..(300): unsure at all n locations
agcttgtagggttcaccccanattctcgttgtcatatgctaaacttgatcccatatctacttgataattcaatggtagccataaccctagccaaggttcatcaacctccatttctccgagaatacgactcgaacgcaatgtgtgcttgttacggagaagccccggggcgttccattgagcattgtacggctctgaagtgtagggtgcgaggtctaattgatgctggctgaaatttgaggagaatcgtgtgtaaatcctgacattgacaagagatgccacacatggtgcaattttgaaagc

SEQ ID NO: 190804 - DNA, 468 bp, Glycine max
  unsure (1)..(468): unsure at all n locations
gctttaagaaaaaccttatttatcactcactagacgacattcttttgtgttaaactaaaactaattttctatcactagatgatatagtttatcttgttatcttgtgaaaaactcttctttgtgaaaaaagcttatatctttggttaacacacttttcgacccctttctaatatgatctttgatatttcaaaagtgtactagtcttcttcgtatattggcttatgactcacctgctgatagtgtggacatgtatattcagattactaaaagcactgtagtggaatgcttacaaaaaattgtatcaaacatgtgtgcaatatttggggatgagtacccgaggaggccaaataataaagacacatgaagactacaaattgaagcagtacatggttntctaggtatgttagggttcattgattgtatgcaatgggaatagaaaaaaaatgtccagttgcgtggaaaggtcta

SEQ ID NO: 190805 - DNA, 433 bp, Glycine max
agcttagtaagcttatcttgatatgagttgttgaaaatcataatataatattctaattctattaacaatagcagctcataacacacactattttttgtttacaggacaaaacatcttctatttatgcataattaatgtaattaacctatataaacacacatctattgtatattcaaacacacatttgtgaatcatgcaggttttgatgatgtcgaaaagaattcacttgataacgattgtcatcatcaaaaagggagagaatgtgaacacctagagtgcgaatgtatgaatacatgattttgatgatgccaaagaataatcaaacaaggttactttcaagattacttcaacaaacattcaaaggttaagcattgcttcaagattaatacaaggttgcttcaacaaacaagcattgctttaagattaattcaag

SEQ ID NO: 190806 - DNA, 223 bp, Glycine max
gacacatgaaactaagctgtatcgacaacatacatgtggctttgtttgcttttgtagacatctagacgagaaaggtgacgtttctgagacactggaaagagagcaggacgaagagacagaactcatgtctatgatgtggcgatgtgactcctcctctaatggtgtaagacgcaactgatgatcatgtgccgcttcaaagagacctgcttttattaaacttgaa

SEQ ID NO: 190807 - DNA, 320 bp, Glycine max
  unsure (1)..(320): unsure at all n locations
acccaaagacgagcatcaactaaacccttaagcttcaattggcaaactaatcacagagtggagaacggaggaaagtccatctgaaaatactggttaccgtcgctaagcaagtcataattatgcantttaattcaacaaaattctaaaatccccacgaccaatcacctgatagctgctagccccgccaacttcagaatgtcccccttcatatgccaccattgaaatgaatctaccccacatttattttcagggatcaaaataaccactgcctcgcccattagatggttcaagaaaaacactttggatagagctcttcaaac

SEQ ID NO: 190808 - DNA, 440 bp, Glycine max
tagtagaaattagaattcctttagaacatgttttatgcaccttgtaaaactagactgtacaagattagacaatgtaaattcacactgtgtggatttacactaagtataattaatgtggatcactctaatatctatgtaattagcaccattgtctacgttaattagctagttttacttcttttggtgaaaaaagttgccttttatgcctaatcctatcttaataatttataacaatatttacaaaaaggaaactaccaaaaaatggctagggctcctcaccaactgcaccttctctctctctccatcaacttttttctttaatcaagtgtttggtgacatgaggtagcttaagacccaatgtgcattgggaacccttgaacctatagctatcctagacttcataaacactccaagttcactccactttgtgccttgctatt

SEQ ID NO: 190809 - DNA, 239 bp, Glycine max
  unsure (1)..(239): unsure at all n locations
agctcgtaacttgtttatgtanaaaagaagttattaatcttgtgtcttgtaagacagtatctcaaagatgagagatgtatgcaggtatgacaaccgacgagtgtataaattaaatcagctcgagtattgatgttggagtcctcagcaacaaaatggatcaattataatacacccacatggttaatgaaataaatcatttgtgatattattaattcggattaattatgtacctgtctctt

SEQ ID NO: 190810 - DNA, 567 bp, Glycine max
  unsure (1)..(567): unsure at all n locations
taacgtcctcacntgtcaacttacgatctntnnnatccaataaccannnnnccnnaaggggnnnnnnnnnnnnttctggcatgagaacgtccacanccaaacnnnagcnnagnnnaagnnannaacagggagaagaaaaccggccacatgtattacgcatctatnaccgcaaaagaaggaggctaaagaacgtcctatgctcgcacggacaagttagacgacgatgagcaagcaaatcttacatgctcgctgaggaaactggaagacgatactgatccgcaacaaacgttactgctcaactcgaataaaaatgtgcaagtcaaaagaaccccgagtcgcgaagagcactggatggccaacttgaaccaattacacaaatgacatcggaagtggttgtcactaagactcaatcagagattccactagtcaccgctggaagaacaggatggtcctcacaaaaaggcgaaacatcgacgagcatatatactcataaaacaaatgtatgccaagccacctacaaaaagactcacccatcagctaaacacctgaatgacccgtcgaaagccg

SEQ ID NO: 190811 - DNA, 434 bp, Glycine max
  unsure (1)..(434): unsure at all n locations
agctntgatgatatggtcttcaccgatgaaaggatcaatttgagtctaanaagaggcaaatctgatcatcatactttgataaatgccaaaaaaaactagggcaaatgaagagggtgagaatgagggacaagcccatgctgtgactgccattcctatacagccaagtttcccaccaacccaacaatgtcattactcagccaataaccgaccttctccttacccaccgcccagttatccacaaaggccatccctaaaacaaccacaaagtctggttaccgcactttcaatgacgaacatcacctttagcacaatccaaaaacaccaaccaagatatgaattttgcagcgagaaagccttagaattcaccccaattccagtgtcctatgctgacttgctccatatctacttgataattcaatggtagccataaccct

SEQ ID NO: 190812 - DNA, 469 bp, Glycine max
  unsure (1)..(469): unsure at all n locations
tgaagatggtgctntaatggaggaaaagaaagagggagagtttgttataggggggagcacaaaattgaaggaaaaaaagggagagaagttgaactttgagttatgtctcacaagactctcattcatcaaagttacaacaagtgttacacatgcttctatttatagactaggtagcttccttgagaagctttcttgagaaaacttcctagagaaacttctttgagaaaacttccttgaaaagctagagcttagctacacacacccatctaaaaactaagctcacctccttgagaagctagagcttagctacacacccctataatagctaagcttacccccatgacaaaatacatgaaaatacaaaaaaaaatcctgctacaaagactactcaaaatgccctgaaatacaaggctaaaaccctatactactagaatggccaaaatacaaggcccaaaagaaggaaaagaac

SEQ ID NO: 190813 - DNA, 519 bp, Glycine max
  unsure (1)..(519): unsure at all n locations
nattgagcgcttggacttcgnngcnctctagagtcgagctgcnaggcatgcaagcttggaaggtagtcataacctcacaaaagatatatatacttatacatatatatatatatatatagatatacatatacatatatatatatatatatatatacatatatatgtctggggagaacgatcccttggatatgcgtgtatgttgcacaaaaaatttgacaacatatgtatatgtgtgattaggcagcaccataccttggatctgcctgtgattagataaatatttctcagaacatatatacacatgcttaggttgaagaactctctgtggcacacatgtatatagcacaatacctcacaaaaattcacgtgtgctcatgtagcatacaccctcttgtatcacccgagagcgctctagactagattactacgcaatacactttcgaacgagactatctcctcaatccatagccgtactcatgcgccgctcatctcatcatccattttcccagatcgcactcc

SEQ ID NO: 190814 - DNA, 438 bp, Glycine max
cttcctttagtgcgtcacgtttaaaaccgagctcgatggtgtttgttatccttgatggtactcggcgggaagagatgggagatatcgacattcccattcagataggcccccacacttgcaatgaggtgtttgacgtaatggatataaatgccgcctatagctgactcttgggaagaccttggattcatgccctgcgagtgggcccttcaacgcttcaccagaaagtgaagttcgcagagggtagacttttagtgatagtgtctggtgaagaggatatgatagtgagtagcccctcctccgcaccgtacatagaagcggcggaagaatcattggaaacggctttccaatcctataaagtggagagctgcgcctcggtggaaccaagtacgtcgctactttctctctccaacgtggacataatggtggcgcgtgttatgc

SEQ ID NO: 190815 - DNA, 224 bp, Glycine max
agcttgccgccacggagttttccgactatgctcttgtgttgtggaacaagctacaaaaggagagagcaagaaatgaagagccaatggttgatacatggacggagatgaaaaagatcatgaggaagcggtatgtgccggctagttactcaagggacttgaaattcaagctccaaaaactaacccaaggcaacaagggggttgaggagtatttcaaggaaatggat

SEQ ID NO: 190816 - DNA, 459 bp, Glycine max
  unsure (1)..(459): unsure at all n locations
tataatatattattacactcgaaattaaacatcagaagctctcgtgatattcaaatggtcataacttttcacccggatgtccgattatggcgaatcacatatcgagacgctcaaaattggacaacggaagctcttgagaaattctaatggtcataacttttaactcggatgtccgattcacgcgcatcacatatagaggcgctcgaaaaggaacaacggaagctctcgagaaattcaaatggtcataactttncacactgaggtccgattcacgattataatatatcaagacgctcgaaattgaacatcgaaagctctcaagaaattcaattggtcatcacttttcacacggatgtccgattcggcgcatatatgtcgaacgcttgaaatgaacaacggaagctcttggaaattaaatggtttaactttcacacggatgtcaattcaacgcatacatat

SEQ ID NO: 190817 - DNA, 399 bp, Glycine max
  unsure (1)..(399): unsure at all n locations
agcttacgtcatggttcaatgtatggttttcttgagccttatgtttatacacaatgcanaggatagatgtcaaaaatttcaacattacattaaaacatgggtgaaggaatcacaacgagaagcatacttaggagcttacttgaatcaatatgtaaaatataactagtacgttcaaaaaaatatttgcattatacgtacctaattatagttctggactttagggcacaatggaagcttgttgttgtgtgtccatgggacaatactattgtttggttttgttctttgcgtaagaagcctgatgttaacatcaaagctacaattaacaggttatgtttaaaattataattcatttattgtataacaatcgtaggatatgtaaacacgaatttgatgctatat

SEQ ID NO: 190818 - DNA, 473 bp, Glycine max
  unsure (1)..(473): unsure at all n locations
tagggatgaagcaagcaactcgcttgggtgagctgctgtgttatctccaccccttatttcctataactaggcatgatcggctgcaggaaaagtccagaacctgaaatcaacaagatttgagagaaattagtgagaagaaggagaaagacgaagaacaatcaaggttgagacgcttccgtaacacttccgtaacgttgtcgtgatcgttcttcgtccattcttcatcgttcatcattcatcgatcggttagttnttatttttgaagctttgaatttattctatgcgcccttaggtgatggaagcttgcttgtggcgcttctatggaggctagatctttgagcttcaatggggtcctttaatggtgattntccaccatggagatgtagcgtaagacaaaggagaagaggtgagaggaggcgccattcactatggaataagccatggaagaaggagcttcaccaccaagatgagcc

SEQ ID NO: 190819 - DNA, 280 bp, Glycine max
agcttcatgacgaagaaacaagttgtttcaattattttctgacgacgacaaggatgatgactcatagcccaaagaatgatttcaagattaagtccacaagatcaagatcaagattaatttccagtctcatacgacgacatccatacgaatccagactcatgagacgcttgatttccagattcatgagacgatgaattcccgatttatgagatgaaaccacgacgacttcacacggggagtattgcaaagatttttcaaacaacatacatagcacactttt

SEQ ID NO: 190820 - DNA, 430 bp, Glycine max
  unsure (1)..(430): unsure at all n locations
gtcaccccataattcgcccatattagggcaaccaaaatttttatttatgaatgacgctctcctacaagctaagaccaggtagaatgagatcaactgtataggctcanggtacaatcaaacgatcatacttccacctcagaatggcagccagggatatatcaatcatgcacaatgtaagctattagctaagtggctatcttcaatacaaacatggccttcatcatctccaatttcacacattcattccatactcagatattcatgcataaatcattactcaatgttaggcattctctcacaattaaagatcacactttcaccgggttgcggctaatgcgttccttcacaatcaactcgacaaaccaactaacattcttagtcatgatcctaagtcaatgtgctttctcttctaacgactgcatgctcattc

SEQ ID NO: 190821 - DNA, 217 bp, Glycine max
agcttgaaggcgctaccaacgaatatgatcactcatgttctaacacgaagcacagcggataagtgatactctgatacatgccatcaaaaaatatggtaggatgattacgtcgataatgatggacaagacgaagatgtgactgccattcctatgcagacaagattgccaccaacctccccatgtcattactgagccaaatacccaccctttccttaac

SEQ ID NO: 190822 - DNA, 338 bp, Glycine max
gtgatctaccaccaccgccaccaccatcatcttagttttctattatttaatattactagtactttgctttctagacgtgtatttggctatattatgacatttggatatactaaaatctgcaatccctcactccttggtttttctattttcccaccattcttcaattcttcaaatgcagtatgtccctcagaattttctcatgcaccatccaactctgtaatacaagtctgcacttcatgttcctcctctttagttcttctaggtgcgacggtgactccgaacgactggcagaatcctgtgatcaaagcgggaaataccagggccctattggacttatc

SEQ ID NO: 190823 - DNA, 396 bp, Glycine max
  unsure (1)..(396): unsure at all n locations
agcttctacattgtagttgagacctattatttatattaagcttctttcaattaattgactatganaacttactanattagattaggtgctccggctagattactggtggattcactttatacaaagaatgattaactcgcttaggtaacttgtaaccaattgcaagtacggaaaatgaaatacacctaataacgaacctgtaaatgactagcaacattctcttttgtcaaacctgngacattcatctcttcaagaattctctttggcacaacctctaaaaaataatttaggcagaaaattgtaagtgatagatcataacttacatatatgtatgcgtccatatattcttgaattgatgctcatgcaaaggttcaattcaaanatcacaccgcccaa

SEQ ID NO: 190824 - DNA, 451 bp, Glycine max
  unsure (1)..(451): unsure at all n locations
ggacactatgaaactcagctttgcattgatcaccctttgtaatgtgtcacccccaatactctgactatgaaacagtatatagaatgatttccttactaatcccanaaggaaagaggaagttggctacttggtggttcactgaatgaacttcatggagcacaatgtttttcaaagatgatttatatcttgagttccatctttaatagatctgttgtgcatgtgtcatataaggtttgatgtagtatctttcaatgtagtcttttagttntatctcttctaatgttntgcaaaagaagtggtctattatgtgtatctgttatttgagcacgttcaattcattgactgagttgcctgtttacaggaacatccagaaaccggaaccagttgcttcgatagggggaaatccttttgcataggattatgctgtagaatgtactattccttttcacat

SEQ ID NO: 190825 - DNA, 214 bp, Glycine max
  unsure (1)..(214): unsure at all n locations
agctntntattttcagtagatgaatatgaatttgtggccatcctcacggacacctctaagagcaatagcatcatttcttgcactgagttgttgcgaatcggaaaccatcttctcaatcaaattcctagcttcagcacgggtcatagtaccaagagctccaccatcggcagcatcaatcatactcctctgcatgttgctaagtccctcatagaaa

SEQ ID NO: 190826 - DNA, 576 bp, Glycine max
  unsure (1)..(576): unsure at all n locations
accacacntccccacgctccgcacacgcncgcgtncatgatntnnatcttcnctaccctnnnannaaccgcgcngcanannnnnnnnnnnnttggatgacctgagacctccggnaccaanacaacgcacgacagagacgaggacgcgnccaagggagaaacacacagcccttattcaatgtttacagacnggcacctgcagacagggcgcggaggacacgagaccacggacacgacacgcggagcgctacagaccaaaaccaagcgagaccaaccccgacccaacccgggcctaggcggacagagagaaccggagacgcacccaaacaggcgagcaccgggcagcaacagatcaaaggaacaaagaccgcaaagcacggaggcacggagggcagaccagcggcgaaacctgtggacacacgcgacaccgacacccggaagccccaacacaggcacgcgatcgacaccccgcccagaggccaaccggcgcacaacggcccgcgccgaaccgacaccggggcgccccgaagaccaacggcagaccctaccacggcgcaaccccgaccacgccgcgagc

SEQ ID NO: 190827 - DNA, 405 bp, Glycine max
  unsure (1)..(405): unsure at all n locations
tttatttgnaccncccgcnagcgagagcatngcatncgagaatataacatctctgtaacacgcactttgcaaatcagaccatatattttgttactagcttacttgaagtacctgtatacttaactcagacctgcaaaaaatactcggttctacgagcttaaacatacatcccggcactaaggcacaatggaagcttgttgatgagagtccatggcacaaggcctacgcactgatctgtgcctagacacacacccatctcacagtctttacactcaacaccccggctaatcctctccgatcccctcgtcaccgctggacgagctaaatcttactggacgctctagtcttacctcacttttgctgttgactagcacttatgccagaccccaatgactaccttccccc

SEQ ID NO: 190828 - DNA, 438 bp, Glycine max
  unsure (1)..(438): unsure at all n locations
tacctcgacggtggagcagcctgttcaatgcacgtcctcntttctgacacccaacggaggagaagaaggatcaaaggccaacgaaaatgacacggagggaagaagaatagcagcggcgcaaatggaagcttagcttgcttgtgtacgtataacatgaaatgttgatgggtgcaccaaaatcttttaaattaaggccaggggtatttttgacctttcacattaaatgttgggtgcacctagcatcaccctcatagaaagcctaagtgtgaaaaggagaattgtatgggtcataaacccttccctaaccatcacaattcatatttgcatttgcaaagggactctctcttttctttttcttctccaagagagactcaaatcctataagcttgaggtatggtgttggtaatcaaaggagatcatnttcctcttcctttgatg

SEQ ID NO: 190829 - DNA, 425 bp, Glycine max
  unsure (1)..(425): unsure at all n locations
agctttgagccanaattctgacttaccataattcttgacccagggtgagaatgtcaatccttaccctcggaagcgaaaagaatagaagggaaatttccaatcaaagaaaaggaaagaaggaagatttccaatcaaaaagatagcaaaaaagaatagaaggaaaattccccaatcaaagagtgggagaaagcanaaagaaaagaaagataattcccaatcaaagaatgggagaaagtaaaaaaggaagaagaagaaggaaagatagctcctgatcaaggatcgaaggacaacagaagaaatgtgcagaaaggtctttggaccggacaatatctgaacaatacagaattgtcaccaaatgaaanaaaagaaggaaagggaaaccacgacctaaatggtcttcttcctttgataccaaccaaaatccc

SEQ ID NO: 190830 - DNA, 453 bp, Glycine max
  unsure (1)..(453): unsure at all n locations
gagcccgggtagtcgaagagaagtttattttcatattcatcaaagtctgaanagagtatgatgaactaatgttacgtaatatggccacagctgaagctttggaacgagaaaccaagaaggcccgaaaggaagaacacgaccaaagcaaagttttgaggggctttatagggcagcaatagtgagctcaagctccgaagaggtgaaaggaatcatcacgggtcaaaggcatgatcttgaaggacgagctaaaggtttgccttaggtcgaaaagaaatttgtcccaacagttaagcgagactgaagggaatatgtgggccatcatcgataagtgcaaagagaagctaaatctagcggcgactcacgagcaaaggctagaggatgagtatgccaagatatcagcagaaagggaagccagggaaagggtaattgattcattgaccaagaggcaacaat

SEQ ID NO: 190831 - DNA, 151 bp, Glycine max
agcttagacaacaatatctacattgtgagaaattaatgcacacgaatattttcgttttaagaagaagaaatatacacttcagtcttctccttgaaaattactaacccttcccttccaaggattaactcgtggaccctatttacaaccacca

SEQ ID NO: 190832 - DNA, 328 bp, Glycine max
  unsure (1)..(328): unsure at all n locations
tanagataaactaagaataatgactagaaatcttatcttagttcttgataananaggctatcaaatacaaactgattagctaggctaagaataccgatagaatatctcatcatatattctgagaatatattctatcaaatattaactgactagcttggctaagaaaaccgatagaatatctcatcatatagtctgataatatattctatgaaacacagactggattagtaagctaacaatactaataagatatctaatcatatattttatcattaggtaggcttagaatacagatagaatatcttatcatatattgtgatagtatatt

SEQ ID NO: 190833 - DNA, 76 bp, Glycine max
  unsure (1)..(76): unsure at all n locations
agctntataagcgcgggttcgagagacaaaggtcatagcgttcgcgatatgcgaagatgatgttccgagtactttg

SEQ ID NO: 190834 - DNA, 439 bp, Glycine max
  unsure (1)..(439): unsure at all n locations
ntaggatatgtaannttatatttatagttcaagacaagcatattgaaacaataactcaactactgtgaccactccaacataactattgccactgaacaagttacttcatgtntagaattctgcattntatataatcaacatatgaaagatggagaaaatattgtaatttcatgacattaaccccacttgtggtgattgatgtacgtggtgattgagttatttattggattcttgcttccatttgggaccgtgttgctcatcatcacaggtacaaatgtttgttaccgattaatttttttattacttgttcactgccattaaagacaactaatatttgatatacaaattttgttcatgatgagagaaccttagattcccgtttgagactgaatgcaatgattcttgcagacagtttgcattaatcaatgtattcaatctt

SEQ ID NO: 190835 - DNA, 262 bp, Glycine max
agcttcctagttatagagagctaaatcctatgttggttcttccttgtaggtacttgatgtaaatacatgtatatctatttaatgatgttttatgtgttctctgtgctatcagtacatcatttcagtgtgtttctaccttgatcacgtagatgcatgctttgttaggatcattcaatggtggaaactggtctgattcttagaacttgataggatagggctagtttatcgtattatcacgagggatcggggtacgataacctag

SEQ ID NO: 190836 - DNA, 473 bp, Glycine max
  unsure (1)..(473): unsure at all n locations
tcctcactttgcagtttaatattgatcacttgtttntcttatttatttntgactttcaatctagagggaagctcaaaaactcccaacacacatttcattgtcaatatgttcttttcaaaattgttcccaaacaaaattgcatcatgcatattatagatgagatgctttaatttgataatctccaaccttatagcccgaaaattttggactacactcttcatcattccaccaagaccttctctagcaattgggaaaagaagatgagagagggaatctccttgtcttaatcctcaagagagtgtgaattttgttgttgggttgtcagattacaagaactacaactattgtagttaagaggcattcacaaatccaactccttcacttatatttgaaaaaccaaatctacccatcatatagtccaagagactccaattcatcatatagccctattaacaatattcagctgttggatg

SEQ ID NO: 190837 - DNA, 425 bp, Glycine max
atatatatatacttatatatatatatatatatatatatatacatatatatatatatatatatatatatatatatgtttaggcagaaagataccttgcatatgcatgtatgtagcacaaacaacttcacaaaatatatatatgtatgtataggtagcaagataccctgcatatgcatgtatatagcaaaaatatctcacaaaacatatatacgtatgtttatgtagcaagatacctgggacacacatgtatactacaaaatacctcacaaaaatatacgtatcgttaggtagaaaaatacctcactgtacacaacgagagcgagtctgatcagaattctaaccattgcctcctaccgaactctatctaacatacccaactacaacggtcgcctagctacaacctcctccctctaatacacacaccg

SEQ ID NO: 190838 - DNA, 420 bp, Glycine max
  unsure (1)..(420): unsure at all n locations
tccttntagtgcgtcacgtntaanaccgagctcgatggngttgttagcctttgatgtgactcggcgggaagtgatggtagaaatcgacattcccattcagataggcccccacacttgcaatgtggtgtttcaagtaatggatataaatcccgcctatagctgcctcttgtgaagaccttggattcatgccctgggaagtggcccttcaacgcttcaccagaaattgaagttcgcagtgggtagactcttagtgatagtgtcgggtgaagaggatatgttagtgagttgcccctcctccgcaccgtacatagaagcggcggaagaatcattggaaacggctctccaatcctttaaggtggcgagctgcgcctcggtggaaccaagtccgtcgctactttctctctccaacgtggccataat

SEQ ID NO: 190839 - DNA, 401 bp, Glycine max
  unsure (1)..(401): unsure at all n locations
gcccactccatcattaggattatttcctgacatctcanacaaacaaatcaaacgtaacaagacaattatagttgctgtttgaatacctcacccactcaagtgtatcacacaattatggcttttctctaatgaaacactcttgccttttaccactctaattccccttgagttcttaggcaattcaagagattatggccacaacaaagaacaattcaccaatatgtgtaagggaaggctagacaaggaaaaggttaaccaagaaaaaggctaacaatgtttttaggcacaaatgaaggaaacaaaattcagaatttatgaattcaagtaacaatccttcatgcaaccaatatattaccttaaagagtntttttttntaagttcttcaagcatgaaccattcag

SEQ ID NO: 190840 - DNA, 409 bp, Glycine max
  unsure (1)..(409): unsure at all n locations
agcttgtcataactttatctcgagcccagtgtttttaatataccatttattgcnaaaagaactagnggatcatgtgtgtaatcttgatactaatttgcttctattggaagaaaaagatattgagttatacgttgtatccaaagttcatatctagaaaataaaaatgaagtataaaatgttaagcattttgtagtatgtgttctttaggtgcttagtacattgctggccgccatactnttctgagctttcataattgacattctatatttacatcaatacaggaataaacagatctttaaacaatggtgaaatcaacaaggaaattatgcttcagctttctaatgtgccaaaagctgtacctatctgcaaaatttctgatgttgactcttctgaggtatgtatgactact

SEQ ID NO: 190841 - DNA, 473 bp, Glycine max
  unsure (1)..(473): unsure at all n locations
ngtaaaaccaattttctagaaagttagctaattccaatattaattagaatttttgttcgttaatgtgcataaaatttacatgtaagattgacatagattttatagaggtcaatctgtattttgcggcctttaagaaaaaatttcattatgaataaaaaattttaagattttaattntttagcatcatgtcaaaattaaaaatcaaatttaattagataaaataaaatattcaatacattagttaagtaaaaaaatagtaagttaaggaaaaataaattaatcttaaaatttaaaatattataaaaataaattaagaaattcaatttcactcttacaataaataattgatcctgtagctaggtcaagtgtaaatttcctacttgattntttaaaaaaatataaatttcaatgagatttaatttatatattatttctatattcaatacatttggcattcgatttcaacgtataaa

SEQ ID NO: 190842 - DNA, 216 bp, Glycine max
  unsure (1)..(216): unsure at all n locations
ggcagtanacgctaacgacagtaacattgcactcggtagtccttctgagctcccgaacatatcgagaggctcgatattagaaccgaagctcgcaggtaattctaacgactttaacatttnactcggaagtctgagcgagtcccgtagtatatcgtgacgctcgaattttgaaaccgaagctcgtaacatacgctaacgacagataacatttcactc

SEQ ID NO: 190843 - DNA, 341 bp, Glycine max
  unsure (1)..(341): unsure at all n locations
agcttcttatccaggcactctcttggnggtctagctcctccttccatggcttattctttagtggatggcgcctcctctcacctcttctcctttatcttccactacacctccatggttgaaaatcaccattgaaagacctcattgaagctcaaagatccatcctccatagaagcttctcaagcaagcttccatcaattattgcttaccttgatatgaccattgtttcacagctggaggcattgccacgcattgcattcttgtggagagagaaggaataanagtacaaacaatgtttgcgttcaggtgtaatgaggaattcacacctacgtagttctttaagt

SEQ ID NO: 190844 - DNA, 465 bp, Glycine max
tcaggttgttcaattgcttcagattgctgcacaaaatgtatattgtttgtgtggtggtcggcagaggagcataaaccacaaactcttgtgacaagtacaaatttctgattcaaggtcagcggtgttaccaagttaaccaaggcatctagtttaccttcaagcttcttagtttcagctgatgaagatgaattcgtggctacttcatgcactcctctaatgactatagcatcatttatggcactaaactgttgggagttggaagccatcttctcaattaaatttctggcttcagcaggggtcatgtctccaagggctccaccactggcagcatctatcatacttctctccatgttactgagtccttcataaaaatattggagaagaagctgctcagaaatctggtggtgagggcaactggcacatagtatttaaatctctcccatattcatataagctctctcactg

SEQ ID NO: 190845 - DNA, 353 bp, Glycine max
  unsure (1)..(353): unsure at all n locations
agctttccattctttcggaagtttatcatctttattggcttcttgaggaggagcttcattgcttccttttccttttcctttacaatctngtccatgaatatgcatttgttctaaagattctgcaacatcatctaaaatatcctttcttgaagaaatagcattagactcatcaaaggaaacatgaatagattattcaatagtcatagttcttttattatatattctataagctttactatgcaaggaataaccaaggaaaattccttcatctgacttagcatcaaattttcctaagttttcttttccattgtttaatacaaagcatttgccaccaaacacatgttgatgagaga

SEQ ID NO: 190846 - DNA, 482 bp, Glycine max
gaatactcaagctttacggatttggtcttcaccgacgaatggatcaaagtgttgttctgaatattgcaaatctgatcatcctgcattgatgaatactataattgcggcaaatgaaaaggatgacaatgagggatatacctctgctatgactgccattcctacacggccaaatttcctgtcagcccaacaatgtcattactcagtcaataacagttgctctcacccaataatacacaaaggccatccccaatcatccacaaagcctgcccgctgcacatccagtgccacaacaccaaccataaaggaattttgtagcacaaagcctgtaggattcaccccacattctagtgtcatatgccaacttgctcttatatctacttgataatgcaatggaagccataacccctgccacggttcctcaacctccattcttcagaggatacgactcgaacgcaacatgtgcatatcatggaagagttctg

SEQ ID NO: 190847 - DNA, 269 bp, Glycine max
  unsure (1)..(269): unsure at all n locations
gcatgcaagcttaaagtatgctcgagtcattcatccctatgagatgttgttgaagaaangaggatcagaattgccattccttggattatatggtttagccaagctcatgcttggacagaaaggctcattatatcaggttgaagaaacgaagattccgtattgcaaaattagagcaaaagaggaatccagtctcatcactgcaaaggctactgccaaacatatttacgattggtgatgtactttgtacttccaatttgaccttgacaaag

SEQ ID NO: 190848 - DNA, 444 bp, Glycine max
ctctgcagattggtcttcgacagtgaaggataatgttgatctaaatatgcaaagttgatcatcctacgaggacgactgagaaaactgtggcagatcaagacggtgaggatgagggagagacctatgctgttactgacattcctgtacggtcaagttgcctactctacccatcactatttttactcagccaattacaaactatgtacttacccaccacccaggtatccacaaaggccagacctaaatctaacacacagtctgtggaccgcactttcaatgacaaacaccacctttagcacatatcatatacaccaaccgagaagtgaatctctgagcgagaaagcctgtacaattcaccccatttccactgtcctatgctgacttgattccatatctacttgataattccatggtagccatgaccctagccaaggttcatcaacc

SEQ ID NO: 190849 - DNA, 119 bp, Glycine max
agcgtgtacgatgcatctctatagtactcactggtgtgtccacattgcgagtcgtgcattgttattctcgttctgttacttattatacccactgttgacgagctcatgccgtttgactt

SEQ ID NO: 190850 - DNA, 208 bp, Glycine max
  unsure (1)..(208): unsure at all n locations
tgagatgaggaagtgttgaagggtgaaactttctttcttattgttgaccacagagtggtacctggagatatgtcgcggnggtcaggagaccttggggacgtcaggtgtggtgctattgcccaaaaccaagcttgaccaatcccgacccaacccggtcatagtttgtcagtgagaacctgtgatgtacctaagcaggcgatctcctggc

SEQ ID NO: 190851 - DNA, 265 bp, Glycine max
atgtgtctagcatcacgattatcgtctcccttcttgcacatgttctgtacttgcctcctatccagaaccatattccaataggactgatactgcctaacaaacgcaaccattaagtccttccacgtatggactcgggaaggttccaagtcagtgtaccaggtaacagctaccccagttagactttcttggaaggaatgcatcaacaatccctcatcttttgcgtatgctgccatcttccgaccatacatctttaaatggttcttgg

SEQ ID NO: 190852 - DNA, 434 bp, Glycine max
  unsure (1)..(434): unsure at all n locations
ccttgtagaatggccagacatgatacatgncattgtttgtttttttttaagggaaaagggaagccccacattatgtccatgacacaaatgcataaatgatgatttggaaatcttatgcacaactggtcatgcatgcacctatgtggacactcaagtgtcaaatttttatggtcatgtgatgctagggctcacgattcatttcctctattcttagtcaacccaatgttcccaaaatatgttcttttaccaatgtgtgcattcatcctagaccattttggagactcgtgaaaatttcacagcattcacccttcacgtgtatacacatctttttaaaaactacgtatgatcagagatttatttaaagaaaagctggaagtaatctcttttcaaaagcatgttagatttctagatagacaactcatattctttttctc

SEQ ID NO: 190853 - DNA, 405 bp, Glycine max
  unsure (1)..(405): unsure at all n locations
agcttgaaccataaccggtgagagtgtgaccttaaactgcgagtgaatgactagctttgagtaatggtcttttcatcaatctctgaaatctagaatgaaatgtatgaatgaggacatggtgaaggccataattgtatatacaagccaattgaccaaagagcttaccttgaattataattgtatcctttgctccctttgtgagctaaattacattttcaaaattgaaccttgaacttgaatgagtacctccagataccttgtttagattctaggagagcatatggttcaaggcaaacttaccccaaattcggnggagtggagctgagtgggatttaaagaanaaggtaaagcatcaacacacacataacaaataagttgtgttaaaaaaaaagcaataaaagaaaa

SEQ ID NO: 190854 - DNA, 465 bp, Glycine max
  unsure (1)..(465): unsure at all n locations
ngcctcanagagatctaggaaggataaagcggttgaaggaaccatttccgctcccgaatatgacagcctccattntaggagcgctgagcaccagcagcgcttcgaggccatcaagggatggtcatttctccgggagcgacgcgtccagctcagggacgacgagtatacccactttcaggaggagatagttcgccggcgttgggcatcactggttacccccatggccaagttcgacccagacatagtcctcgaattttatgctaatgcttggcctacagaggagggcgtgcgagatatgcgatcctgggtgaggggtcagtggatcccgttcgatgcagatgctctcagccagttcctgggataccctttagtgctggaggagggccaggaatgtgagtatggccagaggaggaaccggtccgatgggttcgatgaggaggccatcacccagttgctatgtatacc

SEQ ID NO: 190855 - DNA, 366 bp, Glycine max
  unsure (1)..(366): unsure at all n locations
agcttgacagcgagaataatgagtacaaatatatgatttattccttggaacagcagtcccaactgaacaatagtatggatatgcattctccttgcactttgngtattagcttacatctgatttagcttgttcgaccctataaagagcgcattcattctgtcaagaggccattgcgccccattatgccttggcttaatggtccccaactttcagggaaaggtttaattgttaatgctacgctgagctttcaatcttctgcttcaggaaatgggcatatcaatgggtctactccttaacacatcggtcaattgcattggttgatacatgagcatgtacaacttcttattcaggcattctttatatcga

SEQ ID NO: 190856 - DNA, 494 bp, Glycine max
  unsure (1)..(494): unsure at all n locations
tatatcttgacaccgatataactagctgcggaacagccatgcaatagaagaagaggacccttttattcaacataagcgagattccaatattacctattgaccacaagagcttacaacattaacctgctcgagggtccatattgttacaccgactatattaagtgactcttggaacacatatgagatccctaaccaattaacaaatgggcggactttgggttcttgataacattaaatgtaataacatactggtactaccaaatacacacaaaggttgtatgtctgtactcggacaacagaatatagttattcctgcgacactagacatggacaacattggaatatgttgatactgagactcgtgcacagaggcgccaccataggtctctaactctccaggtggcacgctaacttgtatgagttgatgaaccacttggactgcttgagttgactcatgagtatagtgttctttcattagactgtgtgctaactcn

SEQ ID NO: 190857 - DNA, 316 bp, Glycine max
  unsure (1)..(316): unsure at all n locations
taccaggcaatttttcaatcttngcaatttaaaaaaaatgacaccttagctaatttggttgctttaattctgcatatcctttggaaattgacttatagttgaactaactgcactactgctataatagctcataattggctttaaactagtggaaaatataacagaacattggacaacatcaacacacaaaataacatgaacccaaaaaaatgaattttcccattccacctcaggaatgcataacatatgacaatgttgggaataaaatgtcacaaagacacattagcaaacctagataattgttcggtcaattcca

SEQ ID NO: 190858 - DNA, 420 bp, Glycine max
  unsure (1)..(420): unsure at all n locations
actaagctcgtgtaatcattacactgatttggtattcgantaccagttactgtttnttattaaagcaaaagacgtaactcttcaaaaggtatttgactctttcacattggcttaagttgttctaaaagttataactctcctaaacggctttcttgaccagacatgaagagtctataataacaatgctttgctttgcattccaataatcttgaacacttattcatacaatcctttaccagccttgaatctctgtgaactacttctttttctttgaccaaaagttttcagagcttctggattccaaacctcgaaacttggctatcatcttttattctttctcctttgcaaaagaattgccaggactaccgctgaatcttttgtgctctcttctcctcttcacagaacaaagactaacgctga

SEQ ID NO: 190859 - DNA, 373 bp, Glycine max
  unsure (1)..(373): unsure at all n locations
agctntgatgcaacattnggagaggttaatgtatcaactatatgatgcgctccatgagaggttggatcaaatggagaatagagatcataatgaagaagaaaggaggagaagagggaatgatggtgttcctagacaaaaccgaattgatggtattaaactcaacattcctccatttaaaggaaagaatgatccggaggcctacttggagtgggagatgaaaatagagcatgttttctcatgcaacaactatgaggaggaccaaaaggtgaagcttgccgccacggagttttccgactatgctcttgtgtggtggaagtgattatgcaagttgaagtggacgtttccattgggaaatacaatgataagggacttt

SEQ ID NO: 190860 - DNA, 349 bp, Glycine max
  unsure (1)..(349): unsure at all n locations
cggaagctctcgagaaaatcgaatnntcatatcttttcacacggatgtccgattcggngacataactgatctagacgctcgaaattgaacaacggaagctctcgacaaattcgaatggtcataacttttcacacggatgttcggttctgggacataacacatctagacgctcgaaatgaaccaccaaagctctagagaaattcgaatggtcataacttattacacgaatagtcgattgggaaaataatatatcgagatgctaaaaattaacaaccgaagctctagagaaattccaatgggcataactcttcacacagatgtccgattcggggatagaatatgttgagac

SEQ ID NO: 190861 - DNA, 384 bp, Glycine max
agcttcttttggacctcgaacaatctatatttgctctatcagaaccatgctatgtgctcgcgactggtctctctcttcccttcgcaactggagtgtcactattgctaccccatagagctccgcgaaatttgatacggccatactgctccttgagagcccttttggtctcttgagcaaggcctgttgcgttagtggcattctcttcccgtaacccggcacactctttccgaacgtgtgtagcggccaacttgaacttctgattgtcacgatatgcctttcctaactcgcttttgagagctaggacttcttcgtgctctgtcggggctttaaaactctctgtgctgacgactttaacttggcgagcaatctaagcccagatatgaa

SEQ ID NO: 190862 - DNA, 453 bp, Glycine max
  unsure (1)..(453): unsure at all n locations
tcttatccaaggctcatcttggtggcgaagctccttcttctttggcttattccctagnggatggcgccgcctcttaccttttctcctttgccttgcgctgcatctccatggtggaaaaacaccattaaaggacctcattgaagctcaaagatccagtctccatacaagctccacaagcaagcttccatcaagtggtatcagagcacaagagcttcaagtaggtgctccttaaacctacattaatttttttttctttaccttctcttccattgctgattcttcattattctccatgtcatctcctcactggtctggatctaaatgctgttaacatgattctctacagctcccaccgagtaaacttgctatagaaactaattngatattctatggatcacatgtcttgctcttgctcttgaaccatgaattgtgatgacgttaggatcctttgag

SEQ ID NO: 190863 - DNA, 440 bp, Glycine max
  unsure (1)..(440): unsure at all n locations
agcttcagagccaggcctatgactgtcaattttattctgtcactaaaataaagaacccccattcttcagtatcctcggccacaacggtagtaagagatccaactacaatttaggctaacagtagttctcattcctaaagcagtggaacactttttcatttataagagtccaggatgataacctgagatcacttaattattaaataattaaaatataggaatttagaaatatatacatatagagataaggcgttgttgttgttgttgtatacatatagagatacaatagaaaatcacataaaagagtatgtgattgcaaaacaaaaaaaatatcattcattataccacanaagatacacaagttaatatgcaacgataaattattattcttctttctttgtcactattaaattcaattttctctaacataaacggaaccct

SEQ ID NO: 190864 - DNA, 470 bp, Glycine max
  unsure (1)..(470): unsure at all n locations
ntanatagcaacattccaataagagagaatgaaaacatatttatccaacagaagtatcctttcattatcctccagtgcaaacaagtacttataacattaacctgtttgttggtccatattgtaacaccgactaattaattgactcttggaacctatatcacatcccgtccaaatcaacaaattggcttaatttgggttcttcataataataataataataaaagattggaaagaaaaaagaaaaagaaaggttgaagggctcttcacggacaacagaagagagttaatcctgcgacacgagacatggacaatagtggaataggttgatagtgtgactcgtgcaaagtggtgcaaccatagttatcaaactctcaagttaactcactaacttttatgagtttatgagttcacttgttctctttgagttgactcttgagtaaattctttttttagtagactctgggtaaact

SEQ ID NO: 190865 - DNA, 507 bp, Glycine max
  unsure (1)..(507): unsure at all n locations
atttgacctagacatcgagcaccgagatccttagagacgaactgcggcatgcaagctttgaagngaagaggctataagtattgactattatgacgctataacagacacagaagaccgcacgataaattctcctccattggatttagccatgctacgaatataggangatgctgtggctatactaaatcgcactgcgtgttaagactcatcattctcgctttaatgggaaagaaagaacctccagactacttggagtgcgagaagaaataatagcatgtgctgtcatgcaacaacctatgacgaggaccaaatggtgaatcttgccgccacggagctctccgacatatgctttcgtgtggtggaagtgattatgctacttcgaccgtacctttccattgggaacctcatgctcagcgacttctgaagttctctcaccgtcctcacaatctcctcccgacctaacttgtcaactatcttcctcccctcccccatgataccctctgcccc

SEQ ID NO: 190866 - DNA, 434 bp, Glycine max
  unsure (1)..(434): unsure at all n locations
gcgagtgtttagcctagttaactttttttttatccaattcgattaagaatgagagatcccaaagagaaaacgttcgattgattgttcgctntattttactaanagacgttgatgttttattattatattactactttacctctttttgatttccaacgtggttacggtacgaccgaacgggcggaattcattgtaaccgaagataatggataatacaactcaaacgatcggtggaaatttattttatttttagggtaagcgagatatgacttacataaaatggcttaagcacgtcaaaagggggtataaaaagtaaataaaacgagaatgaaaatacacgatacacaatgtggaccaccatgggtacatagaatgaatcgataagcttggttcgaggtacttactcgttgaagatcgaagaacgatgaagaacg

SEQ ID NO: 190867 - DNA, 261 bp, Glycine max
cagctaattttaccatccgcatgcgcgcgaagcccaccaggcactgttgcccacctagaaatgaacgcactgattgccacatagtccatattctctcttttaaaagaaccgaggacccagcaggcttctcagggttggagacgatcatagcacaagttctttcacgcagcacatgctatcgcagccaacaagggaaagtagacgcaaagactttgccaatctgctactgagagtggagcttttccactcaagacccagcac

SEQ ID NO: 190868 - DNA, 276 bp, Glycine max
gtcattcctaattgctctacaaccgcatattctctattgagctggcgaagaagaatgcggcatttacctgtggtgaaaaacaagagcaagcctctgctttgctcaaagataagcgtactaaggctcctcgtctagctctcgatgcctctggagtgggagtcgcagctgttttgatacacgcgggcaccctatcgcttattatcgcgaaatacctcatagcgagacagagcgttatgcctaaataatagcccttcaaacttaagaacattaccctgt

SEQ ID NO: 190869 - DNA, 155 bp, Glycine max
  unsure (1)..(155): unsure at all n locations
gatgccangagaaacgcgcctgattgtcaacttctatgtgactctcacactgtgacacttcactcactatacgggtgggtcaaaactctgcatcggatagaaccctacgcagataggccgtctcgagacctcgacagccaactctgacactgctc

SEQ ID NO: 190870 - DNA, 501 bp, Glycine max
  unsure (1)..(501): unsure at all n locations
ttgggctgtgccatgaaagtctngagatcccgagagtccgctcgagagaccgcgaggtatgcaggctggctcgaggctgttaatgtttaggctgtgctcttggaaagaaaactcgactatcgtgaggatactcggacaccgnaaacggcgtataatccactaccatatacacaaacatgagcgctcattaatagaggcggaggcgactatttccttataacagtcgctggcgacagactgtgaataatccgttatcaaagcacccattacaggaattgagcttcgtacctaaataatacgcgtcgttgcaggtggtgttgtctctaacagtgacacacatatacttggcaaaagcgactagatgcgtactcaaaggcagttagcggtaccaaaaactgcacatgtgcacatgttgggatgtctaaaaccatacatacacaactctctgaagaatctcgctatctcacataaggtgcacattcctgcacttctaacgttccg

SEQ ID NO: 190871 - DNA, 499 bp, Glycine max
  unsure (1)..(499): unsure at all n locations
ttagtctcgagaacctgcannacgcgacacatngaaactcagctggaggatatggcgacccatacatggttattattgtgttcggccaggacggaaccaagttgtcacataaccatgcgcgctaaacccatcgtgcgctattgaccacatgcacatgaactcacgtacatgcacgaaccccatatactactatctcgtaacagcggggcgccatcaattcgttcgagcttgcgacacatgcaagcacaacaactttcaaaacggacaagctataatagtcgagcgcaacatagagacgcagaanacgtctgctaacatatgaaccaaacacggagctnttctgatttagagaccagagtaacctattgcttcgatgcagttcgttaaccgttggatcgactccataatgttactagatggctagagtgcataactccacattgcgatcgtagggatctactcgcaaacatcctgaaataattcatggctacaatttccg

SEQ ID NO: 190872 - DNA, 508 bp, Glycine max
  unsure (1)..(508): unsure at all n locations
tttgacacttggccttggaccctcgaanccagcgattcttagagngacctgcggtatgcaagcttataagagattatatggttattactttttacgcgaagnacgantgtggtgcattataaatcgagacgctctaacccgcccactggacggactattaaaattcanatgtgtactaacttctacgtcggaggaccgattcaagcccatcaattaacgcgacccccaaaatctatcactggaagctcttgagctattccaatggtcataactttaaactctgatgtccatttcacggacacaataattcgagacggttgaaattgtactaccggtgctctcacgaacattgaatgcactaaacttttcccaacgaggtccaggtcaagcgcataactcatcgtgaccctcggaattgatcaacccaagcttatcagaacacctctggcgctgactattcactcgcatctcccagccgcgccgtcacatatgcagatcttccacctcc

SEQ ID NO: 190873 - DNA, 411 bp, Glycine max
  unsure (1)..(411): unsure at all n locations
agcttgagggaaaaattgatgccttggtcattctagtaactcagcttgccatgaattagaaatttgcatctgcacttgttgcaagagtctgtaatctatgttttctgcagatcaccatacagatctatgtccttctttgcagcaatctggagtcaatgagcaacctgaagcttatgctgcaaacattcataatagaccccctcagcagcaaaaccaacaaaataattatgatctttcaagcaatagatacaatccaggttggaggaatcatccaaatctgagatgggcaagccctccacaacaacaacaacagcctgtccctcctttccagaatgttgccggnccaagcaagccatatgttcctcctccaatgtagcaacaacagcaacagtcacaataaaaacaacaagc

SEQ ID NO: 190874 - DNA, 462 bp, Glycine max
  unsure (1)..(462): unsure at all n locations
aatgtgacactattatctatgtgtatgtgtagttagtctcttatggcaattntgttattgtaatagacttactgagggaactagttctatttttttaattgttgtgtgttgaattttaggtactttaagtttgttcaagcgtttactaggttcagaaataactgttttttggtatgtataaatatttacttgtatttaggtcacatgaatgttttcttattaattatttagtaagtatatattgtatgattttgattaaatgttacagcagaggtttcagagtttangaagataactntgttctatttttttttttacaagtgttcacttctgaaattcaactgttaattcacacttaaaatngatcaatttgtgttacatattgtggctgcgcttgtttgttagtgaggttaaaaatttgttcttcataagataatgatgaatattcatgttgtaaatatc

SEQ ID NO: 190875 - DNA, 543 bp, Glycine max
  unsure (1)..(543): unsure at all n locations
atgatcccttgacnntctgcgcaccntgtagagacganactcagaggcactgcaagctctatcacgagtaatnggatgttagttgctccctactcatttttgaanatgagatggcacgctatcgctatgcgcttggacgaacagccaagagagtatctggcagagccgcagacatgcacgatcactcacattcgaggaccactgtggagctctgcagaccgataccaggagcctaccttagagccatgaagctcatacgaacggtacatgaacatgtacataatgcgcgaatatccaacgctaacgaacatagcaccatgaagactaacgcaactgtgacactgccatgccagaggaacaagcatccactctcagcagaatgatctattctaaggctcacatcacaaataaaagtgaacaggcgagaacacctacttggactgccaacaacattaccccgatgatacccagacattcacagaacacaacgcgatcccaccgcagacgcacgcactagcacgtgacatacgcgtctgtcaccct

SEQ ID NO: 190876 - DNA, 158 bp, Glycine max
acgatccaaacgataggatacacaagaaacggacccgatgtagtgatgccatcctaccccccacgggcattggatcgaacactccaatacgaccgggcctactatgctcgataaagccctacgcctctcatgcgccttagggtacatgtctgagccca

SEQ ID NO: 190877 - DNA, 355 bp, Glycine max
  unsure (1)..(355): unsure at all n locations
agcttgaatctttcgggtgaactcgaagggtgttcaatgtccattgttatataattgcagaaacaagacaaccccagaagcaatttaacaagacagcactattaagacagtttttttgtcacaatgatgagaaagtcacaaggaacaaacaaccccttcctcttcaacaaccaagcacaaatttgatgactntttgcagtatattaccatcataccctccctaatattcgtaaaccaaatcatccaccaagtgacgtgtttgatttagtttattgagaaatataataatgcattgcccactgcatctgcatgaatcaattgacgcttaagttgtttaaggctaacaagaaatatc

SEQ ID NO: 190878 - DNA, 415 bp, Glycine max
  unsure (1)..(415): unsure at all n locations
tgcttctatagtatttccgcctgccacctgacgcatgggtcttatttaacagatgttgngntngnatggataaccacttgnggtatttncgcctgccacctgacgcatgggtcgggaatagtaaatattgtctttgtacagataatcaattgggtatattcgcttgtcacctgatgcataggtcatgatcagcaaatgttgtgagaccaaaagagtctcagccggaagatgctgacatcttcagaaagggtgcagacaaccacattggtctctgcgtgtcaacgggctcgcttgcctcttgatgacgaaaggtgcggataaccataaagtatgtctgcatgctaccgaacccttgagtcacgatatcaaaggtgagactttctcgcggtctcggtcggaagacactgacatctct

SEQ ID NO: 190879 - DNA, 457 bp, Glycine max
  unsure (1)..(457): unsure at all n locations
agtcacctgcggcatgcaagcttataagaacgaaattgcctaaatcattttcaaatatgcatgtgaattaggaagcatcaacaagaatcaagccaaggctattgtgcaagcaatggggcaaaacacaccaaaagattatgatgatggattgctcgaattctcacaaaggtaaacttatcactttcaaattgagatttcaaaactatcatgacatgtaaaggaaaaacaaggatttcaagtcacaaaatgtcaagagacttttattttcagaacaattacccattacttgaacatatcctataattcanagacaaacatgcaaatttaacacaacaaaactaacaaaattaaactagaacccaacaaaactaacaaaattaaactaatttaacacaactaacaaaaccaaaaccaaagaacacactcnccccccatacttaaacaatacattgtcctc

SEQ ID NO: 190880 - DNA, 427 bp, Glycine max
  unsure (1)..(427): unsure at all n locations
gagatggtatctggtcttagaaaataatttgctaagagccaattcggtgcgattggccaacctgaggaatggtgtagtcttgctgctgactacttgcattgtggccccctgcagctcccattcatatacctagggatgcctataggtgttaaccctagaaggaaggtggtgtgggagcctataatcagaaaatttgaagccaaattgaacaaatggaaccacagaagcatctctatggctggcagaattaccttaatcaatgctgtcttgacagctntgcccttgttntatatgtctttnttcagggccccttcagcagtcatcaagaggctcactactatccaaagacaatttctttgnggtggaaacttggaaggaaaaaagatagcttggatctcatggcagcaagtgtgtgctcctagagaaa

SEQ ID NO: 190881 - DNA, 231 bp, Glycine max
  unsure (1)..(231): unsure at all n locations
tagaggatgcaagcttgagatgaggaagtggtgaagggagattctttctgctcttattgntgaccacacagtggtacctggagatatgtcgngggggtcaagagaccttggggacgtcaagtggggtgctattggccaaaaccaagcttgaccaatcccgaccaacccgggcataatcggtcacggagaacctgtgatgtacctaaccaggcgagcttctggcagtcaaca

SEQ ID NO: 190882 - DNA, 450 bp, Glycine max
cgattgtcacgtgctcatgcattatttgttatccgtggctatacgagacatcttgccaaacaaagacaggttagcaataactcgcctgtgctttatcttccatgctatatgtagcatagacattgatccagtcatgtttgatgaaatggaaaatgaggccgcaattatactgtgccagttggagatgtattttccccctgctttcttagacatcatgattcacttgattgcgcatctggtcagagaaatcaaatgctgtggtcctgtttatctacggtggatgtacccggttgagcgatacatgaagatcttaaaaaggtatacacagaatctatatcgttcacaagcatttatcgttgagaggcacattgcagaagaagccattgaattctgtctgactacttacagaatgctaaacctgttggacttcttgagtctctgcatgatgac

SEQ ID NO: 190883 - DNA, 317 bp, Glycine max
gactaggcggcggtcggacgatggcgcacaacatggttgccacatccacaatgcgcgcataaactgaccatcccctgtcgcccacctgcaactgagctcacgtactcccacgtagcccatatcctcgattctatcaacaccgggtcccaatcaatactcccaagcttccacagcatccaagcaaaacaacattcttacagcacaagctatcgcacccaagcaagactgagcataggaagaaaactgtgctcaacacatcaaccaaaatcacaggtcttctcacttaatgaccacaggaaccattccttcgatccaat

SEQ ID NO: 190884 - DNA, 471 bp, Glycine max
  unsure (1)..(471): unsure at all n locations
ntgcggatntggtcttcgccagtgaaaggatcgatgtgtggttctataataggcaaatttgatcatcctactacgacgactgagaacaatggggctaataaagagggtgaggatgagggagaaacccatgctgtgactgccattcctgtaccgccaagtttcccaccaacccaacaatgtcattactcaacccttctccttacccaccgcccagttatccacaaaggtcatccctaaatcgacaacaaaacccacctaccacacaaccaatgctaaacaccacctttggcacaaaccaaaacaccaaccaagaaatgatatttgcagcgaaaagcctgtaggattcaccccaaattccggtgtcatatgctaacttgctcccatatctacttgataacgcaatggtagccataaccnctgctaggttccctcacacccccatttttctgatgatatgactcgaacgcaaca

SEQ ID NO: 190885 - DNA, 461 bp, Glycine max
ccaagcttagcggacagggccgactaaccgagttcatccaaaaaaccagaaaatcaacataaattgatgaactcgcttagcgcacaggcgcgcttagcgagcacatcgaaatttccagaaaacttggggcttttcagccccctaccataggcctctgttaggcctcaaaacctaatcaaaacaacacaaaagcatgtacattatgtgcgaaaataaacccctaacaacatagcatctaaagactaacctaactgtaacattgcaaagcacaaaatcaaagctttaaactagctacagtagtcttctatcctaaggttcaaagcaaaaataaaagtgaagagttgagaacacttacttggattgcagagaagattaagcacgaggaagcacagagaagcagagaatacaatggaagcacaatgcagatgagtgcaagagtaagtgagaaatgtgtatgtaat

SEQ ID NO: 190886 - DNA, 447 bp, Glycine max
  unsure (1)..(447): unsure at all n locations
tgctctacattacattgatgtttgtatttattggaggatgttgtatgccattnttgttttaagggtagcatttcttggtaaaactaactttccaaatgtttgcattcgcaggaaacggccccgaggaagtgatgcaatcctaccccccaagggcattggatagaacactccaataagattgggccaaaaatgcaagagaaggccctagggttctcatgagccttagggtagatttctgagcccatgggccaaggttgggtccaattatctttgtacatattagactaggatgtcattatatttggtccttgtatttagggatccatattgtaggtagggtaccctagaaatataggattnttcagcccttgtatttttgggcacctagactagttnttgtattaggggtagttntgtaatttcacatgcactaagtggatatttgat

SEQ ID NO: 190887 - DNA, 518 bp, Glycine max
  unsure (1)..(518): unsure at all n locations
ntttganncccttggacntcgcagcacctgagatcctatctagacgacctgcangcttgcaagctctaaacagactttcaaaattaacattttgtgcgactaaggaagcataatctggtacttgaaccgagcggtcgctcaaacgatgatgcctcattaactatatttacatgtatagggactgttttacaacgcactttggaaagattattgcgctcgggtatgcaaggctcaaatatgatttttgtaactggaagagagatatctctacgtccataaagtgcagctacctgtcatcaccattcattaacccaattgctggccaatgtctatcttaacatattcttctagcacattattcataacaggtctgaacattgtaaactcatgaccgccactactaacaatagagctctattgtcattcattngcacaactcttaactaaccatgcgatccgacgcgtactatcacctcttttgtactaatggcggctcatgttaaagatctacacgcacg

SEQ ID NO: 190888 - DNA, 346 bp, Glycine max
  unsure (1)..(346): unsure at all n locations
tgtactatnggtcatatgcatatgatacaatcaaagccttctcttcaccaaccaggattccgaatgcttgcagtgcaaacaccgctgatatcaacgctccgcgcgtcttgttgctggcatatttatacatgattgtggctgaaagagggtagtctccaccgatggcaaacgctagacagaatctgaagaagcatagagaggccatgacaccctgtggagctgacccacaggagagttgctgggcaagggaccacactaccatgagaatgagcgttagtgcccatactctatatctccccatttaggcaccaagccaaccaaataataatggtccgtattatgcgcc

SEQ ID NO: 190889 - DNA, 174 bp, Glycine max
agcttcaccggatgatgccgatctatcattttctattcgacatcatacaactgatattcagggaatgaatagaataatcactgcgcggtgtcggtcgttatatggaccagaatgatatctgtcagccgacattgcgcaatttgttttacaaacgctagcgataatggatttttt

SEQ ID NO: 190890 - DNA, 251 bp, Glycine max
  unsure (1)..(251): unsure at all n locations
atactcacctgctctanattacattgatgttagtatttatgggacgttgtatatgccattngcgctccaagagtaacgtgccactgtgaaaactaactcttccaatgtttgcctccgcaggaacggttcctatgaatctggactcctataggtgcaggaccgacaaggcgggcgaaggaactacctctcgcccggagtactacagtcaccgctttaagagcgttgtacaccagcagcgctttgaagccatc

SEQ ID NO: 190891 - DNA, 155 bp, Glycine max
gtatcaaagcttatcttatccagattttagtccatccggagtttattttatcgagaatttatgtgcggctagattttattgcggccggaatttattttatgccatcctatcctattgtgcccagattttattttatttcgattatgggcctggac

SEQ ID NO: 190892 - DNA, 415 bp, Glycine max
  unsure (1)..(415): unsure at all n locations
tctaccntatcaggatatataggcgactgtaatgacatattatgtatgttacctacgttctgaacggctcgaatgctatcaaaggcttcatcagataagaattccatatcaataaacttacggtcgattatggaacgagctgagaaaagatttgcgtaccgattctactattcttctgaagaaaacaatggggaagatgacaatgagggtggaattggtgctgtggatgcgctagcggctccggaacgatgagctcttgaagccgaagcggacgcggaagaaccctttcgtttctttgacgattctgccattcgaaggagaccctgcagagtccaatcggcgagatcaatataaaaatgaactagatgaagatggcaatttacgggagttgattcgatgaagaaatgagtgagat

SEQ ID NO: 190893 - DNA, 210 bp, Glycine max
ggaaagcaaggcaaaggatggggaagagaggacaagggagaagaggggggaggagaggacgaaaggaaaagaaagggggaggaaaaaaaacaaacggagaagagaaagcaaggaaagaaaagggagagaagaagaggggcgaaaaagaagagggaggaaggagggaggaagaagaaaagtgggggggcgagaggaaaagagatggagaag

SEQ ID NO: 190894 - DNA, 230 bp, Glycine max
  unsure (1)..(230): unsure at all n locations
atgcaagcttcacacaagttggttgttggtggtatttgtttgattacatgataacctctcatttgtgtttagcttgtattattggttttgaagaacaccctttgctacaagtcaaacaattatacttggtgatagggccattagggtttttcttcaccctaaacacctatttacaaccaattggatccctacatggaggcagttcagtaagaganaatgaaccatttttc

SEQ ID NO: 190895 - DNA, 449 bp, Glycine max
  unsure (1)..(449): unsure at all n locations
tatcgnttagcctaattcagatcaaattgttatgggcttatctcatncttggccagcttagtggaccaaatcagcctgagatgcaagggttaagcgctaagcgccagagactctcggcttagcgcatgaccaaagatgcgcttagcaaaaggactgtgtttcagaagaagaaaaattctaagttatttttcagtccctttcttaagaaattgaaactcttatatctatcatttaaaaacaagctgatataccccaatgtaatgattatgaagcaagttccacatgatatactgcataaaatgcagagataacagaaattaaaactgggttgcctcccaggaagtgcttctttaacgtcattagtttgacacgtttacatccatgggtgatcaaatgcacagagctatgtgctcttgtgaattcttcaccatggtacagtttcaacctct

SEQ ID NO: 190896 - DNA, 372 bp, Glycine max
  unsure (1)..(372): unsure at all n locations
caagcttgtaccaaaaacaaaaaattntnctaatttaaattacatgacaatgagatcgctatataagatactacaaagatcacattttacaaaagattcatatttaaatacccatttttggcgttttttttttcaagggtgtggcattgccgagagacaatggagggtgaccatttctcatgtttggacgtcaaagaacccataaacattattcccgttctccggttctgtcaaataacagctaaaaacaaagccagaaaatccaaaaaaaataggaaagtgaccttttttcatgttcaagtacccatgtttgggaattttctccgtaggtgtggcagtgccgtgagacaatggagggcggccatttctcat

SEQ ID NO: 190897 - DNA, 173 bp, Glycine max
catgtagaagagtgataactcttagtaaaacctaacaccatttcgaacactgctaaacctttcgaacagttacatctttaggtctattcataaacaagcactggtactcgattaccaaattacagtgactgattacacactgctttgaaacgaaaggatgtgactcttcacct

SEQ ID NO: 190898 - DNA, 453 bp, Glycine max
agctcgagaggaggttccagcatgacccggattagttgtatatctgtattacggctcagcagcgagtagctgacttgtctggctatcatttcaaagaagggtttgacaccatactaatcttcttactttacagactttgatggattatcttttacttgtctgattatttgacattaaatctaaagggaaaataatatgcttgttgaccttgacaatatacgcataccaggacatggataaatgcaaagcttttagtttaccttgttaaaacttgttttgtttgaaacagacaaggatatgaataccagtttattgagaagattgttgaggaggtctctagggagattaatctttgtcctttacatgttgcggattacccagttggactaaagtcacgagtgttacatgtaaggagagctttcgatgctggatctgatcatggcgccacatgat

SEQ ID NO: 190899 - DNA, 470 bp, Glycine max
  unsure (1)..(470): unsure at all n locations
tactgcgacgagtgcgcttcttgaaagaataccggaaccgtactcacggctctgtataacgncaccgggctgcagcgtattctccattccacaatctgcaacagatacaaacacaaaatcacatttcactcttaaaaccctaaaccctaaacacacactgttaacattggcaaataaggtaaacgataaacgcaattaggtcaaaaagagctgcgattagataagaaacctccgcatatgtagctgactggctcaagctgaggatccatcgctggttccagcgaggtgtaaaggaagaaagttctaagctntaacctttagctntctgctcaacgaagaaaatgtaaagtggctcagaatcagaggctctaaaacgaaggattgtgcttcatcttcagctcttatgggcccaaattcgcaacttacatgtccaaaaccgagaagcctctctattctgtatttctttttac

SEQ ID NO: 190900 - DNA, 463 bp, Glycine max
  unsure (1)..(463): unsure at all n locations
agcttgttngcattnggtcccacttatgaaatgactatattttaataataagctaattagagttattagatagatatattcggccgtttgtgtagatgggaaggatgagattctgaataaagcttccttctgggcttacaaaggaagggattcatgattattgatcatcatcatcaatattattatttctttttgaagacaaatctagaagccaaatttttcttccagtggaccctaccctctttcttctccaaaatgttgctcacataggaggaatttggttggagggctatacgatgtggggacaaatcacttgcactttggtgatcaatgatcagtgatcacaaacgcaaaaacaaattacaaccgcttatatggtttataaaatcatgcatgtcattcttctttttacagtctatcatgtgtgctcttcattcatacactaactgagtacatactactc

SEQ ID NO: 190901 - DNA, 449 bp, Glycine max
gtaaatgctgtgaaacttattcatatccgttttcttggaaattgtgtcattgaacttcttggcgtggatcttccaactgcatatcaacatgccttcacttacatccggcaactggctacaattttaagggaggcacttaatacaaagactaaggtgctgtttatttgtccagtacatgttattttcttattaggcactgtaagaagtgccttgaacttatagttatcctaacaaactggttatatatggatattaattactggcccttagttcttacaagtttggcatgtttttctatatttgtctgttaaactggttctttaaccttgcatgtaaaaccttcaaagttctgttatttgtctgttacagttactaggcactcttgattattgttgaaaaattagaggcactcataaacctttcatgttgttgttgatagggattgagaa

SEQ ID NO: 190902 - DNA, 462 bp, Glycine max
  unsure (1)..(462): unsure at all n locations
agcttgcaggattatggngtacccatcacaattggtactatgtggcgttcgggcgaaggngcaagacaactcttcacatncacaaatcacacataaagccaccatccccagctggccaccttaactgagctcacatactttcacggaccncttaatctcggtcctctcaatgccgggtccccatcaattcttccaagctttcaaaacatncaagtaattcaacatccaaacatcatgaactatcaaagccaagaaaacaaggcagaggcaaaaaactctgcccaaaacacaaaccaatatcacagcttttcacactcaaataccccagtatcattctcttcgttccaattcgttaaccgttggatcgactcaaaacttttactggaagtctctagtacataagtctacattttgaccgttgggatctgcgattaaatgtncagaacccaatatgtactaccc

SEQ ID NO: 190903 - DNA, 409 bp, Glycine max
  unsure (1)..(409): unsure at all n locations
atgctttaatcagtgttttctctaactcatcttttctttaaatcaacctcccggtgtcaaaaatcacttgatccatgacatgcactctaaaatactttgtcttatgtttaaggtgtttcatggaaatacattaaactgtacttcatcatcttgtaccttgacagtgagtgttccatcatccacatcaatcacaactttagaaatcttgatgaaagatctactaagaatcaattgaacttcattgccttcatccatatccatcactgcaaagttgactggaaagacagatttgtcaacttttatcaatacatctacaacaatgccataaggaagctgtgttgttctgtcagctaactgcaaacccatccttgntggtctgatttcaacttctcctatctgcttgatcatg

SEQ ID NO: 190904 - DNA, 384 bp, Glycine max
  unsure (1)..(384): unsure at all n locations
agcttncatcanaatctaccttattatataacttagagatcttgnttcatctgttcttgcgattccaccttttctcatatcattttgcatgtttttgctttctgtcttgaatggnatagaggtgagggtcgattctttgaggatcctaacgagggtttgataatcgattntgaccgagaagtaagtcaaacaataaacgaagaagaggaagaggacgtcctttcaccaaagttggagaggttgatcgctcaggaagaacacgaaatgaagcctcaccaagaggaaaccgaactgataaacttagagaccggagagggaaagaaagaagtgaaagtaggaaccagtatgatcgcacctatccgccaaggtttgataacccttctt

SEQ ID NO: 190905 - DNA, 357 bp, Glycine max
aatgaaagtagaaagtgttgaatgaattaattgatctaacttgcaaaacaaagccttgcttttatagactcttcgtgtctggtcaagaagatcatttagaagagttattacttttagaaaaacttataaccaattcgaaaaagtccaaaaccttttgaagagttacatcttttgatttattcagaaacagccactggtagtcgattaccaaattagtgtaattgattacacaaagcttttaagtgaaaggatgcgactcttcacctttgaatttgaattgcaacattcaagggcactgataatcgattaccaaaacattgtaatcgattacagctttttgaaaataattggaacttt

SEQ ID NO: 190906 - DNA, 240 bp, Glycine max
  unsure (1)..(240): unsure at all n locations
agcttgactntggtttagacatgattgatgcatgatttgggacttgtaggaattgatttgggcaagaatggataaggcgaagtgtgattttcgaaatctgcacttatgcagaattttgctgtcaaaataggtgcagcaggattttggctctgtgcagaaaaatgcttgtgtggttggctgtggaaagagcagtacagaatgagttctggatgtctgctagtaaatcccaacggtcacaat

SEQ ID NO: 190907 - DNA, 438 bp, Glycine max
  unsure (1)..(438): unsure at all n locations
ntgaaggtgcgtagcccaccattntccatagtagaatactgttaatgtgtctactatcattgtcatcgttttttcgtcattgaggtgccacttgagctgccaggttctccacctttgggcgtattctttgaaagatcggtgcccccttttttgcacatattntgtagttgcatcctatccgaagccattataccgacactgcctaacgaaggcaaccattaggtcctcccaggaatggactcgggaaggttccaagttagtgtaccaggtaacaactaccccagtaagactttcttggaaggaatgtatcaacaattcctcatcttttgcgtatgcccccatcttctgacaatacatctttagatggttcttggggcaagtaatccccttgtacttgtcaaagtccagcaccttgaacttgggaggggtgatgatatt

SEQ ID NO: 190908 - DNA, 263 bp, Glycine max
  unsure (1)..(263): unsure at all n locations
agctnttgacggactataccaagctctaggttctttgacggagaaagatctatatataggcttgctaagggtagagagaggaagactagagatttggatcaagtaaagagtgttaaggatgaagaaggcaaagtcttagtgcaggaaagagatatcaaggaaaggtggaaggcgtatttccacaacttatttaatgatggatatggatatgactctagccagctacacccaccagaataggaccggaactataagcactatcg

SEQ ID NO: 190909 - DNA, 423 bp, Glycine max
  unsure (1)..(423): unsure at all n locations
tgttgctcatatattgagtgtgtgattaattgnttgtgtatatgggtttgatggaaccaacatttatattagttgagcatggttgctggtccttgtttgtaggggctgttgtagcctatgtagataatttccggcttgtagataatagctgggagcttatagataatgttaaagataaaaatttgcttatagataaaaggtagaagataattgcaccttgtagataatgtgtaggctcatagataattaaatacctgtcaatagataagatattcaaatacatttgaatattagcaggctagagataacctgtatgttggggagtccggctgctaagggccacgcatctgcactcctgttgcaaggctagcgtataggagtgacacgtgtctctgactgtcatgtangtcctagacagtacat

SEQ ID NO: 190910 - DNA, 441 bp, Glycine max
  unsure (1)..(441): unsure at all n locations
ggattcttttattattgcaaccgcgagggcgcaacanacacagacacgcccacacgctcagtcgcacaggtgcacacactcactcacactcacttatacacatacacacgactgcatacacagacatttgcacacataaacacattcactcacttatttccggacacacacatagaaacacatattctcactcagagacacactcacactctctctcgtgaatacggacgcacacactagatagaaactcgaccgcaggctgtcagataggcgcacacacacactcgcacttctgtgattgaaagacacacgctcagaaactcatcacacactcatagagactcatacccacatacagacacatgctcgcagactcacattcacacgaccacatagagatcctctcacgcctacacatagagacacacacacactctctcg

SEQ ID NO: 190911 - DNA, 474 bp, Glycine max
  unsure (1)..(474): unsure at all n locations
ctcagcttataaggcacctgttctagctctttctgactcttctatatcttttgatctagaatgtgatgcctctggagtgggagttggagctgtattgttacaaggtgggcaccctattgcttattttagtgaaaaaattcatagttcccccctcaactaccccacctatgataaagagcgttatgccttaataagagccctccaaacttgggaacattaccttgtttccaaggaatttgccattcatagtgatcatcaatcacttaagtacattagagggcaaaacaagctaaacaaaaggcatgcagaatgggtagagtacctatagcaattttcatatgttatcaaataccaaaagggaacaacaaatgtggtagctgatgccctatctacgagacacacattgtnttgctccctangagctcaaattttaggatttgatcatatcanggacttggatgctttagatgaaca

SEQ ID NO: 190912 - DNA, 341 bp, Glycine max
  unsure (1)..(341): unsure at all n locations
agcttgtaatcgattacacatatactgtaatttattaccagaagagagtttcagaanacattctcaacagtcacatctttttgtgtgattcttgaatggctatcataggcctatatatatgtgacttgagacacgaatttgataagagtttttcaaaacaaaaaggtcttatcctcttataaagagaaatcgttttatcctcttacaaattccttggccaaattacttgtgattcaataaggaattatttgagtgctcacattgttcaatctatctctttcaagagagatttcttcttctcttcttcttcattntgaanagggattaagagaccgagggtc

SEQ ID NO: 190913 - DNA, 451 bp, Glycine max
  unsure (1)..(451): unsure at all n locations
tctacaataaanatccatatccttatgcntttataagtaacattcaaaggtaaactataacatgtttttatttatagtttaattcaatgtccaacgcgttgttataaaacaagtgtctattttttttttgtgaaaaccaacacccatgtattgtatactcttacacttccgtattgacataactaacttaacataaatgatttatattctgttagtgaacgtccactcgattgacttgcacatgatatccatcttgaggttgattctctcgctagaacattctattatttgaatttttcctcttgatgtatggattgacttgcacatgataacctctggatttcaagttatgtgctcttacagacaaaaaaaaaaaagaattatctacaagagcaacaatagtacaagtagtggaagtagagaacgtgcctatagcaaaaaacactatacc

SEQ ID NO: 190914 - DNA, 293 bp, Glycine max
gcttagagaaaactttcttgagaagcaagatcttattaactctcacccatctaagaactaagctcacctgcatgagaaggtcacttgagaagctagagcttagctacacacagcgatctaaaagctagactgacctcctcgataaatgacatgataatacagaagaagtccctactacaaagactactcaaaacggcctgaaaacagggctaaaacgctatactaatagaatgaccatagtacgaggcccgaaagagggacaaacctattctaatatttacaaagaagagtgg

SEQ ID NO: 190915 - DNA, 248 bp, Glycine max
  unsure (1)..(248): unsure at all n locations
agcttgaggctcaactatgnatgttcataacttattactgncgcncaagacatacaagtgagcttgtaaaaaatcttctggacttggagtgatcacatgcaggcctcttgaacccttgccacccaatctgtcatcatgccgagactcaagaagaccaacaggtttagccttctaatatattctgaacaaaattcaacggcttcttatgcaatgcactcttcaacaatagatgcttctagacgatatag

SEQ ID NO: 190916 - DNA, 352 bp, Glycine max
  unsure (1)..(352): unsure at all n locations
ngagttntgattggcagaagaagaacagatgattatccagttattggataagncataggaaaatattgctgattatcagcataactgacattgctctatgcacatntgatcatcatgctggagctttctcatctattggctttgtcatctaacctattattaatatttattttgcggagattatccacttatatatcttctaacttctaaatagtcatgagggattctacatatttgtaaacgtatgttgccatgaacgttttcacaacgtcaaacaaatctctcttgctctgaggtaataganatcgccattcttctctccctcaactctaagctttcactttcttcttac

SEQ ID NO: 190917 - DNA, 470 bp, Glycine max
  unsure (1)..(470): unsure at all n locations
catgcaagcttcctcggtgccatttcctgcgaaggcatatantttttaaagttagttctaccagtgngacactactcttaaaacaaaaatggcatacaacctccccccataaatacaaacatcaatgtaaaattagagcaagcttatgcgcatatttccttacgaacgttcacttgcacaagacattctattaactaagaaaaaatgcacccatatacaatcaaggcagcttcgttatctagattatttacatgtacttccaaggtgtattngttacttacatcacacacatctccttggctaaatttacatacatgcatactcaaagcattttggggtaccaaaaattgcacatgtgcacatcttggtatttctaatacctatacaaacttcatgttgaatcttgactatctacacaataaggtgctacatttcatgctctttttaaagttttgctacctaaagtcgca

SEQ ID NO: 190918 - DNA, 502 bp, Glycine max
  unsure (1)..(502): unsure at all n locations
ntttggactgagcagcgaacttcgataataagcttcgaggtgtgtagcccaccttatttatagtcgaatactgttattgtgtctactatcattgncgtcggtgtgtcatcattgaggtgccacgtttgagctgccaggtatctcacacctattggggtgtattctctcgaaagatactgtgcgccccccgtattgcccatgttatgcagctgcatcctatacgaagacatcatactgacactgcctaacgaatgccaccactatgtccttccattaatgtactctggaagagtccagctagcgtaccatgcaacgagatcccaggaagacattctcggaatgaatggatcaagtatcccgtatattgtgcgcatgctcccatcttccgataatacatcattagatggttcttgggcaagtagtcccctcgacgtacgcaagacgctaccggaacttcgtcgtggatgatatcggctctagaacaactctttgggttgaaacg

SEQ ID NO: 190919 - DNA, 370 bp, Glycine max
tagtttacacgaacaaacaacatgaacaaatagattaacatggggaatgattctagaacaataaccgtatcatgattatttattttgttagagatggtatacattacttgtcagtatacaattaactagtattgcattggaagattaaaatacaaattatcttgagatatatttttttttctgacacagttgttttttttatactacattattaatgtcgaatatccatagactttgtcaaagattagctcttattagaatatttgaatagccaagttttctcagttacaggactcaaacctcacatcttatttaagaagatcgaatttagcattacggagttattaattcttaaacaactattcatatt

SEQ ID NO: 190920 - DNA, 462 bp, Glycine max
ggctcaatctttacatatgagtatgctaacctatgaaatcttaatgtttccttattacgataaaccaaagagaaggaatacgggtatcatatattcgctccaaaaaaatgtcaaaagataggaaacttaccacattttgatgagtgggatcatcttctacgatagtttcatatgaagattgaatcgaaacaaagggacaaatctcaaatatggattgtgcatctgctacggagtataactccatatatagccaggtgtgctgaacagaacagtcccatccagctcccactgtctacatgaatccacttcattgcgaaccattactagacattaatcacaagtcatccaacattgagattgctagtgatacataggatgaagcacggaaaacactcagaagttcttacactaatcccgcaactagaatctcgctttctttacgaactccacaacatctcttct

SEQ ID NO: 190921 - DNA, 230 bp, Glycine max
agctggcatcattctgtacatagccaaaagagattaatcttctctaagcaaaaacgggaagttattaagttgtcttcaaaatgatagacaagagtaagacatactttgagtacaagacaagggcacctttacttttcatatttaagacgtgtttgagtaaatagcttagtatttgttgaataagttcttatcacatgaaacttatgtataagtttacagtgaaggttatt

SEQ ID NO: 190922 - DNA, 307 bp, Glycine max
aaaagcttgagcttgaccttcttaataaacaaatcaagtcgagtcgaatcttagataggtcgagtcataggtccttaacaaacaactcaattcatttccatctctaatggggagagggcaacctagtagagattctctcccttccttattttttttttagaagtaaaattcactatactaaaatattacttatcatatacaacaatcatgatttttatgtaaattataatatttctctattgaaaattaatgattaattcctgaaacattgagattactcaagaaattaattcctctcccatatcta

SEQ ID NO: 190923 - DNA, 374 bp, Glycine max
agcttatgcagcatatatatactatataccttctctgcgcagcagcagactcatacgctggctgacaattatgacgtttccagcagccgatacaaccctggatggatgaatgcccctaacctcatatgtgacaggacctcacaacaaccacagtagtctggtgcttccttacaaaaagctggtgggccaagctgaccatacattcatccaccaatccaacaacaacgaaccccccggacacagccaacagttgaggcgcctccacaagctttcctcgaagaactagtgaggcaaacgactatgcacaacatgcagttttagcaagagaccagagcctccatttagagcttaaccgatcagatgggacaattagc

SEQ ID NO: 190924 - DNA, 64 bp, Glycine max
tgtgctggacctggatcacgcgtctaacttctctttcaattctatgcgagggacgcgcgactgg

SEQ ID NO: 190925 - DNA, 388 bp, Glycine max
agcttaatcatgaatgccccgacttgtctatttatttccgccaacatactttaggtatttgcactaccacaacatctgcgggactcgctgtctgacctctatccatggactcacccttcaggaagactttcggaccagggatctcgatgtccatggatccactaccaacttcattaatacttgtttgagctggtcaccaagtcaaaccattggttatgatactaactgatgtgaaactgagggacgagtccatgcatggaggggaaaacaatgcgtcccctgtatcacaagtctacttgacgagtgagtccatgcacgacaggctgagcgacgtgtctcgtagccatgaatcagtggagagtggcgatcaaggcactatgacatgttg

SEQ ID NO: 190926 - DNA, 453 bp, Glycine max
  unsure (1)..(453): unsure at all n locations
ngatgtcattcanaacacactatgtagacctaaatgattattttacatgcattggttatgtaattgtattcattatgcgatataatttgttgtaacccgttactaaccaattaatattatcaagtactcgtttggttaagcaaggaaattgttggtccaacaaaaatcatttatgcgtgcaacatacatcattgtcataattgacaacacataatgacatgcatgcgtcttacagtttgagtgcgacaacacattggctgacttcagtacacattntgaaactagcagtcgttcgacaacacattggctgacttgactacacattagtgacaacacattggctgacttgactacacatttacgcgtgtctattnttttgtaaacaaaattaaacaaaggctcggtcacaaccatctatatatatggcagactaggctactaaatcacacatta

SEQ ID NO: 190927 - DNA, 465 bp, Glycine max
  unsure (1)..(465): unsure at all n locations
ctgaggcatgcaagcttgcctgtccgatgcagcagtattgatgttccgagttatgttggggaacggttacgaacccggaatgggtttaggcaaagacaacggcggcataactagcttgataaatgccaaaggaaatcgtgggaagtatggtttatgctataaacccactcaggcagatataaagagaagcatcgcgggaagaaagagtggtggtcaaagctcgcagttgagacaagatagtgaaggaagtccgccctgccacataagtagaagctttataagcgcgggtctgggagacgaaggtcaagtggtcgcgatatacgaagatgatgttccgagtacattggatttagtacgaccatgccctcctgatttccagctaggaaactggctagtggaggaacgccctggcatttacgcaacgagcataatgtaaacctttacgggtttaanagctctatagtt

SEQ ID NO: 190928 - DNA, 387 bp, Glycine max
  unsure (1)..(387): unsure at all n locations
acactatgaaactcagcttctaaggaagttntcttaagaaagcttctcaaggaagttttcttataaaagcttctcaaggaaganttcttaagaaagcttctcaaggaagctacctagtctataaatagaagcatgtgtaacacttgttgtaactttgatgaatgaaagtcttatgagatacacttcaaagttccacttctttccctcttttattccttcaatttcgggctccccccttctctcttntcttttcttcattaaagcatcctcttcaagcttcttatccaaggaaattcttggtggtgaagctccttcttccttggcttattccctagtggatggggccgtccctctcctcttctcctttgccttccgctgcatctccat

SEQ ID NO: 190929 - DNA, 423 bp, Glycine max
  unsure (1)..(423): unsure at all n locations
atcttagagcacctgcagctgcagcttggtagggagggatgttcattgttctttgcctgaattntggaagcaacgggtgcaactccgtgacccgaaaccacatgacccaagtactcaacttgtggttgggcaaatgaccatttagagaacttgagcacgaattggttgtgaaggagggtctcgaatgcttgctcaagatgaatgagatgctcaggcaatgtacgactataaattaaaatgtcgtcaaagaaaacgatgatgaatcgccggaggtaaggccggaaaatgtcattcatggtggcttggaacgacgaatgtgcgttacacaaaccanacggcatcactttgaattcatagtggccgtggtgagtgcaaaacgcagtcttggccacatcggattcatgcatncttatctgataatat

SEQ ID NO: 190930 - DNA, 461 bp, Glycine max
  unsure (1)..(461): unsure at all n locations
ntagtggcccttaatttgaagcaatatttgacattcctattatgtattccctgacattncttttgccttgatagttcatggaaatcaagttctgaaggagagtacttgtttccgccttatcgctntttgcaaagcacttttttaatttcagtaagaaattcttaggcactagttatatcatctaaaacaatgctcctaaagatcttaggaatgcgacgcttaatgatcataagactcatgcgatttgagtgatcccacttctcatgaagtttcctctgttaagagattgtggaattcgtaggagaagggggtttctcaatccttaatgcaaggtctagatccatgcagccaagaacaatttgaatgttctatttccagtccttataatttgcaccattaagaactggaaccgaattcaaattagcagatatagaagcaacaacggttaagatcaaaataat

SEQ ID NO: 190931 - DNA, 521 bp, Glycine max
  unsure (1)..(521): unsure at all n locations
atacgagcctgagacgtcgagacacctagaatactccagctctgagccataatcctaactcaccatatacctagaccctttgtgatattgtcaatccttaccctcggacgtcttaataaacgaatgaatatgtcccctctcttaaataagtgaaggcatatgtccattcacagacaaagcaattcatatacatctcgaatgtttccagtccaacgctaaaagagaagaaatgactttcctaattattgagtgggagaaagcctcactatactaaagaatttttcctatctaagaatgggagacagttctacgcacactgaagaagacgatgatgagtgaatgatagctcctgatcaaggatcgaaagataaatagaagaaatgtgcagaaatgtctttggaccggacaatatctgtacaatacagaattgtcaccaaatgaacaaaatagagggaaaggaaaccaccacctgacagtggtcttcttcctttgtnaccaaccaaaatcctgtgcgttggtct

SEQ ID NO: 190932 - DNA, 378 bp, Glycine max
  unsure (1)..(378): unsure at all n locations
gctntgatgtaacatttggagtggttaatgaaacaacgagatgatgcgctccatgagaggttggatcaaatggagaataaagaccatatgaattgctcaagagcttccattgtttaattncgagcgtctagatatataatgcgcctcaatcggacctncgagttaaaagctatgaccatttgatatgctcacgagctttcattgttcaatttcgagcgtcacgatatagtatgcacctgaatcggacctgcgagtgacaacttatgaccatttgaatcgctcaagagcttccattgcccaatcttgacgcgcacgatatattatgcacctgaatcggacctgcgagtgacaacttatgaccattcgaattgctcaaga

SEQ ID NO: 190933 - DNA, 372 bp, Glycine max
  unsure (1)..(372): unsure at all n locations
ctcactcggaggcccgattcaggcgcataatatatcgagactctcgaaantgaacaacggaagctatcgagaaattcaaatggtcaatacttcgaactcggaggtcctattaaggtgcataatatatctagacgctcaaaattttacaatggaagctctatggctatacaaatggtcataacttttcactcgaaggtccgattaaggcgcataatatatcgagacgctcaaaattgaacaatggaagctcttgagcaattcanatggtcataacttgtcactcggaggtacgactcagctgcataatatatcgtgacgctcgaaattgaaaatggaagctcttgagcaatgcaaatggtcataacttgtcac

SEQ ID NO: 190934 - DNA, 507 bp, Glycine max
  unsure (1)..(507): unsure at all n locations
ntgtgctctgatacactagcagannaccgancactatcgaaactcaagcttagatttacaaagctatggaaggaaaggaattattgtattgttctctacaacnaggcatcttaggatacttgtgcttaaaggaaccatctgcacttggagtgtataggtaagggaaaccagtggtcactgactatcttatcagacacattggagctacctacccataccgattgatctttgatcataggccttctgaaacgaacgtctatccctctggtgtctctatctataataacagggaatcagaaacttttgagatgctttgtttcactccaagggaactctaacacatcctattgttgatgcactatgaaaagatagttctttcttgtggcagaaccgagattgaaatagaatttcatgtgtcagacatcaacttagaggatcctgaatatagtccaaggttctagaatggagaaaatgactatgacttgactgatatggatttgtgactct

SEQ ID NO: 190935 - DNA, 412 bp, Glycine max
  unsure (1)..(412): unsure at all n locations
agccttggaaggatgcttcactgtgttgaatatttttagagagaganagagagaggggggaagcatgaaattgaacgaagaacaagggagagaagttgaattgtgagttgcgtctcacaagactctcattcatcaaagttacaacatgtgttacacatgcttctatttatagactaggtagcttccttgagaagctctcttgagaaaacttccttgagaaacttctttgagaaaacttccttgagaagctagagcttagctacacacacccctctcataactaagctcacctccttgagaagcttccctgagaaaattcctcaagaagctagagcttaactacacacacctctttaatagctaagctcaccttcctgagatgagaagctagagcttaccttcacacccctat

SEQ ID NO: 190936 - DNA, 434 bp, Glycine max
  unsure (1)..(434): unsure at all n locations
ccttcaaactaagcttggcaataaatactcctacatttatttcttcatgctttgtatgnnggcctcgacctttgtcacgggaagccggaaggtccatatcaccttcttaattgtacacatggggcactacgcccccaaatgcgcaagtaagaagagataattctccgggctctcgtgtccgtaaaatgcattcatatcatgcatcgcataagcatctcttcataacatcataatggacatatcctgcatttggtcgttatcatattccagcctcacattttgcatgagtcatggcatcatcatgcatatgcgttcaacaaactttttgatctgcgaaatcgcataccatatgttttcatgtttgctcatccttgcgttntcctctacacaacaaacacaaaaaagggggaagcgtgaaacttcacactacattc

SEQ ID NO: 190937 - DNA, 258 bp, Glycine max
  unsure (1)..(258): unsure at all n locations
cttctagcctcanagaggtccaggaaggacaatgcggtcgaatgaactagttccactccggagtacgactgttaccgctttaggagcgctgtacaccagcagcgcttctaggccatcaagggatggtcgtttctccgggagcgacgcgtccagctcaaggacgacgagtatactgatttccaggaggaaatatggcgccggcggtgggcatcactggttactcccatggccaagttcgacccaaaataatcttgagtt

SEQ ID NO: 190938 - DNA, 405 bp, Glycine max
  unsure (1)..(405): unsure at all n locations
taagcttaagctgctcattgactccagatngctacanagaaagacagagatttgtatggtgatccacagaagaacatagaccacagactcttgcagcaggtgtagatttctgattcatggcaagctgggttactaggttgaccaaggcattaagttttccctcaagctttttatttttagtagatgaagatgaatctgtggccacctcatggactcctctaaggataatagcatcatttcttgcactgaattgttgggagttggaagccatcttctcaatcaaattcctagcttcagcaggggtcatattaccaagagcgtcaccattggcagcatcaatcatattcctatccatgttgttaagtccctcatagaaatattgaagaacgagttgctcagaaatct

SEQ ID NO: 190939 - DNA, 355 bp, Glycine max
ttctgctggatcttcatggtggaaaatcaccattaaaggacctcattgaagctaaaagatccagcctccatagaaaccccacaagcaagctttcatcatcacgataccgggttctattggtgaggttgatgtaagcaaagctcttatacttgggagctagtatcaatttaatgcctctctccatgtgctggcgactttgagagatagagataatgcccacacgcatgaccctccaattagctgaccgcttcatcacaaggccatatggagtcattgaagatgttttggtgaaaggtaaaccccttatatttccagatgatttcattgcatagatatataagaagatgctgacatt

SEQ ID NO: 190940 - DNA, 621 bp, Glycine max
  unsure (1)..(621): unsure at all n locations
tacttgcacgtacttgtnactgtantantntaacgtngtttnngattntaaantctgtacacnttttntngannnnnnnnnnaaaaatgatgaantcatggtagtatgcgactctctgnaatactcaatcttgccatccagctcgcctatacgagcagtgcttcttactacataatccactagcttatggaggatgattctggacggcgcaagtagacctggttgctatctgcacccgactttttactaaatacgccccctgcctattatttggcgattcttgttacgaagagttacggaaactgaccaatttcgtaaccgaacttgtattctatccagtaatgttacagaacctatgctgattacataatcatccatcttttgacttacagaatggtacggaaccgtactaattgatctacgatgtctccattttgatttccgaggtgcacagaaacttcggattgtcattatttctttcttatgattccagaatgacccgaacttctacaactgactaatgatgggtggctaacacctcacatggaccagacacatcttgattgttctatcaattggtcgtgacaaatatagaggatcatggtgcttcttagtagtact

SEQ ID NO: 190941 - DNA, 538 bp, Glycine max
  unsure (1)..(538): unsure at all n locations
ntacgaaatactgcaccgtgcttnnctttgggnnaaaaacantctntctntnntcctcaatctcnaagcgtgacaatccatgtagagttactatgatggtcctactttgccgagagcgtgagctgtccaatttctagagagcttacctattatcgatcccaagtgtgacaatctatggagaagctaagaccgtcatacattttagaaagcttgacgatttcaatttctagagtgctcatgaagtttgatctcgaacctgtcaatctgaatgagaagttataacgatctataattgtgaagagcttgacgattccagatttctagagatctgactgtgtttgattcacagccgctcgttctagtgaaacgctatgaccgacatcatttctaaaagcttcacgagtcaatttcaagcgagcttacgttgttgtcctcaagcggacgatcctttaatagcatgacccacataattgggcaagcttcagttgtcaattctcgtgcctatcgttgttagtctcaagccggcctcctgtgaaag

SEQ ID NO: 190942 - DNA, 420 bp, Glycine max
  unsure (1)..(420): unsure at all n locations
atttgataacagttagtctacaaagaggcacatgtgatcatcatactttgataaaagccaaagaaaaatacggcaaatgaaaagggtgagaatgagggacagacccatgctgtgactgccattcctatacagccaagtttcccaccaacgcaacaatgtgattactcatacaataaccgatcttcttcttacccaccgctcagttatccacaaaggctattcctataacaaccaacaagactggttaccgcactttcaaggaacaaattgactttgcacactcaaaaacaccaccaagaatgaattttgcacgagatagcttaaaaatcaccacagatcagtgcctatgatgattggttcaaattacttgaagataaatggagacataccctatccaagttataatctccatttctcccn

SEQ ID NO: 190943 - DNA, 345 bp, Glycine max
  unsure (1)..(345): unsure at all n locations
cggatccttaagcacctgctgcttgcaagctaacagtttttttttcttagtgcatacttttcaaaattagtatcaaaataatcttcaaatgattcatattntagtgtattttaaatttctttgaatttttatctacatatgaattaattatcaaataattgtttattaatgcaaaatttgataaatatgatatgcctgaaaggacactttcatctaatttgaacttttacaatagaattattcaattagaagttattaaaaggtattaaatgatgtgatattgaacgcattacattcatgtcatctgatctctcctatatatgcattaattgttatatattaata

SEQ ID NO: 190944 - DNA, 342 bp, Glycine max
aagacactaacttgtgtttattcccagctaacttgaaagccgcagccctcttctctgatcaatcacctaatatattttcatccgactatattataactatacaaacacacactcctcattgtctcaaataatttaactctcacacctcaaatgataaactcgtggatctacagaggtctcatacaatactatttcattaactctcgtctttaaaggttacaatcgttgatttactgcatatctcataactcaatgcatacaaatctcaatcacatgtttcacattcataatattaattatcacttaccacatctcatacaattcatgactcaattacaatta

SEQ ID NO: 190945 - DNA, 587 bp, Glycine max
  unsure (1)..(587): unsure at all n locations
aaagttgttgttgtattaaancatattgttgtatgtaaacttatatttntttnnnnnnnaacagatggttgtgtgcttccatnccgcaccaacaacttcagcttgcaaatacttatctacgtcgagatattgaatttcaattctcttttcagtctacgttagtagcatcatagcgtatatatgcctatagactcgagtcatgtctaacgtctattcactgcgagagaaagagtggcgtttgcacactataagtcttaaagcactatatggcatgaaagcgaccacgtcagaccgaacggaccagaactataacatatagtatgagtggttctatggaagataaagcaaggagatgattttactgataactcaagtggcaaataggtagtagggaatatattccatttattatactcactactttattcgatataccatacacagtatagttaccgctgatcatgaatccagaaactgttggtgtatactcattgtttcacacttcttatcgtcgatctgctatattattattattattccatggttacctccgtagaagatcttgtgtctccatgcaattgatttct

SEQ ID NO: 190946 - DNA, 384 bp, Glycine max
  unsure (1)..(384): unsure at all n locations
taacttaatgccattaacctagggaattataaaaaacttaatggctgagtgtaactganattgtggcaaccaatagtcaccccaacagccaacaagtcagccaccatttggtctcccaaaaggctgatgcctaggttgccaattaggcccttattacaacttgaactaaacctaactaaagcccttttagttgattatacccaaacatatntttggtcagccaaatttacaaggattgggccattatttagacaaactaaacactctaaaattgagacaaagtggtgccatttaatcctcctccatttgggccatgatacaactcacaaccttggacttttctccttgaaacatgggcttgtattcaaatagtatggacaacac

SEQ ID NO: 190947 - DNA, 535 bp, Glycine max
  unsure (1)..(535): unsure at all n locations
ttctgttctctgcagtccanttncattgcgnaagnnaccgtntactcatncttcaatctcgagcgngacaatctattgagatgctatgaccgtcctacttgtccgagagcgtgcgcagtctaatttctagagagctcacatattacgttcccgagtgtcacattctagtgtaaagccatgaccgtcctacttgttcgagggcatgaccagttcaatttctagcgtgctgacgtattatagtctcgagcatgtcattctgtgtgtgtacttatgaccatcataattgtgagagggcatgacgagtccaatttctagagagcttacgtagtatgatctcgatccgctcatctggtgagtacccaagaccatcataatagctagagagtcttacgcttgcaatttctcgcgtgcttatgttgtatgacctcgagccgcacgtccgagtgagaagtttaatcgtactatgtgtgggaaggtttacttgttcaattcgcgcgacttacattgtatgtcacgaccggacatccgggtaagc

SEQ ID NO: 190948 - DNA, 302 bp, Glycine max
  unsure (1)..(302): unsure at all n locations
tgcatgaagtcttnacctatagcaactcaagatctatgtatctaacacccctcaatttaatggattttcaaggtttgagaagtgaaaatgagaatggggtaattttggagcaaactctcatctcaaacaaaactatgacattaatctaaactcgctcaaactggttntacgacgaaaactctaccgaatcaaaatttgactcctcaacacccaatttaccctagaaatggctcttgccttcactttggtcactcattntcctcctttgcacagcccaagctntcccacaatcctaaatgaca

SEQ ID NO: 190949 - DNA, 537 bp, Glycine max
  unsure (1)..(537): unsure at all n locations
tcacacgcaccataaccgatatccaatttcatacttacattactatagatgaactgagacttatcctactaacagtagcacttgtcttaacctctgaccggacttaattactgggctgcaactggacccatactggttgttacatgcaaatgcctgtgttgtcagtatgggagcaantcctgaaattgtggcgagaaacgtggcatttctgatagaattgttgcggctgtctacttctatacgaatgtgccagagacacaatcattatgggtataactccgctgccacaatattccggaagattggaattttattgggtcgtaatgcaagccaactccttgagttctctaaggatgtgagtatggctataaaactcaaattataagtcaattgtataattaaagaatcggttctctatatgaaaatgttgttagatccaccccaattccggtgaaaggtgttcgaatacaaactccatcaatttctaataaaaacgcaggcataggaaaagttcttgatggtaaaatatataaatcg

SEQ ID NO: 190950 - DNA, 410 bp, Glycine max
  unsure (1)..(410): unsure at all n locations
tacgtaatagctgttacttccacagctcgtgataagtgttgtataagaagaaaaaataagttgtaataataattattgtaatttttcaaaaatgcttggaagtattcataacccatccaatagaattaaacataaaacaaaactaatttagggtctatggctaacccctctacccatggccaatgtcacactaataagagctctcactcctccttatctcaagataagtnttccacgatataacggatgtgagtaaagttagcaattccatgatatctctcactccttagctcatgactccaaaacacatatctcattttctcccggcatctcatacacatgagtaagtttgttaagtctaatcattatcacacaaaataatcacatcaaaatccatcattacaataaca

SEQ ID NO: 190951 - DNA, 298 bp, Glycine max
  unsure (1)..(298): unsure at all n locations
atctatacactcaagcaactcanaatctaggtatctaaaacccctcaatttaatggattttcaaggtttgagaagtgaacatgagaatggggtaattntggagcaaactctcatctcanacaaaactatgacattaatctaaactcgctcaaactggttttacgacgaanactctaccgaatcaaaatttgactcctcaacacccaatttaccctagaaatggctcttgccttcactttggtcactcattttactcctttgcacaggccaaagctttcccacaatcctaaatgacatt

SEQ ID NO: 190952 - DNA, 415 bp, Glycine max
  unsure (1)..(415): unsure at all n locations
gatgatatggtcttcaccgacgaaaggatcaaagtgagtctaaaaagaggcaaatctgatcatcatactttgataaatgccaaaaaaactagggcaaatgaagagggtgagaatgatggataagcccatgctgtgactgccattcctatacagccaagtttcccaccaacccaacattgtcattactcagccaataacaaaccttctccttacccaccgcccagttatccacaaaggcaatccctaaatcaaccacaaagtttgtctaccgcacttccaatgacgaacaccacctttagcacaaaccataaacaccaaccaagaaatgaattttgcagcgagaaagcctgtagaattcaccccaattccaatgtcctatgctgactngctcccatatctatttgataattcaatg

SEQ ID NO: 190953 - DNA, 384 bp, Glycine max
  unsure (1)..(384): unsure at all n locations
gatccttaagtcacctgctgctgcatcttgcacaaggtgacaattaacggctgtgatcttatggccattgtcagcttcaacttgagaccccttgattccatactctagagaaagctccatagattgctccacatccttggaatgtttgttcttcaacaactcaggggaatcaccatagctgattccagcaatatctggtgagccacanatgaccaaatctggggatgtaagagaataccccaagaatgatcttcctgaaacaatatattcccattatattttatcagatgatcagatcccaagagacactcanacaccacaaaaaattaaaatacaaccaaaaagtcttatcccattaattgagggtggtacatggatctcaca

SEQ ID NO: 190954 - DNA, 402 bp, Glycine max
tgttactgcatgatggcagcaatttcgacagatagatgacatgtaacatgttgagtccacttctcaaatttctggaaatccagagggaaaactgaaagatgataagtaaattatgcagtataaaccttttatgcagtaacaagccccaaacacatgacttgtaaataacaatttgaatagtaaaatttgattacactgtgaacaattatataatccagagaaattttggaactctcaacttccatttcaaattgttatgacaagctactacttccatttcaaattgttatgacaagctactgtggtgaaccatctgcttgaaaaaattaaattaaatgtcatatgagccaatggcccacatatcacatataaaactgctaagaacagatatgcacttgatct

SEQ ID NO: 190955 - DNA, 482 bp, Glycine max
  unsure (1)..(482): unsure at all n locations
agcttctatataagctgaaccatnttatcaataatcacaagttgagttntattcagaaaattagagtttatctcttttatcttagtgagagtgattctcctaaattcttgagtgattcaagaacaccttgcctgtatcaaaggactttcacaacctttgtgtgttgccctcactggaaagagtgattctttccttcctttcatgatcacccttgttctttcaaaccacaattccagaaaatccacctctgcccagaattatctcgtggccataactctccatttacgcactcaaattaagtgattcttgagcctanattgaatttcaaaacgagacctttcacctcgctttggaatcacctcatttggagccctgtagcttcagntattggcatctctatatntntgtccagccaccacttaacctacgttgtaccatcccattcatccattntatgccaagaaccaccttattaagaccca

SEQ ID NO: 190956 - DNA, 214 bp, Glycine max
gagcacctcgatgtattatgcgcctgaatcgaatctcctagtgaagagctactaccatttgaattcctgcagagctttcattgttgaatctcgagcggatcgatatattatgcacaagaatccgacctatgagtgaaaagctatgaccagtttaattgctggagagctttcggtgatgaatttctagcacctcgatatattatgcgcctgaatc

SEQ ID NO: 190957 - DNA, 475 bp, Glycine max
  unsure (1)..(475): unsure at all n locations
gtcatgccagctataacaccacattgccttaatcatttccaaatatgcatgtgaattaggacgcatcaacaagaatcaagccaaggctattgtgcaaccaatcaatggggcaaaacacaccaaatgattataatgatggatggctcaaattctcacaaaggtaaaatcatcactttcaaattgagctttcaaaactatcatgacatgtagagaagaatcaaggatttcaagtcacaaaatgtcaagaacttttattttcaaaacaattacccatttcttgaacatatcctgtaattcaaagaaaaacatgcaaagtcgtacgtgcacatganattgacccaaaatattaaactgaaaatccgacgaaactaacaacattaacaaattaacacaactaacaaattaacataaccaacagaactagccaaaccaaagaacactcccccccatacttagacaacacattgtcctcaat

SEQ ID NO: 190958 - DNA, 277 bp, Glycine max
aacacagaagcatgattgattagagaaacacttttatatacatcagctagcttgttagaaagatccaacatctttacctactgttgtcaatctcactttcttgcatttttactatctttagcctagacttagtttaattctattctaaatcatcaattatcaatgtttctttcaacaatgccttatttatgaatttaaccctatcttagactagttccctgagtttgatactcggattcatccgttttaattttaaatacttgacgatctggtgcgc

SEQ ID NO: 190959 - DNA, 186 bp, Glycine max
acgcttgtcatcaaaatgctcgcattattcgctactataccatataaagcgtacatccagccgttaaggcccataacttgctaaaaataacattagactgcacttatgaattctgtgtattttacggatctgcagatagaagcgaacaactgttaataaccgatatctgtatttataactaacacc

SEQ ID NO: 190960 - DNA, 303 bp, Glycine max
  unsure (1)..(303): unsure at all n locations
agcttccttaagaaacttccttgagaagcttctttgagaagcttcgttgagaagttagagcttagctacacatacccctctaataactaagctcacctcctcgagaagcttccttgagaagtttccttgagaagattcctagagaatctagagcttaactacacacacccctctaatagctaagctcacctccttgagatgataagctagagcttagctacacacaccctctataatagttaagctcacccccatgccanaatacatgaaaatacaacaaagtccctactacanagactactc

SEQ ID NO: 190961 - DNA, 357 bp, Glycine max
gactccatctcctcgaatcgcatgtgcacttgtaactccaaagtatcaaacctttcaccaacaaatgtttaaagaccattgaacctttccaaaatcttttgaagaatagaggaatcttctccaccttgtaaatgtccttcttcatcaatgggttgagcaccctttttcacccaagagccatcatgctcttttcggtaaccaaaggatgcaatcacagcagcgcctattatacaggatctcttgattggaacataaggttcacaatcaagagggatgttaaagtgttgaaggaagagagtgactaggtgtggatatggcaatggagcatgtaatcagcatgccttatgcatgcgatat

SEQ ID NO: 190962 - DNA, 114 bp, Glycine max
tataactgaagatagaattagcctctttgagaatttttatgcgtagtattaactatttaagttgtctagctctaatgtgtagtggtactctttatgagaatgaaatagtgatgg

SEQ ID NO: 190963 - DNA, 427 bp, Glycine max
  unsure (1)..(427): unsure at all n locations
taacaacttgaagaggatatagtatatattntatgcatataataataatgcgataatttgaaagaattgatttacatgggaaaacttttagtttccaaaatcaaaagatgcaaaagtcaaaaaagggttatttaagggaaaattaataattagaaaaaaaggtctcttaaatttattctaattattaaatatcccctaagtgtgagactagaacctaaataaatgggtatacttacatcaaatataccctatttttttataagtaagattaatttctccattcctttgtcttttagaactttgaaaccctttcaaggtgaataanaattaatatngccttcttaaaattattaaggcaaattaggctttctttctatatctcagactttgaaaacactattcttttagatgtctactatgagcttat

SEQ ID NO: 190964 - DNA, 414 bp, Glycine max
  unsure (1)..(414): unsure at all n locations
attctgtgcgtttgaagtctaatgttaacaggattatgcttgcaaacacacaaatccttatatggtctaaagcagtcccccatactatggaataagagatctgatgaatttatggctgacatacaattttatacaagtcactatgataacttgtgttactgcaaaatttcttctatagctgagattgcgacatcgctattatatgctgacgatattttgatagccagtaacagcacaagtgaagttgaaaaactgaattctgagtagaccagggcatntcgaatgaacgattctgtaactaccataacaatattgtgattacatatcaaaccggaacagaaaacgaaattcttgtcttgtccacgagttatattcagaaaagtcttgaaggtctggatgtaaattctcacctcg

SEQ ID NO: 190965 - DNA, 266 bp, Glycine max
gcctcgacgtttcttatccgtaacaaattctgctatgattttatccaaaataccatctagcacaactctgcgagcagctttcatgatacccatgtgcaattgggaagaaacgtcctcatatattacacgcaataaagttaccatattaccaacctcgctacttggggaacctgatctacaaatggttccagagatatctccttttaatgcatttacagcagacaatagcacaaaggtgtcttacctattgtcagaatgagagatct

SEQ ID NO: 190966 - DNA, 238 bp, Glycine max
ttatcctttaagctcaagtcaccctccctccatttatctttccaaaacttgagtcttgacccatcacccaccttccatctgaaaatgctaatgaggctattgttgagatgttgtagaaaaacagacctcaagtccttccaccattgagaaaaatgagcactgtccctaccagaacatagggtattccaccctccatatttagatagcaagactctagcccacagctgattgtggttgt

SEQ ID NO: 190967 - DNA, 166 bp, Glycine max
tcttgttcctcttcactttactgatgtttcaagggctatttctctctttttattattctttcttttctttgtatgtgcccatcttttctttttctggtgaagaattttttgtttttgagaaaaaaaaattactctggagttctgtggtatggtagtgaatctataa

SEQ ID NO: 190968 - DNA, 466 bp, Glycine max
  unsure (1)..(466): unsure at all n locations
atcttacacaagtcgcatgcatatccaactccacccaataaaaagagcactgcaacaactacaagtcagaattctcttatacaaaatccactcctcccattcctctatatgaatttaaaccctatgtatgtgtgtgtgtgtgaacaattaactctcagaaaaactgtttaaaaaaatcaaataaatagtttagataaactaagcaaagcatctcctttgtaactccaacttggtctagctagttccattcatggtttggtgaaggggctagattggacctcccaatcccctgcctctccttcatggagttcatcttcgccatcctcaaaccagccctgaagctctcaatgaagttgtgagccttggatcaacatcagggctaggacagaacaatgagggtgcactcacactngcagaatcttcactgtctttggcaaaaagacaattgacttggcttggttcatca

SEQ ID NO: 190969 - DNA, 257 bp, Glycine max
tctggaaagcggattctaatgactcctctgcggccttcacacaaagcatagaggatgggcagctcaccaacatgtcttcctctcctgatacgatgaccagatgcccttccactacgaatttcaacttctggtggagtgtagagggaacaactcccaccgagtggatccacggacgccccaacagacagctgtaggggggttaatatccattatttggaaagaacttgacaggtgtgacggcctatctgtactgggag

SEQ ID NO: 190970 - DNA, 322 bp, Glycine max
cggacagagagctgtctgacatattctctgctgagtgaagagagagagaggcgcttttcggttatagaaggctttatcctctattattattattgtatttaagctatgccacatgtctccattcgagtggagcaccaagggcgccactttaccttctgactgtgacccatactcatccacaaatagtgagaaaaaaatctgacctttgaaacgctaacacgctgcctcggattgcgcgccgttctctgattccagtcctccgtttctctgacgccggcgaccagtttcgaacgcatcagtattatatcaaaacgctcagata

SEQ ID NO: 190971 - DNA, 320 bp, Glycine max
  unsure (1)..(320): unsure at all n locations
agcttgcacatggcttccatttatgattctcgtgcggtgtgttaatgtttatacatggtagcttcaaaagaggctgctgaattggctaaaattaaagctntgtacgcttcaatagcttgcactcgtgaagcttgcacatgcatgaatagtataaaagcaaaggtttgtgtaagaaggatgcacatgctagtcatagttcctatctcatgaagtatgcttatagggtctcttacatgaaatgatgcatcatacccgtggaatctttgcagaaatanagctattcaataataatttgtatcactgaccactaaaacaattat

SEQ ID NO: 190972 - DNA, 324 bp, Glycine max
  unsure (1)..(324): unsure at all n locations
agttgatgacaaatatcccaaagaatgatttcaagattaagtcaacaagaagaaatcaagaagattcaagaatcaagtgaagtttgatttcaagattcaagaaaagatgaattcaagattcaagagaagaaatcaagaagacttcacaagggaagtattgaaaagttttttcaaaaaacaaacatagcacaattttgttttttcaaaagagtcttctcaaaattntctaagttaccagagtttttactctctggtaatcgattaccagtttcttgtaatcgattaccaatggcaaagtttgattcaaaaagctctaactgaatt

SEQ ID NO: 190973 - DNA, 357 bp, Glycine max
atctagacgatataaacttcccaagctatttatcttctctctcagagaggctctctacttggattgactcactctacggcggctcactcaagcttgaggataaagacttcccaagctatttatcttctctctcagagaggctttgtctcactctaagaagtggattcactcttatcttggatggataggaatgaacgctcctacccttatttatactactccatctccacaataaatggtggagatttcttgtatcataaggtgaagattaattctctagaatgctccacacattctatgagtttctacactcttccatatccttccataacgttccagaaagtttcacacatctct

SEQ ID NO: 190974 - DNA, 411 bp, Glycine max
gagccatacgccctcaatggatgacctgacctacttccacccctaattatcaataatattatattaaatgcctgtttacgcttatatacttacttaaacttatgggccttgtataaataatgttaggtgagaagactttcatattaaatcaaatctttaaataaacaagattttttctaatggtaagaacatatttaatagtggatcttgaagtagaatattgacctcaagatctgatcttggcaagatctactgctagagctacatcaacatctcctgtgtgtaggatgggatcttacataagaaccatgaaggtttaaatcattctacaaaatcatttttacattctccttacaattatggagggaataacataatagatgtgaagaagagaacaatcacactccaaca

SEQ ID NO: 190975 - DNA, 421 bp, Glycine max
  unsure (1)..(421): unsure at all n locations
agcttacttatatacgtataaacttgtttatagtatatttagaggtaggttattgatcaatttanaaggtctaataactaaataagcttgtagaacatactaaacttttaaaaaaacattaaattaacattgtaaagatttatatcatataaataagtcaattcagaatttaaatttaagaaataagactgcttttataggctattccaactaacctgtaaacttttgtgggaaatggcttcggcccgtttgtcaaatgtctgcgtgggcagcgttgcacacatggacagatgccatggtaggttacctaaggtctaagacaaacagaaaacgtagcacaccgacgcattaatccctaatcaaatggggacttgggacccacttatgtgngcacatttcanacactcanacttctacattt

SEQ ID NO: 190976 - DNA, 329 bp, Glycine max
  unsure (1)..(329): unsure at all n locations
atcatgggagaattggttgggattacaagcctacaagtgctgataaaaagaggattgatttggaaaggaaagagaaatgcttagctcgtttacaagggcgagaaccacgggtggagagggtccctatctaccacatcattgagagctttgtgagtacagggtgtatgtacgaagatcaggttgctatgctggatgaaaagaccgatcaggatcaaccaaattgggtgcagccatgtcccatagactttgattgaaaaattgacatatcatagagcaacccaagatttatgtttctaatntgatgtcaatcaaccaaactaaggaagatg

SEQ ID NO: 190977 - DNA, 339 bp, Glycine max
ttcatgcagtcgtaggcatcgctgttctcgtagttcccgtgatctcgggggtctttgaagtgaggcggaatacgtttgggtgaagaaaacgttccccctgcacccctttatattttcgtacaggggttgctctccgaagcgagctaacctgtagcttttttttttttgttaggggtgcattaaccatgcctcccccccttttatgggatagctgtgtgcctaacttgaacctacttaagttagaattaagtgtcgattacttatttaaaacgaacaatacttaaagacactgctaacgcataggatactgtgctgccctgcatcaaccttctctgcttg

SEQ ID NO: 190978 - DNA, 549 bp, Glycine max
  unsure (1)..(549): unsure at all n locations
ctagattgagctcccatgcgactctctgacactctacagctcttatgctagatacttgcgcagagantgcattgacgcatactctgatgcagcacgcccatacgactatacatcantcatcactctacctgagacgacagctttctcgtgtganacaactgtgcacagtcaactccttgggctggatgatcatcaactgccatcaagctccatcatttgatactgactcctgtacctgctcatatggctacttcattaaaagaggagctacagcttatcccctctccctatattatatcatgactcagcctcctacccttgacttgatgattgcttacaacatccttctacctagactactcttgggccctgagtttcaggctagacatctatctaatagagtgcacgggcccttggactataagaggataacatgtttaatgcttacacgcattgcgatccacctgtgtcaagtgctataacctccctcagattggacaccccccggctcttagcgctctgccttattttgactatcttccacccccg

SEQ ID NO: 190979 - DNA, 370 bp, Glycine max
tgaaacttcctgcttttattgttgaccacagagtggtacctggagatatgtcgcggtggtcaggagaccttggggacgtcaggtggggtgctattgcccaaaaccaagcttgaccaatcccgacccaacccgggcatagtcggtcagtgagaacctgtgatgtacctaagcaggcgagctcctggcagtcaacagataaaaggaaaacaagacccacaaagcaggaggcttgtggtggctggccagctgtgaattctgtgtaatatgtggattgtggcctctggtaatcgattaccaacggtgggtaatcgattacaaggcttaataatgaagacaggaggctaagatggtctctggtaatctattacca

SEQ ID NO: 190980 - DNA, 463 bp, Glycine max
  unsure (1)..(463): unsure at all n locations
cactaagcttctttgagagacttgcttgagaagctagagcttagctacacacacccctctcataactaagctcacctccttgagaagcttccttaagaagattcctaaagaagctagagcttagctacacatacctctctaatagctaagctcacctccttgagatgagaagctagagcttagctacacaccccctataatagctaagctcacccccatgacaaataacatgaaaataatataaaaaaagtccttattacaaagacaactcacaatgccccgaaatacaaggctaaaaccctatactactagaatggccaaaatacaaggcctagacgaaggaaaaacctattctaatatttacaaagataagcgggctcatacttagcccatgggctcgaaatctaccctaaggctcatgagaaccctanggcctttccttggatctctagcccaatctact

SEQ ID NO: 190981 - DNA, 420 bp, Glycine max
  unsure (1)..(420): unsure at all n locations
gttatatatggcagtatatttattgacataatttttcttgaagagttatatattgatgtaatttgagtaaaaataattntgtaaaacatcacttanaatataactatgctgtgttttttcctccccttacatgatatatactaatactgtaatatttttttatagaaaatatttaaggttaattagaggagactatttatattttataattaaataaaatcagcaagttattataagaaaattttcaattaattcaaactcaagttgtgtatntattcacaaatgtaaagttgtaaacaagccaatcatccttatntgatattgcaatataantacattcattgtacagaaggagtatgaaatgattaagcagtaataactaacacttagcaccacttgtactgaaaatattttaaaaaa

SEQ ID NO: 190982 - DNA, 540 bp, Glycine max
  unsure (1)..(540): unsure at all n locations
attgttcatctattacgcacactatagacactcaagctngccataattgataaaaatcaaacttgggaactcgttgaaagacctgaacacagaatagtcataggtgtgaagtggatgtntagaacaaagctgaatgcagatggctcaatcaacaaacacaaagcatggttagtattaaaggggtatgctcaaatttttggagtatatttctttgatacttttgctccggttgcaaggcaggataccattaggatattgctagttatcgcaacacanaatggatggaaaatctgccaacttgatgtcaagtcagctttcttaaatggatttttggaggaagaaatctatgttgagcaacatgaaggtttccttatgataggacatggngacaaattctatctattaaataaggctttgtatggtttgaaacaagccccaatagcccagtacaacaggattgatgagtacttatcaaaactaggcttagttaaaagtcttaatgaatctaanttatacatcanaggtgatcaagctaactcg

SEQ ID NO: 190983 - DNA, 330 bp, Glycine max
  unsure (1)..(330): unsure at all n locations
agcttgaggatagaaacttcccaagctatttatcttctctctcagagaggctctctacttggattgactcactctacggtggctcactcaagcttgaggataaagacttcccaagctatntatcttctctctcagagaggctttttctcactctaagaagtggattcactcttatcttggatggataggaatgaaggctcctacccttatttatactactccatctccacaataaatggtggagatttcttgtatcataaggtgaagattaattctctagaatgctccacacattctaggagtttctacactcttccatatccttccata

SEQ ID NO: 190984 - DNA, 361 bp, Glycine max
  unsure (1)..(361): unsure at all n locations
cttaagttgtggaagaccaattactaagtctttcctaactagatgattaagatgatgcatatttatgtgtgcaatcctaagatgccataaaccagtcttatctgtagtatgctcttgcacgttgagcaagtgattaagatcactctttgctttgttaattttccaaacatatctttaagatagaaaaaatcaatttgcaacttcatacgttcagcatagtgatccttttttatactttaaaatttagtttgcaaagacttgtaatcatccatgttaaaagagatagaggtacaatcacaactagtggctttatagtttgaaacaaggttttcattntcttgcttcaatttatctatctcac

SEQ ID NO: 190985 - DNA, 331 bp, Glycine max
ttctggcttcaattcatcagtgggcttgccttgtgtgagcaacatcttgcgatgtatccaggctttgatgacagcgttgcaagggctgctatccactgatatgatgaaagccaccattcttgctttccaatgtacatagatgatgccatcatgaattggcggactgatcactggtgctccttctatctgcatgttcatcagaattgaactgcctagatctcactcgaggatttctagtgcacgctctgataccaattgaaattctgatactgaagacagatgccgcacatgatgccacgacattactctgaatgacatgcagattgtgatg

SEQ ID NO: 190986 - DNA, 584 bp, Glycine max
  unsure (1)..(584): unsure at all n locations
gacgcctatcggctcgttagtacactcgtatactatgatttgagtgcgtcatctctccgcancncagtcactattcaattgatcccttgatgtcaccggcacacaacagaaatgaatnattgaatccctgtaagntcccgggatcctctagatcgaactgtctgcatgccagcttgtaggtggcaaatgaccanngaccaattttattattattttaacaatatgagaattttaccctaaggaactaagtttcaagctattaaatctatattaatcactcttatattttgctttttatatttaacaggtttagaaaataattcacaatgtatcacatttttaggtggtgcaattttatttaatttgctatttccctcgtaattgaggtcaaacttctttacttacaaacaaactacccttttcagtactaacacctaccctatctaaggaagattcatcgctgaatttgtcgtgggatttaatccaattaattcaataagagatatcttttttagcccatccgtgggactggtcttctaagaaactacaattcgtcttcgggaatatatagatatcttaaaaaa

SEQ ID NO: 190987 - DNA, 413 bp, Glycine max
  unsure (1)..(413): unsure at all n locations
gganactgagcagccatcattccanatcttggtgggaagccaaagacaaaaccatcagcatcacggagctcatttctggtgatgattggtacatcactcttgggcggtgctctcaatgcctcaagctcctcagttgatagtgtctcgggtacctgctcatatgtttagttaagtaaaaaaggaaatcctttaaataccctattnttattctcaataatgaagttgttttctacccttgactaaatgaatgcttacaacatccctttagctagagtaaatttgggaaattaagtcttagtcacagagatcatacagaatanagcacaggggccattggactaaaagtgacataagttgaattaatgcatatacagcattaggaattntgatggattaaaaatgaaaattacatg

SEQ ID NO: 190988 - DNA, 172 bp, Glycine max
gagattcgtcacggaatacgttaccgtggcgagacagaagcgcctcaggttatattttcttcacagagacaacttctccatgcaaattccaaagagagagatgcgtcaaaggggctgaaccccttactatttgccttcctgcgctatttatagcataatatgggaggtggtt

SEQ ID NO: 190989 - DNA, 460 bp, Glycine max
  unsure (1)..(460): unsure at all n locations
gcttttcgattcattctatgcacccatagaggtccacattgtgtttagtggcattttattctcngcttggttactttntataccccctgttgacgtgcttaagccattttacttaagtcgtttctcgcttaagcaagaactacgtaggtctgaattcctcattgaggatacgtangagcaaaagtcccgcttttgtcgaccaccccaagagatcgttaatggtccaatgccttaacgtttctctcctttcaaaaacaagagatcgttaatggtccaatgccttaacgtttctctcctttcaaaaacaagagatcgttaatggtccaatgccttaacgtttctctccttttcaaaacaagagaatcgtaatggtccaatgccttaacgtttcttccctttcaaaatcaaaagaccggttaatggtcaacaccttanatgaccttttttgtcataaaacaca

SEQ ID NO: 190990 - DNA, 445 bp, Glycine max
  unsure (1)..(445): unsure at all n locations
cttctctatggatcaagctggtgaggaaagaaagttgcaactgagtgagttagatgaaatccgcctagaagcctacgagaacgccaagttctacagagaaaagaccaagaagttccatgatagcatgatagttaaaaaagacttcgtggttgggcaaaaagtgttattgtataattctaggcttggactcatgagtggtaagttgaggtctaagtggattggtcctttctgtgttactaatgttnttccttatggtacagttgagatcagaagcgactccacaaacaagagcttcaatgtcaacagacatcgacttaagccattcctcacgaacccttctttagtggacgtagtggtggaagagacttcttactccccctactctttctcaccatgacttagggagttttatttctatctcctttttgttttattacactgctga

SEQ ID NO: 190991 - DNA, 119 bp, Glycine max
ttcttcaccattcaatttcgagcgtctctatatatgactggactcacccacacatccgaggagaccgttattgtcgtctgaatcggctcagagcttcaacattcggtttcgagggtctc

SEQ ID NO: 190992 - DNA, 399 bp, Glycine max
  unsure (1)..(399): unsure at all n locations
atgggaggaggttatatngccattttgctttaagagtaacgtcccactggtaaaactaactttccaaatgtttgccttcgcaggaatggccccgaggaagcttgcctcanagaggtccaggaaggacaaggcggccgaaggaactagttccgccccggagtacgacagtcaccgctttatgagcgttgtacaccagcagcgcttcgaagccatcaagggatggtcgtttctccgggagcgacgcgtccagctcatggacgacgagtatactgatttccangaggaaatagggcgccggcggtgggcaccactggttactcccatggccaagtttgatccagaaatagtccttgagttttatgccaatgcttggccacagaagagggcgtgcgtgacatg

SEQ ID NO: 190993 - DNA, 411 bp, Glycine max
  unsure (1)..(411): unsure at all n locations
tgcagcttaacattcaatttcgagcgtctcgattatgacgggactcaatcagacatccgagtaaaaagttattgtcgtttgaattggctcagagcttcaacattcaatttcgagggtctcgatatattgcgggactcaatcagacatccgagtaaaaagttattgtcgtttgaattggctcagagcttcaacattcaatttcgagcgtctcgatatatgacgggactcaatcagacatccgagtaaaacgttattgtcgtttgaattggctcagagcttcaacattcaatttcgaggcgctcgatatattacgggactcaatcagacatccgagtaaaaagttattgtcgtttgaattggctcagaggttcaccatttcantttcgaccgtctcgatatattacgggactc

SEQ ID NO: 190994 - DNA, 240 bp, Glycine max
  unsure (1)..(240): unsure at all n locations
ntcagccaattcacacgacaataactntntactcggatgtctgattgagtcccgtaatataacgagacgctcgaaattgaatgttgaagttccatactataacgagacactctaacttgaatgtcgaagctctgagcgaatccagacgactataactacgtactcggatgtctgattgagttccgaacatattcagacgaccgtaactgaattctgaaacgtcggaccgagtccaacgac

SEQ ID NO: 190995 - DNA, 472 bp, Glycine max
  unsure (1)..(472): unsure at all n locations
tgcttatccttaaacaagtattagcaacatcacccaatacttggtttaattttttctcaccatgacattggtgggagtatccaccgggtttgttgatggctaatctccaccgaanaatttggttggtcatctatagtggaattttcccttccaaccacgtttgttccatccacaaagctaacactcaagaccttgcttactctgaccaacgacatgttagtaatacttgtttaatctagtattatgtgtacttaccaaggacgttgaaggttatccttgaaagcatgctttntgcaaacaatataattcttgagtaagagattaattctaaatntaagaattggagttaaaaattagaaccagaggatctttatcaagtagaagacacagtatatgctttgcagtttaagcaagaaacaagaggaanatgccttggaggtaaaaattggagaagtcatanccacaagttcta

SEQ ID NO: 190996 - DNA, 457 bp, Glycine max
  unsure (1)..(457): unsure at all n locations
tactaagcttgaaagtggtgttttcaccttctcgctaagccaatctgctggcttagcgagagcgtccgctaagcgtaacactcatgggctaagcgcgaggaagactctggaagaagatgagctatacaggttctctaagcgcatcgcttcatcagactaagtgcaccgcttcagttcatacttatcttgattaagtcttctcttgattgctgaatcttgagtcttgaatcttgatcttgattattcttgattcttgaatcttgaatcttgaatcttgaaatcaaatntgctcttgatccttgaagtgttcttgactcaatcttgaactcattcttgaatgttatcatctttgttatcatgaagtgatcttgacttttgagccttttgtcatcatcntttgtatcatcanaactccttgaatcaatcttgattcatcatgaaagcttgcttctacatc

SEQ ID NO: 190997 - DNA, 189 bp, Glycine max
aaaatggtaattatatatcttactagattaaaacacttattttaaatacctgcgttaatggtagaactatatataattaagcacgtgaaataatttctaattcttgcagtaagaaaaatggtgggtgaaatgaatttcatttctgtttagtctgattagcctgtctctttgtcttggctagtccatgtg

SEQ ID NO: 190998 - DNA, 414 bp, Glycine max
  unsure (1)..(414): unsure at all n locations
cctagagatgacanaagtagcatgaagaatgcaggttctgaatgttgattcctcatcactgtacgtgctcacatgttggcaatctgtctaagagaaatcttcttgcatagatgagagcctttgaaagtgtttcactaatccaaaacatctggctggatggtattaagtcaactaatggattgttaattcttatgaaatatggtatctacatgtcaatttacaaaagcatttatttatattaaaacaatatttcttattaatcttttatataatgcgtttggctgtccacatttccattacattaaaattgatatatnaaaataatatttcttattatgtattgatggatcatcgtcgctaaaatcacgatcaacatcgtacgattgcacgattntacattagccatcaagcacc

SEQ ID NO: 190999 - DNA, 357 bp, Glycine max
tcttgtacggtaaagtctcacgatagtgacttgctcatgcaacaattgttagtcgtggctatacgatacatcttgccaaacaaagtcaggttagcgataactcgcttgtgctttttcttccatgctatatgtagcaaagtcattgatccagtcaagtttgatgagttggaaaatgaggccgcaattatactgtgccaagtggagatgtattttccccctgctttctttgacatcatgatttacttgattgtgcatctggtcagagaaatcaaatgttgtggtcctgtttatctacaatggatgtacccggttgagcgatacatgaagatcttaaaagggtatacaaagaatctatat

SEQ ID NO: 191000 - DNA, 480 bp, Glycine max
  unsure (1)..(480): unsure at all n locations
ctaagctttagccaatgaactntgttagtgcttagctctactggagtttataagattggctaagattttgttaaaacataagcacttagacaatgaaggaaagctggagttgctgcacatgatgtccaacgttatgtcaaagaataagatcgggctgcacaatgcacaaggcaagatgaaatgtctaatgaagaattgaagctgcaggattcacgatgtcggatacaatgtccaggacatcctgcctgaaaatactggaattgctaaaagcattgaagctgcaggatccacgatgtcggatacaatgtccaggacatcctgcccgaaaatactagagttgctaaaagcattgaagctgcaggatccacgatgtcggatacgatgtccaggacatctggcccgaaaatactggacatataaatctgttatatctttaacagattattgtgcagttagcaagagataagatgatctattctt

SEQ ID NO: 191001 - DNA, 537 bp, Glycine max
  unsure (1)..(537): unsure at all n locations
ttaatatcatgtacttatattttcgttctgataatagttttggtggatntnnnnnnnnnnngaagatagcctttgaaccactcaanaccccagcttnaaacaaacatctactacacaataaaccgatcaatatatccaactttaaacacaattcaaggaccaagtccatgggcaaagtgcgaaacacgatataaatagggtcagtgctacgacaatattatctccacataccacagtagaaccacaaacaaccacaaatgtctctctctatctatctcacgcataatgacatatacatggtgctcaccacccagctcaaccagattctagtaacctcaagacaaaaaataaaatgcgtaatatgttccaacccactgaaaaaacagagaaaatcttgagaaaaaaagaacctccctgacacaagatataggagaaaggacccaaaccaatgccaaccagagagtatgcgcagctgcacatgcatgacacatggcctgcacatggaccacgccctagagttatgtataaaaacaatct

SEQ ID NO: 191002 - DNA, 218 bp, Glycine max
cacattcttggtctttctttgccaacatacacacttgctcaaattcatgaggaggaccacccactccatcacaatcgtgcattcgaattagaatagagacatacacccattttttcacaaaaagataagagtgtttcactgccatgtcatctaaaactaagtcgaactgttcaaaatgctttcagaataagcaaacccactattcataaataaaacta

SEQ ID NO: 191003 - DNA, 125 bp, Glycine max
gaactttgaaatgtgtctcacaagactcccattcttcaaagttacgacaagtgtgacacatgctactatttatagactaggtagcttcctttaaaagctttcttgagagaacttccttaagaaac

SEQ ID NO: 191004 - DNA, 282 bp, Glycine max
  unsure (1)..(282): unsure at all n locations
gcatatatatattatacttatactatngctacacataatcttctttctatactatgcttgacgacaagctagattctatgtccaggggaggcgataaatgtcataatctaattattattgggattaaaatgctagcacttatcttttgattgtaatagttttcttataaacttcccttaaatctacttgttgatatatattgtacaatcactaatgtttttatataaatatggaagaatcatccatgattctgttggtttgatggtcgttagttgatccaaa

SEQ ID NO: 191005 - DNA, 171 bp, Glycine max
  unsure (1)..(171): unsure at all n locations
aatctgtccaatttgagcagctaaaagctgtccaattctgtgtagcataatattgcgcctgagcacacaatgttgtgtattgctggtcgcggaaagggcagtacatattgngctctggacattttctagcacattccagcgcgtaaagtgctgacttatgtattacggacc

SEQ ID NO: 191006 - DNA, 396 bp, Glycine max
  unsure (1)..(396): unsure at all n locations
agcttcanatctnccttcatttccacaccatatagcaagataaagttgtttttggagtctaggagcttacctctacctcgtgggaccttcaatttcaggtaagggtgaacttctcctcacttgaaatctgtgggtgttgggttcttgagagctataatgggtagttctactaggttattgctttacggtagttgtttgtgaaggaaattgttgtaattatgctaaacttgacatgtttaatgtaagcaaaatttcccatgttgatttacggttcaataatgatgttttgagatatacgtgtgcttaanatgtagatagaaaactggtagagaggatggngagagttagcttatagttgaatgtgagaatggtagtgttgtaggtggaaaagtgtga

SEQ ID NO: 191007 - DNA, 496 bp, Glycine max
  unsure (1)..(496): unsure at all n locations
actcagcttacacaatntaattttctcaaacctcgagtttggaagaccaattactaagtctttcttaactagatgattaagatgatgcatgtttatgtgtgcagtcctacaatgccacaaccaagagtcatctatcttaccaaacaactcagctcctaaaatgatgcatgttcaatatttaacatatagatattacctactctcttgccaatatggacatcctgaccagacatagcttcactaataagacaataattcttgttgaattcaattttgaagcctttgtcacatagttgactaatacccaagaggttatgctntagtccatccacatatagaactntctttatctgagttntgtactgatttccaatatttccttcttccattatctttcctttgttattggctccaaaagtgacatatcctccttcttttgacacaaagtaatgtagctccatgtggagctngtaagccttggatcttcttcatcaac

SEQ ID NO: 191008 - DNA, 388 bp, Glycine max
agcttgtaggcctaggatcttcttcatcaatggattcctttgcttcttggaaaatgaatggcagcggaatggagaatgatacgagagaaggagacccacttcaggagaagatgagtctagaagaagctcaccaccataggaggccatggataatagcttgggggaagaacgagatgaatgaagggagagggagagaagacacgaaattttgtgctccaaatgagctctgaaatctgaattgtaatattctaatgatcaaagttgaaaaaaattcacacacatgacctctatttatagcctatgtgtcacacaaaaattggacggaaattcagattctcttgaatttgtggagccaaactctggcagccaaattcactaattatgatta

SEQ ID NO: 191009 - DNA, 351 bp, Glycine max
atgtcaatccttactcctcggatgcacatattagacaagaatgtaaatctcagatctgatagaaagcaagaagaatagactggaaatttctatatcaaagagtgggagaaagcgaatagaatagaaagaaaatttccgatcaatgaatgggagatagttttataagaagaagacaatcgaacgaaagaaagttcctgatcatagaagcatatcatatatgcataaaggtgttttgaccacacaatatctgaacaatacagaattgttccctatgaacataatgaatgaaggaaaccattagctaagtggtctcttcctttgattgccaccaatatcctgtgcgtctgtgac

SEQ ID NO: 191010 - DNA, 247 bp, Glycine max
  unsure (1)..(247): unsure at all n locations
agttgtaaacaatagacttatttttaacgtatgtgagcatattaannagaaaacatattcactcacttaaactaatatagtgtacacgaactgattgccggatcaaatgattattcaaaaagtctaatattcattactgtgtctcgatattgattgacaagaccacactgtaattcctactgatgtgacatatttcacttctggccttgtgtgaaccgtagaacacatcaacttcacccgtctgtac

SEQ ID NO: 191011 - DNA, 357 bp, Glycine max
  unsure (1)..(357): unsure at all n locations
agctngcttctacaatctccctctttttgattatgacaacttctgaaatcaagaaacacacacacattntttcctagtcgatcactcacataaatttccattctccccctttgtttttgaatttatgattcacttaaaattaagtttattactcatgtgagttcttgatttaatccctatttctctcccccnttggcatcaacaaaaagccaaagtgcgtaacaagtatgaaacatacaaatacaactaatcattcacacaacaatcatggagaaatataaactaatcatgaagcangaaacatgactagatcanatatatagaaaaatcacatagtcatataacataattcataat

SEQ ID NO: 191012 - DNA, 450 bp, Glycine max
  unsure (1)..(450): unsure at all n locations
tcagcttagctacacaccacccctctcataactaagctcacctccttgagaagtttccttatgaagattcctaaagtagcttgagcttanctacacatacctctctaatagctaagctcacctncttgagatgagaagctagagcttagctacacaccccctataatagctaagctcacccccatgacaaaaaacatgataatacaaaaaagagtccttactacaaagactacttataatgccccgaaatacaaggctaaaaccctatactactagaatggccaaaatacaaggcccagacgaaggagatacctattctaatatttacaaagataagcgggctcatacttagcccataggctcgaaatctaccctaaggctcatgagaaccctangaccttcccttggatctctagcncaatctacttggagtcttctacccaatgccct

SEQ ID NO: 191013 - DNA, 424 bp, Glycine max
  unsure (1)..(424): unsure at all n locations
gccgggaaaatgatcgaagcgggtctgaaatgaggcaaatttaatcatcctacttggaggaatgagaaanatggngcaaatgaagagggtgagagtgaaagggaaacccatgttgcgactgccgtttctatacagccaagtttcccaccaacccaataatgtcattactcagccaataacaacccttctccttacccaccacccaattatccacaaaggtcatccctaaatcaaccacaaaacccaccttccacacaaccgatgctaaacaccacctttagcacgaaccaaaacaccaaccaaggaaggaattntgcagcanaaagcctgtagaattcaccccaattcttgtgtcctatgctaacttgctngatactgcaatggtagccataacctctgcttgggttctcaacctcattntccn

SEQ ID NO: 191014 - DNA, 334 bp, Glycine max
  unsure (1)..(334): unsure at all n locations
atgaagcttactttaagttaatctaaacctaagagggctgtctatattgagcctagtccaacaatagggatctgaggaagaagcttggattgattcattccaattggggatcgaggtttagtaatctaagctacaacatagaacacaaaagcatgaatgattagagaaacatccttatatgcatcagctggtctgctagaaagacccaacacttctacctattgctatcaattttacttacttacattnttacttgttttatcctagacatagtttaattctactttaaaccatcaattatcaatgtttcttcaacaatgccctatttctgaat

SEQ ID NO: 191015 - DNA, 283 bp, Glycine max
  unsure (1)..(283): unsure at all n locations
tctctctcacagaggatctctacttggattgactcactctttgtggctcacccaagcgtgaggatggagactgaccgagctattaatcttgtctctaagagaggctttttctcactctaagaggtggatgcactcttatctnggatggataggaatgaaggcgactaccctaaatacactactccatctccacactaaatggcggagatttcttgtatcataccgcgaagacatatgctctagaatgctccacacattctaggagtttctacactattccata

SEQ ID NO: 191016 - DNA, 360 bp, Glycine max
  unsure (1)..(360): unsure at all n locations
tagctttcaattcattctatgtacccgtggtgtgtccacatttgttgcatgtattnttattcttggtttcgtctactttntatacccccttttgacgtgcttaagccgtttatttaagtcatttctcgcttaatctaaaaataaaataaatttccaccgaacatttgaaatgtatcatccgttaattttggttaaaatgaattccgaccgttcggtcatgccgtaaccacattggagatcaaaagaggtaaaataataatataataataaagaataccttttagtaaaataaaagcgtaagatcaatcagaacgtttctctttatgacttctcattcttaattgaattgactaataacta

SEQ ID NO: 191017 - DNA, 321 bp, Glycine max
cttgaaggtgtgtagtccaccatcttttcatagaagaatactggttatgtgtctgctattatcgtcatcattcttttctccgtcattgaggtgccacttgagctgtcaggtctctccacctttgggcgtattcttttgaaggattcgtgccccctttatgcacatgttttgtagttgcatgctatccgaagccattatactgacactgcctgacgaaggcaaccactaggtgcttccaataatgggctcgggaaggtccaaattagtgtccagggtacatctaccccagtaagactttcgtggaaggaatgtatcagcaat

SEQ ID NO: 191018 - DNA, 305 bp, Glycine max
  unsure (1)..(305): unsure at all n locations
tacttcacatggacttgatggggcctatgaagttgaagccttggagaaaaaggttgcctatggtgttgtggatgatttctccagatntacctgggtcaactttatcagagagaaatcagacacatttgaagtattcaaagagttgagtctaagacttcaaaaagaaaaagactgtgtcatcaagagaatcaggagtgaccatggcagagagnttgacaacagcaagtttactgaattctgcacatctgaaggcatcactcatgagttctctgcagccattacaccacaacaaaatggcatagttg

SEQ ID NO: 191019 - DNA, 311 bp, Glycine max
  unsure (1)..(311): unsure at all n locations
cactcagctttaatccaagctgatgtnagcggagatactacatggcatggcttataccttaatggatggcgcctacgcacacctctacacatttgtcttccgctacatctccatggaaggcaatcaccaatacaggaccccattgaaactcaaagatctagcctccatagaagccccacaagcaagcatacaccaggaagcttctggatcaaggagctaacaaaaatcttcatgctggtggaccttcattttctagctttgacatgcagcaacctcctatccctcttccattgccacatatagcaattccc

SEQ ID NO: 191020 - DNA, 427 bp, Glycine max
  unsure (1)..(427): unsure at all n locations
ctagacacacaaatanaaattatttaagctatatctccatatgtgcaactgtgcattgagtcgtagtgtaattcctctctatgtgagtggactctatgcaaggttcagtctaagtacacacatcccaagggatgttatcatactaatataggaaagtagcacattaatctagaagattatgatacgatttattagttttagcaaaaacaatttttaccatgtttggcaaaactctactttatccttttatagtatagtttggaaaagtgcaagaagccatataatgcattgctgagctcgtggagagcacctccaaggctgtcccagatgccaattactcatattaatggtcattcaaagtgcttaaattaagaagataaagattangccttgcaatctcattggtccaagcatttcacctacaata

SEQ ID NO: 191021 - DNA, 396 bp, Glycine max
ctatacagtatatgacatataatcttgtcgatctatcattactcttaattatacacgatatacctggcccaatcaattattcattgttgaaaattaaaaagagtctaaaaaaagtgacatattatcatctaaattatgttctagtacaaaatgtttttctactataaaaatgtgaataattcaaaaaggaaatcatacatgttaaaaggctcgtgaaattcccccctccaactagcaaaagaaaaaaatcacatttattaaatgactgatacaacaacccattcaattaatggaccacgttactataaataaccaatctcaatttctagaagttttttttcatataaatttatttattcttacgaacctgccgaggaggtcgacaaaatgtatgct

SEQ ID NO: 191022 - DNA, 598 bp, Glycine max
  unsure (1)..(598): unsure at all n locations
atttaatgtcnctgcgtgtnaattttgtgtaaggtntttntannnnnnnnnnnnnnnaagaacgtggtcgattccatncantaccgacactntanatactcaacctngatacttacatgtgaactgaagaccccagtgtgatctatcacgtctctcttcttacaaaacataacgatattacggtactgtctcatggacgcgacacgcaaacaatgcccacgttacctgaggtcaacacaatcataaatgaccagtctaagaatatgcacaccacattagataactgtccacattacattgactcactgactacacatgaggcccaaagaaaactattccatgcaattccctgaccaacgtcaacatgtagagagaacaatgttgaggtcgcggccctgagcactgtatcgacgctggctctaagataccatgaaccgtatcacaaactaaactgctactcattcattacgtaacactattaaggctgtagactatatcgcgcccaaaatacaggggctaagcctatatgactacagcacataaatattctgctacataatcacactttagactagtcattagaacatctcgcatcacc

SEQ ID NO: 191023 - DNA, 453 bp, Glycine max
  unsure (1)..(453): unsure at all n locations
agcttcctttacttgacattgttggtatgacaccaattangatgacattntcagctgcattntcctatttggagggaaaacgtataaacaatgttgtttgggctctaaaatggttttgaggtatttntctgagacgtgatgcaatccctcaagttattgttactgatagagattcaacattgatgaatgcaatgaanactattttccccaagtcaaccaacttgttgtgttggtttcacattgataagaatgtgaaggcaaaatataaaacctttgtgggtaaaaaaaatgcatgggattatgtcatggaagcatggaggagtctcgtggattgccttctgagcaagggttcgatgagttaagaaagttgaaattgcttgctcaccatggtcaatattngttgactatgtcaaacaaacaaggttgattccctatanacaaagatttgtaaag

SEQ ID NO: 191024 - DNA, 397 bp, Glycine max
  unsure (1)..(397): unsure at all n locations
ctaagcttctaaggaggtgagcttagttatgaaaggggtgtgtgtagctaatctctagcttctcaaggaagttttctcaaagaagcttctcaaggaagttttctcaagaaagcttctcaaggaagctacctagtctataaatagaaacatgtgtaacacttgttgtaactttgatgaatgagagtcttgtgagacacaactcaaaggtcaacttctctccctttttcttccttcaattccgtgctcccccctctctctttctctccctctatcttnttctccattgaagcatcctctccaagctccttcttccatgacttattccttaatnggatggcgcctctctacctctnttcctttgtcttccgctacatctccatggtggaaaatcaccatt

SEQ ID NO: 191025 - DNA, 428 bp, Glycine max
  unsure (1)..(428): unsure at all n locations
agcttaatcaatngannaatgacggtgtgagaatttccctatactctnactaggggcaattttcttggcacccttaatcatgttcaatttgttggtaagtttacgtcttttaatacaaaaaaaggaaacttggttaccatgtgagagtaatttggataaatgaaagtagttttggttgttatatgcatgagtatatcgatgcttgtttgcaacaatgtattataaaaaagtacctaccacatagagagtggctatgcaatttggaatgcatcaagaagtttcagattgtgtgattgcattctctggcaccaaagctattgcattataaaattactgcatacccaacattactttataaaattgcanacaatattactttggctgaaaagcagtctaaagctactatgtcatcatggacttcatgtatc

SEQ ID NO: 191026 - DNA, 289 bp, Glycine max
acagtgacaatggcagagagatctaacattatggcatgaaactataagctatccttgtaccttaatcagcaatactgcaactgaagacgtattattattattattattatcatcaataaaacatgaacacccatggaaacttagcgtagacgaagttgacctacttacctcgcagagaaagctttgatgcttgagcacccacgactgtttcagcaccctagtagcaacagtgtatgttgggttttctttgagccaaactttcaagaacagtgtaaggggttctgtgggt

SEQ ID NO: 191027 - DNA, 430 bp, Glycine max
  unsure (1)..(430): unsure at all n locations
atatattacgtgactcaatcggacatccgagtcaaaatttattgtcgtttggaattgctcagagcttctgttntcaattacgagcggtctcatgtattaccagactcattcggacatccgagtaaaaattaattgtcgtttgagtttcctcagagcttcagttttcaattacaagagcgtcgatttactacggaacacaatcggacatccgagtcaaaagtaatggtcgttggaattgcctcagagctgctgtttcattaacaagagtctcgatataatccggcacacaatcggacatccgagtaaaaagttatggtcgtttgtatttgctcaaagcttcctgtttaatcacaaccctctgatatatactggcactaatcggactccgagaaaaggtattgcttctgaatttccagagcttagtttcacg

SEQ ID NO: 191028 - DNA, 390 bp, Glycine max
tatgctgacttgatcccatatctacttgataattcaatggtagccataaccctagccaaggttcatcaacctccatttctccgagaatacgactcgaacgcaacgtgtgcttgtcacggagaagccccggcgcgttccattgagcattgtagggctctgaagcgtaaggtgcaaggtctagttgatgcgggctggctgaaatttgaggagaattgcgtgtaaatcctgacattgacaagagatgccacacatggggcaatgttgaaagctgttgttaggtgtccctaatgactcatcacgggtttcaagtttatgccattattgtaaaccacaactacaatggttgatgaaatggataaagttgatatctttgtccctcattctctcaca

SEQ ID NO: 191029 - DNA, 382 bp, Glycine max
agcttcaggctgttcaattgcttcagattgttgcacaaaagggcaaaggtctgtgtggtggtcggcagaggagcataaaccacagagtctggcgacaagtgcagatttttgattcatggccagttgggttaccaggttaaccaaggcatctagtttaccttcaagcttcttagtctcagctgatgaagatgaattcgtggctacttcatgcactcctctaatgacaatagcatcatttctggcactaaattgttgggagtttgaagtcatcttctcaattaaatttctggcttcagcaggggtcatgtctccaagggctccaccactggcagcatctatcatacttctcttcatgttactgaatccttcataaaaatattgg

SEQ ID NO: 191030 - DNA, 476 bp, Glycine max
  unsure (1)..(476): unsure at all n locations
tccaatggaccagaaaaacaatgactctctntcagttgcttcacctacaagctatgaggaatatatggagctgctttattgnggtgctgtggaaacaatggcgactctactgtggattaagcgaaatttagtttaagctttgaatggcgccgtatcaatatctcttgaatatagttatccctttgtgtacactggctcacagtgatatttatcatttccagtctccatagaaatttcaactgtaggatggagcatggtttgcttgcgtttcctgattgttntcgctggatttcctttattctagttgttggccttttcctagtacatttgctagtttatttttccgttgagacattntcttcatagacatgtntacagggaaagagttaagtgagtctaactcaatatatcagttgctgattaattaatttacagaaaaattgtcagctngacttgttgatttgctcataaattat

SEQ ID NO: 191031 - DNA, 444 bp, Glycine max
agcttcgtcctcaaatccctcttgttggactatgcccaattgagacagcactcttaggtttagactaacttaaactgagtttcgtctgcagatctctcttgtaagattagactcagctcaagtagcttatgaaagtttagcctaatttagcctaagcttcatccatagatccctcttggtagactagacctagaataaatagcattattgtaacaacataattaaaaccaaaacttaatccgtagatccctcttgtaagactaagtttcaatcctgcttcaatcaagttctaaggaaaaagtacatttcccaatgctaaagtcacctaactatgcacataaatggatgattataccaaaatcatacaaacattaagcattgaaggaagcattgaacatataaaacataatcaattagatattaggtatttacatcagctgttca

SEQ ID NO: 191032 - DNA, 441 bp, Glycine max
  unsure (1)..(441): unsure at all n locations
tgcttctcacacgttactctgatgacaacatctcttcctgagactcttgcttcaactctgggacatatcttgataggtgtatcatcacatgcgcaaacgttgtcagcaacattggttgtatttattttgaaacatcctacggattctgtctttctcttcttgttatctttttccaaatcctttacacgctgctgaagatatttcacatgctctatagcgttgganagaacagaagccttgtccatctacacattagagatatcttacatattattttataagctaatgatggattggtgtgatctaaatntcttaagtttggctttgaaattacaataacaacaagaataaattttattccagtggatgactcagatatatgaatatcgatcacaagagatcattaaactagcttaaaatcaaattctgggaatatattat

SEQ ID NO: 191033 - DNA, 411 bp, Glycine max
  unsure (1)..(411): unsure at all n locations
atcgntcctataagtcctaaatgacatttcaagctagtattaactcactntaacctccatttaccacagaattcagacttagcctttcaaccctcaaagtctcactctttttttttccactcataacatcacattctcactttctaaccctaggttagttctacccttcgtccctaacagatttccatcagcaatttcagcatataaacatcacaaacatcatcacaaaaaccctaaaacagaatgggtatgtttaactcatccaaacatggcaatttcaacaagctttcaacaaatgtcttcacaaataatcatcacacagcagaaccctagcaagattacccatcatatctcccaaaaccccatacccacgaaatttaagagagaaagaagtccacccanacctgaatt

SEQ ID NO: 191034 - DNA, 606 bp, Glycine max
  unsure (1)..(606): unsure at all n locations
ttctgtcacgtcacanntgtctgnattgtagngatagggangtanntaagcagtnnngntgtgnanatntanaaaaaannnnnnnnnnagagagtggtccgatctgantgccatgccananacactcaagtctagatctggaatctgagttagacattatggtcgctccatattttgtgggcatttcactgctactttcgagggccatgattattgagggcctcaatcggacagtacgagtcgacaattctgccagtcgaaattcacctaagtattccatcgtaaaatggaaccgccgcgatagcttacgcgacttattcggagatcgtggtgaaaagttatggtagatagtatcagcgacgggcgtcactgttatccaaagagcgggaaggaaaatatgagcttaaatcggcagaagagtaatctggatggtcttacgaatatggtaggccttccataggacatgtgatcgctatgattattggggactaatctgacatgccaggatcccttgaacatgtggagtgagtctaatttatttgtaaattgtgcttatgaataggtacaggctttgctgatatcggggaaatggtagtaatcgtctcg

SEQ ID NO: 191035 - DNA, 453 bp, Glycine max
  unsure (1)..(453): unsure at all n locations
tgctgtgccggagatgtntntccatcaccaacaccaccaaaatcagtcaaaactgcactgtgttttctgcagctgatagcagggtactcaaaacagtccaatccattggctactctgcattcaacaaccctaactccttgtaatcccaataacaaaactgtgaagataaccccaacaacctgtagaagaaaatcaagtttatatcaaacaccaaaagcacaacaaaggacaagttttcttgtcctgaaactaaaattattataactataaggtttgaagttgtggtccacaacttcaattaaggccccactattgtatatatatgtaattntggagatttccataactgccattgtaaccacaccaactatcaatcactaccaacaantttatgcgacttacaagagaacattaatcgcgaatttaaaccttggaaggaatcaattattattc

SEQ ID NO: 191036 - DNA, 384 bp, Glycine max
  unsure (1)..(384): unsure at all n locations
cctcttcacgttaggaatatgaatgtagcatatatatccatagattcttacgtgctntgctgatggcttcttcccgttccaagcttcaattggagtcttgacttttacagacttagttggacatctgttgagtatgtaaacagcagtgtagactgcttcagcccagaatgtgttaggtaatcccttctccttgagcattgatctagccattatcataactgtgcgattctttctctcgaacactccattttggtgaggagaatatgcgactgntagttgtcgcttaatgccttcatcctcacataatctttcaaactcgcgagaggtgtactctttgccgtgatcacttcttagtacttttatacattttccactgtgattttc

SEQ ID NO: 191037 - DNA, 358 bp, Glycine max
  unsure (1)..(358): unsure at all n locations
accccacctgacgtccccaaggtcttctgaccctcgcgacatatctccaggtaccactctgtggtcaacaataaaagcaggaagtttcacccttcaacacttccttatctcaagcttgtaggattatggggtacccatcacatgtggtactaggtggcggtgggcgatggtgcacaacaagttttccacatccacaatgcgcgcataaacccaccatcccctgttgcccacctccatctgagctcacgtactcccacgtagcccatatcctcgtttctctcaacaccgggtccccatcaatccttccaagcttncacaacatccaagcaaaacaacattcaacagcacaagctatcac

SEQ ID NO: 191038 - DNA, 422 bp, Glycine max
gacaatataatccatatcttgtgataaataataatgtataatatataaagagacatctaattacttagcagatcatagtccattaggtaacattatatgatataagcaatttatttcattttaccttccttaaatttctcacattccttatttggaagcattagtaatggtgcctcttttaaccaatcttgagtgcaaataatagtatccactatttttggtgttagggagttgcagtatggatcaagcactcttccaccattgctgaatgttgacttagaagtcacaatggtgacatgtatagccagaacatctctcgcaatatgttcaaggaccaagaattgcccacactttaatctgcaccaatgtggatatccaaagccttagcctctaaggattccttcatgtatctatctaactca

SEQ ID NO: 191039 - DNA, 321 bp, Glycine max
tggattggctcaaagattcaacattcaatttcgagcgtctcgatatattacgggactcaatcagacatccgagtaaaacgttatttgcgttggaattagctcacagcttcaacattcaatttcgagcgtctctttatcacggatcaatagacatcgagaaaacgtattgcgttgaattgctcaacttaacattaatttcgacgtctcgattttacgggctcaatcagactgcgagtaaaagtattgccgttgaattgctagagctcacattcatttcagcgttcgttatatgacggactcaatctacatcgagtaaagtat

SEQ ID NO: 191040 - DNA, 421 bp, Glycine max
  unsure (1)..(421): unsure at all n locations
tgacaatgactntntactcggatgtctgattgaggcccgtaatatatcgagacgctcgaaattgaatgtggaagctctgagccatttcaaacgacaataactatttactcggatgtctgattgagtcctgtcatatatcgagacgctcgaaattgaatgttgaagctctgagcaaattcaaacgacaataactntttactcggatgtctgattgagtcctgtcatatatcgagacgctcgaaattgaatgcggaagctctgagccaattcatacgacaataactttttactcggatgtctgattgagtcccgtcatatatcgagacgctcgatattgaatgttgaacctctgagctaattcaaacgacaataacttcttactcggatgtctgattgagactcgtcatatatcgagacgctc

SEQ ID NO: 191041 - DNA, 402 bp, Glycine max
  unsure (1)..(402): unsure at all n locations
agcttctcccctatnntgctataaataggggaagaagtgaagaagaaaagggttcagccccttaggcacttctctctctttcgaatttgctaaggaaaattatttccatgaagaaaatccaagccgaggcgcttccgtaacgtttccgtgagtaattacgtgaagattctcgaccgttcttcaaagattcatcgttcgttcttcgttttcttcagttntcaattcattatatgtatccgtggtggtccacattttgtttcatgtatttttattctctttttcatttactttttataccctcttttgacatgcttaagccatttatttaagtcatttctcgcctaatctaanaataaaataaatttccaccgatcggttgaattgtatcatccgttactttcg

SEQ ID NO: 191042 - DNA, 451 bp, Glycine max
  unsure (1)..(451): unsure at all n locations
gagacaatgattgatttttaggagtctctactttaatcgattacttctctcttaaaatgtgctatagaagtgatcacaacttttaataaaaatacaataatgtgtcgtaatgggtgcaagctatgtaattgattacatcaagaatctaatcgattacattgttcttgaaatatttccagttgttgggaagaacactntaattgattgaaatgataatataatcgattacttcttccaaataatcgattacattgtatatttaattgattacatgcggttataactgttttctctataaatagacaccttgtgttctgccttttaataacatctaacaacttctgaatgtgttagaattatgagcttacattagtanaacatacaagagaacataaagtgcttataaatagtgtgactcacacattttaatctgtgattatgaagatcatat

SEQ ID NO: 191043 - DNA, 322 bp, Glycine max
ttgactcattctgtgcccgagatccttaagtcacctgatgcatgcagctttaagctagtatctgttctttatatgttctattttctataaactatctgatgattcttatgttacattagaccaaaaccaaccttcattcttttgaggctcaacaatactaaattactgattgttggtgacaaaaaattctgacaaacatatttttttacaaatataagacggtacaagtgtaagacaagtgcatgtatgctgaaaggagaaaatctcgatgtcgctgcacttaagcttgcaacgagcctcaatgccatcgtgctcacactct

SEQ ID NO: 191044 - DNA, 362 bp, Glycine max
  unsure (1)..(362): unsure at all n locations
ttacttttcagaatgtaagaactaactaaataacactaatatatagagtgactactcagaaggaagagatgggtctcgattagacctttccaatctacctaattaaagtaattacacaaaacagagcctaaacttgcaacccaattattcaagtgtagaggttctgacttccaagctcaatttgacccttgaaattgaagaattggccaaagcttatttgtgacaagattgaagttatctaacttagctctctgaagactactcacatgctccatttggagttctgtagtgtcctatggaccctgcacaagacagattcgtcaagtgaacataaaatctantaattagctacaattttcaat

SEQ ID NO: 191045 - DNA, 256 bp, Glycine max
gcttatcacagggagtgtattgtgtttattgtagctgataagtgtgtactcataacagcccgatccatgggctacgctgcgtcctacaaccgtcactccttgtgatctctgtaaccactctgtgtatatgaccacttcgtcgtgtatagcaatatttagcttgtatgttacaccgaaggctcctgatatgacaacaatgcttgagctgttactctaactgtacatctatatggggtgatgttgtggaccaccactt

SEQ ID NO: 191046 - DNA, 331 bp, Glycine max
  unsure (1)..(331): unsure at all n locations
tgactacttgactncattatttaatgtatgctaactaataattatacatgacaacgggatctacatctgtccaaatccaccccaattgtgatggnggaaaactgagttgactaggttcaaattttctctacttcttaaatttgggggtagggatatgtttggtaatgttgatatctgtcctgcccctgcctccgctcctattttatatatatatatatatatatatatatataaaagcgtatatactatgattgttatttatatataaattctatatgtgtattttgggggtgaggaaaatcaacctccatcacgtgcgaggagggggggt

SEQ ID NO: 191047 - DNA, 454 bp, Glycine max
  unsure (1)..(454): unsure at all n locations
agcttgttgngagtntaactntgtcttgtatgaggagtantttaggaacattacttttcctttntacgtgtatagacaattaaaattaaagcaatgaatattttctgaataatcaccataattagggcttgtgcctctatggtggaaccttgggatattcttacaagttttgatcttttgagtaagctataaaactaatactcaaagatttagtcacacttaanagttcattgtttctctttaaggatgtattatgtgagaaaaattntaaagttgataaaaatatttgaataaagaataagaacataccttattaatttagggataattttaaaaacagaatatanattttgaaaaaaatatattattaactaaatttcttaatcattgtgaattagttgttcctttcttataaaanaaatatatagcggacttatatnnttgagtatttttg

SEQ ID NO: 191048 - DNA, 460 bp, Glycine max
atctagggaactgtagggacacctctatcactgtctaaccacacacattagcttgcttaaaggtaaaggatgagtttattgcaattggagttatggtaaacatgtgtacggatccttagaggattaaattggagttaatttcgggtttttttatgcgttttaatttttcttgtataatgataactatgaatttcccatgtttgacgagtcaattaatgccctgatgtgaattggatgatttaattgagtgtttcactttgaatgttagaaacctagaaatttgggaattcttgattcttgcatgtcttcttgaaattgatcgacggagtttgttccccatgatgtcatcacatgttctggtctattcgtttgacattcgggtgtgtattgaggtctgaattgtgttcttttcttcatgaacacagttttttgtgagcacaaccgtgcttgagagagacac

SEQ ID NO: 191049 - DNA, 430 bp, Glycine max
  unsure (1)..(430): unsure at all n locations
agctatagcttctcaggaagctnctcaaggtggtgagcttatgttttatatgggtgtgtgtagcacagctctaacttctcaaggaagttttctcaaagaagcttctcaagaaagacttcttaaaaaagcttctcaaggaagctacctactctataaatagaagcatgtgtaacacttgttgttactatgatgaatgagagtcttgtgagacatacttcaaagttccacttctctacctcttttattccttcaatgtcgtgctcccccctctctctatctctgcctctatcttttcctccattgaagcatcctcttcaagcttcttatccaatgctcatcttggtggtgaagctccttcttccatggcttattccctagtggatagcgcctcctctcacctcttctactttggcttctgctgcatctccat

SEQ ID NO: 191050 - DNA, 373 bp, Glycine max
  unsure (1)..(373): unsure at all n locations
gttgagtcgagaatactttattatttatttggacaagtttgaatatgatgtagaagaaaatgaatgtgaacattnttcccctttgaaacacttgtttaaaaaaatgttttaaaaatacttttaattaatatttaaattttttattccttattagtatatatgtgaggggtagagggtgtcacaccacacccttttggttatnnttgtttagctatcatgcagtagcacttaggacctagtctcgtattataaataatgtactccattagaagtaaaaaaaggaaagaagaattatcaaataccagtttagtgtaacttagcatanagtagcttaattttcgttcgtatcagtaacactctacannataatttt

SEQ ID NO: 191051 - DNA, 417 bp, Glycine max
  unsure (1)..(417): unsure at all n locations
tatattaatatgggcagtgttttcccatgcaggatataaaaaccaattaagaaataatacatgtgccctgattgtcatatttcttttgaacaacttcttatttaattnttaaaacgtggtagcaatattcttataaacttaaatatgtttttgattctttgtaagttagtgttgtttcattttttatccttttaaattcagttttttaattttaatctttggtatttttttaattttagttcttttaagaccttttatatattgttaatccttataaatctatatttctttttaatattaatctttttagaatctaattttttatttatagctcataagttacacatatgggacaatttttatttaaaaatgcagctatacgaataaatgaacnaatatctactataccaaatgaaa

SEQ ID NO: 191052 - DNA, 455 bp, Glycine max
ttggccttggcccggatcttagcaccgtgctcatgagcctgagtccgcgatcttaattacctgccgctgcagctctaggagataagcactcctgttctcccggagggacaatattatattggctatggatgtgcatgatatcaaaacaatgcctatactcactatattaatcggttaattctatgagggggcgagaagatactttacttgtgttataaagactctacttctaaattcttagtatatgtgtattttaaccactgacaattgatcccctctaacaccgtttgcctttaagataacactgtccggcatcctcttacttcacagtgtatttcctgctgcctttataatctttagcactacataaaaaaccttttcaatttttcccctgtctaactaagacaagatcctttcttaggaaacagaaacctttacacgtgccctttgcaccc

SEQ ID NO: 191053 - DNA, 623 bp, Glycine max
  unsure (1)..(623): unsure at all n locations
atatcgtagtcacctantagttaagatcnttgtgtattaatagtgagngttttgttaatttctnttntannnntnnannnnnnnnacanacagtgntttgatttcgantcccgttgcgattgacacacactatnacatacatcagcgatgagagcactaagtgagacctatcttgtatttatacttaactatacacatcgcatcacgctcgagatgacgcggtgcgtcgataaagctacaactaaggcggctatccgacatgccataatacctacgtgcgatgtatatggatgtacctatgaggactgctcatgaagacataagaaaggcaactngcctcagacatatgcccgaacatacatacttgcaccgcctagtaatgcttgcatacaatagtatgattagatacgtgtgtaaatatgacactcaatgtgacaactatacgaaagactctactnatcacaatgtatgacagatatgtcttgcaagattgacatgngcatggaaacgatgcataacatagtgaggctcatatccaatgtccatagctgtactagtacaatattctagacctgttcccccactgctattaaagatcagacgctcttagttccacacctaan

SEQ ID NO: 191054 - DNA, 213 bp, Glycine max
agctatagaacgattccatggattgctgcggtagacaccgacttacggattcactgaacccatttaactgaatatattcattgatggtttgaggccgcagtcaaaacagttgttagatgcttcaaccgaagggaagattaagttgaagactccagaggaagcaatggagctcattgagaacatggcagctagtgatcacgctattttgcatga

SEQ ID NO: 191055 - DNA, 221 bp, Glycine max
ctgagtgagtgctgatacagagctcgccgattagcgttttcagagaccgcattctctcttatctatatgtcctaactcgctgcacatgtagcctacttgagagcaacagcaaggcggggcactttatctcttagaagtgactcatacttcaaccgcaagaagagaaagatgggatcttctcgaagagcgaagatcctacctcagcatgagaggacgactct

SEQ ID NO: 191056 - DNA, 237 bp, Glycine max
ccatctattgtcttcattgatgagatatacgctgttgttactaagaggtaagttattgaacatcagctttaggagtcactgtgtcaagacattgtctatctttctttttctgacatttttatccgggagggggcaggggatgcgggactgcgtatagagagatatcatggatcaatccttaatatatgactcttttatgcattgcaggtatgatgcccactctggtggagaacgtga

SEQ ID NO: 191057 - DNA, 642 bp, Glycine max
  unsure (1)..(642): unsure at all n locations
tctatgcactataancatttctggtgtctntttctgtganntaatgtagcgntgttagttantgnnattattttnnnnncnntcgatgagtgattgatttccgttgccgatgccacanaacactanaagcatttaatcactactgctactcacgtcaagcctcggatccactctatcttcactattagctataatcttcattacattgctcaccggctacggaactgcgtgaagtgttgaacaacttcagctaaaacaaagtcctacgtgtctaataattactaaacacagattactcctatatatctttctttcgtacgcaacatctcattgattactgatgagtgtacattcgtttaacaaggatcaagatactgcatgggtattgcttatatgggccaaaattcacgtctaacctacctcaggctactactaagcagagcatatcaatcattttactattgggttgtatatacgatgcttataaactgataaccttacgaacccattgcaatcaatacagtgataaccagaactgctgtatacaataccttcgacaatattcgttaactgagaaatcctagcaaaatcacgctcgacattcttttgttgaatcctgctgtcatattatcatcaccgacg

SEQ ID NO: 191058 - DNA, 481 bp, Glycine max
  unsure (1)..(481): unsure at all n locations
tgcatgcntgcttgttgaaattgccatggttggatgagttatacatacccattctgttttagggttntgtgatgatgtttatgatgttngtatgctgaaattgcccatggaaaactgttagagatgaaatgtagagttaacctagggttggaaagtgagaatgtggtgttatgagtggaaaaagagtgaggctttgagagttggaaggttaagtctgaattctgtggtaaatggaggttaaagtgagttaatactagcttgaaatgtcatttaggacttgngaganagcttggactgtgctagagagaaaaacanatgatcaaagtgaacaaatagccatttctagggcaaaattgtgtgttgaggagtcaaattttgattccgtcggaatttanggtgtaaattcagttgagcaagtttagtttgagggtatggacttgtgtgaggtgagagtttgtttanacttacctatctcaattca

SEQ ID NO: 191059 - DNA, 390 bp, Glycine max
tctctctcttgtgcaactgtctcatcctattctcaggtgtataatgaagctttgcaggttcaggtgcaggtgttgctactggtggaggcacttgaatttggttgctatacctcaacgtgatggcactcacatgtttcggattttgcacagtttgtgaatgcaatttgtcagaattctgggactgagctcggttcatctgagtagccatctgccccatctgatttgtcagactttgaatggaggctcttatctcttgctgaaattgcatattatgcatggtcattgtgcctgactaacttctttaagggaggttgatgacgagcctaaatagttgttgtctttgtgggactgctgctattgctgatgctgttttgaggatgaacatatggc

SEQ ID NO: 191060 - DNA, 473 bp, Glycine max
  unsure (1)..(473): unsure at all n locations
caagaacaatgtctatcgaagagtctatacctgtttcctttgatgagtcttatgcccttcttcccaggaagggatttttagatgatatttcagattccttagaagatacacatattcattggaatgacctctaaaaanaaagatgaaggaagccatgaagattctcaagataatggcagtaaaacaaataatgaactttccagagaatggaaagcctcaagagatcatcccctccacaacattattgctgatatatcaaaagggggtacaactagacattctcttaaagatttatgcantaatatggcttttgtatctatgattgaacctaacaatatanaagaagccatatagatgataactggatcattgccatgcaagaagaactgaatcanntttgaagaaacantgtgtggaaactagtaaaaaaacctgaaaatatcctgtcttngaaccaaatgggttttagaatn

SEQ ID NO: 191061 - DNA, 380 bp, Glycine max
  unsure (1)..(380): unsure at all n locations
tctccccccaatttctataaatagggggagaagtgaagtataatatggttcagccccttatgcacttctctctctttcgaatttgcttaagaaaattgtttccgtgaagaaaatccaagccgaggcgcttccgtaacgtttccgtaacgtttccgtgagtgattntgcgaaggttttcgaccgttcttcgacgttcttcatcggtcttcagtctttcacgggtaagtaccttcaaccaagcttttcaattcattctatgtacccgtggtggtccacatttgggttcatgtagttttattctcgtttcatttatttttataccccctttgactgcttagcctttattaagtcattttcgcttacctaaaatataaaaattt

SEQ ID NO: 191062 - DNA, 367 bp, Glycine max
  unsure (1)..(367): unsure at all n locations
cattcagaaactgctagtaatcgattaccatatatgtgtaattgattacacagtgcaaattttgaattcaaattttaatagctggtgtaaatcagttttggccactggtaatcgattacatcctctggtaatcgaataccagagagtaaatntgttgaaaaaaactttttaacttaaatttcttgtccaaaccttttgctacttcaattggaattcctttcctatttaatataccctttctaagactctagagactgtcttgatcatccttcttgaatatctttaatttctttgtcttgaataaagctttgagacgcatgtgaacctttggcatcatcaaaacattcagcttgataattttctacaa

SEQ ID NO: 191063 - DNA, 390 bp, Glycine max
tggacatcttccatctagatggactctcaaatatcataaacaataatcatcttatcctatcgactgcacaagataagactctataggctacctaacaacgataatcaagtacaactaaaaccataatcgactattcgctataatttaatggataattgtaatagaaaaagctttacatgtttgaaaaacacacacacacacacatatatatatatatatatatgaaccagatatgtacaagaatagatgtatttaaggtaaaaaggatacgtacttcctctattctcttttaatggtcacatctctgaaatattgtcgctttatactttatatctgaaaagtgaagataacattaatattaatctataatatattttagccttatattca

SEQ ID NO: 191064 - DNA, 435 bp, Glycine max
  unsure (1)..(435): unsure at all n locations
catgatacatgtcatggcttggtttggttcaaggataanagggatgccccacattatttccatgacacaaatgcaaaaaatgatgatttggaaattntatgcaaaactggtcatgcatgcgcctatgcaaacgctcaagtgtcaaatatttatggtcatgtgatgctagggctcangattcatttcctctattttaaatcaacccaatgtttccaaaatatgttcttttatcgatttgtgcattcctccaagtccatttcgggcgtccggngaaattttcacagcattcacccttcaggtgtagacacgtttttttcttcanaaatcggttatgatcaatgagtttttttttttcanagaaagttgaaatcatctctttcaaagcatgtcggttttagctagacaactttatttctcttttcaccttttccttac

SEQ ID NO: 191065 - DNA, 436 bp, Glycine max
  unsure (1)..(436): unsure at all n locations
actaccgcagctccggccaagctatcctggatgaagtgtatcaacagctcttcatctttagagtgggcgcgcatcttacggcagtacattttgagatggtttttgggacaagtcgtccctttatacttgtcgaagttcgacactttgaacttcgggggaataacaacatcgggtactaagcaaagatccgtcatgtctgcgaatggatagtccccatatccttccacagccctcaatctttcctcaaggagatcgagcttcctcctttcttcagttgctggaggcggcccttccgtggacaaaactatgggtgatgctgcgatgttgggttgaggcaacgtgcctggtgccagcccttcgggatcggnggatagaacttcacatcccttcgagcatgatcttgacggtctctgtggacttcgtcgggctgctgagg

SEQ ID NO: 191066 - DNA, 342 bp, Glycine max
ttgcctgcaagcttctacttatgtggcagggcgggctcacttcactttcttgtctcaaccgcgagctatgaccaccgctcttccttcccgagatgcttctctatatatctgcctgagtgggtttatagcctaaaccatacttcccacgatttcctttggcatttatcaagctagttatgccgacgttgtctttgcctaaacccattctgggttcgtaaccgttccccaacataactcgggccatcattactgctgcattggacaagcaagcttgcccagagaatgagtccacggaggaaatgcttaccacctcaaaagactgtagagtggtttctaatgact

SEQ ID NO: 191067 - DNA, 428 bp, Glycine max
  unsure (1)..(428): unsure at all n locations
tggatntcctgttagtacggaatctttccttcctaagatggagccaaacccagtccccctcattaagaactagctcctttcttcctctattgcccttagttgaatacaccttctgttggatctctatttgtgtcttaaccctctcatgcaacttctttacaaactctgacctagattccccttctatatgtataaaagaagtgtcaagtgggacgggaatgaggtctaatggtgttaatggattgaacccatagacaacctcaaaaggcgattgcttggtggttctatgaaccctcctattgtacgcacattctacatgatgaagatactcatcccaagattatggntgccttttagaagagcccttataagaggggataaagacctattcactacctctgtttgcccatcagtctgtggatgacaac

SEQ ID NO: 191068 - DNA, 175 bp, Glycine max
aaggtatgaccatttgaatttctcgagtgcttccgttggttaatttcaagcgtctcgatattttatggcctccaatcagacatcggagcgaaatgttatgaccattcgaatttgtcgagagcttccgtttttcaatttcgagcgtctagatgagttatgtcaccgaatcagacat

SEQ ID NO: 191069 - DNA, 475 bp, Glycine max
  unsure (1)..(475): unsure at all n locations
tattaggacctataatactcagcttatgagagagtcaaagatcaaattgagagganaaatataagctatgctaaacaagccaacanagggagaaagaaggttgtcttcgaacccggagattgggtttgggtgcacatgagaaaagaaaggtttccggaacaaaggaaatcaaagcttcaaccaaggggagatggaccatttcaagtgcttgaaagaatcaatgacaatgcttacaaagttgagctgcccggtgagtataatgttagttccaccttcaatgtctctgatttatctctttttgatgcagatggagaatccgatttgaggacaaatccttctcaagagggagagaatgatgaggacatgaccaagagcaacggcaatgatccacttgaaggacttggaggacctattgatgatgacatgccaagagcaatggcaacgatccacttggaggacttggatgacctatgac

SEQ ID NO: 191070 - DNA, 418 bp, Glycine max
  unsure (1)..(418): unsure at all n locations
agctnttagaanattntcctctgtaatctactacatagaanagganaagagaggggttgtctaacttatcataaataaaaatgggatttaaccactacatcanaattgattggtatagttaacatatctcgtcaattattttaaggtgcataaaaaagtgcaccaatcaagttcgatggagttatttaactccattntcacttaaaataatttagacaaccctgaagtaaaaaggttggtgggagaccattaattagtaagttattatctgtatctttgcatcggtctccatatttacaagcagcatatgtatgtactatcaataaatatctgattccacttaagcgagtgttagataaaatctaacaaatttaatgattntaagtggcgatcaatagttaaatagaacctacttgga

SEQ ID NO: 191071 - DNA, 393 bp, Glycine max
  unsure (1)..(393): unsure at all n locations
cgatttagccttggtttcactttgattattagtcaattaattcaaggaaactttcaaagaaaaacgtctgattgatctttcttgattattttattatttttttcaagatattttgattattttattattattttgcttttttttgtttaaacgaggttacagcgtgaacgatcggttagatattgttttaacagtgattaaacgagattacaacacanattatcgattgaacttcattttatagcggaagaaaagaaaattgacagtaagcgaaattaaagtgaaagtacacaaaacaagtagggaccactaagggtgcatagaatgaattgaaagattcgatttcgggaacttaccaattgaagatttaagaacgacgaagaacaaacgaag

SEQ ID NO: 191072 - DNA, 450 bp, Glycine max
  unsure (1)..(450): unsure at all n locations
agcttgcacacagccctatcatggaatggtatctattccttgtctntctttgataaattaaattaatattgctgactttactcatttggggtagtttactacttatttaatacttcagctaattgtcacatatgatgtgaatgtaattatgtatgctttttatgccaagtcgtgaatatattatgggggttcttgttgcactttacatgggacgaatttgctgtctagtgtagaggcacaaggccaatgcttagccttgaacttgcggtgatgagtttttggtctccggaaagtgaaaacatgctgcttattatgtgtgtgcgactttgaattgatgatgggcaccatgtgatgatgaattcaaattctcacttttactcttcaagggtcaattatgatatcatgcgatcattacagcatcgtgataattgtactgcgacatagtatgca

SEQ ID NO: 191073 - DNA, 315 bp, Glycine max
actaacatgtcgattatctcactgaaattgagctcatgcagtcatacccttaaagtaaggtcatgaaaaaatatgattaaaaaaaagattgtgttaaaaatgatttattagattttgtcagaaattatttatgaataaatttaataaatattttgcactgatatcatggtaaaaaaaatattgatatagtaaattaaaagactaagatgagagatggaaataagcattaacacagtactatttgagtaatcactaaaatcaatacggtgtttgtgaaaaacttgaataaaaaaaatcaataaatagctagctact

SEQ ID NO: 191074 - DNA, 360 bp, Glycine max
  unsure (1)..(360): unsure at all n locations
ttatttcttatgaggtgcataatgatanccaccaacttttccaacacattcttcattcagagtagacgttatgaggaatctagctcactccatttgtttctaccactcaacaatctacaagaattcttaacttcattatgttctgaaattccaaatttggtgatatttacgtacctaactctttgggtcggtcaacaccaatactgccagcgggaccatctcacgactcattgtatctatgtctttttccactgatgccacaatccaattgcatatataacatcgacatacagtcgttaatttcaccactcggccttcattatagattttatctgaagcactatacttggtatatatatc

SEQ ID NO: 191075 - DNA, 391 bp, Glycine max
  unsure (1)..(391): unsure at all n locations
actatcatgattaattntaacgggacctattctaacgtcttaagagctagtagataattcgaactctagaacatattattaaatctaagagaatgagagagtacattcaataacatagtaatagactagtagttcaataacattctttaaataattacggaggtgtctttagcaacattttattataatgattaaaaggaagaggttggtcaaattgggtagcatacctcgtggtttcatgggttgatcaatgataacgaacctccctaagatgcaattaaattaatctgggtggcctgatactctcttagaatagggctgagaataaaaccttgggaatttaagtgaggggggggacgtaattattttccgtttacctgggggaatgtcg

SEQ ID NO: 191076 - DNA, 370 bp, Glycine max
  unsure (1)..(370): unsure at all n locations
cctgcncattatactgattngnatccatctaaaatgatactacaatacgagattgagaaatcgatgatgataatgagacatggtgtgtacaatatgaacatgtgtttaatatatacgttacaaaatatttatttatttttttttaaaaaatagtatcaacaatttttttaacatttagtggtccaacattcatagatcttttcctccaatgttcattttaattttctatttattatgtatttctctcctgagctattacacttaccctcttcctttcctctttgttctctgcttttttccatctctctccccgaccgtttcacttccccttcctcttattgtctcttactctatcgctgaccctttcact

SEQ ID NO: 191077 - DNA, 292 bp, Glycine max
  unsure (1)..(292): unsure at all n locations
agctngctctanattacattgatgtttgtattatgggaggaggttatatgccatttttgctttaagagtagtgtcccactggtaaaattaactttccatatgtttgccttcgcatgaatggccccgaggaagcttgcctcaaagaggtccaagaaggacaaggcggtcgaatgaactagttccgctccngagtacgacagtcaccgctttatgagcgctgtacaccagcagcgcttcgaaaccatcaagggatggtcgtttcttcgggagcgacccgtccagctcanggatg

SEQ ID NO: 191078 - DNA, 416 bp, Glycine max
  unsure (1)..(416): unsure at all n locations
gttgctgctccctctatctctaacaatctactcattgtgtntctttcatttgttcttagagttttgttggttaacgactggcatatgagaacatcaaatggaggtatatgttgccctattatataatctccttttattctcatggctaatggttaatggttgtgtttcatgttctgatatctcactattcgctttcaatgtttgatgctttatatatcttaatttgaatctttaaatctatggttttgataggcctttcatttcatttattgggtgtgaagaaaaacaaagagaatatttaaaagactagagagataagttgttgctgagcaatgttgccgaaatttgttgtctgttaagtctggttatgttctattatgtttctcttcttttaatatgtgtaatgtttggaagtt

SEQ ID NO: 191079 - DNA, 259 bp, Glycine max
tttttttttgtacacatttgaagttttagggatccctgaacatagacaaactaacttacgtcagcaaaagattttaataataaggatacaatcctttaactttatttattaaatatcattggaactaacttttaaattatagacattttaatattgaaatttttagaaaatatattattatttaaatgatccaatatatataaatattataatataatttgatctataatttccataaaaatacttcagcaaaaaaaaa

SEQ ID NO: 191080 - DNA, 505 bp, Glycine max
tactctagcttatcatggcatcaagatgtgacataatattaatatcttatcagtataatatatttaatattaattaaatgtgaaagattcgataagatgtgagattatcttaatgtgagaatcttgatcaatatctctataggcactctctgaacattgagacttgttttgttccttgattgtgataaatctaactcacctaaatttcttcatattaaaaaaaatttgttaaactaaaggagcgagagattaagtatcataattcataactgcatttcaaaactaaagaaatatatattgagacttccttgtgtatagaggtgggaatatgctagacctacatggacctacgacctgacctacataaagtttgacctgacctatttaattaaacgttagactcagactttttaactgtctatcaattaaatagactaagcttatgcttattaaataccttattagcatgataagcccgcctatatatatatatatatatatatat

SEQ ID NO: 191081 - DNA, 182 bp, Glycine max
  unsure (1)..(182): unsure at all n locations
atgctatttgatgcttttcccactactcttangaggtgaaagggctagtgctgtgcttgtgtgtgtgcgtgatggagagacatatgctgtaacacacatttgaaaggcagtgtgtgtgtgtgtgtggagattccattaattgaatcttaccgatgattggtgaaacaatatctgtggtgttg

SEQ ID NO: 191082 - DNA, 331 bp, Glycine max
  unsure (1)..(331): unsure at all n locations
gcttgtatgagtactgngaaagattcaagatattgtgtataagctgtcctcaccaccagatttctgagcaactccttctgcagcatttctatgagggacttagcaacatggagaggagtatgattgatgctgccagtggtggagcccttggtgatatgactcctgctgaggctaggaatttgattgagaagatggcttccaactcccaacaattcagtgcaagaaattatgctattgttcttagaggagtccatgaggtagccacgaattcatcttcatcagccgagactaagaagcttgaaggtaaactagatgccttggttaacctggt

SEQ ID NO: 191083 - DNA, 443 bp, Glycine max
  unsure (1)..(443): unsure at all n locations
gcttgtaatcggttaaactaatacaagactcttctctgcaagctacaaacacttgtgtaatagattatgatcaacctgtaatcgattaaaacaaagatttttaactacaaacaaaattttctaactttagaacttttcttcttactcctacttgatgatgcatgatgctcatatgaaatgatagagactaagatgtaacacataatacaacaatcagtatgaatgccactcaagaaggttgggcatgtaaaagacaaaactttttcaagcttcaaggctaagtcttcatgttgctccccctatctctaacaactgagttatgtggatggcaaaattaagatggacaatcacgaaaacattgcatcgagcaagtgatgaacatagtgagtataagaaanacatggttagtcttagcacataagaacaaagagtatatttgacat

SEQ ID NO: 191084 - DNA, 359 bp, Glycine max
gctttgcatcatttagcttcagcaatcgattattttgtgctgcactttgtctgattttcccacagttcacaatccacatacaccattcatgacgacagtccaatatcaagtgtgcttggcaaggaagtcaagaataaactgattcaccttctcgggaaactgttcttgaacaaaatgggttccctccgggataaatgtaacctccaagtttggaacaaaccattttgctttttcaccctctgttaaatcttcaatccctggagacttcagaacataatccttgccacccattatcagaaatgccggaactttaaccacaggatctggcaagctaagcacttcacctaatgacctacaaa

SEQ ID NO: 191085 - DNA, 226 bp, Glycine max
tctctgtatatgcgaatatctctttcttaagtatagatagcatgttatccgtactcaaaaataattaattttacttcatgtttgaattaaaagtgacagaaataatctaagttcttgtttttacaaaatcaagttttcaggcagaactattattgacaacgtacttttaagaataatctaacatatcattacaatgacttaacttctcaaattgagttaggatcta

SEQ ID NO: 191086 - DNA, 438 bp, Glycine max
  unsure (1)..(438): unsure at all n locations
agcttgaaatacaaaaaaaaaaatanaaagaaaatctatgataagatccatctttaagagtattataatatgtaaaatatttaatgaattacgttaactttttttggataactttataatatagtataaaatatttaataaattacgttaacttctctttcacactgcaaaacttcggagaaagtattccacgaccaaaaaaatattaactgacaagcgttggttgttcaacccaattcaagtgtatatttcacgtgaattgtcatgcaattgctcgttgagttgttatgaatagatcanaacaattataattggaagttaaaatggtcaattccacatctggttgatgtgatccttaataagagtgatggatcgcttgatacacgtcacagaatataagtcagggtagacactacaagggatatcttgataagtccg

SEQ ID NO: 191087 - DNA, 341 bp, Glycine max
  unsure (1)..(341): unsure at all n locations
tactcaagctctctcacacttgtagaccaacaatctggtgcctcaaggtgtgagtcgttattcatatatatagtctacccctctgagcagaagtgagtatcatacatgagtattccacgatggccattagagctcacatgctctagatattgcattgccgctccacccatgggacatgctgtctggaccttcctctaagaagactttcaatacaagggatctccaccatcatcatcttactccgcggagccagacaccaagtntaaccatcggctttgataccaattgatggaacctatattgctaatctaatgtttagcatctacatactatgggaccta

SEQ ID NO: 191088 - DNA, 371 bp, Glycine max
  unsure (1)..(371): unsure at all n locations
tttgcntgcaagcttgaatncacttacccgcgctaagcgcatgggtggcgctaagcgcaacgtcgcgaatgcagagcctacttaaagcctgtcttgtgccaaattatggtacactttgacacacacttttacagacttttagacaaattgtacgcagaaacagggcatagattctacacactccacaatgcctattatgggataaaagccctatatgcatcaagacgagcatctcgtgcattgaaacctaggtttgtaagataatattgtttgtgtttctttgtaatggtaactaagcacactagttggggatttctaatgaacatctgatgtaaataacctatatctaattgagtatgttttctgtgttc

SEQ ID NO: 191089 - DNA, 261 bp, Glycine max
  unsure (1)..(261): unsure at all n locations
agatgatactatcattgtctaactacacatgtgagccttcttagaggtaagggatgagtttatcacaattgggattagaaagaacatgtgtggngatccttagaggatcaaattgggattaatttgngatanttattgtattgtaattctacctttatgattgtaatcatgagattgttatgtttgacgaaccaattgatgccttaatgcgaatggttgataaaattgagtgctcttggtgttntgtgtttttgaaccatt

SEQ ID NO: 191090 - DNA, 587 bp, Glycine max
  unsure (1)..(587): unsure at all n locations
tctctcttcgtgagactgtattaatagattgatgtcattgttttgtgatnntggggnnnnnnnnnncctatggtcgttgaataccattncctnacaaaaatactanactctgcctctctctagtaggacataccctaacagctatatttgttgtgcaatagactaacatcgatgttacaatgcaagctgcattccggagctttcaagttcggaagcattatcgcaaaattctttgatctgctggcgtggttgagaaagcattgctgcgttcgcatttgaagagagagggcttccgtggtctccacttcaaatctgtcgatgccggcaccggagatcatgatcaccaaagtgatgtacacgacgaatcttctcggactggttggaagcatgcccaaaacctgttgagagatctgtattaggttgtcacgctatgatccgttccaacacagcacaagaagacgtctggaggatgaatctggtccttaataagcatagggtactgctattaatacattaataatctaagaggattggtttgctgtttaatactagttaattttcataggcacctggagcggaatacaact

SEQ ID NO: 191091 - DNA, 492 bp, Glycine max
  unsure (1)..(492): unsure at all n locations
ctcgtgcaagtgggatattatgatagcgactttgccgctatatcgcgatcacaaggacttccgagtaggttattattggtgatcgtgctnatacctgcgagttctaagaaacacggcattgtgacactgtgtgcttgtgaaccgcaaatatgcagctgcaacctatttgcacatgtcatgccattgtgagctgaaagagtccatgtgaagaactacactggctgcaaaacgaaagcacagaagatctatgttgatcatagatctgcacaagagctcgccaagaagtgcagtgttccatgaacgatgtatggcgatcatattcacggtattatttatcagagagttgctcactatgaaagcagcacattcgaggcttgttgaaactgacgagctggatgngcgtacntccaccatgcctcctaactcctgagatttcgtagattgtgaccagacttggtggcagaacaatgttctatgatgacgatctgtatc

SEQ ID NO: 191092 - DNA, 351 bp, Glycine max
  unsure (1)..(351): unsure at all n locations
agcttctgcttatgtggcatggcgggcttcctttactttcttgtctcaaccgcgagctttgactaccgcccttcctttccgtgatgcttctctttacattntcctgagtgggcttatagcctataccatacttcccacgatttcctttggcatttatcaagctagttatgacgccgttgtctttgcctaaacccattccgggttcgtaaccgttccccaacataactcgggccatcattactgctgcatcggacaggcaagcttgcccagagaaggagtccatggaggaaatgcttactcacctcaaagactggaaagcggtttctaatgactcctctgcggcttccacat

SEQ ID NO: 191093 - DNA, 326 bp, Glycine max
gtttgacaaaatgtttctaatagagtcaaggtctattttggcttaattttttagtctcacttgttgtatattattccttttttggtaaaaggcttgactaggttgcatcttgtgtttcgtttgaacatgattttattaagcttgaatgacccgagaagcttcttcataatagtttctttcaaacttcacaactggttgtgtcaaacatgaaatttattttcacctataattaatcttacttctgctcttttaattgttgaaattcgtttcgctatgatgtgtgtgacaaatgttttaatagaatcacggctttttggttacttttt

SEQ ID NO: 191094 - DNA, 215 bp, Glycine max
  unsure (1)..(215): unsure at all n locations
atatatagatcgtggtcttaacaattacacgtcgaatgcctctttattgtctttgtttaaaatcattgctcggttcatatgtaaccagtaatcattcctagctagatagggtgcgcaacaaaaaagacaaaagaagaatgtgttatatattgccccagatgatatcctatacaanaatagcatcgcttttatattatttaattttaatgaatttc

SEQ ID NO: 191095 - DNA, 437 bp, Glycine max
  unsure (1)..(437): unsure at all n locations
agcttaaagtatgcctgagtcattcatccctatgagatgttgttgaagtattggcaatcagaatttccattccttggattacggcgttgaaccaagctcaagcttttacaaaaaggttcatcaagtcaagttgaaatatggaagtaaccgtcctgcacaattggggcaaaagatgaatcgagtcacatcactgcttcgtctactgccaaacatatataggattgttgatgtccttgttacttccagtttcaccttgacaaagatgtcatggaccatgttgaanatctaaattgattcaaccccatatcctgcgtaaaaattcgcaatacttcgactgtacatcattcgcatgcatccatgcttttcatcggntgcattgctcattgcattctttccttganaaataaaataaaataaagtataaatgaacttcatca

SEQ ID NO: 191096 - DNA, 435 bp, Glycine max
agcttaaaacctcttgatcattactaaacaagctgaaattattcacaaacacaagcaaggtatcctaactacatgcaagagataagaatgagaaatagaagaaggaaagaaaagttgggttgcctcccagtaagcactcttttaacgtcactagcttgacgcatcatcctgttatccaggatccaacaaagttcccacttcaaggaccttcttctcaggtctcttttcctccatcacatacactttcagacaaacattttggctaggtgggtctttgtcctcatggaacaaatcaaagttgatcttctgatcttctatgcctatctgcagcattttctttcccatgtctaccatgcagcttgcagtagacatgaatgggcaaccaagaatgagaggaatgtcagcatcctcttctatatctatgacaacgaaatc

SEQ ID NO: 191097 - DNA, 479 bp, Glycine max
  unsure (1)..(479): unsure at all n locations
ttgaagcgttgaactgaagcactgagaccccnancttntataatgaccgctggatgacgtactgtagtaggtgaatctcacgcggctcatgtcaccgcactatggtcctcggagagatgtttggaggtccagatacctgggcgtatancttaaggcatacttaccacgatttccttgggcatcaatcaagctcaatctgccgctcgtgtcgttgcctaaacccatttcgggctcataaccgtgccctaacataaattggtccattattactgctgcatcatacagacaacgatgcctacagatggagcccacggtggaaatgctgtccactcaaaagactgtaagcggatgctaacgatcctgtgcggcttcataaatgcataaagatgggctgctcccagatgactactcgccgaaatatagcatgtgtctacactacatcactactttgggggactactcgccacagccccggcccc

SEQ ID NO: 191098 - DNA, 454 bp, Glycine max
  unsure (1)..(454): unsure at all n locations
gtgaccgtgcgtcatgacatcccctntgtggaagcaccctctaccatcacaccatatcaggtgttctattctttattgtcaaggacactgaaggtgtgagaggagaaaatcacaatggcgtcaaatagcatccaactcttccatcaaacaagtttataacatcaattgaaccttgctcaaactggtgatgcacctaacactccaccgaattaaaatttgacttctaaacacatcaactctaccctataaacggctctaaggcccttctggacattagctaatctctattgcacggcccatactctttgcataggcacaaaagacacttcaggctactattatctctctttatccgcaatcacctctacatgcagacttatcttgccccctaatactaaactccgaaaactcatactgatgtttccttatctcacagttctaccactcctatccg

SEQ ID NO: 191099 - DNA, 427 bp, Glycine max
  unsure (1)..(427): unsure at all n locations
agctntcaaaccggctcttgcttcgagctctggtctctgcttatcttcacacaacaaaatctctcagaactctctggaacttggacctttctctctctagaaaccctagacatacaaagctctgaatcccagtccaaactctcttcacaaaatctgatttcaggtttaaataggtggccttgttcatgctcgtgtgcttagcgcacattagtgatttttggcttaacgcgcctttctcgcttagcggatgaactgaagcggtgcacttagagagatgaagcggtgcgcttagcgaacttgtacaactcatcttcttctggattcttccttgcgcttagcccaggaatgttgcgcttagcggatgctcgctaagccagcagattggcttagcgagaaagtgaaaacaaccttttccaaagcgtaccta

SEQ ID NO: 191100 - DNA, 483 bp, Glycine max
  unsure (1)..(483): unsure at all n locations
ctganacatgactgacgcttgtaganctacactgtgggatacacgacgctagacggacctaagattgttgccaagtattgtctacgcagataatactctatgtgtaacaagtcagaacgggaaatacactttaccttatattcaagccaaagggtgtttcacctcatgaccactgtcaactcgatgggcagtgtaccaaatccgtacaagtgggaaaagtctcggaacttcgatagtctatacacatggactttgtttgtacttgcactagtgcttacccaatttaacacctagagatcagaatttgacattcatatagtaagaacgattggacatccggtaaaggatagatacgatatgttaagactaaaacttatagataaagaagagataagacatctataaatatagttcgatgatgacacataggatttacatcggcagataaatattgatcaacttctaatgcaggatgatactacc

SEQ ID NO: 191101 - DNA, 268 bp, Glycine max
cttctaacgtctatgcaccggtgataaactgtcttctgtctttttatatcgaaatacggaccaggcagcatatttataggataaaaccctaacccatctctggcgctgataaaaggcgagaatgccgtaaccatctaccgctcgaatgtgagttgaatacagacatatcctctatccacactcccctgtcatacttatgccaacaactgtccttctctttacccaccgggatttattatcataagtcgttcctaaccacacaacaatg

SEQ ID NO: 191102 - DNA, 593 bp, Glycine max
  unsure (1)..(593): unsure at all n locations
aatcgatccccgctgtcacacttatatgtttcgattttttatcacaatntctanntaggtnaggtggcgaattgaanaccttgattttgcnggcattgtaatgacgtgacgctcttgaatactccagccttctgtctacacactcgaatgagagaatgttgattattgcgcattagagaaagcctccgatcatagagtctcatggacgcggacactttatctaggagtattgacttaccgtaaccttctatcctcgcttccattgccacctagcgcaatttcaaaccaaataatggaagaagtggaaacagggaatctggagagcttcatgaaagaacaggtgagcactcctttgcttgatgccatcatacagatttcgagatactcctagtgtctataggagctctgtcccaccaaaggaagctactaggcaaagataggactataatgggtagaaatgtgtcccctttataagtaaatctgttcctcacattcctgacaaaagtatggacgcaggtccgttcctgataccttgcactattgtgataatgaaattgagaatgccatgctcattctggagcatcattcgtggc

SEQ ID NO: 191103 - DNA, 520 bp, Glycine max
  unsure (1)..(520): unsure at all n locations
gttaatgcgggaattgaagccctgnactgaccgccctcgtagggccncntcgcttatgttatatcacctccatataagctgaaccattctatcactatacacaatgtgtcttatattcagaatatgagagtttatgtcttntatcttagcgaaagtgatcctcctaaatcctcgagcgattcttgaacaccctggctgtatcataggactctcacaacctttgtgtgctgccctagctggaaagagagatacattccttcctatcaatcacactcttggtctatcaactaccattccagaatatacacctatgcccaaatctatctcgtgaccataacgtcgcattttacaccctcctacccagtgatgcctgatcctcaatcggcctcctgacctgactcttttcctcgactcaacgcacccattagccgtcctgccatcgcatttgtcttctcaactcccatccgtctacccatattcccacgtgactcgcaaccgactatgacacgtccaccggccg

SEQ ID NO: 191104 - DNA, 275 bp, Glycine max
agctctgcgaatatggtcttcgtcggtgaaaggatcgatacgggtctgaaaagaggcaaatttgatcatctttctttgatgaatgagaaaactgggacaaatgaagaggatgataatgacgaaggaactcatgttgtggctgccattcctacatggccaaacttcccaccagcccaccaatgtgatcgctcatccaagatcggcccttctcattacccatcacccattcattccccttagccatccacatattggctacgaggcgtgcctgctta

SEQ ID NO: 191105 - DNA, 362 bp, Glycine max
  unsure (1)..(362): unsure at all n locations
tgagatgaggaagtgttgaagggtgaaacttcctgctanctttgttgaccacagagtggtacctggagatatgtcgcggtggtcaggagaccttggggacgtcacgtggggtgctatcgcccaaaacccttcttgaccaatcccgacccaacccggccatagtcggtcagcgtgaacctgtgatgtacctataccggagagctcccgtcactctgcccatcattagtgctgcatcacacagacaaggctgcctagagaaggagtccactgaggaaatgctgaccacctcaaaagactggaaagcgtgatttaacgatatttctgtggctttcacatataggcatataggatgggcagcttac

SEQ ID NO: 191106 - DNA, 284 bp, Glycine max
  unsure (1)..(284): unsure at all n locations
agcttgaaccctaacaatggaagctctctatattttcaaatggnnntancttctcagacggatgtttgatttggacacataatatatcgagacgctagaaattgaacgattgaacctgtcgagaaattcaattggtcataacgttacacacggatgtgcgattcgggcgcattatatatcgtgactgttgaaattgaacaatggacccttttgagatatttcaatggtcattactatatcacacgaatgtgcgattcagggactaaatatatcgagacgtgtga

SEQ ID NO: 191107 - DNA, 572 bp, Glycine max
  unsure (1)..(572): unsure at all n locations
gctatctccaccatctcttctctncttcatgttattntgttacntntcaattttantanataatcggactcgggtnttttgaacccatggactgaccgcattgtagaccgngaacctggagtactaaccttcttaccaaggcccaacctggtggagaagctaccacgttctatggctcatacatagtggacggcgcctaccttctcctattctgcattgccctccgctgcatctccacggcgaaaaatcaccattgaaggacctcactgaagctcaaagatcccagccccatagaaactccacaagcaggctaacatcagatatgaccacttgtcatattcgagagcctccggtgtgcaattacaagggtgcacgacccattatgcacccaacatcagacacacgtgcgaacaagtatgaccatcagagttcatcccgagcctacctgttcaatctctacgacctcacttattatcaccaacagctacatcctcacaatggtatgacctagtcaccaatggaggccactgcatataatacaaggacccatacttatggccacaaatacatcg

SEQ ID NO: 191108 - DNA, 386 bp, Glycine max
  unsure (1)..(386): unsure at all n locations
gctttctccacacggcggtactggcggaacttctcgtaaggcnccatacggaccaggcagaaaaccgtcaacctctgaacaacagacccacgctccgccactcttacgacaaacgcagcccatgatatccacaagcagcgatagcgatacaaccatgcacaaccacagacagggcacaaccgactaacgggacaacgaccgtacacaaaaaacaagctccgggccacacaaaccaaacaaaaagtgcccacaggcaacacaccccgcaatacctgcacccatccaaccgtgcccaacaaccaaaagcgaaacgaagcggccccctaaactcacgcacaggccacccaaagcgaaaaccgacccaacaacccgtccaacggaagccc

SEQ ID NO: 191109 - DNA, 518 bp, Glycine max
  unsure (1)..(518): unsure at all n locations
gtctcgcctatttgaanccttgtatttgatgcactgtagaactganactttgggtacatcacctggtagaatggatagacatgatacatgttgtggtccgcgatgttctacgaagaacatgctccctgtgaaacatgcctgaacgggaagatacacttgaccatatttgcactctattaatgcttgtacaccgtaaaaccattgttaacatgatgtgctacgtacctattggtctcaagtgggaaaagcctcggaacgtccagtgtgctatacacagggacttgtgtagaacttacataatgcataaccaatttaccacccaagatcagaattgacataaatgataaagaattattgacactcggtaaaggatacatacaatatttttagatataattcgaagattagagaagggataatatatctcaagatatatttcggcgatggaagatcaggatcctacattgtctgataacaatattggattaaatctctacattgcagatatatatttcgcn

SEQ ID NO: 191110 - DNA, 420 bp, Glycine max
  unsure (1)..(420): unsure at all n locations
agctntgatgatatggtcttcaccgatgaaaggatcaaagtgagtctaaaaagaggcaaatctgatcatcatactttgataaatgccaaaaaaaactagggcaaatgaagagggtgagaatgagggacaagcccatgctgtgactgccattcctatacagccaagtttcccaccaacccaacaatgtcattactcagccaataaccgaccttctccttacccaccgcccagttatccacaaaggccatccctaaaacaaccacaaagtctgtttaccgcacttccaatgacgaacatcacctttagcacaatccaaaaacaccaaccaagaaatgaattttgcagcgagaaagccttagaattcaccccaattccagtgtcctatgctgacttgctcccatatctacttgataattcaat

SEQ ID NO: 191111 - DNA, 444 bp, Glycine max
tcattctacacctcgagaaagagaatgatatagttgcacaatatagaaatcttcctcacaaaaattttcatgtaggtggaccctcttctattaattctgacttaccggagccttctattcctctttcattcccacctagcgcaattccaaacaaaaaaatggaagaagtggaaaaggagatcttggagaccttcacgaaagtagaggtgaacatacctttgctagatgccatcaagcagattccaagatacgccaagtttctaaaggagttttgcacccacaaaaggaagctcaaaggcaatgaaaggattataatgggtagaaatgtgtcagcattataggtaaatctgttccttacattcctgagaaatgtaaggacccaggtactttctgtataccttgcattattgggaatagtaaatctgagaatgccatgctagatct

SEQ ID NO: 191112 - DNA, 312 bp, Glycine max
agcttactgggggacatcttgacttgctttcctatctgacattcaccacagattctgccttcttctattttcagatagaggatgcctctaacaccacctttgtgaatgatttccttcatgcctcttaagtgcagatgtccaaatctttgatgccatattctgacttcatcttctttggaggatagacatgtggaggagtacctggttttttgaggtgtccataggtagcagttgctctttgatctgctgcccttcattagaacttcactctactcatctgtcaccaagcattctgactatgtgaagttactt

SEQ ID NO: 191113 - DNA, 306 bp, Glycine max
  unsure (1)..(306): unsure at all n locations
catagatcccaccattccctgttgaccacctccagatgaactcacgtactctcacgtagcccatatgctcgtttctctcaacaccgggtccccatctatcctcccaagctttcacaacattcaagcaaaacaacatnttaacagcacaagctatcatagcctagcacaacagagcaaaggcggaaaactctgctcaacacatcaaccaaaatcacagcttttctcacttaaagaccacagtaacaatatcttcgattcaattcgttaaccgttggatccgactcaaaattttactgtaagttaata

SEQ ID NO: 191114 - DNA, 368 bp, Glycine max
  unsure (1)..(368): unsure at all n locations
agctctgagccaaaatcctgactcaccataaattttgtcccanggtgagaatgtcaatccttaccctctgaagcaaaaaagaagagacaggaaactttccatctaagaaaaagagaatgaaagtttccaaatcataggaaaaaaggaagcctggaaattcccaatccaagagagggagaaagacttaatgaaaagaaagaaagttcccaaccaatgaatgggagatagtatagaaagaaaagaagaaagcttctggtcaaagaaaccagaagaaatgtgcagagaggtctttagaccggacaatatttgaacaatacagaatcgttactaattaaacaaaaacagaacaggacaaagccaaccaaaat

SEQ ID NO: 191115 - DNA, 390 bp, Glycine max
tgaaatgcattcttacaactaattattgcatgcttggagatgatataaaatgtagaaagggagaaagataaaattatatatgtaaacaaaataattattagataaaataaagaggcaaacagatgactgattgctccattcaatagtgctctatctttaatgagtaacaatgtagaaagggagaaagataaagatgcaaacacagcttgaatccatatatacatacaaggtgtctctaagtcaacttctatcgacatcaatattaggttcacagatgactgattgtctaaaggacgaataggagaatggtacctattcaatgaccacatcctgattgtcttttggaaatccaggctgttcatgtgaactgagatcaccacactgaaatag

SEQ ID NO: 191116 - DNA, 349 bp, Glycine max
  unsure (1)..(349): unsure at all n locations
agcttcatctctccatctagtatatgaaatgtggtattcaatgattgaaaaggtaaagaatgtcatatatcaatatgagagaaagtaggagagtgaaggatcaaccttttatgaggtagtgcactccatattaattgaccgttggactaagagtagcactcctctccattgtttagctcattccttaaatccaaggtaattaactctatacttttttacttacctttttttttagaattacataaantttaatcatgtatatatttctttttacttatagatattatagtcatgaatggataagtgaagattctaatcgagttcctccacatcaagacttggaactcac

SEQ ID NO: 191117 - DNA, 442 bp, Glycine max
  unsure (1)..(442): unsure at all n locations
agcttagcctgtataatatgaacagaacaactatatacctttctctatacattaatgatggacagctgagtaaaatacttcatctgtgagactaaagctcaaacactatatcatataatacatagacaaaatagagtgctgcaattccatttgacaataaatagataccaaatataagttgataaatacgtcatgaattccatacattcaaactttttcgtaatattcatattagaaataaaagaggttatgcaatttaatatattcatgttgtcaatctctccatcgaaatctttgtgctcacattagagtcatcagtagagctcttcctttttcttcattattcanatcaataaaaaaaaaagtagcaagcataacttcacatagaatagggtcaagcttcgacagcatgaataactaagattgacatatagattataga

SEQ ID NO: 191118 - DNA, 382 bp, Glycine max
tgactgtttctgaataaattattagatgtaactctttaaaaggtttttgactttctcaaagtggtttaagtttttctaaaagttataactcttctaaatggtcttcttaaccagacacgaagagtctataaaagcaaggctttgttttgcatttttcaatcaattcattcattctatcaatcaatcttttccaattcattctttacacaagcaagttttccacattgatttctaagtctctttgaacttcttcttcttcttccttttgccaaaagctttccaatgttttctggtttttctaaaccttgaagacttgtgctattcatctttatcattctcttcatcctctgccaaaaagaattctgcaaggactaaccgcctg

SEQ ID NO: 191119 - DNA, 403 bp, Glycine max
gcttgagatggaggattgtgggaattctctcctcgaatccttgaggaggattccaaggattccgctctgattaagatgtttctcttggcgggggggtttggtggcaagcaacggcggctcgtggcggccactggtggttgcgggtggtggaaaaggaggtgttagtgtttgggcgacgctttggagaataggggagtgaaaaactatgtttttcacgttgaggaacgtatgtataatctacagatctcacttagcaagcctgtctcactaagccagagtccacttttctcgcttaacgtgataattctggcttaacgcaactccctctacactagggctcgcttagcgggccagatctcacacaacgcaatcttctcttgtgtcgaattactctcagcacgcc

SEQ ID NO: 191120 - DNA, 233 bp, Glycine max
attgcattgcatctaagtctttggtaaatgtgtcaacctgcaggggtttctaacctgtagtagagagttatcaatctgacattgtttaataccaatacatacttgtcacattttatcgttgtattctagcccagtacctaccaagcacactttcctgtcgaagcccaaaccaacatcggtacataacatcaaagcccagaaccaacatcgacaccttcatttatggatatgct

SEQ ID NO: 191121 - DNA, 248 bp, Glycine max
atacaatcctgcgcatttctttatcgtttgcgatacgaaaaacgaagggatgggtacctggtcaagacatattagcgaacttcttgaaagctcatatgagaaccatcattacgctcgagtatctggaagctcagacagatatgtgcagagaagatcatgtgacagcaatgatctttaccaagacaaagaaatttactgcatatacaaactattaacttactgtcttaaactcatcgcaacatttaata

SEQ ID NO: 191122 - DNA, 318 bp, Glycine max
acacaagagcagattcagtgcaataacttacgagtaacaacagttgacagattacaagaacatcttattgttaccgaatacgctaggcgccagcaaccagcgtataatgaccttgtatgaatcaagatgagagaataagggttacaatgatttgcggtttgacagcaatagcgcaagagagtagtcccatctttgtaaaacgtaataacactatgtgtattcaaattgtatattctacaagtttacaatgtgagaataaatagcatagcagctggtgcaagcaattagtaattaagataggctagaaataaggcaaca

SEQ ID NO: 191123 - DNA, 425 bp, Glycine max
agcttcttcaattctaccaatgtaaatcttgttgtatcaagtggcctcggaataattaagaaggggggttgaattttttttttttgaataaaagtatattaattcaaaaaagtactaaatacaaagcatggcgatccaatgatccagcctcaaaacaaccaaaagttcaaacaacccaaattcaaaagaacctctcgaaacctataacatcagctctgcaatgcgagctctaatcttattactatacctgcccctgtatgttatcatatttataatgttatttcgtatagtatccatatcttttggtttcccaaagcaatgttcattcctatagttccataaaccgtagatggtttcagttactgctaaccttagtaaagccgccttccaccctttgccagatacgtagcggagtaaccaatgat

SEQ ID NO: 191124 - DNA, 309 bp, Glycine max
cattgggtgtaaaaattaataatgattataaaaaaaacgatgttctgcttgcttagaaaataataattcaaaaaaatggatttggtggtgttaaatatctatttgttaatccccctggcccttggcccttggaaggctcttaacattggttttaaaaattaatattgattttaaaaaaatcgatgttctgcttgttagaaaatatcaattaacaaaattgatattgatgtttttaaatatttatttttaaatatctatttctgcatcccctggcccttgaagccttgtctttcttggaaccctcaattt

SEQ ID NO: 191125 - DNA, 414 bp, Glycine max
  unsure (1)..(414): unsure at all n locations
gcaagctttaaagcacaacaacacagaatctatgtgttctattcccctccattcaatggctnttctaggtttgaaaggtgaaacccacaatgaggcaaatttgaggcaaactctcacctcacaccagtccataacgtcaatctaaacatgcccaaactggatttacacctaaaattccaccaaatcaaaatttgactcttcaacacccaattctgccctanaaatggctcttggttcactttggtcattcgtttttctctctagctcaacctaacctttctcacatgtcctaaatgacatttccagctaagattaactcactctaacctccatttaccacagaattcatacttacccttccaactcttaaagtcttacttctttttcactcataacatcacattctcactttct

SEQ ID NO: 191126 - DNA, 420 bp, Glycine max
actaagctgcacaaaagtactaatattttttttaaaaatgactatcttactaactaaattccactaataatatagagtgaatactctaaaggaagggataggccttgattaggcccatctaatcttcctaattaaactaattacacaaaacaaagcccaaactcacaacccaattattcaagtgactgaattggccaagcttaatttgaccctgcaaatcgctgaattggccaaagcttatttgtaaaaaaattgaatatattattgttagacttccaaggactactcacatgctccatatggagttctgtagtatcctctagaccctgcactaggcagataggtcaagtaagaacaatatccataaattatgctacatttcttaattaagctcaatcatttgcctaaaccaaaactgag

SEQ ID NO: 191127 - DNA, 395 bp, Glycine max
  unsure (1)..(395): unsure at all n locations
tgcaagcttccttaagatactgccttgagaatcnttcttgataagctncgncgagaagagagagcggagcttctcatacccctctaatcactaagctcacctcctcgagaagctttcttgagaagtntccttgagaagattcctagagaatctagagcttaactactcacacccctctaatagctaagctcacctccttgagatgataagcttgagcttatctacacacaccctctataatagttaagctcacccccatgccaaaatacatgaaaatcaacaaagtccctactacaaagactactctaaatgccatgatatacaatgctaaaaccctatactgctatattggccaatatacaaagcccaaacagaagagaaactctttctaatat

SEQ ID NO: 191128 - DNA, 420 bp, Glycine max
tttaatttctctgaagctccatggtatctatccactcattgttaccagcactgtcatgaacacccacataccgctgagaggacccaattctttcatccatactcctaatactggtgaagtcccccaagaaacaccaagcaccctcaggattagaggcttttaggtgcttcagttgatcccaaagctctctcttcccagctatgtcacacggggcataaacatttacaatgtacaacagcaagttattcttagcccatcttcctgccaacatcagatagtttgtgcccttgacccttctatcaacctcgaaggcaaggttattccacatgcatagaagaccaccagcagtggtaattgaagggacactggtccaagacacactatcatcttcccaaatagactgacaaacaaccttagtga

SEQ ID NO: 191129 - DNA, 372 bp, Glycine max
  unsure (1)..(372): unsure at all n locations
catgcaatctccaagcaaaaacaanctatattaacattttttactccccgcncgaatgtcttccgtggtgtatttagacgtcccatatcaagactcgaagcgatgagcaaattctactgactatacctcttcttccggatgtctgactgtcttcaagtagagaacctagatctctcatttcgcctcgtacccttgcacactccccccgacggttactgcttgagcgatcgctcacgcgtactcgaaactcttcacgctgccattaaaaaaggccgattgctccactctataatggcaaaatctatgcttatgaagcaatcctacatgtttaaagtgatacctgctaacgtacactggctcataactccccac

SEQ ID NO: 191130 - DNA, 168 bp, Glycine max
  unsure (1)..(168): unsure at all n locations
gtccgatncnggcgcataagagatcgagacgcttcaaattgaccatcggaagccttagagaaatttcaatggtcataacttctcactcggaggtccgattcaggcgcataatctatcgagacgcccaaattgaatcatggaagctcttgagcaattcacatggtcata

SEQ ID NO: 191131 - DNA, 580 bp, Glycine max
  unsure (1)..(580): unsure at all n locations
ctcgccgcgctacantccacccctntctgtgactctctctaggtacgtgagtatctggtcgcatnacccacancccccccgccncncaccgccgttgagtcgtgtanatccatcnacnttagagtttagctgcaggcacgcaagcctctntgacataacttccttgagaagctatttttatttcgttcacccctaccacgaggaagcggaccgccatgagaagccccctgaacaagacacctaaagaagctagagttcagccacacatgcctctctaatagctaaccccacctccttaagagagagaagcgagagctcagctacacaccccctatagaagctaagctcacccccatggcaagagacatgaacacacaaagaaatccctactacaaagacgactcaaaatgccccgaaaacaaggctcaaaccctaggccactagaagggccaaaatacaacgcccaaatgaaggaacagccgagggcagtattgacaaagacaagcgggctcatacttagtccaagggctcaatagctacccgaaagctcacgagaaccatatgggcgtcctctggaccg

SEQ ID NO: 191132 - DNA, 293 bp, Glycine max
gtttgagaatttaacggttgtgttcttatttccattgacagcttcaacttgacaccccttgattccatactctacagaaagctccatatattgctccacatgcttggaatgtatgttcttcaacaactcatgggaatcaccatagctgattccagcaatatctggtgagccacaaatgaccaaatctggcgatgtaagagaataccccaaaattgatcttcctgaaacaatatattcccattatagttttatcagatgatcagatgccaagagacactcaaacaccacaataa

SEQ ID NO: 191133 - DNA, 427 bp, Glycine max
actgcatgatggcagcaatttcgacagatagatgacttgtaacatgtcgagtccacttctcaaatttctggaaattcagagggaaaactgacagatgataagtcaattatgcagtataaacctcttatgcagtaacaagccccacacacatgacttgtaaataacaacttgaatagtaaacattgattacactgtgaacaattatataatccagagaaagtttggaactctcaacttccatttcaaattgttatgacaagctactactttcatttcaaattgttatgacaagctactgcggtgaaccatttgcttcagaaattaaataaatttcattcgagccaatggcccacatataaatataaactggtaaaacagatatgccttgacttagccaaaggtggagaaagttgctatgaaactcaag

SEQ ID NO: 191134 - DNA, 423 bp, Glycine max
catgcaagcttgtgtactgctgcattctactaatatattttgtttttcctgtttagcctgagaataacaattggttgaccacaacaacactagaggcggtaaaggacaacagtctttcaaataaacctgttgtgcgtgaacaaacattattaactcaaatgaatcagggaagtgattgcataattcttagactaactaccttcaatgtacctaaacaaaattatttccaaacacgtgaccgacacatatcatgactaacttgaaaaattgattgcattgcgtaggtgggaagggcttggatgactaacctggcaagagtaatcctccccgcaaaggagagttgttgacgtgccttctaagtgaataggcgatgatccactctagaaataatatattggatggtactagtggatactctattat

SEQ ID NO: 191135 - DNA, 348 bp, Glycine max
  unsure (1)..(348): unsure at all n locations
ctatgattgtcacgtgctcatgcatttattgttcgtcttgtctatacgagacatcttgcctaacaaagtcaagttagccataactcgcctgtgctttttcttccatgctatatgtagcaaagtcattatatcctgtcacagttgatgagttggaaaatgaagccgcaattatactatgtcagntggagatgttttttccccctgctttctttgacatcatgaatcacttgattgtgcatctggtcagagaaatcaaatctcgtggtcctgcttatctacggtggatgtacccggtngagcgatacatgaagatcttaaaagggtatacaaagaatctatattgtccag

SEQ ID NO: 191136 - DNA, 367 bp, Glycine max
  unsure (1)..(367): unsure at all n locations
agctatacatttgctattactaatatttgattttgttttaagcatctgcttacttgacaagacgtgcaacttgagtaataaactgagagaccgattcttgagttgccaacactgaagaagatggttctgctaaaggctttgcgggtggttcctcctttgatttggctttcataggaggagaagtagcattggaggaactatcaagggcaaccttgttgaagccaaaaagatgagaccaatatgtgtgtcacaggagaagattttaacaagtttacacattctagtgatgtttggatgaacttcttcaacaacacttgaggaagatattaataaggtaaaatggattaaactanaatcaacttatgca

SEQ ID NO: 191137 - DNA, 168 bp, Glycine max
aagtcaaccattatcttccatagctgctatttttagaaccataaacctttaacaactgctgctataaggacaacaataacaactgagccttgaccccaacccactaggtgaggtcagctacgtggatcaacgacaccataacggacatcatgaagatgtctataaaca

SEQ ID NO: 191138 - DNA, 371 bp, Glycine max
gctagctctaaatttacattgatgtttttattttttggaggaggttctatgccatgtttgctttaagagtaatgtcccactggtaaaactaactttccaaatgtttgccttcgcatgaatggcccctatgaagcttgccttaaagaggtccaggaaggaccaggcggtcgaaggaactaattccgccccggagtacgacagtcaccgctttatgagcgttgtacaccagcagcgctttcaagccatcaagggatggtcgtttctccgggagcgacgcctccaactcatggacgaccagtatactgatctccaggatgaaataaggcgccggcggttggcaccactgggtacttccatgggctagtttgatc

SEQ ID NO: 191139 - DNA, 338 bp, Glycine max
agcttctcaatgatgtgaggtctgaatttgcttttctatcacgcgttggcgtcttccagaatttgattggatgaccacgagcggttgttggaacaggatctgactgagcttggtgagcccaggtgcagcgtgatgtcaaacatggaaaatttgaatgacgcacacattgaagtggacagtgagagaaagaaactcagggttgcagagtctcctaacagacagcttgaacgggatctgaatatggaatacgagcttattgtgagtcggaggatgagctgataaagagacgacttttttggagcaggcagtcaacgaagtggcttttttttagaggaatt

SEQ ID NO: 191140 - DNA, 69 bp, Glycine max
gcaaggaaaccgagatgatctacgtcatcatatcaccctgtgccgaacaggccccgacccggacgccga

SEQ ID NO: 191141 - DNA, 481 bp, Glycine max
  unsure (1)..(481): unsure at all n locations
tgttgatgatcatgaaccncttcttgggaaccccggggtcaaactggaaagcccacacttttgttttatttgtacgatgaccgctcaggcgaagccagagggtggctgctttctaagcactacctatctccccgcctggtagtaatacactcacccactctcggtgtatctgactattatggcttgtctgtaaggaaacactcttgtgatttaccactctaaagcggatagagttgttaggcaataccagagatgacggccttaacgaagaacaatgcaccatactgtgtgaggtatcgctagacaaggaataggctcaccaacacaaaagcttacagtgttgttaagctccactgacggaaattcaagctaaaatttaagaggtataagagaattccttaatgctaccaaatattaccttgacgagttgtaattttcttgacgcctcaacttgcaccattgataaccaatatctttttcg

SEQ ID NO: 191142 - DNA, 352 bp, Glycine max
catgcaagcttaccattcatagaatacctcttctctattttatattgacgtaccacagctccatcttgaacatgtcctaattgcgcaaacgctgtaatatcaattaacaaggttctatcatcacgcaccacatgtgtcgaccttttcatataataaaatattgtcaaagcctcgatgctacaaccattctgatcatatccagccattatcgtattacaagaattaacatctcctctgcgcatttcatcaaataaccgcgtggctgcaagaacgctaccccgatttcgcttaaccatctatcaaactccacgccctttttccacttaacataccctaccgacattgaattcca

SEQ ID NO: 191143 - DNA, 250 bp, Glycine max
  unsure (1)..(250): unsure at all n locations
agcttgcatttggaattgcgaaagccccactctatcattatgattagtacctgacatctcaaacaaacaaatcaaacgtaacaagacaattatagttgctgtttgaatacctcacccactcaagtgtatcacacaattatggctnttctctaatgaaacactcttgccttntaccactctaattccccttgagttcttaggcaattcaagagattatggccacaacaaagaacaattcaccaatatgtgt

SEQ ID NO: 191144 - DNA, 385 bp, Glycine max
  unsure (1)..(385): unsure at all n locations
tgagcgtctcgatatactacgggactctttcggacatctccagaaaaagntattgtcgtttgattttgctcagagcttctgttctgaatttccagcgtgtcgatataccacttgtcacaatcagacatccgagtaaaaaattattgtcgtttgaatttgctcagagcttttggtttcaatcttgagtgtctcgatatattacgggattaattcggacatccgagtaaagagctattatcgttagaatttgctcagagcttctattttcaattacgagcgtctcgatatactacgggacacaatcggacatccgagtaaaaagctattgttggttgaatttgcttcaagcctttgttttgaattttgagccgttctgtttactatg

SEQ ID NO: 191145 - DNA, 421 bp, Glycine max
agcttaaagcatctaacaaacacagccagaatgtctcactttataatcataactaaggtcatctacaaactcaatacaagaaagagagaaagacaaaacatttgtctacaaactggcacacaaaaaacacaacatgcaaatcagcgtacgttaaatataatgcacacgaacaaccatatatacattagataaaggaacttagctgtacaaaatatagaagcaggatatctatagtcggtatttgacccgcattactgtttgtgcaattgcaatcagcagcacgactggttatcatctgccaaataaaaaatagcaacttagtaaggttgacaaaataacaaatcatatgcatgaattgtttataaagagactctaatattaattgatcaaaccatctaacatactaggaaatactcaacta

SEQ ID NO: 191146 - DNA, 398 bp, Glycine max
acctttcttgatggctattgacaaccccgttttggcctagttttttatatgggctgggttgggttatagagttctgtgtgtcctccacactagataaagaaaaagaaaagttaatgctagctgtgagtacgttactagttctagaaggggaactatctgctatacacaatagaacaataccattttttttttccttcacactataccatgtcactcatgccaaaactagaggttactggtatggctttattaaactcaataggaatcttttttctttttgatcataaatgctagcggtgcatacattacttgctctataaggggaacgctttgctatatacaataaaaacgatattgaaccatcatttctgttcacactataccaaatgtcacccatg

SEQ ID NO: 191147 - DNA, 386 bp, Glycine max
aaatttaggaggctggaggggggtatcccatgaaagcaagctgagaggactaccattatttaatctccccgctcgctattgttaatgatgtgtacttgtctagaagtttagaactaaatgctcacaagagttcaacatcacatctttcacgccccccgagctattacacgttttcgtccgtgggccaagataaccccaagctcagtacgaaataataaatattacctctatatcattgattatttttcaagataaacatgggtctatttcttaaagcacaaatcataacgtctttccaccttcaagaagttcaaagctgcagtaacaaaagatagtggctgagagatcacagtcattacgactgatcgaggatgagaattcacttg

SEQ ID NO: 191148 - DNA, 404 bp, Glycine max
gatccttagagataacctccacgcatgcaagcttgtagaacttcccaaaggcaaatatgttgttggagcatagtgggtggtcagaaacaagctagatgaaatatgtaaggttgtgaggaataaggctatgcttgtagccaagggttattgagaataagaaggtgtaaattataccgaaacttttgctcatgttagtcgtctatagacaatacatattttactatcctttactgctcatcatggtatgatattttgtctatagaaaaaagaattgtattttttctatattttgaaaaacgcacaatggtgtgtataaatacggttacaagactgattgtatacactaattctgagctaaaaataaggaaccaaaatccctataattgctgtaactatgaaaggaa

SEQ ID NO: 191149 - DNA, 444 bp, Glycine max
  unsure (1)..(444): unsure at all n locations
gcaaacttcttatatccataaggaaattcaatcaataggcctccaatctttaatggagagggttaccactactcgaaaacccgaatgcaaatttttattgaggcaatagacttaattatttgggaagccatagaaatagggtcttatatatccaccacagtagaaagaattacaatagatggaagcacatcaagtgaaagcataacaatagaaaaacctatagatagatggtctgaagaggataaaagacgagtacaatacaatntataagccaaaaatataattacatctgccctgggaatggatgaatatttcacggtttcacattgtaagagtgctaaggaaatgtgggacactctacacttaacacatgaaggaacaacatatgttaanagatctangataaacacattaactcatgaatatgaactatttacgatgaat

SEQ ID NO: 191150 - DNA, 247 bp, Glycine max
  unsure (1)..(247): unsure at all n locations
agcttggttntgggcaatagcaccccacctgacgtccccaatgtctcctgaccctcgcgacatatctccaggtaccactctgtggtcaacaataaaagcaggaagtttcacccttcaacaacttctcatctcaagcttgtaggattatggggtacccatcacatgtggtactaggtggcggtgggcgatggtgcacaacaagttntccacatccacaatgcgcgcataaacccaccatcccctggtg

SEQ ID NO: 191151 - DNA, 332 bp, Glycine max
gtagacaatataatcaatatcttgtgataaaaaaaaatttataaaatataaagagacatctaattacttagcaaatcataatttattaagtaacattatattatataagcaatttatttcattttaccttccttaaatttctcaaattccttatttgtaagcattagtaatggtgcctcttttaaccaatcttgagtgcaaataagagtatccactatttttggtgttagggagttgcagtatggatcaagcactcttccaccagtgctaaatgttgagttagaagtcacaatggtgacaggtatagccaaaacatatttcgcaatattttc

SEQ ID NO: 191152 - DNA, 233 bp, Glycine max
  unsure (1)..(233): unsure at all n locations
tgcaagcttccatcaataagtttccactcgtatgttctattctggcgcatcacatctagagantgttgaaattgagcaacggaacctctcgagaaactcacatgctcacagcttctcacttggacgtcccgaccaaatgcctaatgtatagtgacgcgtccaagcgaaccatggatgcacttgaccatggaacctggtcgtaccttatagattggaggcacgactatggcaca

SEQ ID NO: 191153 - DNA, 520 bp, Glycine max
  unsure (1)..(520): unsure at all n locations
actgagnccnctgactgacngcnctcgtaganncactaacctcgtgttttgaaccttgaacggctcgatatactgcngcacatatattatacatctctatatcatacgtcctagctgatggatatggcccatagaatctgttgagaacttccagcgtgtatatataccacttgtcacaatcatacatccgagtcaaacattatagtggattgattttgcctatagctcttgttgtgaagcttgagtgttttattataatcctgcaaaatatcaacctcctgaataagagctattatcgatagaatatgctcagagcatttattcttaagtacgagtcgctcgatttactacgggacacatatgatgcgcgtgaataaagctctcgtgggtagagatatgacctatgtgtattttctgagagcttaccttgttgactttctatgcgatcccaactattcattccctcttataagaacaccgatcgtgagaacttgttgacaatctgaatattcataacacg

SEQ ID NO: 191154 - DNA, 257 bp, Glycine max
cccctttttgatgaagacaatcccttgaattaagacctgctatatacaagatgatagctccttcacacaacccttaactcccctatcttttggcatgtctgcctaacttaacttaatggtcattgataattgatttctaacccaaggtctctcaagatctctcccgctttggcaacatcaaaaagaactaagcaacataatcaaaatccgatcagagccttacaataaaccaaaataaattcatacattgtcataac

SEQ ID NO: 191155 - DNA, 428 bp, Glycine max
  unsure (1)..(428): unsure at all n locations
tgctctanatttacattgatgtttgtatttatgggaggatgttatatgccatttttgctttaagagtaatgtcccactaaaactaactttccaaatgtttgccttcgcaggaatggccccgaggaagcttgcctcanagaggtccaggaaggacaaggcggccgaaggaactagttccgccccggagtacgacagtcaccgctttaggagcgttgtacaccagcagcgcttcgaagccatcaagggatggtcgtttctccgggagcgacgcgtccagctcagggacgacgagtatactgatttccaggaggaaatagggcgccggcggtgggcaccactggttactcccatggccaagtttgatccagaaatagtccttgagttttacgccaatgcttggccaacagaggaaggcgtgcgtgacatga

SEQ ID NO: 191156 - DNA, 307 bp, Glycine max
agcttgtggcgctttttacggcagtccttttgtttgtagttgcaaatttttatagctttggaagggtgagtaccattcatgcaaactgtgttgttatttactattcaatttgcacacatgctattggttattagttgcggcaatatatctgaattgaactaaatgcttactatctttcaatatcacttaattcacgcacgtaatctttttacacaactttgcaccaaataattgattataatttttgctgaactatatatatatacatatatatatatatatatatatatctatagatatacatatc

SEQ ID NO: 191157 - DNA, 345 bp, Glycine max
  unsure (1)..(345): unsure at all n locations
aatctcaaccattaaatattttatgaatgaattcaattatgataatacgtactttatgggtgagagaaaaattatttcttcaccttagaattagactcctactttntcttgcatcccttctaccgatacctgccccttaccatataaggagatagtactgcaccacctgtcccctccgcatttaatgtttgatcagagaagttccactgcgttaatttcaacaacttaactaattaaatgatattgagggatacacgaaatgaccttacacgttccaatttacgcgacttagtgcgtaagaatcaactatgctttagccatatattattaaaaattgaaacgatg

SEQ ID NO: 191158 - DNA, 492 bp, Glycine max
  unsure (1)..(492): unsure at all n locations
attactttcgtgactttgcactatccgttataatatagagcagacctgcacgcctgctagatntgtatcatggagcaagaggtgttgatcatttatgtgtctgcacacnaaccgcacttcaccgaagttcgtaatgccacatacaccatccacgatgcatgaccaatatgtattttgctaggcacagagagtaaaataaacctgattctccgtttatggaaactgttcatgaacaaaacgggttctcttctcgataaatgcaccctctcggtttggaatataccattttgctattgcaccctttgtttaatcttcattccctgagccttagaacataatccttgccacccattatcatgaatgccggaacttttaccacaggatcttggcagctaagcacttctccttatgacctacctatacaaacgaagccatctaacactttcctcgatctcccctccaattataaatttgatagttctgagactctcg

SEQ ID NO: 191159 - DNA, 281 bp, Glycine max
taaaactgacagatataatctaagttttgtttctcaaaattaggttctcggcataacttattgacacggacttctaagaattaatcaaacatatcatttaaatgactcaatctcttcaaattgagtttggatctatctaaacaaaaaatttaacataacctatgactaatgtgcagtacaaaggttttcattcaactattatatttagcataatgacataccatttgaattcaggaccacacattatactggaaaaaaccactcattagttgatgcacact

SEQ ID NO: 191160 - DNA, 418 bp, Glycine max
agcttgctaagaccaattccaacaattttaaaaatagatagataattgcacttagcgtgacagggcacgcttagcgcacaaaaaacacaaaaatttctaattgtctgagaacacattactcgcttagcgtacagacgcacttagcgagttcataagcaattgaactttcactcaaagaagatgaacgtgcttagcgagacaagatcgcacttagcgagttcatctggaaatctagatgttcaacagaaacgatgaactcgcttagcgcaacaaggcgcttagtgcgctcatcgcgatttccagaaaaaagcgagggctaagttaactagcctaaagtttgaaatgtggaaataaaatgaacaaagttaagaagcttacttgtgctattgaatatgggtgcaaagagggagcaaaaatg

SEQ ID NO: 191161 - DNA, 433 bp, Glycine max
  unsure (1)..(433): unsure at all n locations
actaagcttaatttacaccagattgttgaagctgttaataaagataaaggtggtatgttttttctctatggatatggaggtacaggaaaaacatacatttggaaaacacttgcaagttcactaagagctgacaataaaattgtaataatggtagcctctagcggcatagcttctctactatttcctagaggtagaactgcacattcaaaatttaaaattctagttccagtttttgaagactcaacttgcaatatccatcaaggaactcaattagctgaactattaaatcagacaagtctaatcatttgggatgaagcacccatggctcacaaattctgttttgaggcacttgatcacagtcgtagagatatcatcaaacacaactcanaggacaataaaatctttggaggtaaagtcatggtctttggtggag

SEQ ID NO: 191162 - DNA, 411 bp, Glycine max
agctattctctgctgtcgcgatatgtatattgttcttcctgaatatattgtagggcatccattttagtaattgcttgactagatccactcattttttatattaaaaaaaatgactgagcattacaaaaagaacaacccaattcaaataaaatatattagaaacacacacacacacacacacgcacacacacatatatagtctcaagtcaccaagtcaataatttttactgaaaaccatgaaaaactcaatcattgaactaaagatgtaatatttgtttcattaactacaagaattaataataataataataatagtaataatcaacataatagcaatgtatgaaacatatttaaaacaacaaaaatagatgaacgtcatagaattaaatctcaatatttacaaatcatcac

SEQ ID NO: 191163 - DNA, 381 bp, Glycine max
  unsure (1)..(381): unsure at all n locations
aaatactaagtatttattacctatacttaactgaaaatacttataacactacaaaataaccataaattgggagagtttaatacaatttatacaagttttatacacaaaagttagtcgttttcaccgactaacaagagacaccatgcatgagcctcaagtaaacctatgggcagataaaaaattcttacccggtaggttgaaaacccgtaagggcggcctaggcaaaaattaggatataaaataaaaaagaagataggataaggagcatgtttatcagaggtttggtcccaaaatccaaactataaaagtatctagtcaagatatgaaatgacacatggtcgtgtttaacatcccnacacgaattatccattgtaccccctc

SEQ ID NO: 191164 - DNA, 337 bp, Glycine max
  unsure (1)..(337): unsure at all n locations
agctntggaaaatgatatctatacaaaagttattttatgaagcgactaacactcatgcctcttgtccttcatcgtaagttgatccttagctacctatgaagttgtttgaggatgcaacacaaatttagcgctaagatgggtgagggtaatctcattacttaggtctttataaatgaccttcctatcaagctgccatgaccttactaaaagaatatgccctacctccatgggaactatatcataattaaattcatccttatatgtcctaatggagaaaggcaccttcacttgctggtaacaatcattatccctttctcactgagccattaaagtttat

SEQ ID NO: 191165 - DNA, 397 bp, Glycine max
agcttgagcttggctcattacttgtcataggttttttttaaggctcggctcggcttatataaaagtctggtttggcccacgagcctatttaaaagcttgcttaaagacgtatttgattaattaattattttaaaacctagtgaaatactaactaaaaaaagaaacttataaaatataaaatttcgtataaataatgtacaaatccaaaaataattgataaacaaaatcatattgaattcaagtcgttaaagcacaaagtatatcaaaagaaaataaaaagagcataatattaaaaaatgtatggattagagatgattggtagaaaatgaattctattctacgtgaacagtgtgcatgaacagtaataaaaactgaaattctaaaatcctaaaattat

SEQ ID NO: 191166 - DNA, 73 bp, Glycine max
tcacgcatgcttagttcacttttaagagaagatattgcattttgactgctacaaaaaagctaagctaggaggg

SEQ ID NO: 191167 - DNA, 110 bp, Glycine max
ttgtcctaacttaatcctctattggaaaactcactcttaatcttatttaaaagtatctttgagggtgttttagtaggaattgggggctcacataatctagctacgttctc

SEQ ID NO: 191168 - DNA, 321 bp, Glycine max
aatccttgcatggagagccaggatttgtcttgtttatgatacgggccacacatatctggacgattaggaattaattcccataatccttgcaaaacaaagtagtatctaccttccctcttataaaaccattatcagcttgagaaaaaacttaacttttcttaccaagctcgaggtgcttcctttaacccatacaacgttttattaagtttgaaaacatgacgagggtagaatgaactatcaaacccacggtatatttaagcccaaaatcgaaatcatgaccatgatgtacatgtagggaatcgaattcctctctaacacatg

SEQ ID NO: 191169 - DNA, 440 bp, Glycine max
  unsure (1)..(440): unsure at all n locations
agcttaaggcatcaaacaaacacagccagaaagctcacattataatcataactaaggtcatctacaaactcaaaaaaagaaagaaagaaagaaaaaaaaattgtctacaaactggcacacaaaaaacacaacatgcaaatcagcgtaggttaaatataatgcacacaaacaaccatatatacaatagataaaggaacttagctgtacaaaatagagaagcaggaaatctatagtcggtatttgacccgcattactgtttgtgcaattgcaatcagcagcacgactggttatcatctgccaaataaaaaatagcaacttagtaaggttgacaaaataacaaatcatatgcatgatttgtttataaagagactntaatattaattgataaaaccatctaacatactangaaatactcaactacaatcaatccctagatcgat

SEQ ID NO: 191170 - DNA, 513 bp, Glycine max
  unsure (1)..(513): unsure at all n locations
attgaaacccgtggaactgaccgccattgtaganacaccannctgtgtaaagacccctctcttgatggctattgacacccccgtttgggcctgactttttatgggttgggttgggttaaaagggtcagcgtgcctctccaactaaactacgaaacagaaatgttcatgcgagccgtgagtactttactacttctagaatgggaactctttgctatcaacaatagaaccataccattttttttctcttcacactataccatgggactcatgcccaaatttcagtttaccggtttggctgtaataaacctaacaaggatcttttttctttttgaacataaatgctagcggggcatacgttacttgctattaaaagggaacgctttgctatatacaataaatatgaaattgaccatctgttttggtcacactattaccaatgttacccatgcctaaaattccagcttacctgtntcggattcaaagctccttagaatactccttatttattgagcc

SEQ ID NO: 191171 - DNA, 174 bp, Glycine max
aaatgtatctccatgcaccgatggatatctgacaaagagagcttccttgactctctttgttgactacttaagcgtcaactttacaccttggcttaccgaggctgcattttgctcctcgaagccattctctacaacatcccacacatcttgagctcctagaaccgcctttatcct

SEQ ID NO: 191172 - DNA, 558 bp, Glycine max
  unsure (1)..(558): unsure at all n locations
cagcccgcccacgaccgaccttaccgccatctcactntnacctcacatatcacgctcacactanncactncccnncacgcanccnncncncccgtgagtcgatgcantgccacnncctngagactctagcaccgagcagccagcatgcaagctngctaaacagacacacacgcatgttctatccgcaccctttcactacatagcgatgcccggacgacaacaagaacccggtacaaacaccggcgaggcgagaggcagatatatctacacagaccatcgcccgcacacgccgcattactaatcaacaccactcgacgcaactaccgcgaaaccgaaaagggcgatgcgaagtcaccctcaggggcaaaccaaccaagcgggggacacagtaagcccgccaaggcgcgaacgcaaccggaaacgaggggcatcaacaaacacgggcaagaaacaccggcaacaagaattgcaggcgaggaaccaaggtgccaaacggtcaaggcccaccacaaacgcgaaataccccgcgcatgacacagcccaaacaccacgcggccc

SEQ ID NO: 191173 - DNA, 305 bp, Glycine max
cactttgcatgtctaacatgagttctcatactctcggttacatccctataagcgcaaaaaccattctctaggtctttctctactacatatctacgacgaacacattgaggaatcttcttttggtgatacttctccaaacctgatttggcaagggctatatcaattatacccagcttctgcctctctcttctgcacccatatcatgcaatatggtgtatcagacacaattgtccttcttttcttgtccttttgagacctataatcattgtgtactctatgtattatgatagactgaagactatgga

SEQ ID NO: 191174 - DNA, 332 bp, Glycine max
agctttctccccaattttctataaatagggggagaagtgaagtgaaaaagggttcagccccttaggcacttctctctctttcgaatttgcttagaaaaattgtttccgtgaagaaaatccaagccgaggcactttcgtaacgtttccgtaacgtttccgtgagtgatttcgcgaaggttttcgaccgttcttcaacgttcttcattcgttcttcatcgttcttcggtcttcaacgggtaagtacctcaaaccaagcttttcgattcattctatgtaccagtggtggtccacatttgtgttcgtgtattttccttctcgttctcattaccttt

SEQ ID NO: 191175 - DNA, 456 bp, Glycine max
  unsure (1)..(456): unsure at all n locations
tggagaatagcttgaagatgttgtcttttacatgcccaactcccttgagtgacatttgtattgattgttatattgaatgttgcatctaagtccatatcatatcttttctgcatcatgcatcatcatgagtaagtgagaagaaaaatttctaagttagaaaagtttcttcagaaggcaaaactctttgttttaatcgattacaaccttatcgtaattgattacacaagttgtctgaagcttgcagagttatttcttgtattagtttaattgattacatccttatcatagtcgattacacagttatttttgagacaatgattgatttttttaggagtctctactttaatcgattatcatttgatataaccgattacttctctttctataagtggtttagaagtgaacaagaacgttttaattgattactntgagtatctaatcaattacattattctt

SEQ ID NO: 191176 - DNA, 184 bp, Glycine max
ataccatgtactcatgccaaattagttactgggtggttataaactaatagatcttttcttttgatcataaatgctacgggctacgctacttgctctaaagggacgcttgcttatacataaaatgatatgaccattctttgtacactatccaagtaccatgctaattagctacctgtggataaag

SEQ ID NO: 191177 - DNA, 486 bp, Glycine max
  unsure (1)..(486): unsure at all n locations
gtttgttacattgcatgacncgcactttagattagagctgcaggcatgcaagctngaaagctttatcttcatgtagctctctttatctttatcaaaaacgcgagcgtctaagtgcggtaggatatgcataagaggatacaacttggttactctactagagaagctaaaacactcaatgctaaattgcgttggttaaattgagcgacatccaggactatctcatactaatatgatggattctgctattcacaatgcactctttaagaaagatgataagaagctcggacgagcattcctgaaaggtgggtgaccagcagagactagataagtgacttgctttctgcccaaatcagtgatcgtgttgacgatgactgaattgcgaaccgcccgcatgattgcgttttcaaaagactttatgattaatatagaaacccttattacatgtcgagaaatgctccagtcgattaccaatggatggaaactgcc

SEQ ID NO: 191178 - DNA, 77 bp, Glycine max
gagagcgcttggaaagaagctcaaagactaatcatcaatggattattagaataccagagagagagggggaggggggg

SEQ ID NO: 191179 - DNA, 425 bp, Glycine max
  unsure (1)..(425): unsure at all n locations
agctttgcataagtatgaaataagctactttagttatcttttcagtaagcaccttttttaagagtttttttaaactacgtgtccgatctagcttttaactttaaggagaaaacaaaactataaaaaaatgggacaaacgttattatactaattatatcttgaagaaaattgtctgtgaaaaagaatatatataagaaagaaaaaaaataaatttaaagaaaaaatttgaacaacatctatagatcaatacacatttagaaaaagaagataaaaacattaatatatatatatatatatatatacatatattattntattttaaaatacaaatctaaatttaaagtattactaaaataaagttaaattcactatatatttttacaaacttggaatatnttttgggtacacttacagacatgtaatat

SEQ ID NO: 191180 - DNA, 453 bp, Glycine max
  unsure (1)..(453): unsure at all n locations
cctagctttgatactacttgaatagaaaggcattctgttttccatgggcaattattatcaataccaacaagcatatgagtccatggaagtttaagcacaagtataaggtctacatggtaattctcatcatctaacgggttgtgttctttgagagaggcatctgattgagatcaggcacaagtgatacaaatcaggagcatgaaatagtagataccacaaacttaaagtataagtaaactaaattaaaggatatggcaaaaaaaattcccatatttggttgcttgtcattatcacttaatatacagaaggacattagagagttttaccaganacctagaatccctaacaacaagatataaaaagaaaatgataataatggttgcaaagagccatgatttgcaaccacagacttatctatataatatacttaataacgttctcattatttacata

SEQ ID NO: 191181 - DNA, 302 bp, Glycine max
agctctcatcttcaattaaggcatatgctacttttagaacatactggtgaatccgcactaggggagctctatgtcacaataactcgttgatgctatggaacagtatcaaaaattcattccgaagcactaacacatagtattctacctaagacacaggaagaattgaactaagtgttataccgattcataacaatgcctacaaagaactaaaacgccacataaatgtcacaggacacgtatgacaatccagtatatttgacgtatatcaatactgtcagaggatggcatcttgataggctgct

SEQ ID NO: 191182 - DNA, 407 bp, Glycine max
tatgttctaaagctagccctgacaacttgttcttacacttatcgaagtcaccactattatagatagggggagcagcaccatggaacaacctactgctatcgctagatgatgcttttaaaaccagaacaaggatatttataggtattagattgagacgtcgatatcacaagatttgacacgtacaacgtagacacaatctaagtgtacatatcgaatctgttgacacatcaacacaggagggcgccatactacattatgggcaatgaccagatacacatgggcttgagcatgttcgtcttacgcacacatcatcaaggtgtacttgagaagtgggatgcacgatgtgaatcgcacccacaccacttggctgatactacctcatgttgaggatggacaccaccaataat

SEQ ID NO: 191183 - DNA, 401 bp, Glycine max
  unsure (1)..(401): unsure at all n locations
catgcaagcttcagcctcatcgctaagcgacaacttatattatctaagcagaacctattgtcgccgagcgcatttccttacggccataactgaggtcgatatagctaagtgttagtcatagcagctaagcgagattcattgcggcaatataagcgctaagcaagaacctttcagctaagcacatgctcctttgtacttaagatgcatcattttagctaagctggccagagcaaggcttagccagagatgcagctnttttaatctgcacacctcgctaagcggacttactcgcacgctaagccgaggttctgttaaaaaaaatttgaatctgaaatgccggcttagcgcacgttcgcttaacaagcctggtttataaaccaaacgtctctcttgctcgctta

SEQ ID NO: 191184 - DNA, 438 bp, Glycine max
  unsure (1)..(438): unsure at all n locations
agcttagtgacatccgtgacttgatcttaagcgtagatgttcgcaagagagattcaggagaatcttccagtcatgtttccaattcaacattgaatactgaaggcaggggaaggactacccagaagggtcagaatggtcgaggcagatcaaagtcaagagggaaaggtcagagaaaatttcaaagtgacgttacttgctggaattgtgacaagagatgtcactttagcaatcagtgcaaggcaccaaagaagaacaagtcgcacaaaaccaagaagcgcgatgatgatgaatccgcaaatgcagcaactgatgaacttgatgatgcattaatttgcagtttggatagtcctgttgattcatggatcatggactcangtgcgtcgttccacactactccctctaaagatntattgtctaactatatttctggaagatttg

SEQ ID NO: 191185 - DNA, 438 bp, Glycine max
  unsure (1)..(438): unsure at all n locations
ctatgttctaatgcaggcacttagagcttgtcatgatgctctcaaatcatttatattatcatatggtttcacaaccagaagaagcaacccttctctctttatctacatctcgggtaacataactgtctattttttggtgtatgttgatgacctccttctcacaggaaataacactacattcatagacacattcattgagttcttatctaatcggttgtcactcaaaaacatgggggcaccatactactttatgggtattgaacttatacccatgaactcaagcatgttcctctcacaacacaaatacatcaaggatgtacttgagatatttgagatgcangatgtgaagtcgtcacccacaccacttgcctcgacgactacactcatgtngcatgatggtacaccaaccaataatgctactcaatatcatagaattat

SEQ ID NO: 191186 - DNA, 372 bp, Glycine max
agcttgcccaggcgagctgatgcttagctaagtttgaatgtgcttgaccaggtgagctggttgcttacgcatgaagctatatcatgtcctaagcgagccagattctagcctgagcgagctaagggttacaaaagatcccaagggaccttgctcccccctgacgtggcatcaatttgattatgtgatcaaaatattgagtgactccttgctatgctctgttactgtcagggaacacggtatgtctggctaacaagaatcctattgtcaacgagcgatggtccccggacgatagtatggtctgacagatgcccttccttacttatgttctatggaaaatgaaacagaatagtcacctatcctatctgagcgatc

SEQ ID NO: 191187 - DNA, 547 bp, Glycine max
  unsure (1)..(547): unsure at all n locations
ccaccactcatacgacctacatctgagtattttcatatataaantaatagcaaaagggatgggctgatgacacactgaaacacnactgtaaggagctctaggagctggacctgagcttactgacgtgctctttatggagagntaacatcatggacacgcaggggaagaccaaggagaagacgtcacaagcggcgccaacctctcaggaataagccacggaaaaaggagcttcaccaccaagatcagcctcgaaaagaagccacgaaaggatgcttcaatggaggaaaagaacgacggagagaaccagagagggggggagcacgaaactgaaggaagaaacatgggagagaagatgaacaccgagatgggacgcacagactctcaaccatcaagcttcaacaagtgcacacacgctctaattaacgaccacgtagctccctcgagaagcgttcctgagaaaacctccatgagaaacgtcattgagaatacacccactgagaagctagagcggagccacacacacccggctcacaactacactcacccg

SEQ ID NO: 191188 - DNA, 429 bp, Glycine max
agcttgtttaccccatgttgaattcgcttacaataaagttgttctttttcaccactaattgctctccttttgaagttgtttatggttttaacccactaactcctcttgatcttttgcctatgcctaatgtttctgtttttaagcataaagaaggtcaagcataggcggactatgtgaagaagcttcatgagagagtcaaagatcaaattgagaggaaaaataaaagctatgctaaacaagccaacaaaaggagaaagaaggttgtcttcgaacccatagattgcgtttggatgcacatgacaaaagacaggtttccggaacaaaggatatcaaagctttaaccaaggtgagatggaccatttctagtgcttgaaagaatcaatgacaatgcttacaaagttgagctgctcggcgagtataatgttagtt

SEQ ID NO: 191189 - DNA, 407 bp, Glycine max
  unsure (1)..(407): unsure at all n locations
atgaaacatgantgccgccttaaaactgaaccttgtaacccgctaatttcagggatcggggttattttttagctcttcttgaaccattttttgattgattaagaaaatcttcatatccttacttggttgtaaaaaccccagctttttactattattgcaatttactttttgctttactgttttaccatcagagtttattttgttttaccacgtttatcatgtattcacaatgcctgattctaataaactctgctaatagcaagtcctgattcaacctcgacctccatttaatttattcttgacaccctggcgctttcggcaataaattccttacctattcataagaatggccaaagtactgcgggaatcacccttctaaacattaacctcgagtccattatatcggc

SEQ ID NO: 191190 - DNA, 377 bp, Glycine max
tgcaagcttgatgtttgtgttgaatgcattaaaggtttacaatctcaaaaacaagaaattaagtgcatatagggctacagacgtcttggaattgatacatacaaacatttgtgggccatttcatacaccttcgtggaatggttaacaatattttatatcattcatagacggttactctagatatgcatacttgtttcttatacatgaaaagtcacaatctctggatgtgttcaaaacatttaaagttgaagttgaaaatcaactcaacaaaagaataaagtgtgtcaaatctgaccgtggtggtgaatactatggcaaatatgacggttcaggtgaacaacgtctggcgtctttttcctggtacctagatgaatgtt

SEQ ID NO: 191191 - DNA, 284 bp, Glycine max
ttttgtcatgtcaaatttaacatgaggaacttgtgcaatgtgtctatcctctgaattcattcattggatgtttattcacattattagaggtctacttttcaattagtgttcatacataaaatgttattatagaaggaacatgtaactgcatttggctccccatgttttggctattaattacacaaacaatgctgatggtggtgtcacatcacagcacatagcacgtgcgttcacatacacataaaaaaaagcatcattacataccttttgtccatggaatgaaa

SEQ ID NO: 191192 - DNA, 292 bp, Glycine max
  unsure (1)..(292): unsure at all n locations
agcttatgaatgcttactgtgaccgattattctgtttatntcaactacattgcttttctgtttgatggacaccgcctcctagctgagcagactccagatgaggtttgtgtttcctacatgtattcatgaattccccttgtattctttattcttataatctacatttttcggtttgacttgaatttctttttgttgcagttggaaatggatgacggtgacgagattgatgccatgcttcaccaaacaggaggttctgttgtctgaaggatgtgattacctttgctcctcatta

SEQ ID NO: 191193 - DNA, 338 bp, Glycine max
atctaagaatcatggactgaaatcctgtagataatgaatccacttcaacaaaatttgttgcttcctttcttactctacatatttacatagagatttataatatttacataccctctaagtaggcgacatatatcattattcattagaaattattgcaccagtggaaacattataaaaccattagctgttcatatattttatcacattgtcaacaactctgtcacagttataaactgctcttgattcccaaacctttatttctcaaaagatcttaaatagcacaaatagacccggttatgtacaaaaaataaatgtatgatattttgctcaacgtatat

SEQ ID NO: 191194 - DNA, 374 bp, Glycine max
  unsure (1)..(374): unsure at all n locations
agctntatgattaagataaatgaaatgtctgatatataatattccttaaacaaaattggcaaccattcataacaaatgaaatctttagtctatgtttattcaacaccaagaaagtaaaaatatacaaggaaaccagggataagagcatgaaaaggaggacacaagaattttaatatggcaaagataaagcaaaagaacaaattatgaaactgaatttctctcagggtaaaggttatggcttcaaaagtagaatccttttgtagcatgtggctggaaatttagttattgactatgaaataagataaaatcaatcatctggattaatgattttaccaacagaattattaactatacctnncatgtccttctgtgaa

SEQ ID NO: 191195 - DNA, 457 bp, Glycine max
tgtctcagcgtttatgcgagacagagaccaacatgttagctatcatcgccaagtactcaagaagagttaggtctagccacggcccacgagcatagaatcgcggacgaatatgcccaagtatacgcggaaaaagaggctagaggaagggtgattgactctttacaccaagaggcaaccatgtggatggatcggtttgctcttaccttgaacgggagtcaagaacttccccgattgttagccaaggccaaggcgatggcagacacctactccgccccgaagagattcatgggcttctcggctattgtcagcatatgatagacttaatggcccacataattagaaatcgttaggaaacttgtatggtctctcagaccttgactagatacgacttcctttttgaaataaaatgagttggtcccatgtttctacttcaaaaagcttgtgcatatcaagtcac

SEQ ID NO: 191196 - DNA, 516 bp, Glycine max
  unsure (1)..(516): unsure at all n locations
cgaccccaatttcnnctttgaaccttgtccattcaacatcnttagagttatgatgcggcctgcaagctgcgagcttttaatttgtggcagacactgtatgatattcttgttgctaagccgagagcagagatggctacttatgtgtcgaacataatgcttgctccagatgatgagactttattgtccccttagtggaacgggagacgctatgttatatggcacatgcagcgtgactctagagatgcgtacttgacacatagccatgacaaggctcgaacgatggttgtactgccttcgctgaatggatcacttgtggagctaatgcatatcagaggggagtgcgtcgcatctgaccgggatggaaaagactaaggatgcgactacgttatattgtcaaccactactcgtgtgtgattagtcgcactcctctaggatctagataaccactctcctatgctctacacaatggatcccgcaccggtgacattgacgggtaattcttccctactgtctccc

SEQ ID NO: 191197 - DNA, 367 bp, Glycine max
agcttaaagtatgcccgagtcattcattcctatatatgttgttgaagtattggccatcagaatttccattccttggattacggggttgaaccaagctcaagcttttacaaaaaggctcatcaagtcaaggggaaatatggaagtaaccatcctgcaaaattggggcaaaagatgaatcgagtcacatcactgcttcgtctactgccaaacatatttaggattgttgatgtccttgttacttccagtttcaccttgacaaagatgtcatggaccatgttgaaaatctagattgattcaaccccatatcctgcgtaaaaattcgcaatacttcgactgtacatcattcgcatgcatccatgctcttcat

SEQ ID NO: 191198 - DNA, 430 bp, Glycine max
  unsure (1)..(430): unsure at all n locations
tttgagcaattcanatggtcataactnttcactcggaggttcgattaaggcgcataatatatcgagacgctcgaaattgaacaatggaagctctcgagaaattcaaatggtcataacttttaactcggaggtccgattcaggcacataatatatcgagacgctcgaaattgaacaatggaagctctttagcaattcaaatggtcataacttttcactcggaggtccgattcaggcgcataatatatcgagacgctcgaaattgaacaacggaagctctcgagaaattgaaatgatcataacttttctcacggaggtcagattcacgcgcataatatagcgagacgctcaaaattgaacaacggaagctctcgatatattcaaatggtcataactcttcacacggaggtccgattcaggcgcttaatatat

SEQ ID NO: 191199 - DNA, 308 bp, Glycine max
  unsure (1)..(308): unsure at all n locations
agcttcaatggagcttacatcatgtggtatcaatatcatcttcatctaggtgatgttcttttgcttcctctatctttttgtttggggaattctctttaattccttgttcttcatcttattctccttgtatatcctccatggtcttgtggtttggtgctgtttaaagtagattcaaaaaaataaaccgattaaatcttagatctacacttgttcttgcatttctatggttcaaattttgtagatctactcttgaatcatgtnttttgtgttgattttangttctaatatttttcattcataatattctt

SEQ ID NO: 191200 - DNA, 461 bp, Glycine max
  unsure (1)..(461): unsure at all n locations
gcttcttataagctgaaccattntatcatataacacaggttgtgttttattcagaaaaattagagtttatcttttttatcttagtgagaatgattctcctaagtttttgagtgattcaagaacaccctggctatatcaaaggactttcacaacctttgtgtgttgccctcgccagaaagagtgattctttccttcctttcatcttcaaccttgttctttcaaaccacaattccagaaaatccacttctacccagaattatctcgtggccataactcccattntacacgctcaaattaaatgattcttgagcctaaattgaatttcaaaatgatatctttcaccttattttggaatcacctcatttggagtcctgtcgcttgagttatagtcatttctatatttctgtccaatcaccacttaacctacgttntatcatctcattcttccattgtattccaag

SEQ ID NO: 191201 - DNA, 97 bp, Glycine max
tcgctgggaggatcattatacaggaacatcttccttgcattaactcattaatttttgagttacagatcttcgaatgatgtaaaaaattatcactatg

SEQ ID NO: 191202 - DNA, 434 bp, Glycine max
agctttccaaactatgtttggcatagaataactcttgaaagtacattgtcacagaaaaactacgacacctactctcttgaaaaataaataaaatttcaaaaatcgaaaaaagacatgttgaaaaaggtgaaagaattaaatgataaaattcaagagatagaagaaaaatgcgacaaagaaatggcaacaaccgaggaaaaatgttttcaagacatggcaacagtggagcaaaaaattcaatttcttgtagagactgaactaaatcaaaacgcatcagaatttaatgttgcatctatggcaacttcgttatcaactccacctgaagctaagtgctttacgttcttcaacatcaacacatgctccaattaataataaggtatgttgcagctttggcagctttgttatcaactccacctgatgctaagtgctttacg

SEQ ID NO: 191203 - DNA, 435 bp, Glycine max
  unsure (1)..(435): unsure at all n locations
tgaaggcgtgtagcccaccatcttttcatagtagaatatttgtaatgtgtctactatcattgttatcatntttttcttcgtcattgaggtgccacttgagctgccagatctctccacctttgggtgtattctttgaaagaaccgtgcccctttttgcacatgttctatagttgcatcctatccgaaaccatatcaaaattgtactgatactgcctaacaaaggcaaccattaggtccttccaagaatggactcgggaaggttccatgttagcgtactatgtaacagctaccccagtaagactttcttggaagagatgtatcaacagttcctcatcttttgcgtatgcccccatctttcgacaatacatctttagatggttcttggggcaagtagtccccttgtacttgtcaaagtccggcaccttgaacttggga

SEQ ID NO: 191204 - DNA, 144 bp, Glycine max
  unsure (1)..(144): unsure at all n locations
agcttgtggattntagggattgagggctgttttggtttgtgtttaggtttgagtttgtgtttgaggtttgtgttttgcatcaaaaactcgaagaaagagctctggttatacgcgtttttgtctttcctgtccatcctgaatgcc

SEQ ID NO: 191205 - DNA, 300 bp, Glycine max
agcttcaacattcaatttcgagcgtctcgatattttattgtactcaatcagacatccgagtgaaaagttattgtcgtttgaattgcctcagagctacaacattcatttacgaggttctcgatatactgcgtcactcaatcagacatccgagatacaagttactgtggtctgaattgcctccgagcctcaacattggatgatcagcgcatcgatatacgaagggactcattcagacatccgagtaacatgttattgtctatcgaatagactcagagcttcaacattctatgtccatggtct

SEQ ID NO: 191206 - DNA, 442 bp, Glycine max
ttcacacgacaataactgtttactcggatgtttgtattgagtcccttattataacgagacgctcgaaattgaaggttgaagtcccataatataacgagacgctcgaaattgaatgttgaagctctcagctaattcaaacgacaataactttttactccgatgtctgattgagtcccgcatatatcgagacgctcgtaatctgaatctgaagctttgtgccaattcaaacgacaataacattctactcggatatccgattgagtcccgatatagatccagaccctcgaaattgatcgctgaagctctaagccatatctaatgatcataactctttactcggatgtatgattgagtcccgtaacattacgacacgctcgaaactgaatgttgaacctctgatcaattcgaaccacaataaccattactctgatgtctgatatga

SEQ ID NO: 191207 - DNA, 443 bp, Glycine max
  unsure (1)..(443): unsure at all n locations
agctntgaaatggagaatngggagaattttctccatcgaatccttgaggaggattctgaggattccgctctgattaaagttttcctcttggtgtggaggtttggcggcaagcgacggtggcttgtggcggccattggtggtcgtgggtggtggagaaggaggtgttagggtttgggtggcatttggagaggaggagagagtgaaaatcatgtttttcacgctgaagaacgtagttataatctgcagatctcgcttagcgagctcgtctcgctaaaaggaagtctacttttcacccttagcacgaaaattcgcgcttagtgcaactccctctacactaagtctcgctcagcgggtcaattctcgcttagcgcaattccctctcgggttggaattgtgcataacgcgcccctactcgctttatgtaactccttctcgggttggaa

SEQ ID NO: 191208 - DNA, 267 bp, Glycine max
caaaccctttgcttcgacgaagacaattgggttacccgcatgtgtagcttatcgcacaacattacttgctaaagacccagggcaaaccacctacacctttggacattatgcatgactggcaagtgccgatccatgcaagcaaacgttcagcaaaaatcaccgcacccttgcaagtagaaggcaccaagccaaacactccacgtataatacacaattgggctacgctctgacacggctaacgtgcattttataaaaaacaactgaaat

SEQ ID NO: 191209 - DNA, 401 bp, Glycine max
agcttcttggttggaaagaaaaaggagcctatcatcattttgcagtatgctgatgatactatctttgtaggagaggctgtgtgggagaatattcatgttataaaggccttattaagaggatatgaattagcttctggtttaaagattaactttgctaaaagtcagtttgggataatagggggtggagtcaattggtctttggaagcagccaatattttgcactgtcgacagctggaatatcctttcctctatttaggcttacctattggggctaatccttctagccagctggtgtgggagcctctcatttctaaattcaagcctaaattagccaaatgggctcaaagagatatatccatggctgggaagatcacccttatccattctggtcttacttccct

SEQ ID NO: 191210 - DNA, 275 bp, Glycine max
ttgaggtcattacgaagaggtgtattcctatctctttcgcttgagcgaagcataggtggctgtgcatgcatgcagaaccaaagagcttcatagtgacgaactcgtcagggcgagccatatgttgctctaccgagggactgtgcttcggggctaagataactactcgcctaggcgagagcccactagagtgaatatctacgctagctacttgataacaacgggaccaaaagttaacatcaagacatctattgtaaaaacgagaggcatgggttctg

SEQ ID NO: 191211 - DNA, 268 bp, Glycine max
ccaaaaaaactgataccataaaaaaaaaagatgagctgatgcgctgaacccactgaagaccaagaaaaaggacttcgacagcttccatccgaaaactcgcgggcaaaaaggaagccccaaaccgaagacttcaacgagcttcacagcaaagacaggaaacgtctcccaaaagacctgaaaaccggctaacactccatcctcaccccgcaaaacaagcaaccgtgaacgatggcccttcccacaagaacaagacaccccggaacacgag

SEQ ID NO: 191212 - DNA, 412 bp, Glycine max
  unsure (1)..(412): unsure at all n locations
agcttgtctaacctacttgatcaacgttgttcttattaganaacccttctttctcaaggctttttaagctcacccatcatctaggatgaaggagtcctctagaaacactttcttggcattttgtccatcgttaatgcctataatcataaccaccaaattcttcttgggtgccattaatcacagagatagaaacttttagatgaaaagatgagatctttgaaactttaatttctcatacacaagcaagagtataaagagagaatttttcaaaggagtgtcttgtatgtccacctttgccttttatatgttttgaaaaatagagagatatattctngaaaactgttttttcaatcgtgacacaaatggcacgtacatcttttaacggaaaatgaatgattttatgcctgaacac

SEQ ID NO: 191213 - DNA, 455 bp, Glycine max
  unsure (1)..(455): unsure at all n locations
tatgtcctggttacatacttacatagtattaatcacaacatacacgccaataaatacttggtaacaaggaattataccctgcaaacaaagctatctgaaatggaaccacctcccctaaacccaagtataagttaatagggttaattataaaatttgtccccttattttcttatttcactaaatggatcctttaagggaagactagaattgtcttttggagtaaaaggtatactcttttatcataaaattaaatcttatatattacattttaagagataatatattatattataaaaatataataaattaaaaaaattaaattttgaattaattttcttaaaacttacattaatactatattntgtaacatatatttagatgaacactttgatatagtgataaaagaatatattttctatctcanagatcatgattcattatagaataaagtgatg

SEQ ID NO: 191214 - DNA, 381 bp, Glycine max
  unsure (1)..(381): unsure at all n locations
agcttcgtccgtagatccctcttgtaagactaggcctatactaaacaacattattgtaacaacataattaaaaccaaaacttaatccgcaaatccctcttgtaagactaagtttcgatcctgcttcaatcaagttctaaggcaacaatacatttcccaatgctaaagtcacctaactatgcacacaaatggatgatcagaccaaaagcatacaaacattaaacattgaaggaagcattgaacatataaaacataatcaattagataataggtatttacatcatctgttcatttgaaatccctagctagggtgtttagccagccattatagaagaaaccctaacaataataagcttacaaaacctangtatctctgcaaaag

SEQ ID NO: 191215 - DNA, 410 bp, Glycine max
  unsure (1)..(410): unsure at all n locations
ntatcacttttcattcttgagctgatttactatcttgccatgtttgagatgcttggatgattntaatgacgaccttgattctttaactctttacgtgtttgatattacccattcttttcattccttaagattcattgagaaatatgtaattgttgttgtgtctgtttgtttctctttaatgtctctagatttgtcccttgctttgtttttttttattttttattttgcccaggagtgcaaaaggctaagtgtgaggggatttgatgtgtcatcattttctcctatttcttaaccctttntgtcaccactttaattactgattagccttaattgtcaaattaattatgcagttttaacatttgggcctattagattaattttgtgtttttaatttaatttcaggagaatta

SEQ ID NO: 191216 - DNA, 433 bp, Glycine max
gcttggaaatagtcaagatacacaactgcttatttctaatgctagaattgcatgatattgaaaatcaacatatacataaaatagtacatccttggtatatttaacctcaaggccatgatccaattcaccatttaaaactttaatcattgatacaaatataacacaagtgcattgtgaaattcccataacattgtgttttcataattgtttgcttaagggattcaattaaattacacgagaaattaaatttaagttaattgcttgaatgaattatgtaatcgaggagttagtgatgccgagtatgtgtattaatgagttctggcgtgtttgggcctacagggatgggcttttgatctatgatagacgtatgtgcgcttagtagaagccaaggtgcagagagagaacctagagagtcaccaaaaacctctcacaa

SEQ ID NO: 191217 - DNA, 513 bp, Glycine max
atcgaaaacattgaactgcccgccttcgtagatacgtacgctctgagtactcaagctctgaccaaaccacaacaggggttgtctacttatagacatttcttagcaccgtgctttgcagactgacgataattgcactaggtgcctactgaagtagggctatcacacacgcgtaagctcatatcacatacagtaagtctgtttacatgaagcgcttgcaccacgcccttctgaacaagagaagcttcgtcttgatcggcatagcccgaatcacatggtactctgaagttctaagcctaatacttgttgcaactcatgttttgaatagaacgcacacacagctccaaacaccaatatgttgtgacattaacagattgtgcttagcgctatgacgagtgcttaatgtgagcttttctatgcaaaatgcagacttgagatgacgatgattgctttgtggaagaccaaggacattattcttggtgcgctaggatggttatacgtactatactctatgag

SEQ ID NO: 191218 - DNA, 400 bp, Glycine max
  unsure (1)..(400): unsure at all n locations
agctttctagcttttcattggtgtattttgatctcctttatgtgctctaaattgtgggagtgtgctcaaatatatggggcaattttgatttgttttcttgcttgattaagttgaattgggggtttgtatgagatggccctaagcctataatgcattttgaagtaatgggacatgccacattgtccccgttctcttgctattaatgcctaaacgcgcgcccaccaagtgttcggtgaaatgcctcaatggcattagcgcgtgattnttgtagggaaacaacccatggggcaatttggcttgcacatatttttgggacatgcattcattttcgaaagagctagagtaattgccccgcatatgtcctatgcctaggaaccaaagtttttatgcaaaagtacac

SEQ ID NO: 191219 - DNA, 131 bp, Glycine max
attatattggagtgccacggaatgtgcgctaagagggttggcgagatttcaagtgcatcacatgagacacgggatgtgaccgcctctttttttatgagactgggccacacagtgcccaatacacatatttg

SEQ ID NO: 191220 - DNA, 354 bp, Glycine max
agcttttctttctcaatcaatctgtctattgactatacaattctaattgcaagttcacattcttgttctttctttgtctaacatacacacttgctcaaattcatgaaaaggaacacaaactccatcacaatcatgcattcaattcaaaataaagacatacacccattttttcacaaaaagataagagtgtttcactgccatgtcatcaaaaactaagtcaaactgttcaaaatgctttcagaataagcaaaccaactattcataaataaaactagcaaaaaggaattactgaactaaaaccatgactataataattataatataaatggcacacaaaatatcatcaggaattta

SEQ ID NO: 191221 - DNA, 444 bp, Glycine max
actcaagcttggagaggatgtcttaatggaggaaaagaaagagggagatatagagacaggggggagcacgaattgaaggaagaacaagggagagaagatgaactttgagttgtgtctcacaagactcccattcatcaaagttacaacaagtgttacacatgcttctatttatagactaggtagcttcctttagaagctttcttgagaaaacttccttaagaaacttcgttgagaaaacttccttgagaaactagagcttagctacacacacccctctaataactaagctcacctccttgagaagcttccttgagaagattcctaaagaagctagagcttatctacacacacctcctataatagctaagctcaccctcatgccacaatacatgaaaatataaaaaagtccctattacaaagactactcacaatgtcctgaaatac

SEQ ID NO: 191222 - DNA, 381 bp, Glycine max
gttaagcgcaacattgggacgcgtgatatcgacccatgcttagtccacttatcgctcttgcagaactgggcttcaatcctgctacaattaaggactaccgcagcttgcagtttaccaatgcttaagtcacctttcttagcacacaaatggatgaatataccattagcgtagaaactattaacatcgtatgtaggctagatcatttaactcctgatctactacaaaactggtgtccacatcaatagttcatatgaaaaccctaactaaggtgtgtaccccgccattatatatgataccctatcacatgtaccttactaagctcagatctttgcgaagatgatatttggtgactcgcaactctttacctaaaagccactgggt

SEQ ID NO: 191223 - DNA, 431 bp, Glycine max
  unsure (1)..(431): unsure at all n locations
cccagctcgcccaggcagtctgggtgcttcctcttaagcaacagccttctggaggaatcttctggagggcctaagtgggcctggttgctatttgcacccccatctttactaaatacaccccctgcttttttgtggtgcttcttttttcgtaaagttacggaaacttacgaatttcgtaacgatacttgttntctttccgtaatgttacggaaccttgcggatcacataaacatgccctgtttgacttacggaatgttaccgaaccttactaatcgtgcaacgatgcttccatatgatctgcggtgcgtcacggaaccttacagattgcgcatcaataatttcgttcgattacaggcatgtcccgtaacttcacaaaatgcctaatgatgggtgccaagcacctcacaaggaccaaacaaaagttgcatgcc

SEQ ID NO: 191224 - DNA, 392 bp, Glycine max
agcttgcgatggtaaacatgtgatgattgtaaatagtgtgatttttcatgtgaataatgaaatgtctaaagacaatcattatttgactggaataatcatcatataagttttccatgtcagcaatgaagtgtctaaagacaacctttgtttgactggacttattgcccatgtttgatcaatgtgttgagagtaccacttttagttagtatttttcaatccaaagattgagaattaatggttcggtaggcatcttgtttaggtcttgaaatgtaccatacagattatttgtgcattgtactgatattgttctcttctttaattgctgctgctggtactactattggttaaattactcatattatttaaatcccaaagttgcatgtataaaattt

SEQ ID NO: 191225 - DNA, 357 bp, Glycine max
agcttcagaccaaagcaactcaaaatctaggtatctaaaacccctcaatttaatggattttcaaggtttgagaagtgaaaatgagaatggggtaattttggagcaaactctcatctcaaacaaaactatgacattaatctaaactcgctcaaactggttttacgacgaaaactctaccgaatcaaaatttgactcctcaacacccaatttaccctagaaatggctcttgccttcactttggtcactcattttcctcctttgcacagcccaagctttcccacaatcctaaatgacatttcaaactaggattaactcactttaacctcctgtcgcaacgtgcccttcgcgggcgagcga

SEQ ID NO: 191226 - DNA, 333 bp, Glycine max
agcttgctaaattcctttattgaacggtttcatttcagattttgttgtccttctcattgcatgtatatagccaatactgctcactgtagtccttcataattgttggaatcatcccttttattgtggctctgaatagtataaataatttgtttcaattatttctaaagcaagtcagtctggataagttctacagttgtgataattttcttagaattctgatttcctcttttagcactcacatttattaaggacctaaccctgtactgatggcaaaaggacctctttccctccacaaatgtcctagtcaatttactagggagattctctactttt

SEQ ID NO: 191227 - DNA, 429 bp, Glycine max
ctctatattttaacaatcccatcctccctccagataatgagtttctggtggagagtagatggcacagccccgactccatggatccattcccttcctaatagcacgtcaaaattagccttggactgtatcaccaggaataaagttggtcgaactatactgcctacagcaacatctacttgaatggctcccacagaatagccagtgttaccctcataattcgaaagcacaatgttgtgggcagatagatcagtgtcatgtttcccgatcttgtagagcatacatcgaggcattaagttaacagacgctcctccatctatgagcacatttgtgattccaacattctcaactcttgccctgatgaaaagaggttcgagatgacttttcactcgaaaatctggcttatgaagaacgctaattgttcatccacac

SEQ ID NO: 191228 - DNA, 372 bp, Glycine max
gcttgcaacaaaattttatgcaggcggactttattctattatatttgacttacaacaggattctatagatgtttcaatacaacctatatgcagttgcgaataaaaaaatggaagaagtggaagaggacatctgggagacctttaagaacacttaggtgaacgtacctctggtggatgcaataataaagagtccaaaatacgccttattcttgaaagagctgtgcactcataagcggaagcttagaggaagtgagcgaattagtatggcctaaaatgtgtcaccattgaatgagtaatgagttgaccgaatactgtgataatgttaagatgcaggtgctgttaccataccttgcgttatagggaacaatatgt

SEQ ID NO: 191229 - DNA, 58 bp, Glycine max
agcttgagatgaggaagtgtataacggtgaaacttcctgtttttattcgtcgaccaca

SEQ ID NO: 191230 - DNA, 491 bp, Glycine max
  unsure (1)..(491): unsure at all n locations
gtgccccttgantcatgacttcagntactctgaccgccggcggcatgctcactggaccatacatcatgagatttcgtattcttttctatcgatgcagagtgagtatgctttgcctatcctgttcggtcgggacaatctattaatatctgtggtcatcacttattcatcctcaccatgaatcattgttcgtgtcgtttggtgctggtttcaattgatccatgagacaattcggtctacaacgttacacaaccctcgttgttctgatactgacgggcgctctcgatgaccacactcatgtatccattcattcgctgcctctatccaaatcttcagttaaagtaacgtcttaggccacttcgacaactanaatacttcattcgcttcatatntgatcatcactcagcctgggctatactcttacttctatacacgtgtgacgccctgatctttgtctcacttcatacctaaaaacattgttgctgctgaatacg

SEQ ID NO: 191231 - DNA, 290 bp, Glycine max
tgatattgcggttatcatgtacacatgtggtagtacaggtctgtcaaggtttgtttcttccttcagttttgttaaacgagtccctttctgtgtgtctgtgaatgtataaactattattcatatttgtgatatgatgcaaaaagcttttgaacagagtcatgcttgtgaataatgattgtgggtgatcatatatcaacatgaaccatatcaagacattgcacttaatataatgaatatgttcttgtctgccacattgagaaccattacgatctccctcatgtaattctatg

SEQ ID NO: 191232 - DNA, 394 bp, Glycine max
agcttctccctattttctataaattttggatatgtgaaggaaaaaatgttcagcccttctggtatttcgagatcacttaaaattagtgaaaaacaattgtttccatgaagaaaatccaagttgaggcgcttacgtaacgtttctgtaacgttttcgtgggtaattttgcgaagattttcaaccgttctttgacgttcttcgatcgttcttcgtcattcttcgatcttcaaccggtaagttcccgaaataaaacttttcaattcattctatgtacccttagtggacctcatttgttttcaggtgcttatattttcatttcatttactttccgtaccccctgttgacgtgctttagtcatttacttaagtcatttgctcgcctaatcaaaaaataa

SEQ ID NO: 191233 - DNA, 394 bp, Glycine max
tctagccaaatggacttaccttgaattaattcctttgatttctcctttgagccttgtttccctttccttgttttgaagctcactacaagccttaagtgaaaaaccatgatattaccatatccttaaggaattttggagctctggaattgttttgcgaataagtgtggggggtatttgtttcattggacaacttgtgatgcaatcctactccgcaagggcattggatagaaaaactccaagtagattgggccagagatgcaagagaaggccctagggttcttatgagccttagggtagaattcgggcccatgggctaagtacgagcccgcttatctttgtaaatattagattaaggtttcattatttttgggccttgtatatagggcttcataat

SEQ ID NO: 191234 - DNA, 409 bp, Glycine max
  unsure (1)..(409): unsure at all n locations
agcttgtagaatggctagacatgatacatgtcttgtcttggntcggctcaagggtaaaagggatgccccacattattttcatgacacaaatgcaaaaatgatgatttggaaattttatgcaaaactggtcatgcatgcacctatgcggacactcaagtgtcaaatttttatggtcatgtgatgctagggcttaagatttatttcctctattttaaatcaacccaatgtttccaaaatatgttcttttatcaatttgtgcattcattcgagtccatttcgggcgctcggggaaatttcacagcattcacccttcaggtgtagacancgtttttttctcttncaaaatcggtcatgatcaatagaattttttttcgaagaagagttggaaatcatctcttttcaaagcatg

SEQ ID NO: 191235 - DNA, 205 bp, Glycine max
tgaccacagaattggacctggagatatgtctcgggggtcaagagaccttggggacgtcaagtggggtgctattgcccaaaaccaagcttgaccaattccgacccaacccgggcataatccgtcaatgagaacatgtgacgtacctaaacaagcgagctcctggcagtcaacagataaaaggaaaacatgaccacagagcaaggag

SEQ ID NO: 191236 - DNA, 361 bp, Glycine max
gcctcaagggtggtgtgttagttccacttcatctatagatatggcttaaaatagtcaccttacaagccggttttgtgaggttgaattatgcctcaacctaaattttaagatggtatgaaaactaatcctagatccattgttgggccacctacatttgcattgctccaggccagtagccctgtgcatgagaaggagtgttcaaaagccgccttaattgtttttcttaatcagcaaatgttacttggtaattgttagttttttgttagtggggggagtcgaaagtcaccttaattgaggtcacccctcgcctgccttacttgcgacctctttaagagctgccttaattgcaaattattaacct

SEQ ID NO: 191237 - DNA, 410 bp, Glycine max
  unsure (1)..(410): unsure at all n locations
aactattgccagtcaatcttctgagctttgcagtttgtctattctacctttngggaggcgcgcttggagcatttgaaggtggaggggaactcggcggtgttgccatgggtcctgttaaaaaacaaaaatagaaatgaaacactatttaattacaacaacatgtaagtatgaaattctaaataaagacagttaattgtaaataaaccaaatataattttccaacatgtaaaatattatttaggtatataccgcagttacgtagctgtattctcccataaaccttcatcatgatcgttacgatttgcatgtatatcatcctcctcaatttcaacatttatggaaggcatctgtggggagaacgtcggaatttcgtaacatcaagagttgaagcatctatatcggaaaggata

SEQ ID NO: 191238 - DNA, 439 bp, Glycine max
  unsure (1)..(439): unsure at all n locations
cttattctatacttgatatacaggacatccttgccttatatattctgaggacaaaacattatacaataacagaataaacttccttatggatttatgtcacagcccaacagttattgtattgaaacaaattccttgtgtcaaattttaatgcttcttctacattcttgcattttttcttctcattttccttaaaaataactttggatggtgattgtaaaccaacaaatgccttattagatatgtacaatatgatgattntgttgcctacactcgtccctatctcttacgatgaaatcaacaattggttnttttgcttatatttattataaaggtgttaaaacttcaaaacattttgaagattgaccaatttaccgtggaatataattataagaattttaagatcctttctcttcggtgactactattacaacatatatgt

SEQ ID NO: 191239 - DNA, 460 bp, Glycine max
  unsure (1)..(460): unsure at all n locations
ctgattcgtgcctcgttgacacccntctnntnggaaaaanaccacgcatgcagcttatccctatttgatattatacggggttttctacaaataagaggttcaggtcgtttgcattattctctctctctcaatggctggtgaatataattaagtgaaaaaaatccctggccgtgcgctctcgtaacgttaccgtgagtaattaccctattattgtcgagcgatcttaaagattaatagttagttcttctatttcttaagactccaacgagtacgtaccataaaccaagctctataattcattctatgcacctgcagtgcggcacatctaggatcatgcataatattatccttccagtggaacactatttctctttgttagaaaataggccagatctaggatcttttttctcaaacatgtgaacatttatttgttcaatgactttgtttttgctatacattt

SEQ ID NO: 191240 - DNA, 214 bp, Glycine max
caaactgaatcacttctacttacccttgcttgatttcggtgggtatgacctcatcaaatgatttgcataccaaatttcgtgggggccttttctgatacatgcgacttcttggtcttggggtgctggtcccatattaggattggaaactcagactggcagaactaataaattgtgccattcttcatttatgggaccgtgataacggaactgggga

SEQ ID NO: 191241 - DNA, 339 bp, Glycine max
  unsure (1)..(339): unsure at all n locations
gcttgcttgaggagcttctatggaggctgtattanttaacttcaatgagggccttcaatggtgattttccaccatggagatgcaccggaagacatagaagaagaggtgagaggaggcgccatccactagggaataactcatggaagaaggagcgttcaccaccaagaatgtgccttggataaaaagcttgaggaggatgctttaatggaggaaaacaaagagagaagggatgagcacgaatattgcggaactaaaaagggagataagngaaattgcaagtgtgtctataacactttggttatcgaagttacaacaagcgttacacatgcttgtatttat

SEQ ID NO: 191242 - DNA, 225 bp, Glycine max
tgtatactctacatgcgagctgtccgcctgctagcttgggtatggagttgccaaagcccttctttatcattaatattagaacctgacctcttaaacaaacaagtcatacgtaccaagacaatgatatttgctgcttgaatacctcacccactcaatagtttcatacagttattgcttttctatagtgaaacactcttgctcttttaccactgaagttccccttga

SEQ ID NO: 191243 - DNA, 407 bp, Glycine max
tgcttcgtggccaaatctcgtatttgtttaatcctatttgtcttcatcccagatttagcaaatgcaatcactatatatatatatatatatgagagttgctaatgcacttacatttaatttaaaatttagtataaatgcattaacaactaacatcataaatttttgataaaaaaaccaataatctcttcacttataataagaatatatcggtaatttaatatcaatttttttaaaacaattaaaagagtcataatagtgctcataaggcacttctttcttctttttcctttctcctcacatggtaataatcatggttcataattcacactctaaaaatttaagtcttctccgagctaacccacttcatccatatgaaaaaatcttaaactcaaagtgaatagcaactg

SEQ ID NO: 191244 - DNA, 968 bp, Glycine max
  unsure (1)..(968): unsure at all n locations
agagttggatttaaataataactatacttctctgtcgtacgtgttatagtgaaatataacgaacgtagtgtatgtatgtgataagtctaaacagcataacaaggngaantttgagatcgatgtcattncggagaccctctannatcnacatgcaagcgtgcgacctttataagtgcagagtctggtgagaacaaggttttagtgggcagcgttaatacgaatattaagggtagctggtcaatgtgattatatactcaccttactcctcctagagttttcgctgttgaattgtaaaaataaaaggaatagaccttaaaatgaggctaattataataagaaaactttttaagtggtattaaattaattatcccttgggattagtatgattagattagaaattatgggcaaagccaagaatctttgagcctaaaccttaataaaaatggttaaaaataaagttagaatgaagaattggaaaacattgttatggagttggaggcttaatttaagggtatttttatggaagatagagaaagagacgttaattgggtggactggattaactttcataaaggggaaattcttttgtgaagagtcttataagtatgtatacagtggcaccagtgtgttgatgtttttaatatctgagtaaaaaaaaaacggcggttattttgtctgtttatgaaacagcaagtagagggggttgcctttggggagtggggcatcccaaaattataagaaagaggaaatagttagtgaatattatgataagtctatagctatatatantaatgtgacaaaacagagggtatgaatagtgtaaaaagaaaatatagaggggtgtccacttattttttctagtaaggagggggggtatcaataaaaagggatttgtatatacaactatgatgaatactctcgtggcaagggggtggatagttaaactctataatataaacactttgagg

SEQ ID NO: 191245 - DNA, 1034 bp, Glycine max
  unsure (1)..(1034): unsure at all n locations
cgccgcgcgcgnnnnnaatgaatagccgtaagtacnctngcnngacaccgtgagaaatacttncaaanctctctgaggccaatgttccaaaaccgtgacaatatacttttagtacctacaagaangngctcttattatgaagttccccgacaancntaatgacaagaactncggccgcacatatgtaacacaccataaagcatcccctgcctacatctcactaatgggcanataaactttgtgtataacaaacgtatcagacctgagtcctcgggcaaatactatatatgagacgtctcgggatagttgacaaaacactatatatttagcagccaatctttcaaaacacgacactttacagaactgcgggcgaaatgatccaacaaccatatcgacgttaaaattatgaattaaacactaccccnacccgataaataggaaattgctttggcgaggttgacgaacacacgtttcaatagtgaacagaccccagttattggtttctgccttgaaccataaaattctcatcgtccaaaagaaaaccacgcccccccaatatgacttccatgtcaccaccgcaatcttgagttcctttcaaagccttttatatatcacaaataacccgcaaatggggacaaacgccnccgaaccaaaaaagtaatccctgggcgctgcatattcacgtattgaatcgcgaaacatttctggtaaaatttttgagaaggggtgccccaaaaatggcgcctataactttgtaaagggaaggtgaaacttttactaaacgaggccactgtgttctaaagggagacgcaataatcgatntgggtcccttcgccatacgcccaaataatttaaaacggtggtgtttcttgggctctctgtcctaacacaaaaaaagacggtttctcttccacacaagtgcttgcntgatacaccaaatctcttttctctttagacttttgcggctcttcccgccatctccttaccctgttttctagcaaattcgactgcgaaaatagggcgtcccttcttcc

SEQ ID NO: 191246 - DNA, 516 bp, Glycine max
agcttgtcaatgcagccttatcttgagatacacccaatccccctccttaatctttgaaggtaggcgatgattattggcatactatgtcatgtgattttgggctctgtttagatgaaacttcaactgattaagtgcttcatctctttctataagatcctaagccactgcctcaactaggacttcccctagaatgaaccttgccaaagatggggatggtcgaccataacctatttcaaatggggtacacctggcagctccctggtaatatgtattataccactattctgcccacgggataaactcaacccaagatttggattgctttgcacacatctcaaatatctctccatggttatgtttagtaccttagtttggccatttgaccgagggtgataagcaatacttattttcaaagttggtccttgttttttgaataactcctgctaaatataactcaaagcatccttgtcccttcactattgaaaaaaggaattccaagctgccttattacttcct

SEQ ID NO: 191247 - DNA, 549 bp, Glycine max
tgcttgtggggcttctatggaggctggatctttgagcttcaatgaggtcctttaatggtgattttccaccatggagatgcaacggaagacaaaggagaagaggtgagaggaggcgccatccattaaggaataagccatggaagaaggagcttcaccaccaagatgagcattgaataagaagcttggagatgatgcttcaatggaggaaaagaaagagggagagaaagagagaggggggagcacgaaattgaaggaagaaaaagggagagaagttgaactttgagttgtgtctcacaagactctcattcatccaagttataacaagtgttacacatgcttctatttatagactaggtagcttccttgagaagctttcttaagaaaacttccttgagaagcttctttgagaaaacttccttgagaagctagagcttagctacacacacccatctaaaaactaagctcacctccttgagaagcttccttgagaagctagagcttagctacacacacccatctaaaaactaagctcacctcctttgacaaata

SEQ ID NO: 191248 - DNA, 578 bp, Glycine max
  unsure (1)..(578): unsure at all n locations
agcttcttcttgtttctctccccatttgaaaccaacatttttcttgagcacttcattgagaggtgctgccaatgtgctaaaatccttcacaaatcgtctataaaaacttgctaagccatgaaaactcctcacctcggtcacagacttaggtgtaggccattcttgaataaccctaaccttctcctcatccacttgcactccttttgaactcacaacaaaaccaagaaacacaacatggttagtacaaaagatgcatttttcaagattgacatacaattgttcttctctaagcacagtcaagacagattttaaatgatcaatatgcaaatcaagtgaagtgctatagataagaatatcatcaaagtacaccacaacgaactttcctatgaactctctcaagatatggttcattaatctcatgaaagtgctaagagcgttagttaggccaaaaagcataaccaaccattcttacaaaccatattttgttntaaaagccagttttcattcatcccctttctaatctaatttgatggatccctttttaaatcgattttaaagaatacatgccccatgcaatt

SEQ ID NO: 191249 - DNA, 678 bp, Glycine max
tcccaagtttttaagttcttcctcaaaactgtcctaagcaaagttcccaaagtcctattaacaacttccgtttgcccatcggtttgtgggtgacaagtggttgaaaataacaatttagtgcccaacttgctccacaaagtcctccaaaaatggcttaggaacttagagtccctatcactaacaatgctccttggcaaaccatggagtctcacaatctccttgaaaaacaaatcagccacatgggaagcatcatcaatttttttacatggaataaaatgagccattttagaaaacctatcaacaaccacaaaaatggaatctctaccattgcttgtttttggcagccccaaaacaaaatccatggataaatcaatccaaggatactccggaattggcaatggagtatacaatacatgaggctttaccttagactttgcctttttacatacaatgcaatgttcacaaaatttctgcacatcctttttcatatgaggccaataaaaatgttcttgtaatgtttctagagtcttttggaccccaaaatgccccatttaacctccttcatgtgcttcacaaacaagcaaatttctagtagaacattaggcacacacaattgttttcttgaaaagaaagcttcatgtctaaaaaacatttctgaaaaatttcacaattttaaaa

SEQ ID NO: 191250 - DNA, 490 bp, Glycine max
agcttgttgctattcctaattataatttgtttcatgtcggaatagataaagccgagaaggaatatcaaatgctagctagcttagcttctaatatacttatcattgtgtttatgctgtttttttttttttttatcattgtccaatgcaaatatcagatttcaattctcattattaaagctaccacctagttcacttgatatttattgaaaaggtaaataacttaataagaaacattgaccatataacagtaggcttcaccagcctcattcctcaatcaagcatgatagttcccattcaatgatattagagtgtaattatatattacctattcataagcatccgcatatgcaatgagatgtcaggattctcctcaccaccaataacccaattgacagctgcttcaacatcttttgaaggagatatgagaactctcaagagctctccaaatacattcggctgagatcccagaacttgtggatcaccaaataaa

SEQ ID NO: 191251 - DNA, 552 bp, Glycine max
atatgttatatttaatcattttaatatataatactatatatggagaaaaatacttattttaatacataaatattaaattaataacattaaatgcaaccttaatatttttgtttaaatctcgtttaaaattttaaatttaattacttaaaaaatatgtattaaaaatattttttttacatatatagttaaatataaattaaaatatttttttggttaccatgcaatttatataaaatattcacctgctttaactttaccgaaaccttaaagtttttattttttaaatccgcaaacaaattatatatattagaagtaagtatcagagataccttaagaacaaaatataagcccaacattcagcaactcggttaatcaatattaatatctgatcaaaagatataagattaatttgataaataaaaattaaaatttaagagtgaaaagagaaattgtgagtttaaatttctgtcattaatatttctaacaaaactaataaaataactcatttactgaaaaaagaacacctcatccgattaaatataaactaaccca

SEQ ID NO: 191252 - DNA, 308 bp, Glycine max
agcttgcatttggaattgcgaaagccccactccatcattaagattagtacctgacatctcaaacaaacaaatcaaacgtaacaagacaattatagttgctgtttgaatacctcacccactcaagtgtatcacacaattatggcttttctctaatgaaacactcttgccttttaccactctaattccccttgagttcttaggtaattcaaaagattatgggcacaacaaagaacaattcaccaatatgtgtaagggaaggcttgagagacaaggaaaagggttaccaagaaaaatgcttacaatgtttt

SEQ ID NO: 191253 - DNA, 461 bp, Glycine max
aaactttctacttttattcgttgaccacagagcggtacctggagatatgtctcgggggtcaagaaaccttggggacgtcaggtggggtactattgcccaaaaccaagcttgaccaatcccgacccaacccgggcgtagtcagtccgtgagaacctgtgacgtacctaaacaagtgagctcctggcagtcaaccgattaaagaacaaagaccacaaagcatggaggcttgtgtggtggctggccagctatggatcttgagtgatatctggaatatggcctttggtaatcgattaccaagggtgggtaatcgattacaaggcttaaaaatgaagacaggaagttaagatggcctctggtaatcgattaccaaggatgtgtaatcgattaccaggcctagaaatgggatcatgaacgcgagacagcttctggtgatccactaccactgctgtgtgatcgattac

SEQ ID NO: 191254 - DNA, 333 bp, Glycine max
agcttgaaaaacttgagatcacaccttattataagagtttgatatgcatcagaaacacactcatcacagttgaaaaacccagttctctcccccatgcactttcaattccattggaaaaataatctaaaatatttaacacgatggaaaaagaattcgggcacttcgacgtggattcagatgattcagatcaccactacttcacattgaacaaacatcaaacaaatattacataaacatgtggctaagtttgatgattatctgctagaatcaaataaactgattgattgaatctcaccatttggaattgaatccccacgaattcatccactatta

SEQ ID NO: 191255 - DNA, 464 bp, Glycine max
  unsure (1)..(464): unsure at all n locations
tgtactaactttaatcttataaaaaaaagtaagatttgtagcaacttaatcctatgtatctttggccagtagtcccagattaaaaccccctccttcataatggcaaatatttggtagacaactatagacttccccggccacccaaattgacgcaagttttgtccatcaattttatttacaccatcaaaactagactttaaagacagtggtagatatcaaaacatatgagttaaatatgattaacaaacctaccgataatagtttttgtttggcggctgaggaacaacgtcagaaagtgaaataccccacttgttggcttctgccttgaaccatgaaatctcatcctccagagaagccacgccccccaatatgacttccatgtcaccacggcaatctgattccttccaagcttttatcagcacactagccgcanatgggacaaacgcccgaacgaacaagtaatc

SEQ ID NO: 191256 - DNA, 491 bp, Glycine max
agcttgggaggattgatggggacccggtgttgagagaaacgaggatatgggctacgtgggagtacgtgagctcagttggaggtgggctacaggggatggtgggtttatgcgcgcattgtggatgtggaaaaacttgttgtgcaccatcgcccgaccgccacctagtaccacatgtgatgggtaccccataatcctacaagcttgagatgaggaagtgttgaagggtgaaacttcctgcttttattgttgaccacagagtggtacctggagatatgtcgcgggggtcaggagaccttggggacgtcaggtggggtgctattgcccaaaaccaagcttgaccaatcccgacccaacccgggcatagtcggtcagtgaaaacctgtgatgtacctaaacaggcgagctcctggcagtcaacagataaagggaaaacagaccacaaagcaaggaggcttgtggtggctggccacctgtgcattttgtgtatatgt

SEQ ID NO: 191257 - DNA, 596 bp, Glycine max
tgcaatgaaagatattgtgtatgtaagagtctggtgtcaatctagacacacaaaccaaggccataattcaaaataggtaagatagaaatgatgatagtcattggcacaaacattgacttctgcaactgctactaagcttgcaatcaaagatattgtatatatagtaattaactttccattcagcaacacaaatttgttttatttgtacgcttaaatttgttagattgcctattcaatttgaaatgtcaaatttctatcttacatcttttatttggacaatatgtaacaaaagatgcaacaaagaagtttactaaaccttatattagagatggacatcagttctttatatattgcttgtctggcgcaccacaaattattttttgatttcttttgtccaaagattagacttgttttatatagttctcgtttgctcaagttaaaatcggtattatacttgcgtaagccatcaatgaacttaaaaatgacaattgaaatacaacacatgaatttaggcaagcagtgatagctgaaaaaatggagtatgtgagaatgaatgcacttatatctagagggattttttactgatacagatgata

SEQ ID NO: 191258 - DNA, 545 bp, Glycine max
agcttcacaattgaactgagaaggtactaatattggacatgtggcaccccctttgaggtatgtgtctcaagtgattacagctagatataactaattcttccgtcaaaagcatggtataaaacacaaacattggtatgataatgaactataatcccattactccaacttgagtgtcgaagactatgcagtcaccccaacgcctctgtgtgatctcttcatcgttgtcatgctccaccaccgaaatcgtcattgcaatccagttctagattaggatcctttcctgaattggatttcttctgcctgaaccaagcaatattaatacgaaattatttagtcaacataaactttaatattttatattgttaattcaattttttcatttttcttgtacattaatcacttaatttttatttattttaggttctatctttaacttttaattaaaaaaaaatattatgaattattttatatttaccaccattattaaaaaatttattacttttaattattattcataaaatatgttgcgggtgatggcaaaacaa

SEQ ID NO: 191259 - DNA, 515 bp, Glycine max
tgagatgaggaagtgttgaagggtgaaacttcctgcttttattgttgaccacagagtggtacctggagatatgtcgcgggggtcaggagaccttggggacgtcaggtggggtgctattgcccaaaaccaagcttgaccaatcccgacccaacccgggcatagtcggtcagtgagaacctgtgatgtacctaagcaggcgagctcctggcagtcaacagataaaaggaaaaaacaagaccacaaagcaaggaggcttgtggtggctggccagctgtgaaacttgattgatatgtgagatatggtctctggtaatcgattaccaagggtgggtaatcgattacaaggcttaaaaatgaagacagggggctaagatggtctctggtaatcgattaccaggggatgtaatcgattaccaggcttgaaaacggagtcaggaagctaagggagcctctggtaatcgattaccagcctgtgtaatcgattacacagagggatgggtcacttgtaatcgatta

SEQ ID NO: 191260 - DNA, 567 bp, Glycine max
agcttgtatttaaaaatgttttaaaaatacttttaattaatatttgaatttttattcctttattaatatatatgtgaggggtagagggtgtcacacatcctataataaagcctccatagctaaagaaagttcaaactagacaagatacttcaaaaccaatgcatcatattactaagtggtaattaccaagtgtcatagcctaatttcgttcggggacaattcttgtcgacctgcggaccttggttggtcactttgagacgcttaacactcatcgtcgtgaaatccgtaaagtttcacgatgtttcagaaagaaattagtcaaaaacacaaaaatggggctgcacttatcaaactgtggggtgtaactagcataggatccatctggaccatctagaacactctggaggggggtgcactcatcaaattaaggggtatgctcaagaaacttcatcactaaacaacctgaaagggaatgcactcatcaatttgggggtgcactcatcaatttggggtgcactcaagaaactcatcactagccaccaggaatgggagtgtctaatcaatagg

SEQ ID NO: 191261 - DNA, 420 bp, Glycine max
tgcaagcaaactggatgcgttggtcaacttggtaacccagctggccttgaatcagaaatctttacctgtcgcaagggtttgtggtttgtgctcctctgctgaccaccatacagacctttgcccttccatgcagcaacctggagcaattgagcagcctgaagcttatgctgcaaatatctacaatagacctcctcaacctcagcagcaaaatcaaccacagcagagcaattatgacctttccagcaacagatacaaccctggatggaggaatcaccctaacctcagatggtccagccctcagcaactacaacaccagcctgctccttcctttcaaaatattgttggcgcaaccaaaccatacattcctccaccaatccaacaacataaccaccccataaacagccaacagttgaggcccct

SEQ ID NO: 191262 - DNA, 271 bp, Glycine max
agcttgttgaagtattccttcttattttcctgaatacacacaaagtccaccttgtattttaaattgagctttttaatagcatcccatttgatgcccctgcccaaacctgtacaattatatgacagaattattttcaatacctgtggaactgctctgtttaaaattgtatttttaagatgcaaatataatttatattgattattagaaagaccagtggtacttcagattacaaagagacatttcctcagataatagccatataggcacccaa

SEQ ID NO: 191263 - DNA, 247 bp, Glycine max
ttgtccatcaattttatttacaccatcaaaactagactttaaagacagtgggagatatcaaaacatatgagttaaatattattaacaaacctaccgataatagtttttgtttggcggctgatgaacaacgtcagaaagggaaataccccacttgttggcttctgccttgaacatgaaatctcatcctcaaagaagccagccccccaatatgacttcatgtaacaccggaatctgatttcctttcaag

SEQ ID NO: 191264 - DNA, 580 bp, Glycine max
ttgggttgcgctgactgatcgccttccaaaccggaaaccagtcgagacatctgctttaattaaaaagccaacgcgaaccaatagaggaggaacatggcccttacaaattgatcatgtttgtaacgcatcgatccaatgctgaaaatggatcggcctttgaacgctaatgtaagcatgatcgcccagccgctaaaggccacattgcctgcccctataaaaaatcctcggtgtcgggcgaatgaaagaatactgagttatttcctgaacattttggtcacatggtagacacatttaactggatcatgaaccctaactacttgctgttgtctcatcctttagcacttagtggtgaaactctcacttgagtcgaacagggggaaaaatgatccctttttgggtcctccataattgatactagaaaaccctcccccatgatgggggtgacagaaataaccacttttctcctacatgttaggggaaaagtcgcatttccgcgtgtaacctcccatttcgtactattgtttaaattgcggcataaccgcggttatactctcatagatcgaaaaactcaactcacgag

SEQ ID NO: 191265 - DNA, 1127 bp, Glycine max
  unsure (1)..(1127): unsure at all n locations
ccctgctacgcgcggncaccaanacacgtagtatgcgatcgacttactangcatctcgcccntgagngacatcctccttttcctccgcgngtctacacttctctctgacagtcatctcgtactctccantcccaacnttattactactaccccatanatcgccccctcgacancnncnnctttggaaaacccgctaggagcntttgngcataagcactcgcggacaantactgcagaaacaactnntagagacgttccgtactatagcatgggacanaatgctctcggccaacgggctgganaacacngcttaacatgggctgtctctctatttggttcctactccagcatgcagatcgtgtcacccctcggctaataatgataggtccggcagtggcgcggacaaccggaactacagccctcgagcggtactccatcataagcagtgcgtgtggactcagtgtgacaccacacgtagcaccggctctgcaaacacatatactccaccctcggctcccggcgacatcaccgcaagatccaccagactaagcctgtgtatgcaaactaaggccggcggaacaccctggcttttcaaccgattgaacgaaaaaatggacaacggcgccctgaaggcgtcgtggcgtgcttgcccccgtgaaactatattgacacgcgagatattgccctctgaaaacaattaccactggtggcgaatcgattaccaaggcctaaaaatcaacacacggggcctaaaacgaacctggagattcaacaccacagagatgcataaaaaaccaggcttgaaaaacgaaacaagaaaccaagggagcctctgggaatccattaccaccctgggtaatttaataacaaaaacaaagggaacccctcaccaaataaccaccttgtggtatccaaacactgccgcggcaccccacatcgaactcctaggcgaacaccaacacgaaaaaccctgaaaccattgcaaaggcggaccacaatacgcctccactcaaccccatatatctccaatatcctcctcctagcctcctaaacccaactgacactcattttataactctcgccgaggctacaaccgcacactttcaaaaggaaatccaccccccccg

SEQ ID NO: 191266 - DNA, 263 bp, Glycine max
ctgcaagcaagtttacccaatgttgaatttttttacaataaagtagaccataggaccactaagtgttctacattgaactttgtaaaaggagttaacccaataactccgcttgaacctttgcctatgcctaacgaatttgtttttaaacataaggaacggcaatcgatagaggactatatgaaaaaggttcataagagattcatagataaaattgagaggaaaagtaaaagctaagctaaacaagacatcaaatggagaaagaa

SEQ ID NO: 191267 - DNA, 1013 bp, Glycine max
  unsure (1)..(1013): unsure at all n locations
gaagaacgaagataagngtgaaatagagagaaagaataatanntgtannncggggaaaacatacgaaggagtnataggttntaatacaaatacnnctncnnncnnncnaanancaacaaggggtnnnaatgatggntgatggnacnntgcnnaannnnggnggaanagaanaaaaaannagagggnnaaggaaaaanaanangaaaaagaaagagggaaaatttgttgatttattttagggganaanagagaagaggaaaagtgtgattataatatagaaatatttnttatatgtaaaaaatttgggatggtagagaaaaaaaaaaagggttttaaaagtaaaaataggaaaaataaaaattaaaagggaaattgagaggggtgtaaaaataaaagaaaagactaaataatggggtttaaaagaatagactgaataaaagggaaataaaaaaaaagatctgaaatttaaaaaaaaaagatggtgtaaaaaagaaagaatagtggaaatggaaaaaaaggaataatagaatattaaaaataaaataaaaggaaaaaaggggggggagtagaagggaaaaaaagaatagtgtatgaaaaaaattgggaaaaaaggaagaagggaagaaaaaaganaaatgtaggggaaaaaagaaaaaaatatattaaaagatatgaaagagatggaaaggtaatagaaaaaagtatgggaaataagaggatggagggagaaagaagaagggtgaaaaattaaaagaaaaatggggtagaaaaggggaaagaggaaaaaaaggagaaaaggggtaatttaaggataaaagaaaaaaaggaaagaattgaaaagaaaaaggaattattgaaagagggatgtaaatttaaaaaaagtagaaaaaggaaaaaaaagaggcgaggaaggaaaagaagaaaagaatagaatgtaaggaaatggtaaaaaaagtaagaagaaaagaaagaaaaggaggaaaaaggttaagagaaaaaagaagaaaagggan

SEQ ID NO: 191268 - DNA, 375 bp, Glycine max
gagcttctcccccattttcctataaatagagggagaagtgaagggaaaaaattttcagccctcctggtaattcgagaatcacttgaaattagtgaaaaaaattggttccctgaagaaaatccaagtcgaggcgcttacgtaacgtttccgtgggtgatttcacgaacattgtcaaccgttctttgacgttttttggtcattcttcatcgttcttcggtcttgaaccggtaagtttccgaaatcgaacttttcaattcattctatgttcccttagtggtcctcattagagcttttattttcatttcatttactttccgtacccccttttgacgtgctttagtcatttactttaggtattttctcgcctaatcaaaa

SEQ ID NO: 191269 - DNA, 541 bp, Glycine max
atatcattctctctaaatggatgctattaattacactcttggttggtaattgggataaactgtcactttaattgctcaacttttaataaatgttaaatttacttgcttcaatttataattttataaaagttttaatttgatctataatatttaaaaaaaaatattatttatttaaatcattgatgtcacctaaaatataataaaacaataaagtaaataatattttttttattaaactacgggttaaaataaaaaagagggcgttacttgagacatccaacaattttgttggggcaccagcaacattggtgaaagggctaaaatgtccttcattattttgttataaaaggttaaagtgacttgtccatacgagtcattattcatttttctctcgcaccgctttcttcttcttttaccttggttcttcgtcttcctctcttttccggcactcctttgtcatcttcgtcttttctccagtgctgcttgatcttcctctttcctccatatcttctcttgtgctactgcattgttcgggtaattg

SEQ ID NO: 191270 - DNA, 591 bp, Glycine max
agcttctcctatttttatctaatcttccgttgattttatgaaattatacagtaatatatttttcatattggtgttttcaggattcctagtgaggatgcagagtctcaactcttaaaaggcagaaaaaaatgcagtggaagcttttgagacagcccaggctatgggtgttattatgtttgacttgccaaattgccctaagaaacattgtcaactagagacatcctctgtcattgaaaaccttcagtttgggaatacacttgttttattaccctttaatatagagcaacctcttaatgcaaggtttttggtggaaaagggattatccattgaagtgaaaagaaatgaagatggatcattcactagaaatgacattgccgcatcccttagacaagccatggtattggaggaaggaaagaagatcagaaattattcaagaaaagctgctgcaattgtaagacacttgaagctgcacccggaacactaccgtattgcatttgtacaagttcttaaaaatgggatgtggaaacccattttgaagtgaagaagatgattaccggttcttaatttacggttatcattagtttgttgaat

SEQ ID NO: 191271 - DNA, 584 bp, Glycine max
  unsure (1)..(584): unsure at all n locations
tctcatggctatgagaggctaaacccccattgttgggagcttggcatgccaactcttggtattcgtttagcctatttcatacatttctgatcttaatgcaatttattatttttatctttgcaaagaaatttgggagaaaagaataaataaattaggctcttcatgcgggaaatcaaatataaagtgtcttagtagatgtgggtggaaacaaagatttcattagatagaaaaaaaatcattaacattgcatcacaagtagttttggcatgctaggctccaacataatcacattctgaattcatctttcggcatttaaattattgctcatttttcttgttatttcttccttttccttttatccccaattttcacacttacaattccttatctcttctacttcttctaattgcttaataattgtgtttgcatcactttaagtacaatcaaagtctctgtggaatcgactctcgaacttncgagtcttttactatttaaaacgaattggtacacttgccanagagttaatatatgtgtgatcaatcccttccggnggcatcctttatgtattctattttgaatacata

SEQ ID NO: 191272 - DNA, 270 bp, Glycine max
agcttcgcattatatgattatagtgttcgggggaggaatgaatagcggctgaatctactaggacaccgggatattggtctaactcatcgtgcccttgttgggctattataattggcaggacatgataaaatggctattgattccggcttcactgaatcactgaatttttaatccttgacctccatgcatatttaagtttgggggatcaaatccaaagcgagcctaaattagacccaggcttaaaatatattgataggggggcaaatggat

SEQ ID NO: 191273 - DNA, 553 bp, Glycine max
  unsure (1)..(553): unsure at all n locations
tcaagtccatgcttgtctgatttttcccttacatttgctataaagcaaccaccttcaaattcatgagacagtttggcaaagaaagcagtagcaagggcagtcttgcctatgccacctatgcccaatattccaagggttctaacttcatttgacccaatttttagtgatgattcaatctgttcataattgtcctcaattccaaccagtccttccagtttgtttgggtatcttggagtcagtttttgcaaaacatccccaacaatgttcttaaggaattcagattcaatcgtaccatatgaaaaggggaaaaaatgaaataaatgatgtattgtaagtctaacaaattcaaaagaaaaagaaaatagaagtacacaaatgattgattatacataatctagaaacaatatggtattgtagtagataaaacaaagggaaaaaaggactangaaaggaaaatccaatgtcttagagcaaataatctatgtctctttttctactcaacgaaatgcattgcanactacatgaaagttgtatactacaaaaaaaaaaaaaa

SEQ ID NO: 191274 - DNA, 435 bp, Glycine max
agcttggggttataatattttagtggtcttcatgaccatatgaacataacttcacaaataattttcatattatgaatgccttgaatcagttcagctattatttatcacagaataataaaagagtacagttggctctttggtttaatttattaggaagtgttctttgtacaactttctcagtctaacaaggtaaaccatgtgcgatgtgtcaaagggttcaaacccacaatataccgtgtagtttacctatatggaagagaatatctgtattctgtctgacatatttcgttggatttggatgtatattggagttattttcttattgggcaggaatattgatcatgttcttaaccaatgcagcttttccttttacccagggactcttagccctataaaattattgttctaactcttgggcgcacattcagatattga

SEQ ID NO: 191275 - DNA, 520 bp, Glycine max
cttgcttcagggtgacttaaaatatatctaaatatccaaaatatctattcatatgaatatgtgaatattgtaaatattctatcttcatccctctatatctgaaaccccataatttcaacacgaagtgatatacatgtgttgcaccttaatttggttgtttcctttggtgtcggctgaagataacactgtaatgtcttgtctatgttttatttcacccaaagcacatggttggttttcttttgttactcaatcaacttatctgcaaattcaatactttggtgcgtgacattttggaggaaatatttccatctatcgccgagcggatattcactgttattcctagaaatggattaccttcttctggttctgatgcaatcactgaggtatgaaaatgttgatgcagttacctaataaatagctgggttttttttggtccttttcttttaatttacttgctttaagttacgtttgtatatatttgctatatgaatgctctttatgacttgattattgttcatta

SEQ ID NO: 191276 - DNA, 272 bp, Glycine max
agcttgtttaccccatgttgaatgtgcttacagtaaggatgttcatagcacccctaatggttctcctttagaaactggatatgggtgaaacccactgactccttgtgaacttttgcctatgccgaacgtttgtgtttttaaccatggagaaggtccaacaaaggcggactttgtgaagaagctttatgagaagagttaatatcaaattgggaggaaaaataaaagctatgctaaacaagcctaccaagggagaaagaaggttgtcttcgaac

SEQ ID NO: 191277 - DNA, 565 bp, Glycine max
  unsure (1)..(565): unsure at all n locations
taggttaaattagtctaaacttacgagggatcgatgtttagtattttaggctacaacatagaacacaaaagcatgattgattagagaaatatcttcatatgcatcagcttgtttgttagaaagacccaatgctttttacctattattgtcaattttacttatttgcatttactgtttttaccatacaagtagtttatttttgtttttaaccatcgtttatcaatgttattccaacaatgcctgatttctaaataaaactctgtctaataagcaagttccctgagttcgatactcggatcactccattttaattttaaatacttgacaacccggtgcgctttccggcaaatcagatttcccttgaacatatttgcataaaggaaaatggaccaaaaagtaactgcaggggaaatccaacacctttctcaatacatttgaagcacttgatgttactagttatatcttgtgaactagcctttggagggatttcctctatgtttntacccttatcatcctttggcttcgaaggtggtactcctaacacacttggagcttgtcctttttt

SEQ ID NO: 191278 - DNA, 330 bp, Glycine max
agcttgttgacatgttgagatttacgtcatcttccgcgctcacaagatctgtcatactgacttttgaataatcgccgacagatcgaaagatacccgagtggttatccgaataaactttttgttgacgatcagacgaaacgcctgctagcacgcatagactaacatcgtcttctgcgcccttacgcaattggggccgacaagcccgttgacacgtggagattcacgttatcttccgcgctcacaagatctgtcatactgacttttgagtaacgctgacgggcggaaatacccgagtggttatccgtattaactgtttgctgtttggaagac

SEQ ID NO: 191279 - DNA, 320 bp, Glycine max
tttcgtcttacagaatgcaaaaagtttatacggataaccactccggtgttttcgcccgtcagcgtgactgataagtcagtatgacagatcttgtgagcgcggaagataacgtaaatctccacgtgtcaacaggcttgtctgccgcgattgacgaagggcgcagaagacgacgttagtctctgcgtgctatcaggcttttcgtcatacagacagcaaaaagtttatacggataaccactcgggtatttacgcccgtcagcgtgactcaaaagtcagtatgacagatcttgtgagcgcggaacatgacgtaaatgtccacat

SEQ ID NO: 191280 - DNA, 388 bp, Glycine max
agcttgttacttctattgcttgctttaattgtcctttagtgtatcacggtgtgacttctcttgttaatcttatatgcttgcctttgtctggtttggatgtcatacttggtatgaattggttgtcttcaaattgtgttgtcataaattgttcagataaaactatttccattgctaaacaaccaatatcaatttattcttctatctccaattccattgtttctattgttgcctgccttaagtctttagttgagggggctcaaggatacatccttttgttctctactaaagtagaggttgaaagaacgtgttagctatacctgtagtgtgtgaattctaagatttttttcttggggaagtctctattttgcctccaaacagggaagttgag

SEQ ID NO: 191281 - DNA, 591 bp, Glycine max
  unsure (1)..(591): unsure at all n locations
ttgatcttncaccaccgccgccttcatcatcttaaaattacattttaatattattactactttgattttcaaccttgtattttggctatattactatggtatttgaacaatttagtatttccttattttcatggtttggttgaacaagtatgttatttgactatgtggattttataagttaatctatttatgattgctacttcatgggttttttttcttcatgttgaggttactattttttatgaatgttgtacgaatgtttaagatatatgtgcatactttaagtttgatacgcactttggctttttgttgatgccaaagggggagagaaatagggatgaatcaagaactcacatgagtaaataatttaattttaaaataagcataaattcaaaaacaaagggggagcatttataagagtgatcgactaggaaaaagtgtgtgtgtgtttcttgatttcagaagttgtcatcatcaaaaaggtggagattgtggaagcaaagcttcatgatgaatcanaaatgattcaaaggggtttgatgatacaatgatgacaacaaaaatgatgacaaggcgatgaacaaaagctca

SEQ ID NO: 191282 - DNA, 488 bp, Glycine max
agcttgacaattgattatcagaaaaggtaatcgattagttcgtttcagtctgagtatcttttgtttcttctgttctgtttggataatcgattattatgtgtggtaatcgattatagaatcacacaaagaatttttctttgtttctaggtgttgggtaatcaattatcaaatgagacaattgattatcctaagttacagatccttccttcttctgaaactggcttgggctctcgattaccaaagtaagtaatcgattaattcgatgcctctatccaaatctcaagtaaaagtaagttcttaggaaacttcgagaactagaatacttcattcgcttcatatttgatcaacactaagcatggaatagacttatactatatcacacatgtaacaccctgatatatatatctatatattattaggaattatgtttgaatgttgataatttgttgcgttattttcatccgtaattatttttaagaagttaattt

SEQ ID NO: 191283 - DNA, 496 bp, Glycine max
tgccttccaagaatgatattgcggttatcatgtacacaagtggtagtacaggtctgccaaaggtttgtttcttcgtcaagttttgttaaaggtgtccctttctgtgtgtctgtgaatgtataatctcttattcatatttgtgatttgatgcaaagtgcttttgtccagagtcatgcttgtgaataatgattttgggtgataaaatatcaacaagaaccatatcaagacattgtattaatataatgaaaattttcttgtctgcaacattgagaaccaataggatctccctcagctcagttctatgattccctttgatttgacagggtgttatgattactcatggaaacattgtagcaacaacagcagcagttatgacaattattccaaatcttggtagcaaggatgtgtacatggcctacttgccccttgctcatgtttttgaaatggcagcacaggtaatttcttcttagccttctaactgtcaaagtagttgatg

SEQ ID NO: 191284 - DNA, 529 bp, Glycine max
gacgctcgggccgctgaccgcatgttatgtgtgacaagctttgagggaatatcgaccctaaaccggggattatagattaaacccgcggcctccttagcgtttaacggcgccccatgggtggatttggtttatcatttaaatcacaccctgttggaaccaaagggctcaaaataatttaagaaggggggggtattaaatacttgacacaactgtatcgagaaaaaaaaaatctctttggagcgcttacctctgcgggtgaagaagaaatggggttcatgagacaatccgagacaattaattcgggccatttttgcctccttggatactaacgagctagggactagggaacatacccccccaaaggatttgttcttctttgggaaccaacccgggctatcctaccaatgtcaaggcgaatcagcgagtctttgaaatccttcatactgctagagatgggctcctctattgtgaggacctcacaaggaagaccactacccctcgcttctatttaccactgacggaggttccc

SEQ ID NO: 191285 - DNA, 362 bp, Glycine max
agctaaatggattatgggacactcgttatatgtcgcactaagaggtgaatatgcgatggcatcactttacctctctcaattccataggtaagggacggagataccatactcttttcccacattttactagagactccgcactcctaagtaaccattaatcacactcctctcacacacggttcccatctaccactgcaaggctgcgatgaatgcaaaacttttattacatagataaagacactaccctgatactttaggagatagtcgaggcgtaaaactctgcccaagactgaatctaaaaccacagctttgcttactcatatacccgagcctcatgatcggtgtacccaaaagaaaccact

SEQ ID NO: 191286 - DNA, 486 bp, Glycine max
ctaattaacctaaaattgagagaaaatgattttttaacacacaaaccggaagtactaaatatttattaccaaataaattggaataatctcatacaatttacacaagttttatacataaaaggtagtgattttcaccgactaacagaggcctctacaatcacctttcctccttctctattatactgccattgatcttcaagaagcaaatgactctattgatgaacaacatccaaagtctacaagctccacatgaagctacatcatgtgggatcaagaacagcttcatctacgagaagctcttttgcttcctctatcttttgcttgggcaattcaatttaataacgtattcttaacaatttctccatgtatctgcttcattgccttgcggtttggttctgctgaaagtttattccaataaacacaccgatttaatcctacatctacacttgttattggatttctatgggtcaaatttatccatatact

SEQ ID NO: 191287 - DNA, 430 bp, Glycine max
ataatttctggactacatcctgttattatcactcatctcagctattcaaccagcggttataggccccatccatttgtttattaaatttacgccctgcctggccattctttctattctggagtaacttatctacaaatttagaatcaaggctctcctactgaaaatttgatcacctaaacttgtacagatatcattccctttcttttttcacgactttattttcctatggacaaacagtgtctataagctgctaccttccccctgttctcttactatgtcgaacacccccatgttctttcttaattaacaatgattattcctttcgccttttaaaatctccattatacccatatgcctctttattataaatttcactttaatcttgtttcactaacgttttttcctttctatccttcacatcctattcacc

SEQ ID NO: 191288 - DNA, 333 bp, Glycine max
agcttcacaaaatcaagagccgctgctatagtatgttttccgacaacttcattggtccatattccttttcatccttttcaacacaagattttcttggtaaggttggagatttggtcactattctttaagaatcttcgaaagactcaagactcatgatttacgaattatgacacaagtcttcgagattgtttctttctcctattgtcttgatgtgatgattgttgaactctttctagagagttagacctcttaaaatgatatttttggtgatagttgggtgcttataaccgcccaagattgaatcttcgatagctgtttggtgactagaataaa

SEQ ID NO: 191289 - DNA, 627 bp, Glycine max
  unsure (1)..(627): unsure at all n locations
agtgacctataaaacccagcttccgttaacaaattattgaactggagaacgataaatcaaattccataagtgaagaagacaagggaatgtaacttacatagcttattaaagctactgaggcattcagaaaaaaagaaagaaaaaaagctactaggagccatatagtcgctcctcgcaacttaaatcacgcaggggtagattaaacaaggccaaagcacaaaaggaagaaaataaatcataacataccaaaaactaattatggtattaaatgaatatgttttcatttcatatatgttttgactataagttggcccaattcactatatttttccaaatccagaaattcacaagaattataaaaccaatatatatatatatatatatatatatatatatatttctcgtttcaaccaaccaacaaaactataatgcaataggaatttctacttaaaactcaatatatcaaggattaattaaacaaacataaactgacaatctcaacaaattaataagcatgtngccaggaacataaatgaaaccctatagaaatgagggacccggaaaaagaaagagaatcttttgaggagcacatgcaagctactntaaactttacatctagggttatac

SEQ ID NO: 191290 - DNA, 538 bp, Glycine max
agcttgcatttggaattgctaaagccccactccatcattaggattagtacctgacatcttaaacaaacaaatcaaacgtaacaagacaattatagttgctgtttgaatacctcacccactcaagtgtatcacacaattatggcttttctctaatgaaacactcttgccttttaccactctaattccccttgagttcttaggcaattcaagagattatggccacaacagagaacaattcaccaatatgtgtaacgtaaggctagagagacaaggaaaaggttaaccaagacaaaggctaacaatgtttttaggcacaaatgaaggaaataaaattcagaatttaggaattcaagttacaatccttcatgcaaccactttttaccttaagagaattttttttttaaaagtttttcagcctgacccattcaccccatttttttttttttttaaactttggctattcccaaaatttgcttctttttttttatttaaaaaaaaaaaaagggttatttttttgcaatgggtttcccccaaaaaa

SEQ ID NO: 191291 - DNA, 437 bp, Glycine max
tctacttatgtggcagggcgggcttccttcactttcttgtcttccacgcgagctctgaccactgctctttcttcccgcgatgcttcttttcatgtacgcctgagtgggcttatagcctaaaccatacttcccacgatttccttgggcatttatcaggctagttatgccgccgctgtctttgcctaaacccattccgggttcataaccgttccccaacataactcgggccatcattactgctgcatcagacagacaaggctgcccacagaaggagtccacggaggaaatgctgaccacctccaaagactggaaagtggtttctaacgattcttttgcggcttccacataaagcatagaggatgggcagcttaccaagatgtcttcctcgcctgacacgatgaccaagtgcccctccactacgaatttcaacttttggt

SEQ ID NO: 191292 - DNA, 456 bp, Glycine max
agcttcataaatcatgggctttgcttcgctaggtattggtgtcaatttcaactggaccataaccccattttatcagctgcaagtttacaacctagcaggaataaaacatgaaatttattttcatttttttttctctctttagttattcttcatttgttaacttcaaaatataggacgaatttcacaattactgaaatgccaaagtgaagggttgattgcataaattgtgacagtacaagagacagaagcaacatttgcatgtctcaattattgaacgactaactagtgcttggttatacaagaaattcactggacatagctttgtgttgtcggatgaacaataagataaatctttgtgttatgtttctttttcctttctcttattttatttaagtaactcaaagtgaaaatttcttacaaaggaataaaaaaaccaataacgaaaattagacgctt

SEQ ID NO: 191293 - DNA, 615 bp, Glycine max
gaaagatagaacagccaaaaagactgacaaactgacatgaataatgtactattgttgtaagcttttcaaggaatcaccgcatcctgatgaaaagcagaggcaacaactcagcaaccaacttggccttgctccaaagcaagttaagttttggttccaaaatcgtcgaacccaaatcaaggtatctaaatttatttacctaaatattactcaagaatatatgcaaacttaatttatttaattagaaattatgtaagcattatgcaatattattgccttttgcaggcaatacaagagcgccatgaaaattcattgttgaagacagaattagacagacttagggaggaaaataaggccatgagagagaccataaacaaatcttgttgccccaattgtggcatggtaacggctaccatagatgcttccatgtccactgaagaaaaacaacttcttattgaaaatgccaaactcaaagccgaggtaataaatttgtataaaactaaatctaaatacaaggaacatgaaactttaaaaaaagaaaatgtattaatgctagaataatggtggatctatgtgtcaaagtacaaactacaatcttaatgaaaagattccctaata

SEQ ID NO: 191294 - DNA, 639 bp, Glycine max
agcttcattagatgttgcatttcagtatcacttcctctatatggaagaacaatatgcacttcttgcattgtaaatttgttagattgtggtgcaactgttggcattgtgctccttcaatgttagcaggatgtttcttggtttcaccatcgactttgtcatatcagcaataatattcttctcatccttagtcaatcgcccaacatatgaatgtctaactaaggacttgaccaattcatgattgtgaatcccacagatcaacttcaccatccaaccttcccatccatgcattggtttcccatgaagcttgaagggacaaccacatttcctactcccaatgtctcttctaacaaattctttcttcctacacttatactgaccgctcctttcacaaccaattaacacaaatgaagttcttcctccactaccaatatgtgtgtcagacctcataatgattgcaacaaatccattttcatgggcaaccgatcgaactcccacaaaacattttcttgggtacccaagacctacaatgcaacccccacatattaatttttattacaaacatacattcaacccaatgactcaacctatatgaacatcattacctaagaagtattaaaagcatccgaaccaatcaacatg

SEQ ID NO: 191295 - DNA, 684 bp, Glycine max
  unsure (1)..(684): unsure at all n locations
tatatcgttgctagcaagcagtatatcatcgacatataacaccaagaatgagtatttactcccactaaacttgtggtatacacaatcatcaactgcatttgcctcaaaaccatatgaggtaatgacttgatggaacttgtaataccattgacgggaaccttgcttcaaaccatagatggacttatttagtttgcaaaccatagactttgagtcacctgatacaaagttttctggttgcatcatataaattgtttcttcaatgtcaccatttagaaacatagtcttaacatccatttgatgtagctctaaatcataatgagctaccagtgtcattattgttctaaaagaatcctttgaagatattggagaaaaggtttctttatagtcaatgccttccttttgggtaaatccttaggcgagccttatatctctcaacattgccctttgaatcccttttgattntaaatatccatttgtaaccaataggtttcacacttttaggcaattcgacgagatcccaaacgtcattgtcttgtatagatttcatctcatctttcatggcattgatccaattttgagagttagaactacgcatgacttgtgataactgctaaataattgtgaataaatgtagaaaattagccaaatttttgctttaaaatattatttagcagttatttgtga

SEQ ID NO: 191296 - DNA, 506 bp, Glycine max
agcttgagcttggctcattacttgtcataggttttttttaatgctcggctcggcttatataaaagtctggtttggcccacgagcctatttaaaagcttgcttaaagacgtatttgattaattaattattttaaaacctagtgaaatactaactaaaaaaagaaacttataaaatataaaatttcgtataaataatgtacaaatccaaaaataattgataaacaaaatcatattgaattcaagtcgttaaagcacacagtatatcaaaagaaaataaaaagagcctaatattaaaaaatgtatggattacagatgattggtagaaaatgaattttattctacgtgaacagtgtgcatgaacagtaattaaaactgaaattctaaaatcctaaaattattctcctctccgaaaaaaaactccttacctaaaacttgggggctggtatataagtccacggtcctcaaacttacaaatttatttaagttccaccccttaacgaaatttaa

SEQ ID NO: 191297 - DNA, 338 bp, Glycine max
gattgatggggaccccagttgatagaacgagattaggctacttgggagtacctgagctcagttgaaagtgggctactggggaatgtggatttatgtgtgattcgtggatgtggatagtccacttgcaccattgctcgatcgcgagctattaccacatgtgaccggtacccgataatcctacaagcttgaagtgaggaagtggggaatggagagacttcctacttttattcgttgaccacaaagaggtacctggagatatgatccgggggtcaggagaccttggggacgtcaggtgtggagacttagatcataaccatacttgacccctgctcacccca

SEQ ID NO: 191298 - DNA, 369 bp, Glycine max
agcttgagattgttttgctttaggaaataatgaaagcatgattgccaaaatcgtgagatctacgttggctcatgagagttttcgtatactcgaatagtagatttgtaaaagtttactttgtataaaacaattatggattaactataaatatcatattaatttaacattctattaatattttaaagcacataagtagtaagttcatacaatttcgaaacataagctcttcttcaacaaaagggcgtacagttaggatacacaaatagagaagatgaacctgattggcagcgattgtttacgaatggaatgcaggatagagaacaagtgctgctgagtgaggatactaatactctgtggaattttcaagat

SEQ ID NO: 191299 - DNA, 242 bp, Glycine max
ccttcccgcgaagcttcttttcatgtccgcctgagtgggcctataacctaaaccatacttcccacgaattcgttgggcaattatcaggctacaaatgccgccgccgtctttgcctaaacccattccgggttcataaccgctccccaacataactcgggccatcattaatgctgcatcggacagacaaggctgcccacacaaggagtccacggaggaaaggctgaccacctcaaaagactgga

SEQ ID NO: 191300 - DNA, 231 bp, Glycine max
gcagcctgcaagcttgcatgtgcgagggccacactcctcatagttggatgccccggcgccgttaactatatatatatatatctatacatgaccatctttatagctggtcgactgcctcgcccaccctagtgtattgcacaattatagctttaaccgagtgaagaactggcgcctcagaccattttaataaccctagagtgactgaagaaatcaagagagatggtcataaca

SEQ ID NO: 191301 - DNA, 958 bp, Glycine max
  unsure (1)..(958): unsure at all n locations
cgccccgcaccgctgttatgttacgcccccgtccagataccgaccaaacactttcgccctctctncaccccccccccgcgnnttgaatcttggcntggagacccttagaaacccaagcctctacctatgtcgcccggcggactgccaccactaaaatgactttcactccagcccttagcacaggtcttcgctccgacaagctgatttccatgtccacccgcacgggcttataacctacaccatacctcccacgaattcgacgggcaactatcaggctaaacatacccgcgccgtatttgccgacacccataccggggtcatagaccgctccccaacaaaactagggccataatcactgctgcatcggaaacacaaagctgcccacgacaacgaagtgcccgcgagcgaaaagcctgtcccaccctccacaaggactgcggatcagtgtgtctcctaacacaaatcatcagccggcattccaaagtgaggcattagaggatggggcccggtcccaagaagagctgctgccccacaagaagaccaagcgcccctcccctacgaattccacacttctggagaagtgaacaaagggccaaaattcccattgacgcagaagtcaccgccgcccccaacaaacgccggtaagggggcgggccccatctcaaagcgtcgaaaagcgactccgacagcgagcgaacggaccatacgaacacggcgacaacaaaaccccccacctgggcccaacagacgaagagccgtccacaagccccaaaccaacactcggaaaaacgcgatcagtgtggcaaccaccgccaagcgacgtccgtccacaaaggacaaaacacgcccacaaaccacaccggcacgcccccaagcctctgcacgccacgacccaagcggcaggcaaaactacatcacgcgcgtcaggggaaaggctcgattcgcccgcgatcacccc

SEQ ID NO: 191302 - DNA, 488 bp, Glycine max
agcttgtgtactgctgcattctactaatatatggagttggccactgcttagcctgagaataacaattggttgaccacaacaacactagaggcggtaaaggacaacagtctttcaaataaacctgttgtgcgtgaacaaacattattaactcaaatgaatcagggaagtgattgcataattcttagactaactaccttcaatgtacctaaacaaaattatttccaaacacgtgaccgacacatatcatgactaacttgaaaaattgattgcattgcgtaggtgggaagggcttggatgactaacctggcaagagtaatcctccccgcaaaggagagttgttgacgtgccttctaagtgaataggcgatgatccactctagaaataatatattggatggtactagtggatactctattataaagaatagaatgtcgaggtactttcaagattttctgtatgtaaaaccctaaatatttggctcattaatc

SEQ ID NO: 191303 - DNA, 231 bp, Glycine max
agcttctcccctattttcctataaatagggggagaggtgaagggaaaaaatgttcagcccttctggtatttcgagatcacttaaaattagtgaaaaacaattgtttccatgaagaaaatccaagttgaggcgcttccgtaacgtttctgtaacgttttcgtgggtaattttgcgaagattttcaaccgttctttgacggtctttgttccttctttgtcattcttcgatcct

SEQ ID NO: 191304 - DNA, 559 bp, Glycine max
agcttctaaactttgtacaagaatgaatctctgataccacttgttagacaagtggcctcagatatcttaagaagggggggttgaattaagatgtcccaaactgtttcccctaattaaaaatctatttcactttttactcaagttatgaattcccttaatgacaatcttcttaaatattaattcaaatgaagcaacttgaatatgaatataaagcaatgataaataaaggagattaagggaagagaaaatgcaaactcagttttatactggttcagccacacccttgtgcctacgtccagtccccaagcaacccgcttgagagttccactatcttgtaaattccttttacaagttctaaacacacaaggacaatccttcctttgtgtttagagatcctttacaacaagagactcacagtctcttaatcccttatagaatgaaaaaaagaaaaagaaccaatctctctagaaagagatggattttacagattgaccactcaaataattccttaatgaattgccatttgaatggccaacgaattctttagaagattaaatga

SEQ ID NO: 191305 - DNA, 883 bp, Glycine max
  unsure (1)..(883): unsure at all n locations
ccccccgcccccccgtgctcatcgcgcggcatcttccttaccccgcttctatctctactcctctctttccngccccccccccttccttccccgcncncccccccntttgacctgatcgctgtttagggggactttaaactcaggtgggagcttgggattcttttaaaaggggactttaaaaatgttgaattttaaaaaatctcttaaacaggctctttgaaaaatgggaacttttggaaaggttttttctaaaacaacccccggtgaacgattaccccttaagggtgattcggtacccattaaccaaaggggctttttcttttggatttttgaaaataaaacagttaaaagctctggtgattgattacaaacattgggggattcaatacaccaatttaaaatacttttaaactggtttaacataaagtataattattggaatttgaaaacttaaccgtcttaaacactggtaattcattcctacttttgggtatcgattacacaaaagaaaaactctttgggatgaattaatggaaaccttcttggggttcctaatattttggaaaacattttttagacttattctgattgagccttctcttgattctgaaacttgacctgataattttgaatcctgaatctggaaatttggattttggttgaccctgaatctttgggtaatcaaaaaacctggaagaaattgttcccacaagattatttgaaaatggtgaaaaaaaaaaaggcgctttttctttcgcggcttgacaccggaaaaaattcttgagaaattattcccaaaataatccagttttaaaaaattgcctttaatagggaagcccctctttaaattccgataagaaaaggacaacaccccatccaatgc

SEQ ID NO: 191306 - DNA, 351 bp, Glycine max
caaaaacaagcgattaattctttcatcacagttgatgactagaggaacgagaaagcgaaaacagtgactgaaggaccacatactggcccacaaactctaggcccaaattcatcgacccttaacttaacttctccacagctaccaccaccaccacaaagactggttccttctctaactctctggtacttttcttgcctctctcttctaagcagatactacagcgaaggagcatctttcattgtcaaaccttatgttttacattctaactacaagggcaggggaattttttttattttttctttcacaggcataataccctttgggcaaatattagaattgcgagtatgccat

SEQ ID NO: 191307 - DNA, 369 bp, Glycine max
tctattctgaatgtcaagcgtctcgatatactacaggacactatcaaatatccgagtaaaaagttattgtcgcctgaatttgcttagagctttcgttttcaattttgagcttctcgatatattacgagactcaatctgacatccgagttaaaagttatcgtcgttagaaatttctcagagctttcgttatcaattacgagttactcgatatattatgggattcattcggacattcgagtaaaaaattattgccgtctgattttgctcagagattccgttatcaatttcgaggatctcaatatatcacaggattcatttcgacatctgagtaaaagttattggcctttgatttgctaacagcttctattc

SEQ ID NO: 191308 - DNA, 485 bp, Glycine max
agcttgtagcatggctagatatgatatatgtcagggtttggtttaattaaaggataaaaggggatgtcccacattatttccatgacacaaatgtaacaatgatgatttggaacttttatgcaaaactagtcatgcctgcacctatgtggacactcaagtgtcaaacttttatggtcatgtgatgctagggctcaggattcgtttcctctattttagtcaactcagtgtttccaaaatatgttcttttatcaatttgtgcattcatccgagcctattttgggtgttcgaaaaaactttcacagcatttacccttcagatgtatacacacttttcaaaaactagttatgatcagtgaattctttcaaaaaaaagttggaagtcatttcttttcataaacatgttgtttttttagccaaacaaccttttttatttgaatcattttcttttttttcctcccttctttttcttttctacttgcctctctt

SEQ ID NO: 191309 - DNA, 366 bp, Glycine max
agcttctagacaaaaagtacaaagaaaaagtaattaattttttcattacattttatgactagatgaaggagaaagcgaaaacagtgactgaaggtccacatactggcccaaaaactctaggcccaaattcatcgacccttaacttaacttctccacagctaccaccaccaccacaaagactggttccttctctaactctctggtacttttcttgcctctctcttctaagcagatactacagcgaaggagcatctttcattgtcaaaccttatgttttacattctagctacaagggcaggggaattttttttattttttttttcacaggcataatacctttgggcaaatattagtattgcaagtatg

SEQ ID NO: 191310 - DNA, 394 bp, Glycine max
tgccacccagctcgcccaggcgagctaggtttcttcctccagaaggcaccgccttctagggaacttcctggaaagaccaagtgggcctgattgctatttgcaccccctgtttactaaatacacccctgcccttttttgctgattcttcttccgtaacgttatggaactttacgaatttcgcgatgatactcgttttctttctgtaatgtcacgaaaccttacggattacgcaatcctcccttctttggcttccggaatgttacggaactttacagattgcgcattaacatttccttttgacttccggcatgtcacgaaacttcacggattgtgcaacaatgctttctttagacttccggcatgtcacggaacttcacaaattgcctaatgatgg

SEQ ID NO: 191311 - DNA, 333 bp, Glycine max
agcttgagatgaggaagtgttgaagggtgaaacttcctgcttttattgttgaccacagagtggtacctggagatatgtcgcgggggtcaggagaccttggggacgtcaggtggggtgctattgcccaaaaccaagcttgaccaatcccgacccaacccgggcatagtcggtcagtgagaacctgtgatgtacctaagcaggcgagctcctggcagtcaacagataagaggaacaaagaccacaaagctgggatgcttgtggtggctggccagctgtgaaacttgattgacatgagagagttggtctctggtaatccaatgcccaaggtgggga

SEQ ID NO: 191312 - DNA, 333 bp, Glycine max
tgagatgaggaagtgttgaagggtgaaacttcctgcttttattgttgaccacaaagtggtacctggagaatatgtcgcgggggtcaagaaaccttggggaccgtaagtggggtgctattgcccaaaaccaaacttgaccaatcccgacccaacccgggcataatcggtcagtgaaaacctgtgatgtacctaagcaggcgagctcctggcagtcaacagataaaaggaaaacaagaccacaaagcaaggaggcttgtggtggctggccaactgtgaattttgtgtaatatgtggatggtggcctctggtaatcgattacaaggcttaaaattg

SEQ ID NO: 191313 - DNA, 358 bp, Glycine max
agcttacccttatggcttgcctccggacttcactccccttgccgctccagaagatgtgagccaagctcctactttcgaggggcaacttcctccttatgccgactatcccctggaagaagatgacaaaggagatgcccatctatgctctctggttcccctcaaggatccggccccccatgaattaccccaaccaaacatagtccgccatgtcctgtctgcacccgcacccgtaaaagaatctgttcccttcgcagaagaaaagggacagattgattcacttgaaaagaggctaagagcggtagacggccttggcaattgacccatgctcaaaaatagcggacctatgtctggtacttga

SEQ ID NO: 191314 - DNA, 511 bp, Glycine max
  unsure (1)..(511): unsure at all n locations
ntatgcttgctctcttattcacaccaaaaaaaggagaccaaatctaccaaagccaaaatctcctacaggtccaaactcaaaaagacccattgatctgtgatgattatgcgcattaccccttgatttgatgggaaatgacttgcaaaatcgatttatgacgtgtttgtgatttggaattgagaggagacacttgccagtgtgagattttatacacctttgagtggttttcctccattttattgaatctagtgtttcttctaatgtttctgtagaaaagaaatgcaaaatgtcttaatctcattcttggttatgagaaattctatctttgtgctttcattcctcattcgtggcattatttttgaaaaaaaaagtgtgttctgatcggtttgggagtttgatttctttaccaagtgtgttcgcattttaatggaagttttcacaaactccaatgccttctgtcttttacatttcaaagactgtaatgtcttcagtcttttacaatttcaaagac

SEQ ID NO: 191315 - DNA, 580 bp, Glycine max
agcttggtagtgaagtatcccaaatttcgcaaaagctataccccaaaatcctaaatattggtcagttggaacactaaagaaggaaggggtttgaagaaacataaatagaacaccaatctcattcttaaaataaaacacccaacaataaatcatcatttgccttatctactttctttggcccaaggacaaatctgctatcaactagttgcaacacagaatacctttgaaccctaatctctcttttcattaggcttaataactaccaaggaaaaagaaaaccatagatcatctagttctttggcaattcaacaacctaatacacaatcttaaatcacacaccaattagcactagtaaagcaagtatgaaagaaaaaaaatccaagcagaaatcactacatagtagtatgaaacgagatggatcttacgggattgagcaagagctcggggctggtcctgcacataaaccaacaaaattcacaaactcgatcactttgattttttaataagaatcgtcatattaaaaatggaaaatgtggaattgaaatgggtaaattaatttaatctttggttttccattatc

SEQ ID NO: 191316 - DNA, 586 bp, Glycine max
  unsure (1)..(586): unsure at all n locations
tagaacaatatacttgtccttcatttaattgtctttgggcttgacgaccacgatcaacaaagtactttcgacacctactgtatgttgatttcaccaacgctgttatcggtatgttgcgacaatccttcaaaaccttatttatacattcagagaagttggttgtcatgtgaccatattgacgtccttctctatcataagccatggtctatttttcctttgaaatgcgatcaatccatgttgctatcgctggactcagttggcgaaatttttctaaattttgataaaaaaaatatgcttgcaaggagtgtaacctgcatgaaattagttagcaacaacaattttaagtatatgtcaaacttaaattaaggtgagcatgatcaacgaaatgttacccaatttcttcaacatttctttttgtttggcattattgaatttgtgattgaaattgctcgctatgtgtcngacgcagtaaacatgataaccgtggggagattgtcaaccaagcgcttcattagccacaacgaactttatactcgcgtgacgatcagatatgagacanataccatnnttatctatgacatgttca

SEQ ID NO: 191317 - DNA, 526 bp, Glycine max
agcttgcttctaccatgtttcacacagtccgcgtgtgtgatatacactcgacaaagtttgaagtatatgagaccttctatcctataacgcaacgtggcatacaaaagtgggcagttaacttgaatggccattattgccaatgcggaaagtattttgcgcttcactatccatgttcacacattattgcaacttgtggttacatgagcatgaactattaccaatttatttatgcgcgctcattatctataacgtaccaatatagtctacttttatctatgaattcaaattaattatttttataacattatctttaagctctcggctattatctataagctttaaattatctacaaggcttcaatagtccctaccaacaaggaccaacaccccttgcttaactaatataaataccagttccattgaacccctctacacaacagttctatacgacttacacacactcagtacacgacattttacctgtgccacactctttttttcactcatacgaactactttacagcac

SEQ ID NO: 191318 - DNA, 531 bp, Glycine max
  unsure (1)..(531): unsure at all n locations
tcctcaatttttttggattgatgctcttaagacggttgcgtatatattaaaccgagttccaaccaaaattgtctcaaagacaccttttgagctattcaagggttggaaaccaagtttgcgacatatacgcatttggggatgtctgtctgaagtaagaatttataatccacaagagaagaaactagaccctaagaatattactgggtatttcattggatatgctgaaaggtctaaagggtataggttctattgtccatcccacaacactangattgtggaatcaaggaatgcaaagtttcttgaaaatgacttgatcagtaggagtgatcaatttcagaacatttcttctgaaagggatcactatgaagcttaaccttctaggacaagtaataggttggtagtcattcccacccctcaagttaaaatgggtgttagacaaccagtgattgaagttccacaagctgttgaaagtgatcatgtagatcaagttgtttgtgaggaacaaaatgatgatattgaaacaactagtga

SEQ ID NO: 191319 - DNA, 310 bp, Glycine max
agcttccatcatgaagggttcacaaacatcccattgatggtaacaaggggttgtatcaattataatcccctccttgccataagacaacttggctatcccatgagaggagcaccatccgaagaaagtatcgcgcctttcattgcatgaggcttcagtgaccccaatgcaagagtgcttcaaagagtctgaaaagcacagaatgtggtgccaagaaaggattaggagctcaaaggaagcaccagtgggatcatcaacaattatcataagtggttaaaggctataacacaagagataacttagctcctaaagc

SEQ ID NO: 191320 - DNA, 361 bp, Glycine max
  unsure (1)..(361): unsure at all n locations
tatagagctctgtagtgggttgtaaatggaataacgatttaaacaaatgaattaatatattcttggacttgannagaagattannaaatagtaccatattttaatttaagatgcccgaaacttcgacaaaataccgacaacaatttatttaacgaaaaaaataagtatttctattaaaaaaacttgttttattcaaatattatattttatcaaaaacaagaaatttggaaaagtaagtaattgaatttctttatccaagcataaaattctaaaaatgaagcaatttattttattaatccaagcacacaattttgaaaatgaaataatttcatatgaagcatttaaaattctatagaatttt

SEQ ID NO: 191321 - DNA, 428 bp, Glycine max
agcttcttggttggaaagaaaaaggagcctatcaacattttgcagtatgctgatgatactatctttgtaggagaggctgtgtgggagaatattcatgttataaaggccttattaagaggatatgaattagcttctggtttaaagattaactttgctaaaagtcagtttgggataatagggggtggagtcaattggtctttggaagcagccaatattttgcactgtcgacagctggaatatcctttcctctatttaggcttacctattggggctaatccttctagccagctggtgtgggagcctctcatttctaaattcaagtctaaattagccaaatgggctcaaagagatatatccatggctgggaagatcacccttatcaattctgtccttaattccctcccaatttatctcccttcctttttaaa

SEQ ID NO: 191322 - DNA, 444 bp, Glycine max
ggataatgtgagtgtatgtatacatgattttgatgatgtcaaaagaacaatcagacgaaggtgcttcaaaggataagcatggcttcaagattaatacaagactgattcaacaaacaaagccttgcttcgagattaactcaaagatcaagccttgccttaaaacaaatagctttcaagacatgcaaggctctagtaatcgattaccaggcgttgtaatcgattaccacgcagtgtaatcgattactagcagacagggttgaaaaatagctggtgaaaagagttttacatttgaattttcaacatgtaatcgattaccatatgtgtgtgatcgattaccagcaacgaaactcttgaaattcagattccaaagtcatgacccttcaaattataactgtgtaatccattacaccaacattgtaatcgattactagtggagagttttca

SEQ ID NO: 191323 - DNA, 444 bp, Glycine max
agctttactggtttagtggtctgctcgtactactgcattctaggagtcaagggtttgacacccaattagctcaaaacgtaggattttttttttttacaaacactattcatcatcttcaacctttagcggatcaaacccgacccatacgcagacccgatcgtttttcattcatttggacaccatttttcacaattcaaaagccaaaattaaggaaatcaaatgaaatacagatttttaatcttattttaaagaaacaaggcccttcataccataaacgaaatcaaatcggaaaaataccgaaaaccgaaaatggacaaggcagaggcaattgtggctctgataccaaatgttagaataaatttcttaacctgtgatattacatactacaaaaaaaaaaaacacaggttaataataaaatgcggaaaatacagatcaaatcatacc

SEQ ID NO: 191324 - DNA, 538 bp, Glycine max
taacggtattgattctgtgatattcctcttgccccaaaaagataagaattctgttagcagaagatagtataaataagtatgtaaataaaatcacaatcataaatgagaatatatttccttgccttattccttctccccttccttctatggaagccctggtcctcgaaaccagctaattagatctccccccctaacagtcaatgtgtttgattgcgagaaggacatcaacgtgccagttaccgttgttttcgtggttgaaaatcgagcccgaggagccagagtggatcgtttccttcatcttgtcacagagtgtgacgacagatttagacaaatccgtgatggtggctgcgatcaaatccaactttgacgagtgggtgtccagtttcctggtctgtgctgccatggtggtcgcgtgagactgaagcgtggacttaatggcctcaagctctactttcaaagcgttaagtctctgagaagccatccttgtacacgtacacgattgaggtgaaactcttaacgaaagcaccaatgatacata

SEQ ID NO: 191325 - DNA, 470 bp, Glycine max
agcttatggaaagatctgggacctaaccatggtcgaggtctccacggaggccattgcctccctcgcctaatattatgaccagcctttgaggtgctttacctttggggacttccagttaacacccacgatggaagagtttgaagagatcctgggatgccctctgggaggaaggaaaccatatcacttctcaggattctatccctccttagctagaatttctaaaatagtcaaagtcttgacacaggaattggaccgcgggaagcaagtcgaaaatggggtagttggggtactaaggaaatgtttggaagcaaaggcgagagtcttggcaagtcaaggcgaatgggccccgttcatggacatcttaccacttttgatcttcggggtggtcctctttccaaatgtcgatgggttggtggaccgaacaacgattgatgcttttctcgccttttacgaacgctataaaaaccccg

SEQ ID NO: 191326 - DNA, 522 bp, Glycine max
  unsure (1)..(522): unsure at all n locations
tctacttatatggcagggcgggcttccttcactttcttgtctccaacgcgagctctgaccactgttcttccttcccgcgatgcttcttttcatgtccgcctgagtgggcttatagcctaaaccatacttcccacgatttccttgggtttttatcaagctagttatgccgccattgtctttgcctaaacccatcccgggttcataaccgttccccaacataactcgggccatcattaccgccgcatcggacagacaaggttgcccaaagagggagtccacggaggaaatgctgaccacctcaaaagactggaaagcggtttctaacgattcttctgcggcttccacataaggcatggaagatgggcagcttaccaagatatcttcctcgcctgacacgatgaccaagtgcccctccactacgaatttcagcttttggtggagtgtagaaggcacaactcccactgagtggatccaagggcgccccaacangcagctgtagggggggttaatatccattatttg

SEQ ID NO: 191327 - DNA, 478 bp, Glycine max
agcttatgacaattaactaacctacacttatgtataatgagaggttctattataatgtgtatttaatataagcttctggaacagtatatgaaaattggatatgtcaaaatctccgacttaagggcaacaaagaaaaaggaaatatattaactggtagtaaatacaagcctagtgcaaaatgagctactgtaattacttatacctattttctaagtgatctttgaagtttaaacaaacacttttgagatggcttttttcaatttattctaaaacatcttactccataatttaataacacatacaacaggtcttggaagctatatttttgcttcctgataagtgataagctatatttaatacccacaacaagctcaaaataaataaatactgaaaacgaggctatccacaaaaaaacttgacaattttggaagagttaaattcatgttaaatatttcttggactgactgtctttttcttc

SEQ ID NO: 191328 - DNA, 580 bp, Glycine max
  unsure (1)..(580): unsure at all n locations
tataagaacgaaattgcctaaatcatttccaaatatgcatgtgaattacgaagcatcaacaagaatcaagccaaggctattgtgcaagctatcaatggggcaaaacacaccaaaagattatgatgatggatggctcgaattctcacaatggtaaacttatcactttcaaattgagctttcaaaactatcatgacatgtagaggaaaaacaaggatttcaaataacaaaatgtcaagagacttttattttcagaacaattacccattacttgaacatatcctataattcaaagaaaaatatgcaaagttgtacatgcaaacagaattgacctaaaatattaaactagaaacccaacaaaactaacaaaattaacaaacttaacaaaactagcaaaaccaaaaccaaagaacactccccccatacttaaacaacacattgtcctcaatgtagcacaattaaaagattaaaggcaattaagccatcaaatagaatcggacaaatgtaataaaagtaaacgaggggataggaaaagaaaaactccctacgntatggtagacaagacccaatgtgtaattggatg

SEQ ID NO: 191329 - DNA, 335 bp, Glycine max
agcttgccgttgctgaggaagatacatccctctgaccgctacttcctgcggagggtggaagctgacatggcctttcccatatcaatcgtggccatgagaacagcttcccttcttagaatctagctacattacccagcaaatccaagggagaagaaacagtcctcgtctcttctggggacacacgcacttggtatgtcaggctcttcttacgaggattctatgaactataggcttctcgatgccagggacatcccgcgaaaccttcgtaagctttattaacgacaaactcgcctacgtgttctcttggtttgcctactacccagcttttgccatgg

SEQ ID NO: 191330 - DNA, 266 bp, Glycine max
tgactgattgggtattcaacaccgaaacgatcatgctgggtatcgtcgaacgctaccctgaacattctggtttgaccactgcccacaatcgtgcgatcgcaaacgattatactcaagtatacacctttgctgaggctgccagtacgacgctggactatttactgccagacgcacccatgtgtatctatcccaatgaccttacctttcacccgagtatacacctatgccatttgctatcctacgccaaggctatggggtgcacatac

SEQ ID NO: 191331 - DNA, 520 bp, Glycine max
  unsure (1)..(520): unsure at all n locations
agcttgggattacatttgggcacctattttgattttcccatgttgtctctacatacataaaacaaccccaccgtcccaattttgcaaaatcacattcatatatcattggggcatttcatcgagcacttggtgggcgcacgtttagacataaattgcaagagaatgggagcaatgtggcatgccccattgcttcagaatacaacctaggcctaaggtcttttcattcaaatcctcaattcaagaaaacaagcaccaaagcaaaccaaaactgccttacaaatataagcatgttctcacaattcgaggcaccaaaagatgaagaaagcacatcaatggaaagcaaaaacatcaaggatggaacacttacttgttggagggaattgaaataccaaaaatgaaagcaaaatgcgatcaaaaggcttaggggagcaagaaaccgcaagccttcgtgttctctctttcttgattgaagggggggaggggtttttgnttccacataccctcccccttccttcctttt

SEQ ID NO: 191332 - DNA, 927 bp, Glycine max
  unsure (1)..(927): unsure at all n locations
gggagggaaggagtagtgtangttgtgtataaaatttcaataaaaatatgtgtgtaataaaactaggagtatgtaatgatagaantacncccnccncacaccggggatttttttgaaaatgttgaacntgctaannngtgtagaaaaagaacactcnagggttgttttatatgggaaggtgggnataattnagatttttgaatttaaagggagatntggaaaatggtgattttttgggggaaggttatattaatgataaggctggagagggggttatagagctaaacaatatttatggaggaatttgttggggtgtgaaaaaggtaattatgggggtattggatttgtataaaaaaattttgggttaataaaaggtgtttaaaataaattggggtattattaatgggggattggaaagataagggtgtgtaaagagggagttaaggaggaaatggtgagtaaattaaaagaatggaaagggggttttaaagattgttttgggggtttcaaataaagtatggaggatggggaaaatattaagatatgttatttggttgaaatgatgagaaaatgggcgtttagtaagaattagagattttggtggaaggaaaaagggaaaagtttaatgaatgggataaagggggaactaaaaaggagttgttaggggggtgaatattaaatatttggaaaggaaatagaaagggggaggggtatagggaatgagaggaaagaatttggactaaaagataagggataggagtggaagaataaagaataattgaggtaggtgttaatgggaagaattgataggaaatatggtaaagaggtgtaaaggattaagtattaaaggaaaaaatatgtgtgatggagtggtaaataatagaggtgtaatgttgaattgaangtgagtaagggtaataatgtgta

SEQ ID NO: 191333 - DNA, 486 bp, Glycine max
agctttaatcaagattccatccatccatcaaatttttaatcaaaacccatttgataagctcttggtggaagaagagaaatgaactaagagatcaagaatagaaagagaagagcttaccaacatggaaacaaccaaaaagactctagaaattaaggaaacaaagtcttctttgagtgaattccaaaaattcaagctcttgagaggaaaggataagcttagagaggaaaaaaaagattaggatatcataagagagaaaaagacactctaagctcttctaagctgtatggagaagattattattgaaaattgggctttttttaagtggctaccatatcctccatttacaccctaatctattgttgttgctacgcgcacccaacacaattgtcggtacacctagcataacaatgcgatttccggtttgtgcttctataaaactgatacgaattgagcaatccggaaatggcccatgatttttttaaaaaa

SEQ ID NO: 191334 - DNA, 779 bp, Glycine max
  unsure (1)..(779): unsure at all n locations
ctgcatgtctagggtttactcnacagagaaggcgtccgcgtattcttagactgccgacactatgtgctgacgtgacataatattagcttccttcttggaaagcgctcggtgggctacacttagcttaaaatggttacaacagcgtatactactctagacgaatgtgtgtccttatatccctcttgttcgactaaactgtgaccaatcgaaaaatagtgcgtgcacacttaaaaacagaatttactccccatatccctgcgtgaagaataagagaaaagatttgcttcattaaatttatagacgcggggtactttccaccaaggctcagatgcataacgatccttcccacatggtgattacaccgcgagcctatgatgttcttgcaatgacagacgccttgctccccatcataccctgccctttatacgtctcagtccttacgtccagcaattctttagaagtccccacccagggtgttcagccattcgttacataaaaaaccccttcgtttatgagattcccaaaccctgccaatctctataaaagtggtcacgtttgctagctccaaagcgattttgccgaaattcgccctgtggggtgccctccaatgctgggggacttttggtaaaagtctcttcccctttctcatggcaccatgcggggttttagagatttagaccccttctatgcggcgtggcacctccctaatctgtacgccttgagggagaaactggcttcccttctcccttcccatacctggcgctacacacccagtgtct

SEQ ID NO: 191335 - DNA, 442 bp, Glycine max
agcttctagacaaaaagtacaaagaaaaagtaattaattttttcattacattttatgactagatgaaggagaaagcgaaaacagtgactgaaggtccacatactggcccagaaactctaggcccaaattcatcgacccttaacttaacttctccacagctaccaccaccaccacaaagactggttccttctctaactctctggtacttttcttgcctctctcttctaagcagatactacagcgaaggagcatctttcattgtcaaaccttatgttttacattctagctacaagggcaggggaattttttttattttttttttcacaggcataatacctttgggcaaatattaatattgcaagtatgcatgtaagtttaaactttatacaagtacccagttaaaatgattatataataaacaaggttgaatttatgatatttt

SEQ ID NO: 191336 - DNA, 527 bp, Glycine max
tgccacccagctcgcccaggcgagctaggtttcttcctccagaagcaccgccttctagggaacttcctggaaagaccaagtgggcctgattgctatttgcaccccctgtttactaaatacacccctgcccttttttgctgattcttcttccgtaacgttatggaactttacgaatttcgcgatgatactcgttttctttctgtaatgtcacgaaaccttacggattacgcaatcctcccttctttggcttccggaatgttacggaactttacagattgcgcattaacatttccttttgacttccggcatgtcacgaaacttcacggattgtgcaacaatgctttcttttgacttccggcatgtcacggaacttcacgaattgcctaatgatgggtgccaagtacctcgaagtggtcaaacgagggtcgcatcccaacaaacggatggttcccagacgaaattagggtatgacaattgcatacaatagttatcacacagtctgtatcattaagagcacgttctccccg

SEQ ID NO: 191337 - DNA, 494 bp, Glycine max
agcttgctaacccatggaagctcctaatatctcccacactttttggggtgggccattcttggatggccttgattttctcagggtccacttggaccccatttctaccaactacaaaatctaagaaaactatattatctacacaaaaggtacacttctctatatttgcatagagggtgtttttcctaaggactaaaagaacttgcttgagatgtcctaagtgatcatctaggctcatactatacactaaaatatcatcaaaataaacgactacaaatctacctatgaaatcccttaagacatgatgcataagcctcataaaggtgcttggtgcattagtgagcccaaaaggcatcactagtcattcatacaaaccaaacttggtcttgaaaacggttttccattcatcaccctttttcatcctgatttggtgataaccagttttaagatcaattttttgaaaaatattagcaccatgcaacttatcaagcaaatca

SEQ ID NO: 191338 - DNA, 528 bp, Glycine max
ctagctcatttacaagtgcagccattttccccagactttgaattgaaaaattgacagatcatagagcaaccaaagatttttgtttcgaattcgatataatcaagtagtttagatcctattgttgtgcctaggctttaagggttactttctttgttgggcatactcttctttaatgttccagtgaccattaatatacaacctcttattgatatgttccctttttcacctttgtccgtttcatttctctgcatatttatattcattgcaattatatcatttgccgcagatccgataatgagtcctgtgaaagcagcgatattgaggacctggatgttgactttgagcagccagtcaatcaaaccggggaggaaaaagatgaggattggggattcctcttggatttgaggagaatagtggaacgggaagaaagagagataaagtcgcatcaagaggagacagaggttgttaacttgggcacttgtgaagaaaaaaatgaggtcaagattggcacttgtgtgtccgctaaca

SEQ ID NO: 191339 - DNA, 565 bp, Glycine max
agcttgcacatggcttccatttatgattctcgtgcggtgtgttaatgtttatacatggtagcttcaaaagaggctgctgaattggctaaaattaaagctttgtacgcttcaatagcttgcactcgtgaagcttgcacatgcatgaatagtataaaagcaaaggtttgtgtaagaaggatgcacatgctagtcatagttcctatctcatgaagtatgcttatagggtctcttacatgaaatgatgcatcatacccgtggaatcttgccagaaataaagctattcaataataatttgtatcactgaccactaaaacaattataagttgtgtatattggactccaggtgatgcatgaatattatatacaagatatcagaaggtaatactttggcaaaaaaaccaatacttgtgtcaaccattacctttaaccacccaactttcattcttctccattgttattttcaatccttctatccatttggtggggttcttcattggtcaaccaatggcacatgcacaaccccgaaccaattgatgggctcctttgtgcgcttacaaaacaacca

SEQ ID NO: 191340 - DNA, 597 bp, Glycine max
tcatgatgatgaatcaagttgattcaagtatttttgataatgacaaagttgatgacaaaaatcccaaagaatgatttcaagattaagtcaacaagaagaaatcaagaagattcaagaatcaagtgaagtttgatttcaagattcaagaaaagatgaattcaagattcaagagaagaaatcaagaagacttcacaagggaagtattgaaaagttttttcaaaaaacaaacatagcacaattttgttttttcaaaagagttttctcaaaattttctaagttaccagagtttttactctctggtaatcgattaccagtttcttgtaatcgattaccaatggcaaagtttgatttcaaaaagctttcaactgaatttgcaacgttccaattgatttcaaaatggtgtaatcaattacaagatattggtaatcgattaccagtgtatctgaacattgaaattcaaaatcaattgtgaagagtcatatcctttcataaaaagctttgtgtaatcgattgcatggttttgggtatcgattaccagtgacaagtttgaataaaaatcaaaggatataactctttccatgggttttagtttttttt

SEQ ID NO: 191341 - DNA, 572 bp, Glycine max
agcttagtgacatccgtgactagatcttaagcgaagatgttcgcaagagagattcatgagaatcttccagtcatgtttccaattcaacattgaatactgaaggcaggggaaggactacccacaagggtcagaatggtccaagcagatcaaagtctagagggaaaggtcacagaaaattcaaagtgacgttacttgctggaattgtgacaagagatgtcactttatcaatcagtgcaaggcaccaaagaagaacaagtcgcacaaaaccaagaagcgcgatgatgatgaatccgcaaatgcagcaactgatgaacttgatgatgcattaatttgcagtttggataggcctgttgattcatggatcatggactcaggtgcgtcgttccccactactccctctaaagatttattgtctaactatatttctggaagatttggaaaagtttaccttgcagatggaaaatctcttgacattggcggaagatgtgaatttaaccatcagaacctctagtggatccctatggacattgcacaatgtcacacatattcctcccttaaagaaaaatttaatt

SEQ ID NO: 191342 - DNA, 590 bp, Glycine max
tcataaggctatctatgggctaaggcaggcacttagagcttggcatgatgctctcaaatcatttataacatcatatggtttcacaaccagaagaagcaacccttctctctttatctacatctcgggtaacataactgtctattttttggtgtatgttgatgacctccttctcacaggaaataacactacattcatagacacattcattgagttcttatctaatcggttgtcactcaaaaacatgggggcaccatactactttatgggtattgaacttatacccatgaactcaagcatgttcctctcacaacacaaatacatcaaggatgtacttgagaaatttgagatgcaggatgtgaagtcgtcacccacaccacttgcctcgacgactacactcatgttgcatgatggtacaccaaccaataatgctactcaatatcaaagaattattggtgcattacaataccttaccctaacaagacctggcctctcattctccatcaacaaactctcaatattatgcacaaaccaaccttccttcatcttccacatctcaggcgccttctcgaatacttgaagccactattaac

SEQ ID NO: 191343 - DNA, 424 bp, Glycine max
agcttgtacggccagccgctctaacatctaatccatgaaaggaaggggaaagtgatccatccttgttgccttgttaagatttttataatctatgtacattctccatccggtcattgttgttgtgcgaattaattcatttttctcattcttaacaattgtcatgccacccttcttcagatccacttgcactcaactaacccatgcactatccaaaattgggtaggtcattctagcttctagaagtttcaaaacctctttccttaccccttccttcatcacaagattcaatcttctttacgattgagccactagtttaaagtcttcctccataaaaattttatgcatgcaacaagaaggatgatgtagctccatgtagagcttgtatgcattggatattcttcatcaatggatttctttgtttctt

SEQ ID NO: 191344 - DNA, 524 bp, Glycine max
tcatcctcagatccctcttgatggactatgctaaatttagacagccctcctaggtttagactaacttaaactaagcttcatcctcaaatccctcttgttggactagacttagcttaaatagcttactaaagtttagactaatttagcctaagctttgtcctcagatccctcttgttagactagacttagaccaaacaacattattgtaacagcatacttaaaaccaaaatttaatccgcagatccctcctgtaagaataagtttcaattctgcttcattcaatttctaaggcaacaatacatttcccaatgctaaagtcacctaactatgctcacaaatgggtgattaaaccaagagcatacgaaatttaagcaatgaaagaagcattgaacacaagaaacacaatcaattagatattaaagtaattacatcagctattctttagaaatccccaacaagggtgtttagccagccattacagaagaaaccctaacaataatgagattacaaaacctagctatctc

SEQ ID NO: 191345 - DNA, 446 bp, Glycine max
agctttgaagatacaaactccctccatacacccaagatggttagagttaagccatttttagcagggagttagaatttctaatccaactaattactaagtgcttgtttagcgtgtgtttgtttttccgataaacttgcagcaacatgaagtctgagactacttcagtatagaaagataggtgttgttgcttctccaactttcccaagggagatttaggaattttttaaaagggaatcaaaatgatattcagatagttttaccggtgatccaaacacacttagttagcattcaaaattaagtttagagcatctggaactaattttacaacaacatttatcttaacaggagacttgtgactaaagttaatttaatatccacacaatttaatatccacacaaaattgtgtggatatcattatgtgaattgagtcaaacaatataattatg

SEQ ID NO: 191346 - DNA, 436 bp, Glycine max
tctggtgggacatcttgacttgctttccaatctgacattcaccacagattctgccttcttctattttgaaactgggaatgcctctaacaacacctttgtcaatgatattcttcatgcctcttaagtgcagatgtgcaaatctttgatgccatattttgacttcatcttctttggaggatggacatgtggaggagtaactgggttcttgaggcgtccataagtagcagttgtcctttgatctgctgcccttcattagaacgtcattcttctcatttgccaccaaacattctgactatgtgaagcttacattgaatccttcatgacacaactgactgatgctgatcaaatttgcagtcagtcccttcaccagcagaactttgtttagactaggaactacatcctggactagctctaccattgcaggatctttccttta

SEQ ID NO: 191347 - DNA, 379 bp, Glycine max
agcttatggaaagatctgcgacctaaccatggtctaaggagactcagaggcacttgcctgcctaaagtaatagtatgaccaccctgttaagagctttacctttggggacttagcagtctacacccactacggaacgagtttgaaaaaatcctgtgatgccctcttggaggaaggaaaccatatgacctctcacgattctatccctgcgtatctagaaattacaagactctcaaagacttgacacaggaattggaccgcgggaagcaagtgcaaaaaggtgtagcaggggtactaaagaaatgttaggaatcaaaggccacagtcttgactactcaaggcgaatgggccccgttcatggacatcctaacactttagatct

SEQ ID NO: 191348 - DNA, 400 bp, Glycine max
tcgacgaatatggcacgacggtccctcttgactctgatgtctgctacacgaactctgaacactgagactccttaccgcgatgccccaatctatgagcgcctgaatgcgattataacctaaaacatacatgccacaatgagcttgggtatatatcaagatacttatgccgccattgcctatgtctaaacccatcccggcgacataaccgatccacaacatagctcgagcgatcattatccgacgcatcagacacacaaagttgcccacagaaggagtccacggatgaaatgctgaccacctcaaaagactgaaaagcggttgataaccattctattgcgagacccacataatgcatggacgatgggctgatcaccaagatatgatactcgcctgacactat

SEQ ID NO: 191349 - DNA, 340 bp, Glycine max
agcttcatgatgttgaatcaagattgattcaaggagttttgatgataacaaagatgatgacaaaaagcccaagagaataagttcaagatttgtagacaaaggatcaacctgatgttttgatgatgccaaaggattacatgtttcacaaagctttattcacgtacgagaaatcaaagatattcatgatggataatcaagacagtctctacaatcttaaaaagggtatattaagtaggaatagaattcctattgaagtatctaaaggttcggccaataaatttaagctaaaaaggtgttttgctagacatttactttctggtaactcatcaccggaggatgt

SEQ ID NO: 191350 - DNA, 514 bp, Glycine max
  unsure (1)..(514): unsure at all n locations
tcattctacacctgaaaaagaggatgagatagttgcacaaaaaaaaaagcttcttaacaaaaattttcatgcaggtggaccttcttctagtaattccgacttacagcagcctcgtatccctcttccattcccacctagagcgattccaaacaaaaaaaatggaagaagtggaaaaggagatcttggagaccttcagaaaagtagaagtgaacatacctctgctagatgccatcaagaagattccaagatatgccaagtttctaaaggagttatgcacccacaaaaagaagctcaagggcaatgaaaggattagcatgggtagaaatgtgtcagcattgataggtaaatctgttcctcacattcctgagaaatataaggacctangtactttctgtataccttgcatcattgggaacattaaatttgagaatgccatgctagatctangagcatcagttagtgtcatgcctctgtccattttcaattctttatctcttggatccttgcaatctac

SEQ ID NO: 191351 - DNA, 511 bp, Glycine max
agctttgagaatgcaaatttagctctattgtctctttgtttgcattcgctgaacctttgatgtattatctgatatgttatcgaagattttcttgtttactaacttactctccctttatatctcaattttttatgtgtgcacgtgagctgatgagcatgccaatgactgattactattgtttgaattttacttgattgagatataggaggtgaagatgtcgaccccggcaaggaagagactgatgagggattttaaaagattgcaacaagatcctcctgctggcatcagtggggctccccaagacaataatattatgctttggaatgctgttatctttgggtgtgtaggagtatataaatcatgaaatttttgttttcttaagagtgtgtttctcttaactttgggggtttggatgatttaaggtatgataacaatctaattgtgcctttcttggtctttttttccagaccagatgaccccccttgggatggaggtacaattttatctatct

SEQ ID NO: 191352 - DNA, 437 bp, Glycine max
tttcagcgtgatttgtctttttgtgaggggattttgtgcaaggctcactttgagtgcacatatcccaaggaagattaaaccactcatgcttcaatttatcacactactcttaaaaagttttatatgatttaccaattttagtcaaagtcgaatattcatttttggcgaaactctatgttatcctttttaagtgaaatgtcagaagtgaagcgtaccacattcggtagtgatgtacacatttttccatggctaagtaagggtaattcatgaatctaaattgaatgattaagataagcctacacaataatccaatggaccatgctctaagcttcttttgtccatttaattaaactccacaagtccccaaagctatgggtcattctttcctctcttcatgagctgagccagaggaaaagagacaccattttccacttttc

SEQ ID NO: 191353 - DNA, 363 bp, Glycine max
agctttgcagtagatgccactctactctaaatttttgaaggatatgttgacaaggaagcacatgtacattcatcaggaaaacatcatagtggaaggaaattgtagtgctgtaatccaaaagatccttccacctacgtgcaaagatcctgggagtgtaaccattccttgttcaataggagaagtcaatgtgggaaaggctctgattgatctgggagccagcattaatttgatgccactctctatgtgcagaagactgggagagttggagattatgcccactcgaatgactttgcaattagctgaccgctccattaccaggccctacggagtgattgaagatgtgttggtcaggggtaaacattt

SEQ ID NO: 191354 - DNA, 504 bp, Glycine max
tcatgatgaatcaagattgattcaaagagttttgatgataacaaagatgatgacaaaaagctcaaaagtcaagaacacttcatgataacaaagatgatgatctcaagaatcaaagaatgagttcaagattgaatcaagtacacttcagggatcaagaggaaagttgaattcaagaatcaagaatcaagtttcaagattcatgttccaagaatcaagatcaagattcaagactcaagattcaagaatcaagagaagactcaatcaagataagtattaaaaaacaatttcaaaaattgagtagcacatgattttttctcaaaaccttttattagagagtgtttactctccggtaatcgattactagattattgtaatcggttaccagtagcaaaatggttttcaaaaaactttcaaactgaatgtacaacgttccaataaatttcaaaatgctgtaatcgattacaagtatttggtaatcgattaccagtgtgtctgaacgttgaa

SEQ ID NO: 191355 - DNA, 498 bp, Glycine max
agctttgatgtttgtgttgaatgcattaaaggtaaacagaccaaaagcaagaaattaggtgcatataaggctacaggtgtcttggaattgatacatacgaacatttgtgggtcatttcatacaccttcatggaatggtcaacaatattttatatcattcatggacgattactccagatatgcatacttgtttcttatacatgaaaagtcacaatctctatatgtgttcaaagcatttaaagttgaagttgaaaatcaactcaacaaaagaatcaagagtgtcaaatttgaccgtggtggtgaatactatggtagatatgacagttcaagtgaacaatgcccagggccttttgccaggtacttagaggaatgtggaatcgtcccaccatacaccaagtctgggtcaccttacatgaatggtgtgggtgaaagatgaaaccaaattcttaaggatatgggaaaaaatatgaattgtcattttaactgtaccaaagtcact

SEQ ID NO: 191356 - DNA, 405 bp, Glycine max
tttgttgggaatctctgccgagtcttgatgtaaatattatttactatctatttaatgttgctttgatgtgttcattgcttctatctgaatttaattctaacatgtttttggttcgatcacccatttgtgtgtaaagttaggatttttaacattgaaaaatattttgaatccttataactggatataacatggctagataactgtattatcaagacacagagtgcagggactctacttttattatgttgtgaccttaatgttgttccgctaggccaaattcgatgagggatccgagaacgaaatttagttagaattagcccattcatgcgagacatcagtgtttgggacaattgttctcaccattgaacaccgaagccacatttgatagagaaaaactttttattg

SEQ ID NO: 191357 - DNA, 788 bp, Glycine max
  unsure (1)..(788): unsure at all n locations
natgactccttgcantatcgngacnnttaaaaanaaccccagcctgcgagcttcatgttgtatggaatagcaaccccgtttttttttatttatttgagacaactcgtgagggaagtatttggaaattttgccagcggcgaacaatagggccccaacctttgaaaggttccccatttgctgaaaaggatggaactcttggggaccaaactcattcaaaaactccaaaattaactgaaaacgccccccctgaaagcttattatttcaaggaacacacttttgaatgaatgaaagtcccctgttgattgaaacaccctcacttccaggcctttaaccttacccttatttgagacgccttacttcccgtccggttattcgcccccaggttattatcaactttttttgccccaaggaaaaaatgtaagacttccaaggagtacgccggccctctttgttctcgggaatgattaaatgcggggaagaaaaactagcggtacttttttaaatggggggcccggcacaatacacctgtgaatagaaatcacccctttggtctaaaacacacaaaagaactctcctctcgtgggggggaaaacacggtctcaaataccgaagaatttttttctgaatggatcaatgcctttggtttttgggggggtacccaatcttaaatcttccccaaggggataccgctcctctaaatattaaaaaatttttttggaggcccccctctctcctttaggcggttgtgttcctccctgggctcaggaaattcctttaaattcttccg

SEQ ID NO: 191358 - DNA, 326 bp, Glycine max
aatacctcagcttcttgacatatttgggaaattgattttatatacaaaaggggcttgcttcagaatattccatttttttggctttgacaagtcttcatatcattgagcttatcggattaagatgtattccaaaagaagaacaacgagcattttactgggaccttacccttgatttattataaggggaaaagagggttaaaataagaataaaaaggaaaaagaccccttcctaaatacagctttggtgcaccaaaattgtcctggcttcacattgacataagcccgttaaacaaggatatcctatttcattgggtgctgaatccttc

SEQ ID NO: 191359 - DNA, 440 bp, Glycine max
agctttagttcactacttcaagtagtgcacgatatgcttccagaggaaaacacgttgcctaaaagttattatcaagcgaagaagatactgtgtccgataggtatggagtatcaaaagattcatgcttgcctgaattattgcatattgtacagacatgaatttgaagaattgtccaaatgccctaggtgtggggtatcacggtacaaagtcaaggatgatgaggatcatagtagtgatgaaaactcaaagaaggccccccccagcaaaggtgttgtggtatctatcgatcgttccaaggattaagcatctttttgctaatggagacgacgctaaagaccttacatggcatgcaaatgggagaaactgcgatggaatggttcatcatctgattgattgctcgtagtgcaagaaaatagaacgtttgtttcggatttcgggaa

SEQ ID NO: 191360 - DNA, 562 bp, Glycine max
tgaagctcaagaaaagcttgaagaagttttggcttttacatgcccaacttccttgagtcgcatttgtattggttgttatcttggttggtgcatcttagtacatttgatatttgtgttgcatcatgcatcatcatggttagtgtgaagaaaagtttctaagttagaaaaatttctttagaggcaaaaactgttttaatcgattacagagttgtcgtaatcagttacaacaagttgtttgaaccttaaagagctaagtctcgtatcggtttaattgattatagtagtattttaatcgattacactgttgtttgagataatgattgatttattcaggagtctctgctttgatcgattaccaagtggatgaattgattacttctttcttgttcaagtgttcaaaagtgaacaagaacactctaatcgattacttaggacatctaatcaattacattgttcttgagttgctttccaaatgttggatgaacactttaattgattacttagataatctaatccattactttgttaaaataatcaactatcttatagatttaattgatta

SEQ ID NO: 191361 - DNA, 463 bp, Glycine max
agcttcgagctctctcgcggttcacgcgcagtgtggaggttccctagccctcgaacgctaggtatcattggtgctttcattgagcacaagttctaacgcatggcggaaggcacgagatcaaaagctttatcatcgaaaaaaatggaggaattattcgcgaaatttgctgcaacagtggaggcgaaaatggagaccttagcggagagactagcacatcttgaagctagtagattcaatccttcgcaagcacagccaaaggtgtcttcgtttccgacatcaggaccactcgcagcgccgcatcggatgaaactggatgtgccaaggtttgacggctccgacgccaccggttggatttttaaaattaggcagtttttcgagtatcacacaactccagatcatgagaggctcaccatcacatcgttctatatggaaggacaagcattagcttggttccaatggatgc

SEQ ID NO: 191362 - DNA, 621 bp, Glycine max
aaatggattttaaacccccaaaattgtaatactaaatatttattacctatacttaatagaaaatacttataacactacaaaataaccattaattggaagaagttgatacaatttacacaagttttatacacaaaagttagtcgtattcaccgactaacaccttttacataacaaaaatatgtttatgctttataatttttttataaaaaaattgcgattaattgcataaataagttttttatctataggaattaaacacaatgccaaaggatttataatactcacatcctgctcaacaaaaatatgtttttgatttataattttttacaaaaaaaaaattgttattaattacataaatatgttgctttatttacaattgatgatataagctaccctttttaatccttcttgaattaattatgatacacgacacaaactatcttaataatgactcattacttttttaatagtaatagaataaaatggtcgataattatttttatttaaatttgtattattaatgacacttagtaccctttatttataatcaattaattgacgtacaaaattaagtaactatgatacaattagttgtattcaataaaaaaattactcttttta

SEQ ID NO: 191363 - DNA, 601 bp, Glycine max
agcttgtgtgttagagaggatttgttcgccttgtggaccaaagagctccaaagggttcttcttgtctaatgaatgtactaggaatgctgatatagtttgcattggtgtttctttttatcataacagttattgttttggtgtttgtgtacttttttccacagtaaaaggatttatattaatattaagtgaaggttatgcttgtcacaagaagtgccagacccaacctcataaatgcatcatggagttccttccaaaacactactactcctttacatatatattgattctacaacattataaggaacagatggtatcaacaatattccatagtaccctaccatgcttcctagtgttcccttggtccttatttctcacctctcccagttgcaaactcgataggcctacctaaattacgccaaacaattttgtgagtcaatacacgatacataaagtgagcaatcaaaccccttttatatttccacaacaccagcaccatgacctgaatatgagttcgtccttaaccatgcctaaactacatctaacacaattgaatttgatgtcattctggtgctttccaatcatctgaatcgatgtcattctg

SEQ ID NO: 191364 - DNA, 430 bp, Glycine max
gtaccactatttctttaacattttgggtttggttctccccttgaaagcattctagtgtgctctgcttgagcacttgaaagtgggcccttctcaactccaccccaataatagggtcatggtgaaagcctttgagattgtgtgccctttctttaaactttgaaccaatgtgcctgtgtacccgcacttttttcatatgatatcgacggttacattcagtggggtctacttgaacagcatgttcaaaaagcttttctagttatacacgaatgtatcacactactttaaagattgtcgcttagaggacctacctactgaccttgatgttgatggattaccactaatgttcaagcacatgaggagctctgcttcccattctataggaaatgtaaccccaactggtttcaggttattaatgaggatctatagaacc

SEQ ID NO: 191365 - DNA, 526 bp, Glycine max
agcttatgtcgcaaacatctacaatagacctcctcaacctcaacagcaaaatcagccacaacaaaacaattatgacctctccagcaacaaatacaatcccgggtggaagaatcatcccaaccttagatggtcgaattcttcacaacagtagttacaacaacaacaaccttattttcaaaatgttgctggcccaagcagaccatacgttgctccaccaatccagcagcaacaacaacaacagccctagaaacaacaaacagtcgaggcccctccgcaaccttcccttgaagaacttgtgaggcaaatgactatgcaaaacatgcagtttcaacaagagactagagcctccatttagagcttaactaatcagatgggacaattggctacacagttaaatcaacaacatgttggatcgagtggcctcagaatattaagaaagggggttgaattaattattcctaaacctttacccaattaaaaattactcttttaaggcttttacttatgttgttaagaaaatatggag

SEQ ID NO: 191366 - DNA, 655 bp, Glycine max
tcacaagcaagtttccatcaagtggtaatcagagcacaagagcttcaagtaggtgctccttaaagctccattgttgtttcttcatttttctccatgtatttcctcacatgtattgtggtaaatgttgttaacatgattctttagaatttacaccgattaaacttgctatataagctagatttgattttctatggttcaaatttcttgttcttattcttgaaccatgaattatgttaagtttaggttcctttgagttttgtattgctatttttttgtggctgaaacctaaactataaaattattaaaaaaacattaaagtagaagaaaacctcaaaaatctagagtgacatgttcacctattgtaattttgtcatagaagttatgtctagacatgaaacttgtcacataagtgtgctgaattttatttttttgtttctttgtctaactcatttgttcataagtgtatgaaattcttttagcctcttagttgatttgagtcaactcttgcatgttaattagtccttaacatgttcatgcaaaattcttagagagtctttgattgtgaaccttttttttgaacttttaggtttccttatgattgtgtttattgcgaatttgagtttttgtgattaaaattgctggctgaaattttgat

SEQ ID NO: 191367 - DNA, 469 bp, Glycine max
agctttcgagaaattcgaatggtcattacttttcacacggatgtctgaatttgggacgtaatatatcgagaggctccaaattgcacaacgaaagtactcgagaaattcgaatggtcataacttttcacgcggatgtcaaaatttgggagataatatatcgagatgctcgaaatggaacagcggaagctctcgagaaattcgaatggtcataactattcacacagacgtccgaatttgcgacataatatatcgagacactcgaaattgaacaacggaagctcaccagaaattcgaatgagccataacttttcacacggatgtctgattcgcggacataactcatctagacgctcgaaaattgaccacggaagctctcgaaaaaattcaatgggcattaacttttcaaaccgatgttccgaattggggggactaattattttgaaaccccccaaaatttgccccacggaaa

SEQ ID NO: 191368 - DNA, 347 bp, Glycine max
tctcgatatattatgtccccgaatcagacatctgtgggaagagttatgaccatttgtatttctcgagagctaccgtagttcaatttcgagtatctcgatatactattttcccaaatcggatatccttgtaataacttatgaccaatcgaatttctcgagagcttgtgttgttaaatttcaagcgtgtcgatatattatgtcctataatcagacatccgagtgaaataatatgactagtcgattttctcgagagcttgctttgtccaatttcgagcgtctcgatatattatgttccaaattcggacatgcgtgtgaaaagatatgaccattctaatttatcgaggagc

SEQ ID NO: 191369 - DNA, 371 bp, Glycine max
agcttataatatatcgatacgctcgaaattaaacatcgaaaactctcggaaaattcaaatagacataactattcacacggatgtccgattcgggcgcataatatgtcgagaggctcgaaattgaacaacggatgctcttgataaattcaactggtataacttttcacaccgatattcgattcgggcacataatatgtcgagaagctcaatattgaacaaccaaagttctttagaaaatcaaatgggcataacttttcacacggatgtccgattcaggcttattatatatcgatacgctcgaaattaagcatcggaactcttccgaaaatcaaaagggcggaaattttcacaccgaaatttccctttggggc

SEQ ID NO: 191370 - DNA, 412 bp, Glycine max
ggccattaagcctatcatatgctgacaatagccgagaagccccagaatctcttcgggggccggaagtaagatgtcctgcccatcgccttggcgcttggctaataatcggggaagttcttgactcccgctcaaggcaagagcaaaccgatccatccacatgggtgcctcttggtgtaaagagtcgaccacccttcctctagcctctttttccgcatatacttgggcatactcatccgcgaatctatgctcgtggagcggggctagacccaactcttcttggtacttggcgatgatagctagcaagtaggtttctgtctcccataacacgctgaaacaagcttgttttggaacctgaacaagcaatcaattcctcttttagaaccatgcctatgtgctcgcgacaggccccttt

SEQ ID NO: 191371 - DNA, 494 bp, Glycine max
agctttggagtttccaagtgccaattcgtcttcttctttagtccagtcttcttctagcttcaatccatcagtgggctttccttctgtgtccagcatcttgggatgttcccagcctttgatgacagctttccaggttctgctatccagtgatttgaggaaggccaccatccttgctttccagtattcatagttggttccatccaggattggtggtctgttcactggtcctccttctttctccatgttcatcagaatttatctccctagatctcactcagtgatttcgagtgcctgctctgataccaattgaaattctgataccaatgacagatgtcgtaccggatgtcacgacatcacgcttcagaacatgcagattatatttgactgtatgaacagattaaacaagtaaataacacaagagaattgtaacccagttcggtgcaacctcacctacatctgggggctacccagccagggaggaaatccactaaaat

SEQ ID NO: 191372 - DNA, 581 bp, Glycine max
ttgagactaagatgaagaatttcacaaaaattatttaaacctatgcacaacaaacccacaacagttttagaaaaatcgtcattgaccaatgagtctcaatgacgatttttcaaaaattgtcatagactagctaatgttaatgagtcccaacgacactttttccaaaactgtcgtagtttcactaatcttaacaatgattcttccaaaaattatcgttaacaacttcacttaattacaaaaatgtcaccacttttttttaaagacaatttttataaccatcatagatttgccgtcctggaatgcatgttttttaataatgaattggaaattaagcgataatatattcattggtgaatatcattaacaatgacaaaagcaactcactagcggtcaataatactagaggataaattatatgtatatgagatagacaaaataatagaatttacatataatattccgtaatattgtccttatttataggagcaaacactatctttacttgaagactatgtgatatctcaacattgatccagagttttatatgaacaatataccacttataaggatgaataaaaagt

SEQ ID NO: 191373 - DNA, 489 bp, Glycine max
agctttgatcttccaccaccgccgccaccatcatcttagatctctatttttatattatttgtactttgattttcagccttgtattttggctatattattatggtatttgaacaatttactatttccctatttgcatggtatgtttgaataaatattaagtatgttatttgactatatgggttttatagataatttatttatgattgttgcttcatgattcttgcttcatggtttggttgttagtttctcaatgaatgttgtatggatgtttagttatgtttgattatttcaaatttgttacgcactttggctttttgttgatgccgaagggggagagaaatgggattaaaatcaagaactcacatgagtaatcaatttaattttaagatatgcacaaattcaaaaacaaagggggagaatttatgtgaatgatcgactaggaaaaagtgtgtgtgtgtttcttgatttcaaaagttgtcatcatcaaaa

SEQ ID NO: 191374 - DNA, 580 bp, Glycine max
cccatcttggtggtgaagctccttcttccatggcttattccctagtggatggcgcctcctctcacctcttttcctttgtcttccgctacatctccatggggtaaaatcaccattgaaggacctcattgaagctcaaagatccagccaccatagaagccccacaagcaagcttccatcaagtggtaatcagagcacaagagcttcaagtaggtactccttaaacctccattaattttttgctttaccttctcttccattgttgtttcttcatttttctccatgtatctcctcacatgtcttgtgataaatgttgttaacatgattctttagattttccaccgattaaacttgctatagaagctagattttattgtctatggttcaaatttcttgttcttgttcttgaaccatgaattgtgttgagtttaggttcctttgagttttgtcttggtattttttgtggctgaaacctaaaccataaaattcttacaaaatattaaagtagaagaaaacctcaaaaatctagagtgacttgttcacctattgaagtttgtcatagaatcatgtctagtcatgaaac

SEQ ID NO: 191375 - DNA, 516 bp, Glycine max
agcttatgatattctttccattttccttccccacattatgttttaaagcacctaataatacatagctaagtatgtttacatcagtgccagttttataaactcttcatcttttcctttatctttagtaaaatgctatcagaaaaatgttttaaattccaggaagttcaatgcttaccatttcatgtgaagattaaatcacttaatcaaaacaataaatgtttcaaatttacgaataaggttggttaggtggttaagaaagaagaaaatgaggaaaatattgtggattggatctctcttgttaacaaaaagctgacaaactaataattaacatttttcgattaaaaaaaaaggttcatacagatttggctatatatgctatatttgggccacaatcttttacttgtgattgtggatgatatcagttagcccctatggtttaatgccttgcaaaatctgctaactgcaggggagatttcaacaacttcatttggttttaggttttggtgataaattctt

SEQ ID NO: 191376 - DNA, 564 bp, Glycine max
  unsure (1)..(564): unsure at all n locations
atcgttcgtgtgtatgatatctactccacaaggtttgaagtaaaggagaccttcaatcctatcacgcaacgtggcggaaaaaagtggacagtaaacttgaatgaccattattgtcaatgcggaaagtattctgtgcttcactattcatgttcacacattattgcagcttatggttacgtgagcatgaactactaccaatatatagatgttgtttacacgaatgagcacatcttaaaagcttactccgcacaatggtggcctctcangaatgaagcgacaattctccttctaatgacgcatggacacttatccctgacccaactacaattctttcgaaaggtcggccaaaatcaacaatgataaggaatgagatggattggctcaaaccgtctgagcaccggcaaaaatgtagtagatgtggagcagaagggtccaacagcagatgatgtccaatgncatctaaccgtgggagttgntcatttaattgatttatgtatgttagacgagtgacttgtattgggtttaatttctattgaatgtatttaagttggggtcctcaatgaa

SEQ ID NO: 191377 - DNA, 505 bp, Glycine max
  unsure (1)..(505): unsure at all n locations
agctttaacaactataaggattaaaaagataacttttaaaatatagggactaaaagaaaattaaaatataaactatagggactaaaaataccactttcaaactatagaaactaaaagatatgaattgcgaaactatagagagcaaataagtaatttaaccttaattaattcataaattttgtataatttagtcctgaagatttaacatcattaaggtctcaaagatgtggtaggctcttgccnttttttttttttttttttttgtcaatcttcatatttttacgataataataaaatgtttctaaatcccaaaatccttattctctagttccatcatcgatccatgtcttaagagcacctaatttttttctttttctataaacacaagttcaggaaccaatatattttttcccctggtaatgtactttttttgtgaaaacgtaactcgctttatgccaaaaaatattttttttttgaaccccctttttggcttggcccccctggc

SEQ ID NO: 191378 - DNA, 552 bp, Glycine max
tgtcagtaagtacactgaagcgcatagtgcaagggaagtgcgtacaacaccatgcatctgtgaggagtcctcaagttcattatttatgctgtgaactgcaaataaagagtgcacacaatgcaaccatcagaccatatatccatgaggcaatcaggaaaatccaaatatctaactgcaatcatgtcatgctcctttgtaactgaaacttttgcaatggttgtccgtttttaatagtacttggccatggggaatcagtttgaaaattctatatcagacttcaagcaaccgagcatatgaagcaaaagatatactgacattcatcatgtggttaacaaagaatgaactataaaatgaataagtgatttgaactcatggtgtacagcaagaaacaaacaaaaataacaaggatattttattttcaaatatgtagctgtcagattgacctcacaaatttttcatgcaaattattaaatagcttatagttatataagtatgatgtgaataaaaactaaaacaaaggaaatggaaattatacaaaggcctaaaaattta

SEQ ID NO: 191379 - DNA, 396 bp, Glycine max
agcttctcttttcatttacgagcgtctcgatatattacgcgactcaatcggacatgcgagtaaaaagttattgccgctcgaaattgctcaaagtttctgttttcaatatcgagcgtttcgatattctacgggacgcattatgacatctgaatcaaaagtgattgccgtctgaatttgctcaacccttctgttttcaattaccagcggctcaattaattatgggactcagtgggacatccagtttaaaaattattgtccatagatttttcatatagcttctgtttttaataacgagcgtctcgctatactactggacacaatccgacatccgagacaaaagtgtttgccagttgaatttcctcacacctcctcttttcatttcgagcgttttcattt

SEQ ID NO: 191380 - DNA, 301 bp, Glycine max
atggcttagtccctaacgcgaggcgcctccacacacctcttctgcatagtctaacgctacatccccatggagtaaaatcaccattgaaagacctcatcgaagctcaaagatccagccaccatataaaccccacaaacaagctaacatcaagtggtaatcagagcacaaaagcttctaatacgtactccctaaacctccactaattttatgctttaccttctcttccaatgacgaaacttcatttttctccatggatctactcacatgtcttgcgaaaaacgactgtaacacgataatttat

SEQ ID NO: 191381 - DNA, 384 bp, Glycine max
agcttggagcgccatccgtagactcagcagaagtcagttgtggaagaaatcagaccatgtgcatgaatcttacacccagtgggttattgataggaccaagagctttggcctaccctaccacttaccaagatacctatcgtccaccatcccaccatcatccttgcctatcccctttgacactaaggaagagtttcatgaacaattaaccaaagaaaggcaagaaaaagaaacttggaagaggagatgccaggagctcgagcgagagaatgagactttgaaggggaagatagcccaacagagccgtgagctttttatccagaaccagaggatgattgagaaggacgacttgcttcgtcggaaagacgccttgctccaccaagatgc

SEQ ID NO: 191382 - DNA, 535 bp, Glycine max
taataaatctatatatggtttaaaacaagcctcctgtcagtggtaccttaagtttcatgggataatttcttcatttgattttgatgaaaaccccatggattaatgcatataccacaaggtaagtgggagtaaaatatgttttcttgttttatatgttgatgatattttacttgacaccaatgatcgaggtttgctacatgaagtgaaacaatttcaatctaagaattttgacatgaaagatatggatgatgcatcttatgtcatcgacattaagattaatagagataaacctcgaggtattttgggtctatcacaggaaacctatattaacaaaactctagagagatttcggatgaaagattgttcacgaagggttgctcccattgtgaagggtgataggtttagtttgaaccagtgcccaaagaatgactttgagagggaacaaatgaaaaacatttcttatgcttcagttgttggaagccttatgtatgctcaagtgttcacaaggcctgacattgcttttgcaattggaatg

SEQ ID NO: 191383 - DNA, 449 bp, Glycine max
agcttgcaatcactaattacctcaacagcaaccacagccaccaccaaacgtgtagacccagtcagtcaaagcccaaaacccactatgaaagtgaaacagaatcaacaatgcaatccaatccatgctcttcaatttgaagaagtgcaacattacattacaaattcaactgtactagcacacggaccaagcttctgaaacccaattccagactcaatcggtaccaatttctcaccatcacaatttcacaaattaaatcatcagttcattacattctccctttttcttcctcctctcctccaacaaagcaccagaatctaaaacaattatccaacatctaaaaacctagttaagttttccaaaccagcaggaagtaaaacaaaaaaccctaattgaatgtcttcttaattgatggacttcttcactcaaaatctaaaggaaaacctaaccct

SEQ ID NO: 191384 - DNA, 463 bp, Glycine max
  unsure (1)..(463): unsure at all n locations
tgtataagcgagtgcaagaatgcaggatagttttgaaaccagtgtctgtgacacgacaaaagccaccaaggcatatgctctccatgtttgcacacttgtcagccattagaagtaatcccagatcattcactcttcggaagtaagtaatttggaactcttggcttcgaaccaatgaaagatgtttcaatctcccaagttgattaatttgttgaagaccagcattggttaggtcaaatgtaattcttggttcaatcagtggtgcatcttgaagatccaaatgggtcaaaagcatgagacctttggatattgtaccaaccatagcatcagttatatagtctacattaagacacagtttctgaatgcttggaagtatggatggttgagcangatttgagggcagctgggatcccaaatttgggctaagcagttcagtcactgtcactgaagaaatgtagccaatctc

SEQ ID NO: 191385 - DNA, 543 bp, Glycine max
agcttcactccaacccccatttttatatttttcgtgtagggggtgctcgcccaagcgagctaaccctgtgcatttttttttacaataattctttgcaaaatcgtgtttaacctctgggttggtgcttatttttattctaagtctacgagtaagaataaactaggaatattcaactatgactttagaaaaatagatgaataaacaacaagcagaaactttaaaggatactaggctgcctcccagtagcgcttctttaacgtcttgaaccggacgtgggataatgatctgctgaccacaagcctagcatctgctcgtacccatccctaagtatctgaaagcaggaaatggcaccacacaataaaacatgactacactaccacttaccttggtttctctttgtcttacatttggcacagtattgaccatcgctaaaaaaaaattatttcctgtcctttaattcacatgataaaaatatgcaagtgtatgcatatgcatgagcagtttaatcgcaataaccttaaacaaaagtctatcatgctcaat

SEQ ID NO: 191386 - DNA, 598 bp, Glycine max
  unsure (1)..(598): unsure at all n locations
ttcataagtgaaatcaagtgcaaccatctcccttagagtcctctcacgaggtggaggttgagccatgttctcagtatgaaaattagtaattgaatattcagaatcaccaacaacagaatactcacaatgctcaaaatgctcacaatgcatagaatgatcaggatgcacactatgcctaactaatctatgaaaggttctatctatttcaggatcaaagggttgtaaatcacctggattgcccctagtcatgcaccatatgcagcaaataatgtgttctcaaacaagcacctaacaagggggtaaaactacaactatagtcaaaagatatccaagtaagttgaaattttgtgagcaacaccctaaaataatgaaaagatagcacaaaaaatttcaaacaaaaattaaaagtaaaactatgaaaactacctaagcaaagtttagaaaaataagacaataatacttaaaaaataaaaaaagaacttagtaaatgactgatttttcgagtttgggagaccccaaccagctaaagcgggttgccccaatatgggcaacttnttttctacctcaaatgcatatataataatagtcattctgatac

SEQ ID NO: 191387 - DNA, 530 bp, Glycine max
agctttgcggatttggtcttcgccgggaaaaggatcgattcgggtctgaaatgaggcaaatttaatcatcctacttggaggaatgaaaaaattggggcaaatgaagagggtgagagtgaaagggaaacccatgttgcgactgccgtttctatacagccaagtttcccaccaacccaataatgtcattactcagccaataacaacccttctccttacccaccacccaattatccacaaaggtcatccctaaatcaaccacaaaacccaccttccacacaaccgatgctaaacaccacctttagcacgaaccaaaacaccaaccaaggaaggaattttgcagcaaaaagcctgtagaattcaccccaattctggtgtcctatgctaacttgcttgatactgcaatggtagccataacctctgctgggtttcctcaacctccattttttccaggatacgacttcaacacaatgtgtgcttattatggaggagcccccgggcattccattgagcattgtatgaccctgaaacgt

SEQ ID NO: 191388 - DNA, 543 bp, Glycine max
  unsure (1)..(543): unsure at all n locations
taggctaaactttcataagctatttaagctaagtctagtccaacaagaatgatttgaggatgaagcttagtttaagttagtctaaacctaggagggctgtctatattgagcctagtccaacaatagggatctgaggaagaagcttggattgattcattccaattggggatcgaggtttagtaatttaggctacaacatagaacacaaaagcatgattgattagagaaacatccttatatgcatcagctggtctgctagaaagacccaacacttctacctattgctatcaattttacttacttacatttttactgtttttatcctagacatagtttaattctactttaaaccatcaattatcaatgtttctttcaacaatgccttatttctgaatttaacccagtcttagactagtttcattgagttcgatactcagattcatccattttaatttttaaatacttgacgatccggtgcgctttctggaaaatcgggttttccttgaatatanttgtacgaagaaaaagtggaacaaaaagtaac

SEQ ID NO: 191389 - DNA, 411 bp, Glycine max
agcttcttatccaagggtcatcttggtggtgaagctccttcttccatggcttattccttaatggatggcgcctcctctcacctcttctcctttgtcttccgctgcatcttcatggtggaaaatcaccattaaaggacctcattgaagctcaaagatccagcctccatagaagctccacaagaaaacttccatcaccattgctcctctattcctttgggttttagctactatcccatactttcatctaccttgtccttggccccattacaaccttaaaagaccttttgatcctcatgtgcatgtgcttgtgatgtggttgtcaattttagagtcttgcccagtgtatgtggggtttggtttcatgggtgcccttagaataaacaattgcctaaacactttgaaaaaagagtg

SEQ ID NO: 191390 - DNA, 251 bp, Glycine max
aaccgaattcaaaaatgccaaaatgatgaacctaaggctggcaactcctaaattcccctaatattgcttttgaaatggggggggggaaaaatggacactaaactttaatgaccattattgtcaatgcggaaagtattctgtgctttactattcatgttcacacattattgccgcttatggttacgtgagcctgaactactaccaatatataaatgttgtttaccccaatgagcacatcttaaaagcttact

SEQ ID NO: 191391 - DNA, 381 bp, Glycine max
agcttatggtgtacttacaagagagataatgtcttgacctagtttgtttggtagttaagtcataataggatagaatataagaaaaaagataagaacatgatattaaaaaaaaggataattgatcaatgcacacaagaacattatcatgttattcaatcttgtatttgatataaactagataatcatagatggtgatagtggtggcgatgacgacgatagtgataatggttgcgttagcaataaagtggtgatagttactatgccaatggtgatggtgatagtagtgaaagggtggtagtagcaatggtgggtgatagtggcgttctagctaaaagcaagcccagggtggtaatcctactccaaaattcggtacactccaaa

SEQ ID NO: 191392 - DNA, 439 bp, Glycine max
tggaatgatctgcaaaagctaaacccttcttgctggacaatgtctgcttttaaagtaaacacaaagtgtgatttgcaagtaaataacatgtataaagcattcaataatgtaataatgtagtacagacataagccaattattacactattggagggaattcaattttacataagttctagaattgtgaagttgaggactaccttgatgaagtatgaggggtcaatctgtcctaaaattaagcaaatcatggaaaagaataaaaaagcatgtgaaccatggcgggcacattggtgtggtgatgataatctgtttttgtttgaagtgtcaaaaggcatggaaaaatatgttgtcaatcttaaacaataaacatgttcttgtacaaagtgggagtgtactggaattccatgcactcattccataacatgcatgtggatcaatg

SEQ ID NO: 191393 - DNA, 395 bp, Glycine max
agctttggaaagacttcttagttcttttcagtcttgctttggtcattgggcctttcatccattgcaaaagatatttgaagtcattggactcttgttggatcatatcaacaagactttggacatttttcatgagattttcttttggcctaaaatgaaacatgatgttaataaatattatgccaaatgcattgtatatcataaagctaagtctaaggtcttaaaccatgaattgtatacccctttgcctattcccacctctccttgaactaacatatccatggattttgctcttggtcttccaaggtccaagagaggtaaaaattctatttttgttatggttgataggttctcaatgatggttcactttattccttgccataaaggggatgatattt

SEQ ID NO: 191394 - DNA, 476 bp, Glycine max
tctttgagaaaactgccttgagaagctagagcttatctacatacacctctctaatagctaagcgcacctgcttgagatgagaagctagagcttagctacacaccccctataatagctaagctcacccccattccaaaaatacatgaaaatacagaaaaaagtccctactacaaagacttctcaaaatgccctgaaatacaaggctaaaaccctatactactagaatggccagaatacaaggcccaaaagaaggaagaaccaattctaatatctacaaagaagagaggacccaaccttggtccatgggctcaaaaatctaccctggggttcatgagaacccgaaggccttctttagcagttctagcccaatcctcttggagtcttgtatccaatacccttagggggtaggattgcatcacttaccacctatttaccaaaactaaccgcagactgtaagttctaccaacaagttacat

SEQ ID NO: 191395 - DNA, 437 bp, Glycine max
agctttccctctttgaacaaatacccctcagccaaatagaatccatcttgggcctttttcccacaactctcataaatgggagagaaatgttcatctaaagcatacaagtccctaatattatcaaatcctaaaatttgagctcctagggagcaaaacaatgtctgtctcctagagagggcatcagctaccacatttgtttttccctttttgtatttgataacatatggaaattgctctaggtactctacccattttgcatgcctcttgtttaacttgctttgccctctaatgtacttaagtgattgatgatcactatgaatgacaaattccttggaaacaaggtaatgttcccaagtttggagggctcttattaaggcataaagctctttatcataggtggggtagttgagggtggcactatgaaatttttactaaaa

SEQ ID NO: 191396 - DNA, 238 bp, Glycine max
ttcgagaaattcaaatgggcaaaacttttcacactgtagtcctattcatgcgcataatatatcgaaacgctcgaaattgaacatcggaagctctcgataaattcacatggtcataactcttaactcggatgtctgatcttggcgcataatatatcgagacgctcgacattgaacatcagaagctctcattggtcatatacggtcactcgggggtgataaaaaagcgcattatatacct

SEQ ID NO: 191397 - DNA, 378 bp, Glycine max
agcttatctgatttccttttgcaaaaacggaaggaaataaagacacaaccaagggaagtatagttattatcataacaataatgctaaattaggaacaaaacacccatttaaatgtaaacatcatgagtcaatataataaaaacaagtatcaatagcaaaatgaagcattatatggctacctttagaaacactgtaatggcatgactggtgagaaagtgcttctacagtgacaatagcggcaataatgaatcaagcaactcttgtaggatccaattgctaggtatgagacttgggtcctacattgaaagcatgggattctggtctagtgtttataataaggccaattacaaaactaacttgtaatgtgattctgaagat

SEQ ID NO: 191398 - DNA, 511 bp, Glycine max
tgtaggattatggggtacccatcgcatgtggtactatgtggcggtcgggcgatggtgcacaacaaattttccacatcccataaatcgcgcataaacccaccatcccctgttgcccacctccaactgagctcacgtactcccacgtagcccatatcctcgtttctctcaacatcgggtccccatcaatcctcccaagcttccccaacatccaagtaattcaacattcaaacagcacaaactatcacagccaagaaaacagggcaaaggcagaaaactctgcccaaaacaccaacaaaaatcacagctttttctcacttaaagaccccagtaacatttcctttgttccaattcgttaaccgttggatcgactcgaaacttttactggaagtctctagtacataaaatctacattttgaccgttgggatctactaacaaacatccagaactcattctgaattactctttccacaaccagcaaatacatagaatttttctgcacttatgcaaaat

SEQ ID NO: 191399 - DNA, 461 bp, Glycine max
  unsure (1)..(461): unsure at all n locations
agcttcataacctgtcttggcacctctggaggatttgcacaacggatcagtgcccagttaacattctgaaagaatggatgctgttttatctctgtcgcaccacgtctataggcaagacgatgctgaggctctttcacaagcaagcccctgatcaagtccctggcagcaaagctgacactaggagattctggaaaccgtagaggctgcccaattacgttaaacagtgttgcacgattcactgaacctttgaatggtgttctgccaaacaaaagctcatacaagaatatcccaaatgtccaccagtccacggcacttccgtgcccttcacccttgatgatctccggcgccaagtactcgtgtgtccccacaaaggacattgatctggcatttgttggctcancaattagctcaggaagaggggtcacttggtgatgcatgtcattctttggtttgaacttttt

SEQ ID NO: 191400 - DNA, 505 bp, Glycine max
tgttatgtatttcgtgctggaaaggtctctacgagtgcctagatgaagtttctgtggactcatctggttacatatcccatattgaaaggtgtatggaggttctatttactctattgccagtggttcaatcttctggaagtgtatcatctgcggatgtaagttctgtagaggaatggtctgaagctgtaagatgcttacggaaggctccgcagatttggctattggattttcttaaggtatggtatgcatacacattacactacatgatatattttactgtatctcttcttcatcatcatcaataacaacaacaacaacaatcatcttttactatacgtgatcatttctgttgtttggtaccttcattatgttgattttttgttgtttactttaagctaatcctccttggcgttgattcaaattgattgaggtcaagcttgtttattagatacaaattgtctgtttaaaccctgtgcgtgaccaaagcttgccgttgtaatcacac

SEQ ID NO: 191401 - DNA, 461 bp, Glycine max
agcttttatgtgaaaggatgtgactcttcacatttgaatttgaatttcaacgttcaaaggcactggtaatcgattaccaaaacattgcaatcgattacaactttttgaaattaattggaacgttgtaaattcaatttgaaaactttttcaaaacaattttgctactggtaatcgattaccagagagtaaaaactctttggtaaacatgttttgagaaaaatccatgtgctactcagtttttgaaaaatccttttcatacttatgttgattaagtcttctcttgattcttgaatcttgatcttgattcttgaagcttgatccttgaatcttgattcttgaattcatccttcttcttgaatcttgaagtgttcttcaacttttccttttgagtcttgaatttgttcttgatgccttcttgtcataccctaatttcgtccggggattattatttaatgatatac

SEQ ID NO: 191402 - DNA, 335 bp, Glycine max
  unsure (1)..(335): unsure at all n locations
tgccgcccagctcgcccaggcgagctccgctcgtcccggcgagctaaggttgcttcctccanaaacaataaccttctggaagaatcttcttggaggcccaagagggcctggttgctatttgcacccccatttttgctaagtacacccccctgcctttttttggtgatacttttttcgtaaagctacgaaaacttacgaatttcgcaacgatacttgaattctttccgtaaagttaccgaaacttggggattacataattatcccctttttgacttacaggatcgtacagaacctcactaattgggcaacgacgcttccgtttaatatacaccgtg

SEQ ID NO: 191403 - DNA, 516 bp, Glycine max
  unsure (1)..(516): unsure at all n locations
agctttcaactgaatttacaatgttccaattaatttcaaaatggtgtaatcaattacaagatattggtaatcaattaccaatgtgtttgaacgttgaaattcaaattcaattgtgaagagtcacatcctttcagaaaaatgctttgtgtaatcgattacaaggatttggtaatcgattaccagtgacaagttttgaacaaaaatcaaaagatgtaactcttccaatggttttcagatttttctaaaggttataactcctttaatggttttcttgaccagagttgaagagtctataaaagcaagaccatgatttgcatttaaaaaaaaaaaaaccttacaacacttacaacctttacaaacaatttttcacatattcttttacaacctttgaatctctntgaacttcttcttcttcttcttcttcttcctttgcaaaaaagcttttcaaaagtttcttgtttttccaaaccttgaaaacaaaagtgtgtaattcatctttttctttctcttctccct

SEQ ID NO: 191404 - DNA, 541 bp, Glycine max
tcttgaacgtgatcaatatattcattggtacagaataaaggatgaagacgtggttcatgatagacaacacctagaaaataaaccggtacagacttccactgctcgattttgtttgggtgacaccgactgggatgacattctctaccggttttgcatatgtggagggtgaacacgttaataatttggtttgggctttacaacgcttctgaggcctttttttaaagcgtgatgccctccctggagttatttccactaacagagaccaaacattgatgaatgcagtgaagactgtattccctgtctgtacaaatttgttgtgcagctttcacataaacaagaatgtgaaggccaaacgtaaatcattaatttcgcaaaaaaatgcttgggattatgtcatggattgttggggatgtctgactgattgtccttcaaaacaacagtttgatgaatgcctgaagaagtcaaaatggcttgcgcaccttggccaatgttggtgactatggtaagaaacatggatatatcacacaagaaaatttttttt

SEQ ID NO: 191405 - DNA, 483 bp, Glycine max
agcttgtagaatggctagacatgatacatgtcagggtttggtttgcttcaaggataaaagggatgccccacattatttccatgacacaaatgcaaaaatgatgatttggaaactttatgcaaaactggtcatgcatgtacctatgcggacactcaagtgtcaaatttttatggtcatgtgatgctagggctcaggattcatttcctctattttaaatcaacccaatgtttccaaaatatgttcttttatcaatttgtgcgttcatccgagtccatttcgggcgtccggaaaaatttcacagcattcacctttcaggtgtagacacatttttcaaaaattggttatgatcagtgaaatttttcaaagaaaaagttggaaatcatctcttttcataagcatgtcggtttttcagctagacaacttatttttctttttccaatctttttcttactttgcttttttttccttattcgctctcttttt

SEQ ID NO: 191406 - DNA, 621 bp, Glycine max
  unsure (1)..(621): unsure at all n locations
tgcctcgaagaggtccaggaaggacaaggcagccgaaggaactaattccgctccggagtatgatagtcaccgctttaagagtgctgtacaccaacagcgcttcgaggccatcaaaggatggtcgtttctccgggagcgacgcgtccagctcagggacgacgagtatactgatttccaggaggaaatagggcgccggcggtgggcatcactggttactcccatggccaagtttgatccagaaatagtccttgagttttatgccaatgcttggccaacagaggagggcgtgcgtgacatgagatcctgggtaaggggtcagtggatcccgtttgatgccgacgctatcggccaactcctangatatccgttggtgttggaagagggccccgaatgtgagtatggccagaagaagaacccgtctgaccggttccatgaggaagccatcgccccacttctatgtttaccgagacaagattttcccggactgctgcagggaggcgagtgcaaatcattcccaccaacataaccaccctgacccaatattgatgaccttgcttcttagctaactcctgcccaccaatcataatttccaccttcccctgccgaattgccacatttttt

SEQ ID NO: 191407 - DNA, 527 bp, Glycine max
agcttgacattaagaaaagataaacatcttatatgtctgagtataatcataaacaaaaatattaattttggataaagaaaaaatacttagtaaattttacttgtcttaaaaaaatagcattatctaatttttatgttcacgtttcattatactttctttcttctctttattttatttcattttttacaagtaaatgtctattaaatagttaataaactttaaaatacttcaaaaatatatttgataaattagaataatcaagttataaatgagtaacaagctaaatttaaaactttttatttgtataacttcgtttatttaaattaattgaacttcaacataatatcttacaagtgaaacttgaatattaaatactcaaccatgttcaaaacatttacgccatagatgcagtcactcaaattaattagcactagatcgtttgaatttaaccgatagttttgagccaatattgattatatttgattgaacataactatatatgtgatagaactggagcaggcaaaatg

SEQ ID NO: 191408 - DNA, 333 bp, Glycine max
cttttgagctcattcctttacttgcacataagaaagcaagtgtccttaagtgcccaaactcttctaacatctgctccaattcctcctgaaaaagagatgtatttcacaccgtcatttttcatgcaacccccaggtaattaccattatgtcatgcaaccaaaattttctttaaagagcaccatggatttaaaaaagggaatttttttcattttcctgtatatgcttgtgcttgacattcaaagaaagttacgttttggtttttcatgtttattttgctgctgaagctattctttttctcagaacttcaaatattatcatttcacgaaaaagaaa

SEQ ID NO: 191409 - DNA, 560 bp, Glycine max
agcttgtaggattatggggtacccatcacatgtggtactatgtggcggtcgggcgatggtgcacaacaagtttttgcacatccacaatgcgcgcataaacccaccatcccctgttgcccacctccaactgagctcgcgtactcccacgtagcccatatcctcgtttctctcaacaccgggtccccatcaatcctctcaagcttccacaacatccaagcaaaacaacattcaaacagcacaagctatcacagccaagcaaaacagagcaaaggcagaaaactctgctcaacacatcaaccaaaatcacagtttttctcacgtaaagaccacagtaacaattctttcgatccaattcgttaaccgttggatcgactccaaaattttactggaagtctatagtgtataagcctgcattttgaccgttgggatatcctagcaaacattcaaaactcattctgcactagacttttcacagccaaccacgcacaaccttttttctgcccttgtgcaaaattttgctgccaaattcacaagaaaaattttgctaaatgcagatttca

SEQ ID NO: 191410 - DNA, 503 bp, Glycine max
ttactatgcaaggaataaccaaggaaaattccttcatttgacttagcatcaaactttcctaagttttcttttccattgtttaatacaaaacatttgcaaccaaaaacatgaagatgcgagatgtttggtttcctgccattgaacagttcatatggagttttctttaaaatgggtcttattaaatccctattcatgatatagcatgcagtattaacggcttcagtccaaaaatattttggaagaagagtgtcatttaataaggttctaacaatttcttccaaagacctatttctcctttcaacaactccattttgttgaggagttctacgtgcagaaaagttatgttcaatgccatgcttaccacaaaataattcaaattctttttttcaaattcacccccataatcactcctaatagatataattttgagatttttattgtcttgaatgatttatgctagtttcctaaatacttgaaatgcatcattcttatgagtgataaat

SEQ ID NO: 191411 - DNA, 185 bp, Glycine max
gagcttctcccccaatgttttatatatcgggggttatattttattctaaaagggctcagcccctgatgcgcttctctctctttcgaggttgctctatgaagattgcttccctgaagaaaatccaagcccaggcgcttcccgtacgcttctgtgagtgatttcgcgaaggttttcgaccgagtgtt

SEQ ID NO: 191412 - DNA, 169 bp, Glycine max
tatccgtgacgaaattgaatttctttttcttaattgtctagggtctactcacatgctccatttggggttctgtggggtcctataaaccatgcgccagaacgataagtctaatgaacaccaatgccaaaaataggccattgttgtttattaatctcaaacatttgtctat

SEQ ID NO: 191413 - DNA, 478 bp, Glycine max
  unsure (1)..(478): unsure at all n locations
agcttgttcacacatcgttcgcgtgtatgatatccactcgacaaggtttgaagtataggagaccttcaatcctataacgcaacgtggcagacaaaagtgggcagttaacttgaatggccattattgccaatgcggaaagtattttgcgcttcactatccatgttcacacattattgcaacttgtggttacatgagcatgaactaataccaatatatagatgttgtttacacaaatgagcacatcttaaaagcttactccgcacaatggtggcctcttgggaatgaagcggcaattcctccttctgatgacgcatggacacttatccctaacccaactaaaattcatgcgaaaggtcggccaaaatcaacaaggataaggaatgagatggattggctcaaaccatctgagcaccaacaaaaatgtagtatatgtggaatagaaaggcacaancaacgtcgatggtcaatgctatctgat

SEQ ID NO: 191414 - DNA, 511 bp, Glycine max
tgagggaaaacttgatgccttggtcaacctaataactcagcttggcatgaatcataaatttgcacctgttacaagagtctgtggtatatgttcttctgcagatcaccatacagatctttgtgcttctttgcagtgatctggagtcaatgaacaacctgaagcttatgctgcctacatttataatagaccccctcacagcaaaaccaacattagcgaactaattatgatcttccaagctacagatacaatccacgttggagaaatcattcaaatatgagatgggcaagtgcttcacaacaacaacagtctgtccctcctttccagaatgttgctggtccaagcaaaccatatgttcctcctccaatacagcagcaacaacgacaacagtcacaacgaagacgacaagcaactgagacttctccttaaccttccttagaagagttagtgaggcatatgaccatccagaatatgcaatttcagcatgagacaagagccttcattcagagtctga

SEQ ID NO: 191415 - DNA, 466 bp, Glycine max
aaagcaattcttgtgtttgagaaattattatactaattcagccttccgtccgttaattattccctattcagggggttcaatctggcgttaaatgccaatattaactgctttaaaataattacaaccttgcccgccaatattcggttactcgaagtaattattatttaccgtgcggaattgacgcgctctttaaggcgtgatgatccttttggttgacctacctctattttgtcgactatgtgatattatcacgacttccgcaatacgtgcttaaaaatttggcctattgtccctattcacaaaaaattggggcaccatgtttcgatctgtgctccgtaaacttatttcttcactccttaattcgctagacattcttttcgttataattgtctttgcgaatattagtactaattttcttttctatcctgccttttcattggttatttactacgtcagacatcttacc

SEQ ID NO: 191416 - DNA, 561 bp, Glycine max
ggtgcgagcttgtaaagatccttgcagctgatttatcatcattttttctaagactttggtttcctcgattggcacaaccatgtgcttgaatttgggatctatcgagtgtagagtcttctccataattcttacatcttctaacttctcaccatttatttttagtttatttgaaacagcgagaattcctgaaaaataatcggaaatggacgctgactctttcatatgtaaggattcgaactcacctcttatagtttggagatgcaccttctttactttgtcttctcctttgtgagaggtttgaagcttatcccatgcctccttagcagatgttgcataagaaatcttctcgaatgcatcattctttaatgcttgatacatgaagaagagagctttattgtctcctctttttgagtcccttaatggctccttttgtacttgggataatgaaagcccatcttgggactccttttagcatttttcaacctttccccaacattatgtgcttcaagaaaggcccttcttttgatgctccatttgcaatagggcctccccttttgaagt

SEQ ID NO: 191417 - DNA, 570 bp, Glycine max
tcagctgcagcaattaccctgccagaaataaggtttcccccactattctgtgtattattctccaaagaaaggtctttccagaagccggatgaataatttctagctaggatgcgccaaatatgcacagcttttgagctcattcctttacttgcacataagaaggcaagtgtccttaggtgcccagactcttctaacatctgctccaattcctcctgaaaaagagatgtatttcacacggtcatttttcaggcaacccccaggtaattaccattatgtcatgcaaccaaagttttctttaaggagcagcatggatttaaaaaagggaatttttttcattttcctgtatatgcttgtgcttgacattcaaagaaggttaggttttgggttttcatgtttattttgctgctgaggctattctctttctgcagagcttcaatatgatcatatcaggaaaaggaaaaaagtatttctcaaatctacatagaaataatgggtataattcaattcacgacatatttattttacagtattaattatgaaaaatgtattgaaattacttcattcaataac

SEQ ID NO: 191418 - DNA, 662 bp, Glycine max
agctttaggcaatatacattaagcaaaactatttgcacatttttatataaagctgcttgtggcgtcaaagcctcaaatgcattaacacttggcaaagtaagcacgacttacctcaatcaaaattagaccctgtgagcacgaatgagcaccctaaacggactgcaaagtgaaatgtacctagataaggtccttgcagaagaaacaaacaaagagtctttatagtgagcataagttcgtacctaggtatttagaagaaagactcatgaaacatacctaggtagggtggcaagctgtcacggtctcgagtgcgatgaagaagaagaagcttagacagaaaagaagagagcttagatggagatcgaagaagagagcacgagcaaaatagggctcgcgcctgatatattttaaaatgtaagtccaacattggttttcaataaaaaaaaaacgatgttaacaaaatgatgttagagtaaacatcggttttttggatgaaaccaatgttaacttatcatacgttaaacatcggttttcaacccaccttctctataaatttcctcagttccccaaaataacaaaaacccccacaacaaaacaaccaaacaaccccccctaacttaaaaaaaaccaaccaagaaagaaaacccttgaaggagaggaaaaaa

SEQ ID NO: 191419 - DNA, 546 bp, Glycine max
ttttcctcttgacttcatctccttatttcatttttttaaaacaaatttagccaaaataaccactacagacacattaccaaaaagctggcagcaaaatcaatgacgaaaaaagaagctgagacacagtgccagttgctgcttatcaatcccaaatttttttcaatttaacttataaaataattattataaaaattaatagatttttttatatatgataatttttttattaaataacaataacaatataattggtataaatattattcatttattaaattttagttggagagaataaaagtatcataagtttgtaagtcattcacattcattataaaaatatatataaatataaaaaataatataatttactaataaatccaaagatttccttttaatccaaacccaaagactaaatgtatataaatttatatgcaaactcattcaaaagattgatttttgttaaagtttttatcattaataatcataaaaaaatttagcataacttataaataattttacaattaaaataattttaaaaaatatata

SEQ ID NO: 191420 - DNA, 504 bp, Glycine max
agcttgttaaagaacttcgaaaaaatcaagaacaagcttgttcgcacatcgttcgcgtgtatgacatccactccacaaggtttgaagttgaggagaccttcaatcctattacacaacgtggccgacaaaagtgggcagttaacttgaatggtcattattgtcaatgcagaaggtattctgcgcttcactatccatgttcacatattattgcagcttgtggttacgtgagcctgaactactaccaatatatagatgttgtttatacaaatgagcacatcgtaaaagcttactccgcacaatggtggcctcttgggaatgaagcgactattcctccttctaatgacgcatggacacttatccctgacccaacagcaattcgtgcgaaaggtcggcctaaatcaacaaggataaggaatgagatggattgtgtcgaaccccttgagcaccgacaaaaatgcagtagatgtggagccgaagcgcataacaggcgtcgatgtccaatgc

SEQ ID NO: 191421 - DNA, 358 bp, Glycine max
tgcctgtccgatgcagtagtaatgatggcccgagttatgttggggaacggttacgaacccggaatgggtttagggaaagacaacggcggcatgactaacctgataaatgccaaaggaaatcgtgggaagtatggtttaggctataaacccactcaggcggatataaagagaagcatcgtgggaagaaagagcggtggtcaaagctcgcggttgaggcaagaaagtgaaggaagcccgccctgccacataagtagaagctttataagcgcgggtctgggagacgaaggtcaaatggtcgcgatataccaaaatgatgttccgagtacattggatttggtacgaccatgccctcctgatt

SEQ ID NO: 191422 - DNA, 538 bp, Glycine max
agcttgtagaattatggggtacccatcacatgtggtactaggtggcggtcgggcgatggtgcacaacaagctttccacatccacaatgcgcgcataaacccaccatcccctgttgcccacctccaactgagctcacgtactcccacgtagcccatatcctcgtttctctcaacaccgggtccccatcaatcctctcaagcttccacaacatccaagcaaaacaacattcaaacagcacaagctatcacagccaagcaaaacagagccaaggcagaaaactctgctcaacacatcaaccaaaatcacagcttttctcacgtaaagaccacagtaacaattccttcgatccaattcggtaaccgttggatcgactccaaaattttactggaagtctatagtgtataaacctgcattttgaaccgtgggatatactaccaaacattcagaactcattctgcactagactttccacagccaaccacacacaagccattttctgcacttgtgcaaaattctgctgcacaaattcacagcaaaa

SEQ ID NO: 191423 - DNA, 343 bp, Glycine max
tgtcacagttctgccatcattggtggtgacttgaaaagaggggattgtccattgaggtatgagtttttatgatttactggtgtgtttataaattactgcattttgttgtttttatgatttttcacttcctactacttttgggtttgatgttgtgataactatcttaaggattacattacagctaagagtggatttgattgctgatcaaacacaaaaggtatttgataggatcctaacaaagttaggttgtactgtcccaccagttcctagattttgcatgcaaaaaggaggtaagaagctgcattttttataccatgcactttcataccttacgtgtgtatgg

SEQ ID NO: 191424 - DNA, 152 bp, Glycine max
agcttgctctaaatttacactgatgattgttttttttggaggaggtcatatgccctttttggtataaaataatgtcccactgggttaaactaaactttccaaatatttgccttcacacgaattgctcccaagaagcttgcctcaaaaatgtc

SEQ ID NO: 191425 - DNA, 792 bp, Glycine max
  unsure (1)..(792): unsure at all n locations
tggctgacccaatgaaccctggacaccgcggnnaattnagaggcgcgttattgttccgccccaattgaagttctccaggagtaatttggcactattcaacccccaaagggctctctggggccttttgaaccatttgtaaattagtatgccccaaatttacccccctggtgaaacctattacccatttgaacatttgtaagcattccgtgcttaagtgccaaaatctctttatatgtggtcccttatttgagcttccagagagaatttttaaccgttttttttcgcaaaccctccgtagttcaccattttggcatgccaccaaaattttccttcaagagcagcatggatttgaaaagaggaaaatcttttaatttcctgaaaggcttgtgcgtgaaattcaagaacgctaagttttggtttccacgtttattttgccgcggaaggttttatgtctctgcagagctttcaaaagatcctatcaagaaaaagcaaaagccttttctcaaattctcataaaaataatgggtgtaatttaatttacgacatatttattttccggagtaattttagaaatgtattggaataccttaattccataacccaatacatcactggttgaaatatttggcagtcactgttcatttggttaaagactttctcttatcagaataaacattccgtattttgcttggacaaataatctccacttcagctacaaggaacctatacattatcatgttagcactatcttgaaagcgtttaaaccgaccatctaatcgataatttcactcg

SEQ ID NO: 191426 - DNA, 544 bp, Glycine max
  unsure (1)..(544): unsure at all n locations
agctttaaagcacaacaacacagaatctaggtgtccaacacccctccattcaatggcttttctaggtttgaaaggtgaaatttagaatgaagtaaatttgaggcaaactctcacctcacaccagtccataacgtcaatctaaacatgcccaaactggatttacacctaaaattccaccaaatcaaaatttgactcttcaacacccaattttgccctagaaatggctcttggttcactttggtcatttgtttttctctctagctcagcctaacctttctcacatgtcctaaatgacatttcaagctaagattaactcactttaacctccatttaccacagaattcagacttagccttccaactctcaaagtctcactctttttccactcataacatcacattctcactttctaaccttaagttaattctacccttcgtctctaacagatttccatcagcaatttcagcatataaacatcacanacatcatcacaaaaaccctaaacagaatgggatgttaaactcatccaacatgcaatttcaac

SEQ ID NO: 191427 - DNA, 433 bp, Glycine max
tgcacaaaaagtaactaaatatttttttttacaaaatgaagtaactaactaactaaattccactaataatatagagtgaatactctaaaggaagggataggccttgattaagcccatctaatcttcctaattaaactaattacacaaaacaaagcccaaactcacaacccaattattcaagtgactgaattggccaagcttaatttgaccctggaaattgctgaattggccaaagcttatttgtaaaaaaattgaatatatttttgttagacttccaaggacaactcacatgctccatttggagatctgtagtatcctctagaccctgcactacgcagataggtcaagtaagaacaaaatccaaaaattagctacaattcttaattaagctcaatcatttgcctaagaccaaaactgagttaaggtgaaaaat

SEQ ID NO: 191428 - DNA, 372 bp, Glycine max
accgaaggagagatacaggcggcttctacctttttctttcttgacaccattacattgaagcgcatatccacttgcaaattcaaggtatcaaacctctcaccagcaaaggttggaagaccatcaaacctttccataatctttgaatgaatagatgaatcttctccttcatgtccttctataccaacatttctagcaccctttcttacccaagagccatcatgctcctttatgtaacccaatgatgctatgactaaagcacctataatgaattgtagatgcaatcgcctttggtgttttgatgatgaccataatgatattatgcaattgacgcaaatgggcttttcaagactaaattcaacacaatacttcatg

SEQ ID NO: 191429 - DNA, 400 bp, Glycine max
agcctcttaagatgcctgtgggtgatgttattagatgtctagttaaaatccactatctcattagatacatcgacattgaagtagtcaatgaatcttgaggcacgcacgacatacggaaattatgtactccactaaccgacgtttctataacataatgtcttcaatcaaaagtaccaaattcatcttgatacctaatttcagactgtataccatctgcagatcactgttagttacctgagcatgattacttgaccttaaatgaaaatgtaggtaatgaggtacacaagcattctgtcctttactgtcagaccacctactccaaggagattcctcaaattccttgatgggtcaagaagcattccctataggtctgcatcttgttgacccatcactatttgtt

SEQ ID NO: 191430 - DNA, 422 bp, Glycine max
agcttatatggaaactaaagataagaaattctttactttaagtaatactttgcctctattactaagaagtcactaaaccatgcataacacaatataaaaatgttccacagctgcttattaaatgatttaaaaaatactatataaaaaggcgaatgcactacagccaacatatgttgtataataacacacagttgatctcacttcaagtctgtagttcagttttgatagacctgaactatcaattaaagttgctcaaaatcatacaataaagaaccaaaaattagagagcaagacacaaaaaattcataaactagttttgtacaactttgatatcatagaaaaagaagagataaaagcctacgttctatcgtaggatatgatatgttccaacctagcattgatctaaatatctgtaagcatgc

SEQ ID NO: 191431 - DNA, 359 bp, Glycine max
  unsure (1)..(359): unsure at all n locations
ctcctgatcttgacttcatagaacctttttttaagccaaggcgtctgactcaatcccatgttatagccacancccaatgctcaaccgcttctatttcaggattagctctttatcctaggtcaaatggatgaatgcctgaataaatgcttcccgcacagatgcattttaccgataccagagccccggagattatctccttcttacataccacattctgcagcatatcgcccgatgcatgcatttaaggtgacatggaccttccctcttctcgtgacaaagtgaggggatcaatatagcaacttgtgcatgatgacatgatgcagatgctaaaaagacagggtcacatggagatgtcacag

SEQ ID NO: 191432 - DNA, 410 bp, Glycine max
  unsure (1)..(410): unsure at all n locations
agccggagctcatgagggctgtcccacaatgcttcacgacattngnctcgcccatgctcttccttgcgagccctcttggtttctcgttcaacggctcttgcggaagctgcattttcttctcataactcggcacactctttctggacgtctgaagagactaacttgaatttttctgaggcaagcctttcctttcctagttctgctcttagagctcggacttcttcatcctcattcggagcgtcgaagttctcctcgttgataatttttaacttggagagccaatctaaccctcgtgtacgaactttcagccattcatgataaccaccgatgatgccattaccgatgctcctaagttctttatcttttcttaacggctctcccacgccttgggactctttgactatctcgaa

SEQ ID NO: 191433 - DNA, 403 bp, Glycine max
  unsure (1)..(403): unsure at all n locations
agctntgatgcaacatttggagaggttaattaaacaacgagatgatgcgctctatgagaggttggatcaaatggagaatagagatcataatgaagaacaaaggaggagaagagggaatgatggtgttcctacacaaaaccgaattgatggtattaaactcaacattcctccatttaaaggaaagaatgatccggaggcctacttggagtgggagatgaaaatagagcatgttttctcatgcaacaactatgaggaggaccaaaaggcgaagcttgccgccatggagttttccgactatgctcttgtgtggtggaacatgctacaaaaggagagagcaagaaatgaagagccaatggttgatacatggacggagatgaaaaaatcatgaggaagcggtatgtgc

SEQ ID NO: 191434 - DNA, 439 bp, Glycine max
  unsure (1)..(439): unsure at all n locations
gatcttaagcaccgcggcatgcagctgatgattacattctctccctttctcaagcaaattcttaattcttcttgacatcatcaaaatcttcatgatttacattctccccctttgtcaagcaaattctttntgatatcatcaaaacctgcatgatttaaaaaaacaagctagcaattctaatgaatcatcacttcatatcccttcccttttcaaccaagttagcactacttcctataccaaaatcccaacatataaaatttacaacaactttgtacagcttataacataatatgcttaagtcaaacatttatttattcacaaagaacttgtttccctttatctttttcttttctttcttttcttttctattcaataatttaatatttaatctaccttaataccctcatctaaaaatagagtatttacatcatattagcca

SEQ ID NO: 191435 - DNA, 239 bp, Glycine max
ctgagccaccccctgatattggaggagggccaactgcgcgagcacaaccacagagggaggctatcacacagctattatgcataccggagcaagatttcacccgggccactgaaaagagacgatagtgcgatatacccacaaacatgaccacacctacacagaaataaacgacgtcgtcacttaacaacaacctgcccagagaacagaatgccaaactccccctgcagatgaatccggat

SEQ ID NO: 191436 - DNA, 422 bp, Glycine max
  unsure (1)..(422): unsure at all n locations
agcnnggatgtctccttgttcactacatttttattcaccgggtngagtcttctctgtggctgtcttactggtttaactccatcctctaaatttattcgatgcatacatatggatgggctaataccacgaatgtccgccaaggtccagcctatagccttcttatgcttcttgagaactgacaacaacttctcctcttgctcatcagcaagggaggcagatataatcactggaaaactcttgctatcatccaagtaagcgtattttaaatttgatggcagaggcttcaattctggtgtggtccgctggacagtggtagaaggagatggtttctcatcctttacctcataaagaaagtcaaaggtatgagtactttctgaaacatggttagtcctatctgactctataaaatcaattctcagagg

SEQ ID NO: 191437 - DNA, 370 bp, Glycine max
  unsure (1)..(370): unsure at all n locations
tgattctatatttaatgatcatattcatgaacggtcctaaaataatgtagntaacgaaatacttaatgtcacagaccattaatattaataaagatagtctaaaaactaaatcctatgttttctgtacatcacctataaggaccatttgactaacttttaggcatattcattatcacatattatccacgccatcgccatgtattaatatcactttgatggcactaatacataagtaacattaaggaccattttttaacaaaaataattgtaaaaactaatacttctcgtggagcggctggttaagntctaatatacttatactatcatcaatataacgagtagtgtgaacactaattaaactctacttcta

SEQ ID NO: 191438 - DNA, 418 bp, Glycine max
agcttagaacttgaaatgagatgcgtaactcatctatcaatattattttttcccaatatatatctttctttagagacaattctaattgaaatacggtcaaatattagtcatgaacaaacttttttgacgaaaatttaaaccatgatttgttatattgtgagaaattaattctttttactagactcaattcggttggaaatcttaccggggcattctcctattctcagagcttgtcttcttgttaatgctaaccgtgtttttcttttatttcatgcaaaaccccaatcctaatatttgtaacactggaattaaaatgaaattatcgtaaattaaatgtctaaatcgaccaaagttacagtttgagagattaatgagagttttttctttcctttttcttttgctttgctaactggaaaaa

SEQ ID NO: 191439 - DNA, 429 bp, Glycine max
  unsure (1)..(429): unsure at all n locations
agctngccactaatcctaagttcattacattgtgcctatccatttccgagaatcccgtggcttacacggagtacaccattaagcaaaatttaattttacaagggggttgaatttggatacctaagaattctcacttcatttccactttgttgatggaatttcattcttcgcccatagaagtgttggatcaacagtctcaataacttaatagggataggcttagaatgcagaagaagcagcaatcaatttattaatgttctttaaacatgaaagacaaaattgattgtaacaaaataaatgagataagggaagagagaatgcanacacattcggcaaagtccgtgcctacgtccagtactcacgcaacccacttgagattttccactccttctgtaaaaatccatttacaaagtctgaatcacacaggga

SEQ ID NO: 191440 - DNA, 427 bp, Glycine max
ctgcaacttgctggggttttatggaggttatctttggctttttgaggtcctttaatagtgattttccaccatggagatgcagcggaagacaaaggagaagaggtgagaggaggcgccatccattagggaataagccatggaagaaggagcttcaccaccaagatgagccttggataagaagcttggaaggatgcttcaatggaggaaaagaaagagggagagaaagagagaggggggagcccgaaattgaaggaataaaagagggagagaagtggaactttgaagtatgtctcacaagactctcattcatcaaagttacaacaagtgttacacatgcttctatttatagactaggtagcttccttgagaagctttcttgagaaaacttccttgagaagctcttttgagacaatttccttgagacgct

SEQ ID NO: 191441 - DNA, 429 bp, Glycine max
agctttgagccaaaatcctgactcaccatataccttgacccagggtgagaatgtcaatccttaccctcggaagcgaaaagaatagaagggaaatttccaatcaaagaaaaggaaagaaggaagatttccaatcaaagagaaagcaaaaaaagaaaagaaggaaaattcccaatcaaagagtgggagaaagcaaaaagaaaagaaagaaaattcccaatcaaagaatgggagaaagtaaaaaaagaagaagaaggaggaaagaaagcccctgatcggggatctaaggaaaaacagaaggaatatgcagagaggtctttggatcggacaatatctgaacaatacagaattgtcaccaaatgaacgaaaaaagaaggaaagggaaccacgacctaaaatagtcttctccctttgattaccaaccaaaatccc

SEQ ID NO: 191442 - DNA, 434 bp, Glycine max
  unsure (1)..(434): unsure at all n locations
agctnctatttggtcattctgtgcaacattcttagctttactttttattaaanngngccatgttcatcacctagagctcctgatgacacatttgccttttgaccatgaccctcggcaacccatgaacttgcaatatgttaaggaactcaaaggtttcctgcaagtgaagtaaaatctcaaaaatagcatccttattatataaaaactaatgctgaaccaaacttcaagaaaatcacacagtagcacctcgacatgagaacaaacacattcacaaacctgtcatcattcaaaactaactcaccatttcgaaaccataacttccatcgataagaagaagtgttagatcggcaaacttcgcggcatctatcatgccattgatatcattcggacattccacanactgcanactgcacccgcctctgctttcctgacat

SEQ ID NO: 191443 - DNA, 418 bp, Glycine max
  unsure (1)..(418): unsure at all n locations
acctngtcggaggggggagggtatgatcgtctgactgggagaggaactggaggagggcgtggtatctaagaacgtccacgagggtgacctgtgaaaaatggtcgtcggtggtgaggtacgcgttggggacggcaataatggagagggaggagcggtccgagagatccgcgacgaacggcgtggctaacatgaggagggaggtgaatagggatattattgtatttttacttttgctacacacaagacaaaaagttgtactatatttagtgagttacacgttcttgggtatttgtctaatccatcattctctctattttgtatctgccctcggctattctgtacatcaaactttggacaaatatttttgtgttgttcaatttcttattctttccaaactccaccaccctaatttacttta

SEQ ID NO: 191444 - DNA, 421 bp, Glycine max
agcttcttatccaaggctcatcttggtggtgaacctccttcttctatggcttattccctagtggatggcgcctcctctcacctcttctcctttgtcttccgctgcatctccatggtggaaaatcaccattaaaggacctcattgaaactcaaagatccagcctccatagaagccccacaagcaagcttccatcaggaacctcctcctcttaaaccattaactctcaacgaaagattggagaggattgtttgctgagttgtgacattaattgtcccatggtagaggcaagtcacactcaacttgtggcgcttgggctgttacactcttaagtagaaagaattgtgccctaactataagctatagcttttggcctagtggtaagcgctggatccaacaattggtatcagagccaaggtcatga

SEQ ID NO: 191445 - DNA, 352 bp, Glycine max
agctttagatttcaatggtgagcgtctctttatgttacgggactcaatcggacttccgagtgaaaagttattgtcgctagaatctgctacgatcttctattttaaatatcgagcgtttcaatatgttacgggactcaatcagacttccgagtgaaaagttattgtcgttcgaatttgctacgagctaccgttttaaatttcgagcgtctccatatattacaggactcaatcggacttccgagagaaaagttattgaccgctaaatttgctacgagcttctgttttatatttctagcgtctcgatttattacacgacctcaatcggactatcccagtgataagttattgtcgt

SEQ ID NO: 191446 - DNA, 381 bp, Glycine max
agctggaacgcgaagagagcgcaggttcttgacttatcccaaataccattttaatccacttagcccattcactaccctttcacttgactttgatttaacagcacacacttatgggaattcctcttcttttttttttacacataaaacattacattaatttgatgtgcgcgctgctgtttcttacctataaaattatccatcaaacaaactcccccatatttggggcgaaaatgtcttaaccaaatgtgctctcctataaccaaagcaaggtcaatggagatgacatttcaaatctcaagggtcaattcgacactcactatttaactcaaagatgggcgccaatgaaatcattattgataaacaggctagctctttggtcaa

SEQ ID NO: 191447 - DNA, 406 bp, Glycine max
  unsure (1)..(406): unsure at all n locations
ngcttcatgagtatcacagatactaatctttctagtacaaaaatggcaagggtcagtttattataaaagaaatcaacacaaaaataaaatgaccataattaataagaaaacattcataattatacacaaacatccattagtctaacatacactcaacaagtagtcatcagccttcaacaattccaatcaatcatgctcaatgtgatgcatgcacctaacctcaactctcaaatacaatgtggtaccattcatcaggaaatagcttaagcgcgtccacgcgacactcccacttaggaaaactaggtaacaagtgtcgaggtcaccctttcgtgcacaggaaactccccccccccccccatggtgaacaacctaagtctcaagggagttccaaatcgagtgacatgcc

SEQ ID NO: 191448 - DNA, 341 bp, Glycine max
ctactaatatgacatattcctagactttccataacccctttattgataaaaattgctcatcatgatcacaatccaagcaggcgatttgggaaagatctgcaaatgcttctctttaggtgcttcctctatacactctgaacgtatgtgggcctcttcacctttcttttaggctatactttgttatgccccccctctttagtgattcccacctctgagtatgctgtttgtcttcctctttagctgcagcggtcttgttcctttataaaaactacatttagtgcaattatggcacttctaaaccatcgcatgacatccccatcctcattcccttctctacaaag

SEQ ID NO: 191449 - DNA, 418 bp, Glycine max
agcttgtaccaaaattctttttgtcgtttataacagcagagatgcttaaaagatatttgttattagaaacgaaaatgcttagcattcctcatatattgcgagaaatatagtaattattataaaagtcgtatcaataataaaaaataattcaattgatttataatactataaaagaaatgaaagataatatattgtgcgaaaatatagtaacttttttatgtagaaatagaagatgataccacaatttacaatactcatgctttattttcaatcaaccattgctattgattaaagatttacaataatacggggatggtttaaattttattggataattagtatttttttaaaatgtgtaattcgttaataaattcgttcctcaaatactaaaattcaaaatttagtactctaaaatgta

SEQ ID NO: 191450 - DNA, 425 bp, Glycine max
  unsure (1)..(425): unsure at all n locations
agctttaaagaataaggtcttaaaggatcataccttttatgttgtaaaacttaataaggatattgataccttaaagacaacttgttaagatatagcggatgtcctacaaacaaatctagtcatgggtatgaaggaggcatatatgttcatgatgaggatgtagttgtttgtaatttatgtggtaaagtatgacatatgatgtccaagtgcaaggatctacctaagaagggtgcatccaatgcattcagaattaacaagagaggacccaaaaagatttggatacctaaggacaagattattttgatgcaaatgtccttgacaataggaaagacacatctatcatggtacccgaacagtagcagctcacaacacatgacatatgtntcaatgcctgaccnctatgtatggtggaatngtaactttta

SEQ ID NO: 191451 - DNA, 423 bp, Glycine max
acgcttaattaactatgggagtgaagaacttgttgcattgtatcacgaaccgaaaagacagcacactaaaatagcacctaaaatgaaagacaaacaacttcatcaattctaacaaagcaaactcaacaaaagtattacttaatttagtcaaacagactgaaacccatgtcatcgtcagactctacagctggttctttcttcttttcctcctccttggctgcagccgctggagcaccagatgcagcagcatgagcagcaacggcggcaacggcaaatttacttgggtcctgcattcaagataactcataaattaaaaggatgaagataacaatttcggtgatagttgatcaaaatgtcaaagccaatacctgtagatactccttgaccttgtctgcctccgggaaagaataatctgtctcaacc

SEQ ID NO: 191452 - DNA, 420 bp, Glycine max
  unsure (1)..(420): unsure at all n locations
agctccgntctctgcagccggtgcgtctttatatctcttcctacactgcacccttttccttcatcatcttcgacaacctcaaatcctcaccttccaaaaacccatactcccttatcccaaacctctccgccaacaccttccaaacatgctatcacttgaacacgtccccgttgctacaattaaacgcctcgttcttcgcgcgtggatccactgcaccccaaatgtgctgctccgcaatcaaatcagcatccgaagcagtgttataacactcccacacagctttcgtccctggaaaccacaacggaacaccctcatgcttgcaaatagcagcgtaaacacaaagggtcccaacgaggttcatcaagctataatgggagaaaccaaagataaaatgtggtcgtgtaacgaaccacgttaacg

SEQ ID NO: 191453 - DNA, 430 bp, Glycine max
  unsure (1)..(430): unsure at all n locations
agcttcatgatgaatcaagattgattcattgagttttgatgataacaaagatgatgacaaaaagctgaaaagtcaagctcacttcatggtaacaaagatgatgacattcaagaatgagttcaagattgagtcaagaacacttcaaggatcaagagcaaatttgatttcaagaatcaagattcaagattcaaagattcaagaataatcaagatcaagattcaagactcaaagattcaagaatcaagagaagacttaatcaagataagtgttaaaaagtttttcaaaatattgagtagcacaagaagttttttacaaaatcattaccaaaaagttttactctctggtaatcgattaccagattatagtaatcgattaccagtggttntaaaacgttaaaattttcaaaattcacaatgaagagtcacatctg

SEQ ID NO: 191454 - DNA, 432 bp, Glycine max
  unsure (1)..(432): unsure at all n locations
agcttgtacatagaanaactaaaataagctatagcagaagttcacctctgacatgtttatagtgggaccaccaattgaagaagcaatattgctatattttgcaggcattgattgtgttgcagggaagggtgagtatgggatatcctcccttgctgtttgaacagttgaagccaacagtgcactgggcaaagaatttgtataagcctgctaaacaatagcactataagattagtgcaaatagcagaataacaacatgatattaatattagaagataaaagaaactacaataatatatatggcttattattacagtaaagcaataaatggtcctgcaccatattatagttttctgaaaaaagtacaagttactgtagtaataagttgccatacaagtaaagcaactgagcattgaaattcacactcaactcaat

SEQ ID NO: 191455 - DNA, 423 bp, Glycine max
  unsure (1)..(423): unsure at all n locations
agcttgtgaaatcaatgaaatctaaganttcgtttgacataagncgctcaattatgttcttagaaatgtgacctaagcacttatgtcataatgctcctgagtttgtaatatcaattctacgcttagtaccacgcaattctgcattaaaggattcaccataggaagctacagtatcaagtaaatatagatttatcattaaccaagagtgaaccagttccaacaatatctgaattgaaagacaacctaaacacattgtttccaaatgagcacaaataacccaatttgtccaaataagaaactgaaaccaaattctgtctaaatgatggtacaacaaaagtgtttttcaaatccaaatcaaaaccaatacataataataatctaaaatgttctatagctttcaccttcaccaatttaccatctcca

SEQ ID NO: 191456 - DNA, 422 bp, Glycine max
agctggtcctattgtgtgaggatactccttcttataagaaatgaactagtctttgttgagtaatgttatagtgtgggcagcttcgggtcatctcttgcaacctttcccagacttcaataagactctctgtaacaccctgatatatatatctatatatcattagtaattatgtttgatgtttgattatttgttgcgttattttcatccgtaattattattaaggaagttaatttaattaataaaggggtgtggatagataaagatctagcttctcaaagaagcctcttgagaaagattctcaaagaagccacgaggaagcttctggaggaagcctcttaatgaagcttctagagaaagctacatgaagctgtctcggtaaaaatgcctccccgcccttgttaaccgttggatcttactcaaat

SEQ ID NO: 191457 - DNA, 426 bp, Glycine max
  unsure (1)..(426): unsure at all n locations
agctncattaaatatagatatttctttaatccccacaccaccttcctccttaggtaagcaaatagcttcctattttacccaaggaattttcttgtaatccttatctccccccacagaaagtctctttgcagtgttaccaatctatttgctctccttttgagggatcttgaaaaaggagagcaaatatattggtaaagcattgagcaccgaattgattaaagtcaccttccctgccatggaaatattcttctgtgcccacttagataacttggattcatatttactaatcaaaggctcccacaccatgttgcttgagggtttagccccaaccggaatacccaaatagcagaaggggatctgcagctgcctacagttcagaatttgtgcagcctgacttacccaattgactctaccctttataatccg

SEQ ID NO: 191458 - DNA, 318 bp, Glycine max
agctggctggcaattcctttaagtaataatttgacatggctctgcttatcgattaagagaggaggaggggagggaaaggtctgcgtccacatgagtctcaatccttctcactaacaaaagctaacaaattaacaactaacattgtcctttaaagaaaagtttaacatgagaagggattattacatggataacaacaaattacgaggatagtggataaaaatgatataaatataactaacaaaactgttgtggacttatggttcaggtaggtgcacataagcatataattacactacatctcccagattatccaacaaa

SEQ ID NO: 191459 - DNA, 423 bp, Glycine max
  unsure (1)..(423): unsure at all n locations
agctggatgatgacgatggggtgttntgatccacggaggttctgtggaaacccgttgctggggtgtattgataccattgtatttnttctataaaaaaaaagtgaaatttttaaataataaaaaaatccattaattattctgttaatcacggattaaagactaaatacatgtattaaatgagtggtcaattttttttaaacggtcaactcacgcaacttaacaaaaggatcaaaattatgaaaaactccaacctgaggggtcaaaatcacaaaagtttttaaatttgaaggatcaaaattataatttaatataataactttggagcagtcattgtcctaatgcagtggtggagtattatcaaacccagaacattttaaagaatctacgctgattttacttgaaattataagataacttatgaat

SEQ ID NO: 191460 - DNA, 410 bp, Glycine max
  unsure (1)..(410): unsure at all n locations
agcttcttttgtaacttggtgatcttctttctatgctccacaaccgctagcaaccatttgctcaactacatcagngtcactgtggtcctcattgacccaccaaaaattcaaacaatggactcccctctaaaattttaggaaatgaaaatattgaaatttcccaaaacaagaactcaaaaatcaaaccaaccacaaaatagaaagcacaaagttgccttccaatttgggaaaccccaaaaaatccttcctgggttccatgaagtatgagaagttaccgacacatctctacttccgcaatctcatttcatcaaacccacaacactggaggtcaatgacgatgaagacaactctgcacccctcaaccctaatgattctcctaaaaaaacaacatcttacaacaatggaggaat

SEQ ID NO: 191461 - DNA, 417 bp, Glycine max
  unsure (1)..(417): unsure at all n locations
agcttgtaccaaaattctttntggcgttgataacagcagagatgcttaaaagaaatttgttattagaaacgaaaatgcttagcattcctcatatattgtgagaaatatagtaattattataaaagtcgtatcaataataaaaaataatttaattgatttataatactataaaagaaatgaaagataatatattgtgcgaaaatatagtaacttttttatgtagaaatagaagatgataccacaatttacaatactcatgctttattttcaatcaaccattgctattgattaaagatttacaataatacggggatggtttaaattttattggataattagtatttttttaaaatgtgtaattcgttaataaattcgctcctcaaatactaaaattcaaaatttagtactctaaaatgt

SEQ ID NO: 191462 - DNA, 430 bp, Glycine max
agcttcagtggaccgagaatgcatgcatctttagtcttcacaaactgaaatcattcttgcccgtgaacttttcgacatcgaactttgcagatcctatcgtcctcatacttcaagagacaaacccagagtcgttgagagcggaaactaccagaaaacgaacaacctaagctactaataccaatctgttatgaacagatctgcaactatttgataaaagccactcaaaactaaaagaactaaaaaatagaagtttgtgtagaaatccctatttttttattgaattaaaaatgtactgcaatgaattaacttataactcgttgtacccttttatatacatcaatcatagtttggttacaacaaactatgacttatgctaatgaaacacctgtaacaataattgtgcctaaagtttaaaaccacttatctaata

SEQ ID NO: 191463 - DNA, 430 bp, Glycine max
  unsure (1)..(430): unsure at all n locations
agctntgataattcaaattccttggagttgttaaattggattgatgctcttaaatctgtctcatattctctatttttatgataattctacatttttgttttgtgtttctataattttcttcaattgtttgcaacatgtttgttaaaatctcctattgtttataagtggattgaagttagaaccaaaatagattgtatctttgagttgacctaagttattcctatactacagaattaatcctagttttagaacgattcgacaatcattataacatacctacaaaacaatttagagagtagattaacgtaccgaagagattttgggttgtttttggttagtagtcttttcctttgagaacccatttatatttctcatttggaactccatatctactaatcacacaattttagaggaatgaatgacccttatt

SEQ ID NO: 191464 - DNA, 428 bp, Glycine max
  unsure (1)..(428): unsure at all n locations
agcttccttnggaaagggaaaagtntcctttatttcacaccccattcaatcagtgtttttgggatctgatcgtcggtacaatagatactggcttttcttgggtccttgtaatgtagatgatccaagccacaggaggatatactttgaatcttctgaagatggtcactgggaggttattgatactgaggaggtgaatttctttggttttcttattttgtgtaagagaagatatttagttacatatattggaaacatggaagagtaaacaatcaaaaatgcatatgtaatatgtttattggtctagtgtgtctattttatgcattactggtatagtgttaataattatttgcatatggttaacctgtatgtatgcaggccttgtgtgccttgttgtcagttctggatgatagaggaaaaagggaggctct

SEQ ID NO: 191465 - DNA, 424 bp, Glycine max
  unsure (1)..(424): unsure at all n locations
agccctctcgagccaccctaacgtaacggcttagacttattcacnggnccttctttaaattgaatctcaggcaataattcattaatcaacaacctatgaaccctaccatatattacttatcgcaattgggcaaactctcgtcaatctaataatacgaaataacctagatgattaataaaaaaaaaatatgaccaagccaccatttaaaaaaaatccaaataaaaaatgcaaaatcttgtgtctctttgatgtgggcatgtgttaacgtaataaccacggtctcctcatcaccaatctctttcacataattcaccaactgtaaacaggggttatccccaaaagtatatgtaacaagttgaccactatgaccaaatagaatntntaattatgtaaatctcatactaaacacattaatgataataaa

SEQ ID NO: 191466 - DNA, 430 bp, Glycine max
agcttcaatgaaaaataatgtgtaaaaaatgttgtgttctttatttaagaatgatacaatttaactattattttaataaatgtgaaataatcagaccaaaaaagagttgaagaagaagaagaaaaataaaaacatgtttgaaatttaatatgactagtgcggtggctgtgagacaacagttaacagtggacaaaaacataggttggaagaatttttggggtttttctatatttagttataacttgtagcgacttaaaagttgatgcctgcgatgtgtgtgtgccaagacacgatgcatgtccatcagcaccctggtcacgtttgtacaacatcataattcttcacattgtctttgaacatcattcattgtgaaagagagataaataattaacgaatattaatgcgtgccagctgcatgcttcttaataaa

SEQ ID NO: 191467 - DNA, 420 bp, Glycine max
agcttcttgggtgttggaaaatctgcaaatgcgaccacctatgggctatgggaggaggtgtttcaagtttaagtaataataacaataataataacaatcataataataataatcataataataataatattaataataataatatatgtggtgaattaggcatagagaaaatggaaactcccgtgtggagcgggtgatttaagagcgaaaaactttcacatgcactcccgcaattgtcgctgaggggaaaagcacctttctgtgttgatagaacgttcaatgccatgccattttagatcttccccacgcactatgctatgccctccctgctaagcactgcgcgatactgcgaaacataacgtctgcccaatgcccttgcatggatatattgtctcttctgcctccttggggtcactctca

SEQ ID NO: 191468 - DNA, 423 bp, Glycine max
agcttctatgaagcaaaatttaatggcgtattgtgtgtgacagatgattcaagcaaggagaccattatcatgtgcaattcaaatcttgacacaaattgggataagttttaacctttgaccaaagcttgtaagtttgtgttgctatgttggtataaaattcactattaataatggttaatgcatataattctatctttagactacaaaagataaatggagagtaaaatgacaatttgctaagtgtgatgagtgataccaagggtatccctcccaaactacttctcaaacaaaataatattctattttttgagcatcaaaatcacttcaatttttttagaagattaattatggctaataatcattaatcacacaataatcttataaaaaatatattttttgctcacagaactccatatgatcttt

SEQ ID NO: 191469 - DNA, 424 bp, Glycine max
  unsure (1)..(424): unsure at all n locations
naagctaaagtcatcatgcattgtactctgtttctgctagaaacaatgaatttgctaacatgtagaagttcattatgctccattaattttttcaagttatcttgaaaataataaaagacactcactctcaagaggattttcctttatatgttgatgacgtcacagtccactaagtggcgagttccaacgtaaccatgacactaacgtttttaacttttttccgacattagccgttgaagctgacggtcccacctcactaccaccgctccgttacatttgaaaaacaaaaagttataacactaaacggcgttggtgtcctccaacggctcctaacacaaccttacatttactccttcattcaataaactcaaatctcagatcactcactcactcttaaattccattcacattccaattcgaattc

SEQ ID NO: 191470 - DNA, 394 bp, Glycine max
agctttacaagagaggacagcacaaccaagttctgtgggaactcgttcatctgaatcatcttcagcatttccagcagacttgagggaatccgaagttggtgtgtctgaagcacacattatggtggaagatcaaccacagaaggttactcttaaggactattgtagctctatcgtgccgcaatttttcacaagcattgcatggctgaaagttcaagctcataacatcacatatcctcattccttgatccagctgattcaaggaaatctgtttcatggtttgccaaatgaagacccttatgcacaccttgcaacatacataaaaatctgcaatacaatgaaaattgcaggggtgccagaagatgtagtgagggctcagttgttttcactctttttg

SEQ ID NO: 191471 - DNA, 420 bp, Glycine max
  unsure (1)..(420): unsure at all n locations
agctttccgcaagacttacggaaagatcttagagttgaccttagcagaggtatccatagaagcctttgcatcactcacccaatactacgaccagcctttgagatgcttcacattcggagacttccaattagtaccaaccattgaagaatttgaggaagttctaggatgtcctctcgggggaagaaaaccatatctttcatccgggtgtctcccctcttcgagcagaattgcaatagtggtcaaggattcagcaagaggtttggaccgcataaaacagactcggaatggcatagcgggcctaccacggaagtacctagaagacaaggcaaggggtatggccaatcaaggagactgggtcccgtttatggatgtgttagctntgctaattntcggggttgtcctctttccaaatgtggatgg

SEQ ID NO: 191472 - DNA, 410 bp, Glycine max
  unsure (1)..(410): unsure at all n locations
agcttgttgccaaaatatattgtttctttcatcagttnttcatgaattctcaaagcctgacaccactctgtctctcaatctaattgcaaaaatattttgtttcagtcatcagctcttcataaactctcccaatactccatccctcaatctcgttacaaaaataaactgtttctttcatcagttgttcataaagtcacaatctctcaacactgttcctcctcaatcttgttgcaaaaatatagtttttttcatcagtttttttataaagtctcaaaagctcacatcactttgttcctcaattttattgccaaaatatattgtttctttcatcagtttttcacaaagtcataaaatctcccacaactccatccctcaatcttgttgcaaaattctatattgtctctttcatc

SEQ ID NO: 191473 - DNA, 423 bp, Glycine max
  unsure (1)..(423): unsure at all n locations
agcttattgaaaccaatcctttcagctgtttaatttccaggtgcgtagttattggagatttggatatgttatgatatactagagtcttggtgaacactgtacatagcaatgcactcacttctgaatgttatgtacatatttataatttaaaattatcttttaattggggtatatgttgccatatttatggttactgaagtgcatattgtaatttttattaacacaattctaataactgaagagcaccatatctgtcttttcacgtcattcaataaattttaattttttctgtattgctattttatttgtttcatatgcttggttttcccactatatgcagtttgtgtgcatggaacctacagaaagaacttggcatcaattctaggatctggtctgaagtgtatgaagagatngcatgttcat

SEQ ID NO: 191474 - DNA, 430 bp, Glycine max
  unsure (1)..(430): unsure at all n locations
agcttaaagnatgcccgagtcattcattcttaagagatgttgnngaagtatcggcgatcagaattgccattccttggattatagggttgaaccaagctcatgcttttacaaaaaggttcatcaagtcaagttgaaatatggaagtaaccgtcttgcaaaattggggcaaaagatgaatcgagtcacatcactgcttcgtctactgccaaacacatttaggattattgatgtccttgttacttccagtttcaccttgacaaagatgtcatggaccatgttgaaaatctaaattgattcaaccccatatcttgcgtaaaaattcgcaatacttcaactgtacatcattcgcatgcatccatgctgttcattagttgcattgctcgttgcattctctccttgaaaaataaaataaaatgaacttaatcattgt

SEQ ID NO: 191475 - DNA, 429 bp, Glycine max
  unsure (1)..(429): unsure at all n locations
agctngtanggttaaagtctcacgattgtttcgtgctcatgcaacaattgttagccgtggctatacgagacatctttccaaacaaagtcaggttagcgataactcgcctgtgctttttcttccatgctatatgtagcaaagtcattgatccagtcaagtttgatgagttggaaaatgaggccgcaattatactgtgccagttggagatgtattttcaccctgctttctttgacatcatgattcacttgattgtgcatctggtcagagaaatcaaatgttgtggtcctgtttatctacggtggatgtacccggttgagcgatacatgaagatcttaaaagggtatacaaagaatctatatagtctggaagcatctattgctgagaggtacattgtagaagaagccattaaatctttgtcagaatatttag

SEQ ID NO: 191476 - DNA, 421 bp, Glycine max
agcttgcctgtccgatgcagcagtaaggatggcccgttttatgtcggggaacggttacgaacccgttatgggtttaggcaaagacaacggcggcataactagcctgataaatgccaaaggaaatcgtgggaagtatgttttaggctataagcccactcaggcagatgtaaagggaagcatcgtgggaaggaagggcggtggtcaaagctcgcggttgagacaagaaagtgaaggaagcccgccctgccacataagtagaagctttataagcgcgggtctgggagacgaaggtcaagtggtcgcaatatacaaagatgatgttccgagtacattggatttggtacgaccttgccctcctgatttccagttggggaattggcgagtggaggaaacccccggctttacgcagcgagcataatgt

SEQ ID NO: 191477 - DNA, 427 bp, Glycine max
agcttagatggggcatggttgaggaatgacttttgattattatgagtaacctaaaaatgcttaaaaagattaataaactatattgtcgcacatatagtaaagaaaaaggcttcatatagtgtggagaccacttgttatagattcaactgtagttatctcttccaagatttggtcttgtgtaagaaaagaaccaatagtaaaggtgttccaacattgtctatgagattcgttaagataacacatctgaggtattgtttgatttgatgcatgattgctctgtcatggtttttttcattaaaaggtgcctcaatgcatttagggagaagggtgtttataaaatattctcggtctcaaatcctaagcgatgtgggactttttgacataccgcaacacaaggttataaaacaatctagagaatagtttgact

SEQ ID NO: 191478 - DNA, 419 bp, Glycine max
  unsure (1)..(419): unsure at all n locations
agctttactgctttcagcatgttgtgtaatctntngatcacccttaggagtggaaacaaccaaactatccacaggacgatcaatcctagatggaaatttcctgtcaaatgcacctgattcttttagatgtctagatcctttcaaatcctgagtagttgcagactatggcgaaagcattttcacttttgattcagttgcattcgatcgccccaaacttgaggattcgaataatgtagattttccagtcacccgagcaggcatctccatgttctttgaagtatgttcattaccccctttttttggggggggaacaacttcatcaacaagtttgactcttggcttggaatttaagttgttgaatgaattagacttcaacagcatacctattcataagaacaaaattgaatttggattaaata

SEQ ID NO: 191479 - DNA, 420 bp, Glycine max
agcttcagaccaaagcgattcataatctttgtatctaaaacccctcaatttagtggattttcaaggtttgagaagtgaaaatgagaatgggctaatttggagcaaactctcaccttacacaagtctatatcatcaatctaaacttgctcaaactggtctttacgacaaaaattctaccgaatcaaaatttgactcctcaacacccaattttaccctagaaatggctcttcccttcactttggtcatttgtttttctctcttgcacagcccaaactttctcataagtcctaaatgacatttcgaactaggattaactccctttaacctccaaataccactaaatccagatttggccttccaactctcaaagcatcactctcttttccactcataacagtacattctcactttctaacccta

SEQ ID NO: 191480 - DNA, 419 bp, Glycine max
agctggctctagatggacattgatgtttgtatttatgggaggttgtatgccatttttgttttaagagtaccgtcccactggtaaaactaactttccaaatgtttgccttcgcaggaaatggccccgaggaagcttgcctcaaagaggtccaggaaggacaaggcagccgaaggaactagttccgctccggagtatgacagtcaccgctttaggagcgctgtacaccagcagcgcttcgaggccatcaagggatggtcgtttctctgggagcgacgcgtccagctcatggacgacgagtatactgatttccaggaggaaatagggcgccggcggtgggcatcactggttactcccatggccaagtccgatccagaaatagcccttgagttttatgcccatgcttgcgcacagaggagggc

SEQ ID NO: 191481 - DNA, 424 bp, Glycine max
agctcgtaccaaagatgtgccattgaagtctctctatattccacatgccagctactagcaaccaactgcttaaaagatggatccttactgatacagttgataaatctaaacaagtaaactcttctaggcttttgaatctgcaggccaattttgataggagagtggtctgaaatattaggatctaaaacttcataagaggcatcttgatacttctgaaaccaatcaacattaccaataactctgtcaatccgagagtaaatcacatcaacaacatgcttattcgaccaagtgtaatggttccctttcatatcagcttcaaacaatcccatatttgacatcatgtgtttaaggtccctaactttggtctcaacaacattatcaccaccaattctgtcctgactattcagaacattattaaaatcac

SEQ ID NO: 191482 - DNA, 417 bp, Glycine max
agcttgtgcctcttatctaacttatgcatgtcagccttggtgtttacttcgtgtttgtcatgcttctatctggcttgtcagacttcattccaaaatctggacatttcttccatctagatgtagcccttggctcgctcgcgcagtttttccatgctactgagtggtttcttgcacagattgtctgtgaacttgtcaaggcatagtgcgaggagcatggaatgtaatgctacctcggggttgagattttggatctggacggttgtgtgcccaaatctgtccatgaattttctgctcattgtttacttgtcagagactggccaaggcggtcgaggtcatatggtgagacctactggtggtgtactacgcactaaatcatttgacgagggtgtcaaagctatctatggacctaggggggtc

SEQ ID NO: 191483 - DNA, 429 bp, Glycine max
  unsure (1)..(429): unsure at all n locations
agctngtgcagtcttaagatgcaatcaagattatttctccaacctgtgcgtatgtaatccccatacctgtttgctatagtgaatactgtcacagttgctagtcttgctttcatgtcatctccaaaggcaaggactggttcctcaactgatgatgggtttaaaagtgtagtgaacttgcaaagcgacactaccagatcatcaagaacatcttcaagatgatggcaagctgaaattttagcaatagctaagaacccatccatacatgtttggtatacctcttcctgttcagcatgatcaaataccacagagatggcagcaatcgttgggcctgacattatggcaaacatatcatgatcaaggtaggccttagaatcagatacaataaatggagcagtttttttggacttatgcattagatcaatccaccga

SEQ ID NO: 191484 - DNA, 428 bp, Glycine max
  unsure (1)..(428): unsure at all n locations
agctngctctaaatgtacattgaggttggtatttattggaggaggttgcatgccatttttgttttaagagtagtgtcccactggtaaaactaactttccaaatgtttgccttcgcaagaaatggccccgaggaagctngcctcaaagaggtccaggaaggacaaggcagccgaaggaactatttccgctccggagtatgacagtcaccgctttaggagcgctgtacaccagcagcgcttttaggccatcaagggatggtcgtttctccgggagcgacgcgtccagctcagggacgacgagtatactgatttccaggaggaaatagggcgccggcggtgggcatcactggttactctcatgcccaagtttgatccagaaatagtccttgagttttatgccaatgcttggccaacagaggagggcgtgcg

SEQ ID NO: 191485 - DNA, 420 bp, Glycine max
agcttcaacacccttactgggggaaatatgtgatgcttcaattcataagcacctccttttacaacctatggacaatatttgcattgaatctttctagtttcttcaactgaaatcccaggtttccatgccacgccactcgtgtttccaggagcattccttggcattctaaaggacactagttgcagaactagtaccagaagtgcaagcataagctgagtttgaactaacagcatgaccatcaccactagcttatgaagcaaagtctattgcatcaacaacagagactgaggcaaacttaagcatgcgtgtggcagaataaacaaggcagggagagtgtgagatataggcctgaacagaaaaacgaaggagatgtgagcagagataagaggcagatgtacaatgcataacctgtgaaccaca

SEQ ID NO: 191486 - DNA, 430 bp, Glycine max
  unsure (1)..(430): unsure at all n locations
agcttcataacctcagcactctntgatagatgtcccacagtacgagcaattgctgcaaaaacaaccaaagtcattaatttatgtaaaatgcgagaaaatatagagttaatagactaaaaccatgttacacagcggattcttgtttatatagacaagtagtattgattacacataattagaagatattcaatttctctatatcagatatcaaatcctatcacatcattatacattaaattcctgattctcaacactcccctcaatctaaagctttgttacaagaaaatttattcccaactaataaataaaaacataaaattgagttccaccaaaaaacaatgtttgaaagacaactcagggatgttggcgaagttggagaatattgctagaaagataacattgccaaagagctggaataaccatcagccta

SEQ ID NO: 191487 - DNA, 431 bp, Glycine max
agcttcgaagcatagcgagtagagatgtattctctcttttcgaatcctacattccgataaaattcagctacttattgattcatattattaatattagacgaatctcaatttttgtatcttacggtacatgaatgaatctgcacaatttcatatcatcaatacaaatcacatgattcaatagtttgattttcttttatttctctttcaccaattctcatgaaaagaattgaaaagtcatttaagtgaaattgataaatgaaaaggaattagaggaatatatttttaaaattgtcctatttgattatttcacaacattatttgtcattcatttattcagcgcatgcactttatttgtctatttcactgcttcattctttttctaaaataaaagcttcacaaattgagataaagctaataattctgttctatct

SEQ ID NO: 191488 - DNA, 418 bp, Glycine max
  unsure (1)..(418): unsure at all n locations
agctntggaaaatgattgatatacaaaagttagtcatataaagggactaacaagcatgtgctaagccgaaatccactaatgcatgttgagcggtccatagtcgcgctaagcacgctagcacaaacaaagccacctatttaagcctaaaatcaaattttggagaggattttggccattttctcaaggagcttctgcatgtgagagattctagagagagaagggtttgaatccagagaatttgagaggttttgttgtgcgaagacctgcagagaactgaacttgaagagaaagtcgtcctgagagcttgagatgagtttgtgagtgattgtgaggttagaggtggaggagacatcttcaccacttatatttcttcaatctttcattgttctcttctctttgttggaaaagaagcttccca

SEQ ID NO: 191489 - DNA, 423 bp, Glycine max
agcttccttcagaatattcctagagaagcttgagcttagctacatacacccctctaatagctaagttcacctccttgagatgacaaactagagcttagctacacacatcccataaaatagctaagctcacccccatgccaaaatacataaaaatactaaaatgtcccaactacaaggactactcaaaatgccctgaaatacaaggctaaaaccacctatactactagaatggccaaaatacaaggccccaaagaaggaaaaccctattcgaatatttacaaagaagagtggactcaaccatggcatatggatccatatatctaccctgaggttcttgagaacactaggtgatgcaatcctccctaggaagggaccaatcactagagccatgagcaagaggctccaagaggattgggctagagc

SEQ ID NO: 191490 - DNA, 423 bp, Glycine max
  unsure (1)..(423): unsure at all n locations
agcctctactgtactttgaaaactcttattttcagattaaattttaaaatatcttccaaaaaaaacagggccaaacacatcctgagtgtcttgttctattatattagtgcacaactgagtgtttcaccatgtgtatattgaaatctcccttatcgcttgaaaacacccattgtgttccaacttccaactttaagggttcatgccagacagcttatagatcatctaacacacatctacttcctctttttcaaccagcataacaacaactgcaagattaatattacaaaaatgataaaggaggacttggcattaaagatcttaggactttcaattcagctttgttgtgaaagtggcgtcggtatttatttcacaaccagcaggagcactgngcaaaaattctaatatcaaaatatggcggctgga

SEQ ID NO: 191491 - DNA, 397 bp, Glycine max
  unsure (1)..(397): unsure at all n locations
agctntacttgaatattggccatagtagcttatgttcttanngaagncancanacngctcagtgactgatcttgattttgtcatcttgaaggtgtacagttgttgcttcaagcatagccgatttgcaagggactttgtcatatacaaggactccagtttcaaccacattgaggattttgtcctttctcttgcaacttctcttaaagctttatctcccatgcatataatgactgcacttctggctttatcaatcatttctgaattctctctttgagcttagagattcaaacatcctttcttctcctataagagcttctgcatagccatgttgaatcaagattgtttccatcttgatcctccttaacccgaagttattttcccctgagaacctttcaat

SEQ ID NO: 191492 - DNA, 415 bp, Glycine max
agcttagtaaagctatgcactaacacgtttggcttaagaacgtaaagaagcgctactagaaggcaacctacaattggctacgaagaagctctctgcgaagcagtccaggaaaggcaccattgaagagggttctagtgtggccccacaagctgacacaggttttgacaaccaccgactccagagcgtggaacattagtagcatttcgaggccactgagggatggttattcctcacgcaaagacaaaggcagctaagggatgatgaatttccagatttccttggaggaggcggaaccatacaatcgaaatcaccaaacttgtgatttatccttcattactgctctcaattatactattatcttgttatttcctttgtgatataacattatctgcttccaattgttatgcccattgtg

SEQ ID NO: 191493 - DNA, 419 bp, Glycine max
agacttgcttctacaatctcccccttttttatgatgacaacttctgaaatcaagaaacacacacacacacacatactttttcctagtcgatcactcacataaatttccattctccccctttgtttttgaatttatgcttctcttaaaaattaagttgattactcatgtgagttcttcatttaatccctatttctctcccctttggaatcaacaaaaagccaaagtgcgctacaagtttgaatcatacaaagataactaagcatccatacaacattcatggaaaaatatcaaccaaatcatgaagcaagaaccatgaagaaacaatcatgaatagattaattataaaatccacatagtcaaataacatacttaatatttgttcaaacataccatgcaaataaggaaatagtaaattgttc

SEQ ID NO: 191494 - DNA, 431 bp, Glycine max
  unsure (1)..(431): unsure at all n locations
agctngccacttatcctaagttcattacattgtgccaatccatttccgagaatcccgtggcttacacggagtacaccattaagcaaaatttaattttacaagggggttgaatttggatacctaaaaattctcacttcatttccactttgttgatggaatttcattcttcgcccatagaagtgttggatcaacagtctcaataacttaatagggataggcttagaatgcagaagaagcagcaatcaatttattaatgttctttaaacatgaaagacaaaattgattgtaacaaaataaatgagataagggaagagagaatgcaaacacattcggcaaagtccgtgcctacgtccagtactcaagcaacccacttgagattttccactccttttgtaaaaatccatttacaaagtctgaatcacacagggaca

SEQ ID NO: 191495 - DNA, 434 bp, Glycine max
agcttcatgatgatgagtcaagttgactctatgtcttttgattatgaaaaagatgatgacaaaaagcccaaagaatgatttcaagattgagtctacaaattcaagatcaagtttcatgagaagaaatcaagaagattctagaatcaagagaagtttgatttctagattcaaaagaagatgaattcaagattcaagagaagaaatcaagaagacttcataagggaagtattgaaaagatttttcaaaaacaaacatagcacagttttgtttttcaaaagagtttttctcaaaattttctaaattaccagagtttttactctctggtaatcgattaccagtttcctgtaattgattaccagtgacaatgtttgatttcaaaagtttttcaactaaatttgcaacgttccaattgatttcaaaatggtgtaatcgat

SEQ ID NO: 191496 - DNA, 429 bp, Glycine max
  unsure (1)..(429): unsure at all n locations
agctttagggggctaagacatggattactattgtttttttatcaacaacaaaaagtttaggtgatttgagtcccgagagctcattagggtcaaggtaggactcaagactcaaagagtgcttgtaggttactcaccgacaaggtcctcacatcggcagagagaatcaaaaccatgtgttctttaggaatatgggtttatttcttaccaactggattaatccttggtggttaattatattgctgttgatatcatgatgtattaaataattaatcataagaaaaataattcgtttgcgtagttttaggttgattctgtgttagatgatataactatataattaataaaagttattgaggttctttttcattgaataaattnttgacatataataaataaaatattaaaaaaatacttcaatctaataaaaat

SEQ ID NO: 191497 - DNA, 420 bp, Glycine max
agcttgccctggctgcttcgttgccgcctcaccttgtgggagaggaggcgagaaacctgacgaagtccgccccacttttccagtgcccgtgctatatcaaaccgccctgcgggaaaattccattgtatactaacttcaaattggaagtgggatgaagctacagccatcagttttatccatctttctttgctagacttgaaagtaagcaaacctatggtttgttgctgtaaacaataaaatcaaaattgaggggaatatcttgaccaacctgcacgttcaaatgaccttctgctaggcataaaagaagggtccattccccagctcctttgaaatctacttatctgcatgaagatgtaagcaatgttacgtggatagatgcttaacatttatcctttcatcatgtcattgtcatttaacttt

SEQ ID NO: 191498 - DNA, 425 bp, Glycine max
agcttcttgttgtggaagtaccgtttcatataccacaattgcaaaccacaaaactgcaatgcacatagccaaggacataatgctaagccatgccactctgccatttgttttttcactcagtcctcatttcagcttccttgaacaaataacccaaaaaacaaaaattaagcatatgaaaagtttttaaaaaattatttgcaataaacaatctacaggggaagatgttgatgtgattggaattaccttcccttaaaaaattatttgggcaaaatgaatagaataaatagaagtattaatggaaaaatgggagaaaaaaaaaactgaacacaaatagagctcaactggacattctgcaatagggacaagaaaacatattccaactttacctgggtaaatgaaacacaaaatacaaaattgtgcttact

SEQ ID NO: 191499 - DNA, 414 bp, Glycine max
  unsure (1)..(414): unsure at all n locations
agcttcaacattcagatttgagcgtctcgttatattacgggactcaatcagacatccgagtaaaaagntattgtcgtttggattggctaagagattcaacattcaatttcgagcgtctcgatatattacgggactcattcagacatccgagtaaaaagttattgtcgtttgaatttgctcagagcttcaacattcaatttcgagcgtctcgttatattacgggactcaatcagacatccgagtaaaaagttattgccgtttgaattggctcanagcttatacattcaacttcgagcgtctcgatatattacgggcctcaatcagacatccgagaaaaaagttgttgtcgtctgaatttgctcagaggttaaacattcaatttcgagcgtctcgtatattacacgactcaatcag

SEQ ID NO: 191500 - DNA, 396 bp, Glycine max
  unsure (1)..(396): unsure at all n locations
agctggttagagctatcatcacatgacgctttatnggcacagaataagttgctttctatacaacttgagattctaacagaaacacttggtaagtcgccaactaaactgtttattggtcaacctacacattctttgtttttgcaggttacaagttgtaccatctgtggtgaggcttatgaaacacgtcaatgtattcccatcaaagaaaacactcaagaagttcactatatgggaaatcaacagagacaaggatatactcgaggaggattctcatgcttccagcagggcccttataaccaacaaggacagtggagatcacaccctggcaatcaatttaacaaggaccacggtggaccttccaacaggccaattcaacaagggcctaacattttttat

SEQ ID NO: 191501 - DNA, 423 bp, Glycine max
agctttggaagcacgaaataaggattagtttaaaatcaacataactaattaaagaacttgagacgatgcaaaaagcataaacatgagtaccatgatctgggcaaaagaaacctattgacaattgccttttaagattaacctaaattgtaaaacttctaatgttgccgcttctagttaatcattctacctaataatcttgaagtcatatatttaatttggattttgtaaatcaattctccaccactatttagctctatttaatttaggcatatttaagtaatgacataattaagcacatatttaataagagattgtcacatgaatgctcaataacttatataattgccaaccacttttaataaaataaattatacaaaaaacttacgacattcttatcataaaaataattgaaatattaaactt

SEQ ID NO: 191502 - DNA, 420 bp, Glycine max
agcttctagttacaaagtgtttccatgccttattatatacgagcttcctttatcaagaacagtgaccaacatgcaatgcacgcgtatgctctgaaacacagagataacacacacagaataggagcttctcaatcgaacagcataaaactagtttcctgaaaacaaaaccgaagtaattagcctataaacaaaaccaaaacaaattaaccaagtatatatacatacgcctttttagccctacttaccttggtgcaacaagtcaacgaaatacgtgagtacacatactaacatccctccccttcacgtctctactcttatgcaaaaatcatagacttttctcgagacatgatgtattaattatactacgtggaagataggtggaaaaacataagtgagacatttttgtggctgtgatataaa

SEQ ID NO: 191503 - DNA, 416 bp, Glycine max
agcttcatacaattaatataaaacttatattctaatgtcacatcctatcagagtgttctgttctcatatcttctagcatgaggttcttcatagtcatccctacctattcatctgctcccccaaacacaaggttcaagatcatcacaggatccaaacacaaacagcaaatcgggagtgagttatcacattcctaactactagagagaaacaagacaccatatagtagccaaatacaatttacttagcatatctcacattatttcatcactttgtcattcaaaattcacttttcaatcatcaatcacacctttcaatcatcaatcataatacacaagaatcacacacttcgatcaaggcataataacacatcaatttgataataaaaaattagcaagcgtatgcaacagtgatgctaa

SEQ ID NO: 191504 - DNA, 417 bp, Glycine max
  unsure (1)..(417): unsure at all n locations
agctttagatgaggatgagtngaataatttctgtactaancttgaaaagtttttaaggtttaataaatactctgatattgatggtcttgatttattttcagaattgaatgtactaagagaagtgttaagagaagaaattagcacaccagtagaagtattgagttatattaaaactttagattcttttccaaatgtttacattgcatatataattttattgacaatccctgtaacagttgctactgttgaaagaagtttttcaaaattaaaattgcttaaatcatatctaaaatcaacaatgttacaagatagattgaatgggttagctatttttatctattgaaagtgaagtgttagaattgctcgattataaaactctgataaatgactttgcagttaaaaaagctagaagataat

SEQ ID NO: 191505 - DNA, 434 bp, Glycine max
  unsure (1)..(434): unsure at all n locations
agcttccaacacctccacggagagtatagagccggcaatggcacccaatgaaactccccggagaagaccactcttagtagccttagctgctagagcaccagctatagctcctgtgagggccccagctgcaaccaaaaaacacaattacatgagaccaaccaaaccaaacttcacagcctgtgcaacactaaaatagtggctactggccaggcaaacattctacacccttcaaattttctacccttgtaaacaatagcacctacaccaacaactagcacaccaaccataaatctcactaccaccaccaattcaggtcataaaaaaagtacaaagcttaaaatacagttactttggtgcttttagcttttttctcctatcagaattataatttcacctcanaaaactaagttggctttttgaagtaaatatttatt

SEQ ID NO: 191506 - DNA, 429 bp, Glycine max
  unsure (1)..(429): unsure at all n locations
agcttgtccaatntgtgagcaaaacacatgtttcatccaacttaaacatgggaagaagacaatttatacacggcaccgtaggtttttaaaacattatcacccctatcgatgattgaagaaagcatttaatggtagccaagagactaaagaacccccagaaccgttagctccccatgaagtgtatgatcgggtgaaagacatcgtaactgtttttggtaagacacaacgaaaggatcatgctaacaagaacatttggaagaaaaggtcaatgttctttgattttccttattggaccaatctacatgttcagcattgtctcgacgttatgcatgtggagaagaatgtttgtgatagtttacttggcacccttcttaacatcaaaggcaagacaaaggatggtctgaaatgttgacagaatttggtcaatat

SEQ ID NO: 191507 - DNA, 430 bp, Glycine max
agcttatcctgtgttttctacccgtttatctgtgggtaaacattataatgagccaattctaaggcttcgttaacaatggtgttcgactaggttttcctttcacttgatgattttaattttatcagtgcagcgaagtatatggggaatgtttttaacagaattaccccccaactcacagtgatatatttatggttatcaaccaagtgctgtaaatgactgttgccattgggaagggatgtctaggctgcttctaacttttccagattagcctttgttgttctataaatgtaatgtcatattactcatgtctgaatgctatgtactgtgttcatccaacgggccattccgtagactgcagccgttcctatctcaattacttaacgaaatttagatttccaggatcactgtgcgttagccttttgaaagttaa

SEQ ID NO: 191508 - DNA, 421 bp, Glycine max
agcttgtagttagaattacaaccctgtgttgtatccataccccctaaaaccagggttgattgaaatggtcttgatgatggatgcaaatgtatcattaattttttcatgctagcttttgactcaaatatacatttttcatgcaaatgtatcattattttttttcatgctaccttctcatctaaatgagactttttctcaaatttatatgtcctttcttttatttttttcactgaatttgataatttttataagactattttcatgatgtcttttacattaattatttttttaccaaaatatctttaattactttacgataaatgtattatttctcttacaaggattgaggaggaagagtaacatgttaattaaatataaagtaattatgtgaaaagagagacatgatgacggtaagtagtta

SEQ ID NO: 191509 - DNA, 418 bp, Glycine max
  unsure (1)..(418): unsure at all n locations
agcttatacttacacagcctccatatccctctatttcatgtgtgattcgntgaggtgttacatgtccaccagttttcgtctaattcttcctcaaaccacaccatattagaagaaaagtttgctcttatatcatttgtagcattcttgattatcgacttctcgacagctcacacaccacgacacttcacactgtggcacttcactaaactcttcattgatcataaccctccatcggtcaaaattcttcgtaggtagccctttttgagatctcgaanatctatttcgactaattttcaggattaataacagtccccacaaaccaatacaaaactttntcagcgtgttttgttctcactcacatggtttttgataaatatctcagaaagtcactcgtcttataactacttcaagttgaaca

SEQ ID NO: 191510 - DNA, 421 bp, Glycine max
  unsure (1)..(421): unsure at all n locations
agctttgatctaccaccaccattgtcactattatcttagntttctattatgcttaaatattattagtactttgatttctagccgtgcatttggctatattattatgacatttgaacaatttagtatttcttttattcgcatagcatgactgaacaattatgaatatgactatgtggtttttatatatttgatctattcatgtttcttgcttcatgattggtttagatttttcaatgaatgtcttgtgaatgattagtaatttatgtatgttttatatttgttactcactttggctttctgttgatgccaaagggggagaaaaaatagggattaaatcaagacactcacatattaaaataacttaatttcaagtgaagcttaaactcaaaaacaaaggaggagaatatggaaaattaagtga

SEQ ID NO: 191511 - DNA, 413 bp, Glycine max
agcttatttcgcgccatgagtgtgttcatttatcaattcattatatggaagcaaataatgtgggggtagatatagaagaagcatgctaccccctcttatctaatcacctaatcactaaaaagaacttgttgctatttaaccttacccatagaatcaatcaaggaaattataatcacaaatcaagcagcaatacctttcagttttgttgaatggaaaccgcctctggtccacaggagacacgttttaaattattttaatttctaacccctcccctgaaagataaacatagtacataaattcaaagttgcatagcaatactcaaataaaacaaagaaattaatataacctaagacaagccacaatcaataaagcatcaaatctaatgtccttctagtcacacacaagatacatgt

SEQ ID NO: 191512 - DNA, 407 bp, Glycine max
  unsure (1)..(407): unsure at all n locations
acgctaggagtgatcgtggcttgtaagatttaacttgnctcanacccatcaactgtgacagtgtttacggttccaaggacattggaacaaaatgcaaccgagattgttcatataaggcagcttgtggcgaatatacttgacgaggacctaatcataaggatcaactttggtagggcaccaattgaaaatgggaacctaacagttcaggcacaatttgaatccatgtatcttggaggtgtggatcagctcattcctttgatgcaagaaagcttcccaaagttgggtttggtcacagaatattgtattgagacgagtcggataggttcaattctctacatggctggattacaaacggngaatccactgatgtcttgctgaacaaaactcaagctaacggcgtgtcgttc

SEQ ID NO: 191513 - DNA, 424 bp, Glycine max
  unsure (1)..(424): unsure at all n locations
agctnggaaggatctggaaaggttaaaccttgctgctcggacaagatctacttttaaggtaaacacaaaatgtgatctgcaagtcaataacatgtgtgaggcattcaacactgtaataatgaagtgcagagacaagccaattattactctactggagggaatccgattttacataagttttacaattgcgaagttaaggactatcctcatgaggtatgagggttccatttgtcccaaagttcagcaaatcatcgaaaaaaataaaaaaagcatgtaaagcatggcgaccacattggtctagtgatgaagatttgtctttgtttgaggtgccaaagggcatagaaaaaattgatatcaatcttaaacaacagacatgttcttatagaaagtgggagttaactggaattcataccctattcaatac

SEQ ID NO: 191514 - DNA, 418 bp, Glycine max
  unsure (1)..(418): unsure at all n locations
agcttcgatagtcaactaaggcgtttaataccatanagaagaacggacttgatgcagctgcaaagaaggctggaattgatcttaggaagaaataagagtgcctaattatggttttgtaacagagtggcaaaatgcattcatgttccttgctgttaattgtagatttttgtttttcaaaaacaacttgtgttgttgcttctagagaaacaaaatatggcgaggtcatgagcttactaggccatgaatctcactaatggaaatctcttttgaaaaccccctcatcgtggtacttataatggccatggatatcataagatctttagtagctttaccaacttgaaatatcctactaaattggtattctgatgtatgttgaattgtagctaccacaaccaaaattgctgttgccagagtcatt

SEQ ID NO: 191515 - DNA, 414 bp, Glycine max
  unsure (1)..(414): unsure at all n locations
agcttctatcagaagtttcaganaanaattataaaaaaacttcaattttatcaacaaccattggctgaattttaacgaaaagtaatcaatgactagaatgagatgtaaaaaaaaggaggggaaattttttaagtaaagatgacatgtgtccagctcaagcttgttttattaatggatagcgatagagagatgcacaggccaactctttttgtcttttatttttttggatcgtctgcaatgcatttacaacaatttcccttaggaacttaaaactctaattatattgatataatattttagtaaatatgatgtacaaatttatgtcatgttcgttttcatttctatttgtttttggactcacgattatatgaattatattatacttttaacaattcaagctacggaaatgaaata

SEQ ID NO: 191516 - DNA, 412 bp, Glycine max
agctgggggagccttgatgctctcatttgaggctcacggctgcttatgaggaaaatggtgggtccccatagactaacccttttgcaagtggctccatcagggtgtatctcaaagaggttatggagagccaagccaaggcaagaggtatcccttacaagaagaaaaagaaggcctcaaatcaaagcaagggaaatgatgaatcatcctccaccatgcacttctcttgaacaacatcttcagtatcgatccctttggacctttcaagtcatggtaattaattaattaactaatcttgcttgccatcacactcatgatcataaactatgcttaactaggatgattacctcaatgcggtgctaggatctattatttttttcctaaacgcgatgctaggatctattttttttttcaa

SEQ ID NO: 191517 - DNA, 412 bp, Glycine max
agctttcttctttctctgttattgagtttctgtgagtgattgaaagtgtgtacgtgggtgggtgctgcacttccattgtcttgcttttgctgtgtggcttccataattcattcttggtaagtgtttttttaaaataaaatttatatgttctgatttataatttctgttcttaatttttataatacgttagttagtattaatacgtattataaatttaggctaattaggattaatatatattgcaaggttaggttaattactatgctgctttttaatttttatgtattaatagatatttgaagattacgttattcttaatagatatttgaaggttaggttagttagtctgcgttgttgtatatatctttcgatcttatatatgtgatataatattattagttctacaaatatt

SEQ ID NO: 191518 - DNA, 429 bp, Glycine max
  unsure (1)..(429): unsure at all n locations
agctnggcgtctcacagctcttccacgaatgatagctttaagcttaactattcccttcaatgctctcgaagctttccttgcctgtaaactcttaccagttagtgaatggtgtgcaagaatctacagtaaggtggcttcagtttcttattttcatctaccgtcacttatgtttcttttcccttaaaatatagttccagttcagaagttaccatactcttgattttgggaaatcactaattggttgaagaattctagtgaagtagtatttatttattttataacaaagtcatagttctgaaatctggttgtgcttcagtttgtgtatccttttatgtttggcttctcaaatttaactgagcctatcagtgatcacctagctaagaaaagtgaacaaggtggaaaatgatagttgaatgatgagagagattg

SEQ ID NO: 191519 - DNA, 425 bp, Glycine max
agcttggaaggatgcttcaatggaggaaattaatgagggagagaaagatagaggggggagcacgaaattgaaggaagataaagggagagaagttgaactttgagttgtgtctcacaagactctcattcatcaaagttaccacaagtgttacacatgcttctatttatagactacgtagcttccttgagaagctttcttgagaaaccttccttgagaagcttctttgagaaaacttccttgagaagctagagcttagctacacacacccctctcataactaagctcacctccttgagaagcttctttaagaagattcctacagaagctagagcttagctacacatacctctctaatagctaagctcacctccttgagatgagaagctagagcttagctacacaccccctataatagctaagctcac

SEQ ID NO: 191520 - DNA, 300 bp, Glycine max
taatcataatgcacatactcaaaagcctagatgaaacatgaataccagtgcgcaagcttattctatgtgatttagcaagcacacaatgatcacagaattcaagtttatctagtttatcaccacctaatagattttgtttctaagttcatgtaatcccctttcactaacatgacctaatctcaaatgccaaagttttgttttatcaaacaatgtattactagctactgatgcatgtcaataatagtggaccttcaagaataacaagtcattacgtttattcttggtaccctttgcaatgac

SEQ ID NO: 191521 - DNA, 408 bp, Glycine max
agcttcgttccgaacggaattggagaggtggtggatcataaaccagatgatgaagaatgcgacgaagcatataccgagcagcactttgagattggcattgttgtatatcggaatggagcttccgtatctgcttctctctctttgtcgattgaacggaggcctcttttgtcgtcgagaatcggcgtcggcgtcggcatcggatctcgctctgctccgaacggtacttcttccacttccagtcatttttggcggatcagagattcacgccaccgcatgcatagggatttggagttcgattggagggagtgttagcgtagcataggtttcggtgttaattggggagttcgcagtgtaacgtatcagtggagtatcataacgaaggagacgagtgacttgaccggatatcca

SEQ ID NO: 191522 - DNA, 246 bp, Glycine max
gcaccacaactgcctggaaaatggatcactcaacaacggttgcactcaacctcattgcgttagcactcaatcaaaatatgcctcagcccataagaagtaagctcatatatcgctgttggaaatatctagtgaaacatataaacattagaactggcagagaggatgctgatgttaaaattcaatctaataattaccattgaaattcatacgatgagaatgtatatgtatatataggcttacattcaa

SEQ ID NO: 191523 - DNA, 416 bp, Glycine max
agcttgagatgaggaagtgttgaagggtgtatacttcctgcttttattgttgaccacagagtggtacctggagatatgtcgcgggggtcaggagaccttggggacgtcaggtggggtgctattgcccaaaaccaagcttgaccaatcccgacccaacccgggcatagtcggtcagtgagaacctgtgatgtacctaaacaggcgagctcctggcagtcaacagataaaaggaacaaagaccacaaagcaaggaggcttgtggtggctggccagctgtgaaacttgattgatatgtgagatatggtctctggtaatcgattaccaagggtgggtaatcgattacaaggcttaaaaatgaagacaggaggctaagatggtctctggtaatcgattaccatggggtgtaatcgatcacc

SEQ ID NO: 191524 - DNA, 456 bp, Glycine max
  unsure (1)..(456): unsure at all n locations
tctccgaagggcatggttatttccagtttcctgaanatatctaaatatcttgccaaatgacggtccttatccttcttggaaggactacaggatatgctacttccataccttcattcacagctttatcacttctactcttcttttcattctcaattttttcatctttttcaatttttttatttcctttttctttttctacttctttttctttttcttgggcaataaattcttttttcttgaccattatttgtttctctttttcctgattgttttcacctctcacatcatttttcttgccatcaatacctttcttttcatcagctttcttcttgtgcacaacactctcctcatcctcagcctccacaaacctcttactccttgtcatcacagctttgcattcttacttgggatattttttctgtattcgccacaaaactatcggatgacttgtaacta

SEQ ID NO: 191525 - DNA, 412 bp, Glycine max
  unsure (1)..(412): unsure at all n locations
agcttagctacacacacctgtataatagtttagctcaactccttgagatgagaagctagagcttanctacacaccccctataatagctaagctcacccatatgcgaaaaaacctgaaaatacaaaaaaagtcgctactacaaagactactcaaaatgcctcgaaatacaaggctaaaaccctatactactagaatggccaaaatacaaggcccaaacgaaggaaaaacctattctaatattttcaaagataagcgggctcatacttagcccatgggcttgaaatctaccctaaggctcatgagaaccctagggccttcccttggatctctagcgcaatcaacttggagtcttctatccaatgcccttgcggngtaggatatcatcattccctccaccttggaaaggatttga

SEQ ID NO: 191526 - DNA, 311 bp, Glycine max
tctgattctccatgctcaattctagtttgcctttccccatatctactatgcagttggtcgtggacataaaagggtggcccaatattatgggaatgtcacgaaccttctctatatccataaccagaaaatctgtatgaaaaacaacgtgcttgacctgaattaacacatccttaatcactccatatggccttgtgatggagcggtcagctaactggagggtcatgcgtgtgggcattatctctatctctccaagtcgccggctcatggaaagaggcattaaattgatgctagcttccaagtctatgagagct

SEQ ID NO: 191527 - DNA, 420 bp, Glycine max
agcttctagccaaatggacttaccttgaattaattcctttgatagcccttttgagccttgtttccctttccttgttttgaagctcactacaagccttaaatgaaaaaccatgatatcaccatatccttaaggaattttggagctttggaattgttttgggaataagtatggggggtttttgtttcattggataacttgttttgttggctatgcttcatgatgtattttgggccatacttgatgtacattgtatattggttaaatgttggacatgctgaatgaaatgttgtttctcaaaggctatagagtaaaaaaaaaaaagaaaaagaaaagcaataaagttgagtgaataagatcttaaatggcacaagaatgatgaaactcttggttctactctttatggttaaatattatctttac

SEQ ID NO: 191528 - DNA, 418 bp, Glycine max
agcttcttcttcttcgttatcgttttttttaataatttttaaaataaattaaagataattcattagggttaggacccttaaaaaaatgtttatctttagtgcctatcaaacgttgacacgtggcaatcaaagctactgcctaacggtcaacatccaattgtgacgtcgggggaccaacattgcaattttttataaaataaaggacccaattcgtgaattaaattatcgggggactaaatgcaaaattggacctaaagtaggggaccaaaagtgcaattttgccttttatttatatacccaaaggaaataggtactactagttggtgcatatttaatggtcaaataatgctaagagttttactagcagcttatcatgtttgtatgttgtgtgttggtgtatcacccaaaggagaacatt

SEQ ID NO: 191529 - DNA, 310 bp, Glycine max
tatccttgcatggagtgccattttctataatatcagatcgaggtccttagttcacagctcaattttggagatctttccagtaggccttaaggactagattggatttgagtagtgcttttcaccctcatattgatggtcaatcagaaagaacaattcaaatcctagaagatatgttgcatgcttgattttggaggtagttaggatcaatacttgcctttggcagagtttgcttataataataattattagtctagtattcaaatgacttttgaggccttgtatgagaggcattgtagatcactgattgggt

SEQ ID NO: 191530 - DNA, 415 bp, Glycine max
agcttacccccactattactcacaaccactcaccaaacttatcaatgttaagaaaatgacatcggcagaaatgcagttgagaagagaaaggggcctatgctttacttgtgatgacaagttttcccctagccatcgttgtcctaataagcaatattttgttccacagtgggaagaagaggatgaacctgcattacaaccagatccaccagacgaggttgagacagctggtgaccctagtttgcaagatcatcatttgtcttataatgctttaaaaggctcatcaagtcttggaacaatgaagtttcaaggatcaataaatggattgggagtgcagattctactagataatggaagttcagataatttcctccagcctagactatctcaatgcctgaagttacctgtagaaccaatt

SEQ ID NO: 191531 - DNA, 369 bp, Glycine max
  unsure (1)..(369): unsure at all n locations
tatcttacctatctatcntccagatgtctttgccaagaatcaatggataaaaaacatgaagttctaattcaagatgttttctttgttgcatgggcataatgcaatcactctatgtctagcaatgattttattaagatgtccctacctttgagttctactaaaaattatcctctctcgagcgactaatccctaaaactgatgcatataaaaccttcaatgtatttctactaaggattaccctctttcaagcgccaaacccctaaagatgatgcaaggatgaagcatataatacatttgttggcattttaagcctgccaagccctaactaaacgggtttagcctttcattgtcatgagagactattacact

SEQ ID NO: 191532 - DNA, 413 bp, Glycine max
agcttccacatacttgatatctattctactattttcagctaacagaggttcgacaacagaatgacctccaaggccaagatagagcaaattggagagattcccaatctgagatggaatcttcccatggaatcgagtataagagaggtggaggtgagtcaaggaggtcattgcacaaaggaaagaaggaattgccataccttcaaaataattgtcgctcaagtcaagatatcgaagcttagagagattcccgatctgagagggtactgttccgttggcagaaacagaactcaggtcaagatacaccaaatttgagagattcccgatctgaggaggaatcttccccatgaatccagtatgagagaggttgaggtgagtcaaggaagtcattgtcccaaggaaagatagaattgaca

SEQ ID NO: 191533 - DNA, 382 bp, Glycine max
  unsure (1)..(382): unsure at all n locations
tgaggatgcttcagtcgcaggagttgctntctttccaatgtttctactatcatactgcgccaagcaaatagcagaacttaatataatatccacaggcaaatctaaatcacgttcaacaacttgaattccttctttctccattgcaagaattaattggtaagagcttcttctagacattatcatttccttatctacattntgagtatttacgatcataactgttccaggaaaaacctccatgcttttatgatcatgctcagttntcacagcaggaattagtggcgcatgattatctgcttcacgtgcaacctttgaagaatttttatcatagctttgctccacaggacanaagttcagtagtctctccaagtcctgttcatac

SEQ ID NO: 191534 - DNA, 415 bp, Glycine max
agcttgttctcctcctcgaagctcttctctagaaactgaacctggctcgcagagagacgtcgcttcttctcgggttgatgaaagtactcgtccatgcactcatccccattgtcgtccatgtcaaacgcgcggaagaaggagccgttacaccccttccctccttctccttcaaaactcatcatggatctcgaacctgaaccaaattataacaaaaacaccatccattagtcataagtcaaaaacaaaaattggtgagagagaggttagattagttttttttttttttttttaacgaacaaatgctattttgttaatttttgttacaaatgttagtccagtatattcgaactcacgatctctctttcttttgttctttcccaactcttgagtcaacctccccatatatcttaagatg

SEQ ID NO: 191535 - DNA, 354 bp, Glycine max
  unsure (1)..(354): unsure at all n locations
cttatcccattggtgaggtcagctacatggatcacacctttctcttcngcacgggtaaaaaccaagctttcaaaaatattgttaagtttcaagtcttccttgatgagttcctncaatgacttaataaagtacaaaaagttatatatgaaaactataagaataacccataatgggtatcattcctcaatcacttacttggaaatgatgtattttgaacaaaaaattggaaaagaaagccagctaataacccagttccaaagacaccaatatatgcagtaactgcaattatcaagaacacaagtcagtaatcactagtcagatctgggagaagaaaatagtaatacacccattatt

SEQ ID NO: 191536 - DNA, 394 bp, Glycine max
  unsure (1)..(394): unsure at all n locations
agctngagtttattgtgttgtcatattgtttattcatcaatcgggaaagaatattgcaattacctcttaacgggggtttaaattattagttgaattatctatcaactatttcagtttattgatttgtaaaatacatatttttttttcatggattagagattatacttatccttcaacttgaatcagagactaatcttactcaaaatataattaaacacgaatttgattttacattatgtcaaccttttggattaatttactaaatatttgtttaaactagtttttttaccataccaaaaaaaatctaaaattatacaaaaaaaactactttatttaattaaatagataagcttaagtttaagactatatttgattatttaaatgagacaaattt

SEQ ID NO: 191537 - DNA, 403 bp, Glycine max
  unsure (1)..(403): unsure at all n locations
tcacatcacacaagtagcaagcattcaacttacagggattctaacagcccatgacttcgcaatagcaacgacacccttctagagaccgttcattccgcggtcatgctccccaaaaccttcatggaagtaagcacccaaaaaccaccctgcacaccattgaaaaacacactcaattttcaaacctcanactctccaaaacacaaatccaacacaatcatgaacaaaaacaaaaaagagcaaaacataaaaccaaacacacccgcaataaaagggtcagcagtgcgcagtgtctcaaggtccaaaacagaaaagtcatgactatatcttgccaattgtcgaagacacaaacaaggccaacacatccgcaccagctagcatagccacacgcctacaacacatgcat

SEQ ID NO: 191538 - DNA, 456 bp, Glycine max
  unsure (1)..(456): unsure at all n locations
tcctcttagtcacctgcggcatgcaagcttatatcaatatattntttctaatacttatcatttttattttcaaattttgctaattcttattcttattattctttatcttttcattagcaattaaaagtttaacttattattcaattttcatttttgtaatggtttatttgattgtgaagagaggaatagagaacatacctataataaagagataatttaaaaaaatagagtggaaataaactttaatgttgatttgtttaatttaaaagaaataaacctataaaattactcttgcacccttgcaagcaagcattgtcaatcacaaaaaatttctttctccaagctgaagagttacacacattgttcttactaaaattcggaacatagcacatcaggtgaacatagctaagtggggtccccaacttcacatgacaacttggagaaatacctttgaca

SEQ ID NO: 191539 - DNA, 401 bp, Glycine max
  unsure (1)..(401): unsure at all n locations
tttctgatagatctattatgatgacacaaataaaatacattagggacttgttgcacaaaacaaaaataaccgacgctcagcctatctgctctcctatggtttcctcctgcgaactctctaaaaatggcagtgatctctttcatgatcctaccttatttcattcacgtgttggggcactccagaatgccactttgactcacccagagaataactactctgtcnacaangtctgccagtgtatggctcaacctttagacactcattggactgctgtaaaacatattctgcactatctatagggtactgtttctcatggtcttcacttaagacctgctgctcttgggaagccactcaatttaactgccatgtgtgatgctgactccgcttctcgatgtgatgac

SEQ ID NO: 191540 - DNA, 430 bp, Glycine max
agcttgcttctataatctcccgctttgtgatgatgacaactctgaaatgaagaaacacatacacacactttttcctagtcgatcactcacttaattttccattctccccctttgtttatgagtttatgcttccttgaaattaagttaattacttatgtgagttcttgatttaatccctatttctctccccctttggcatcaacaaaaagccaaagtgcgtaacaagtagaaatcatacatacactactaatcattcacaagtcattcattgaggaataaaaaaccaatcatcaagcaaggaacatgaatagatcaaatatataaaaactacatagttatataacataattcataattgttcaaacataccatgcaaataaaagaaatactaaattgttcaaatgtcataataatatagatcattttgata

SEQ ID NO: 191541 - DNA, 392 bp, Glycine max
  unsure (1)..(392): unsure at all n locations
tctcaaacaaataagcactattgtcgacaccaaaaacagagttatctattattgacaatgatgacaacaacagaaaacatgatgatgacaacaaattacgaagcaagcctaccaacttttgttgcactttcttggatggtgatgaatactctaactgcgacaaataaaacaaatacattagtccacaaacaaacacaaactttaacctaaatnttatttaactcgtaatagcttacccattgaatctccaaaattcataacagaagttatgaagttgagttcactgtacttttgttctactcaaacatagtaagttactaatgatgaataagaaaggtgaaacaaaatgtcaacatacttcatcaaatgaaaaaatttagacataaaacaac

SEQ ID NO: 191542 - DNA, 418 bp, Glycine max
agcttggttcgaggtacttacccgttgattatcgaagaacgatgaagaacgaatgaagaacgtcgaagaacggttgaaacctttgcgaaattcctcacggaaaacgttacggaaacgtttcggaagcgcctcggcttagattttcttcacggaaatgattttcccaagcaaattcgaaagagagagaagtgcctaaggggctggaccccttccttcttcatttcctcccctatttatagcaaaataggggaggtggttgccgcccagctcgcccaggcgagcagggttgcttcctccagaagcaaccgccttctggaggaatcttctggagggcccaaatgggcctgggtgctatttgcacccccatttttactaagtacacccccctctgctgttttttggtgattcttttttcgta

SEQ ID NO: 191543 - DNA, 384 bp, Glycine max
  unsure (1)..(384): unsure at all n locations
ttttaaatgattgtaaagactcggataaacagaatatgttaaaaaaaattgatttacagtccttaagccaaattcttaatgagaagtaacagaattatggaaaaacgaaaaaaccaatggcatgaaatgctatggaatacaactctagattgatcacactctttgtccttctcactcccccaaatttccattttcatcccagaaaataaccgtgttttggattcatgaccttcaacagcgtacaccttaaatatgtaacttacttggtcttctttacatctttttctgcctcttggttgaattgcatgtactgttcaagcaattccatcgtaatcctctacttctgctcgtcttccaacaacctcattgcctcangttcatggt

SEQ ID NO: 191544 - DNA, 422 bp, Glycine max
  unsure (1)..(422): unsure at all n locations
agcttgtgcaatttcgagcttagtaagcttgtgacttgtgatttagcatgaactagtacccttgtagggagtagtataagccaagaagcagctcataatattgactgtgggcattgtgaaattgaaggatcctccacgaggttgcatgatttgtcaagttgtctttagatacttgccattaaaatatgcaagtgaaattcatgtttctatattatacagtatacaatcttttatcaattcttatgtgagcaacaactatctctgattcaataatgccttgttgtctaaaaaaatgatgttttattgagaactttagattgagtttgccctttgantaatttgaatctgctgaagtcctaccccaaaatgtagatattgagacctctgaatgtattgctaaatctcaaacagatttgtttgcg

SEQ ID NO: 191545 - DNA, 391 bp, Glycine max
  unsure (1)..(391): unsure at all n locations
atatgcatgtgaattatgaagcatcaacaagaatcaagcccaggctattgtgcaagcaatcaatggggcaaaacacaccgaaagaatatgatgatggatggctcaaattctcacaaaaggtaacttatcactttcaaattgagctttcaaaactatcatgacatgtagaggaaaaacaaggatttcaaatcacaaaatgtcaagagacttttattttcagaacaattacccatttcttgaacatatctgaaattctgataccagcggacagatgtcgtacaggatgtcacgacatcacgcttcagaacatgcagattgtatgtgtccgtttgaacagattanacangtaattacacaagagaattgtaacccagtcgttcacctcactaca

SEQ ID NO: 191546 - DNA, 422 bp, Glycine max
agcttgcatgatttacattctccccctttctcaagcatattcttaattcttcttgacatcatcaaaatcttcatgatttacattctccccctttttgatgatgacaaccacctgtaggttaggagcaacaacaaagaaaaaatatctatttgcatatagtttactcccccttggtttttcaatgattgcttatatgagacagttgaagatttcatatttttcatatgtaaacaaattgtctcataaagaatagataatttttcttactattttatcttttatctttttctccccctttgtcaacatcaaaaacaaatcatgaataaagaggagaaagatgttaccacttgttgattacatacatatattttatctgttatcttgttgattgcaatgcatgagaatcaagtgataccaaaaag

SEQ ID NO: 191547 - DNA, 421 bp, Glycine max
  unsure (1)..(421): unsure at all n locations
ntgaatctgattcgagaacttgagatgcaaaggatgaaagattctgatacagtcaaagattatgtggacaagcttctcagcattgcaaacaaaatatgtcttcttggcactgacattcctaactctcgaattgttcaaaaaatacttgtaacaattctagaaaaataagaagccacattaacttccttggagaactcaaaagatctttctactatcaccttggcagagcttttgaccgcacttcaggctttggaacanagaagactcatgagacaagaaggtactactgaaggggatttggtagctaaatcacaggacaaaaaaaagaagggcaagtcacgaagtttcaaccacaaaaatggtagcaaatcctctcatgatattccatcatgtcccttttgtaaaaaaaaaaaacaatcat

SEQ ID NO: 191548 - DNA, 358 bp, Glycine max
  unsure (1)..(358): unsure at all n locations
agcttactatgaggcatggtattatacattttgtcttggatagncatcaggattaaggacccaaactgtgtcttccaatggcgctcacaggtaggttttttgaacatcctcttccataaattacaaactgtgtgttgggaacctggttgtagcatccatgtactgagctgttttgaatatgcaggctgagattgccatgagggaggcacgcaaccctggaatgacagatgatgaggtttgttgctcacatgggtctctgttttaagtatgatgaaatggtgaatgatgacgatgtatctctgtgataaataatgatgctacatctaccttctaatgattgaagctaagaattttcatg

SEQ ID NO: 191549 - DNA, 249 bp, Glycine max
ctgctgctggtgttttctttctgaattcgattcctgatgtgaagcttacatcataattgcgaatatccgtactttgtgacgatttagtccctcatactgatgttcgttataccagtttactgttggcatcatataattaattgcttcatgcaaccttgttaattcacgactctggctagtttatactctggaactgtctgtatcttgaactaccactctcaggtgtgacattctttcgaactgcaatgc

SEQ ID NO: 191550 - DNA, 401 bp, Glycine max
ttacagcagatgttagttatgaccctctaacccaaatataaaacaacttaatgccattaacctagggaattaataaaaacttaatggctgaatgtaactgaaattgtggcaaccaaaagtcacccctaacagccaacaagtcaaccaccatttggtctcccaaaaagctgatgcctaggttgccaattgggcccttattacaacttgaactaaacctaactaaagcccttttaattgattaacccaaaacatatttttggccagccaactttacaaggattgggccattatttagacaaactaaacactctaaaaattgacacaagtggtgtaatttagtcctccttcatttgggccatgatacaactcacaaccttggactttttccttgaaacttgggc

SEQ ID NO: 191551 - DNA, 318 bp, Glycine max
tttgacgtatcgactagtaacttcttgggattcctaattcatcaacaaagcataaaagttgacaaaaataaaagcaaaaatggtcttagaagttaagcctccctaaaacaagagagttacaaattttagtatgaaagattaatttcttgacaagattaaaaattgtattgtgaatatgagcacattgtgtctgaagcatagaaaaacgcaaaggctaatgaagaacgagaaaagtaaaagtggagctgacgtgatggaagcttgcttgagaacatctatggagggtggatctttgagtttcaatgaggtgcttcaatg

SEQ ID NO: 191552 - DNA, 413 bp, Glycine max
agcttgatgaggttttctgtttgtgtatgtattatattcataattaagtcgaagtgtcgaactaatatggtaactgaaatgaccctttatcactgatctattgatgaaggaggactgaagtttggcatggctattaaatgagaacacgtggagaccctttatctgagaccattcgttttaaccttgcgcgtgattttgctttctaatcacacactctcgtctcgtgtctgttaacgttgtttcttttatttgcttcggtggtggactggtggtcgatgaggaaagttgttgaaaatttgtgctaaggaggcagcataataatcttggtcacgactcgcgagagagcttagcacatgcattggagttattctccatcgatgagtaagcggcgccttttcatcttagaaataaaa

SEQ ID NO: 191553 - DNA, 399 bp, Glycine max
  unsure (1)..(399): unsure at all n locations
ctggacgtgtcggtcaagtcttgtcttagaaatatactatatgctttattatatttttaggaaaaaataaaataaaatactaatgaggtcattacttgtctttcttaagatgatgtgttaattaagttagcagagacattctaatatcgcaaatgttaaaaaggaaaataagactagtttagtttactcacgagtaaacgtgttgatttgttagtgaattgtttattactagtttataaccacgggaatatatgttcttacgcttaattccctccctcaatattattagttgtctctttaccaatttttttatctcatcgttcgtgtacttctatttaattatcattactntntttggacagttttggtaccggacgttgaatcaaatcaactaaatta

SEQ ID NO: 191554 - DNA, 413 bp, Glycine max
  unsure (1)..(413): unsure at all n locations
agctntgtatggtagagatccacctactttggtgagatatcaaccagaaatcactgatgttccaactgtgcaagagcaattgactgctatagatgaacttttgagacaattgaaggataatttgatgaaggctcagacatatatgaagaatcaggctgataagaaaagaaaagatgtcaatctacaggtgggagacttggttctagttaaagtacaaccatacaaacaacattcagctgctcttagaaagaatcataagctgggaatgcgcttctttggcccctttaaaattctggccaaagtaggagcagtggcctacaagttagagttacctgcagaagctagaatacacaatgtcttccaagtctttcagctgaagttgtttaaaggaacaccaggagaacaatacttgc

SEQ ID NO: 191555 - DNA, 462 bp, Glycine max
  unsure (1)..(462): unsure at all n locations
tttcggacctttaaactaagcttcacatagtattttaaatcttatagaacaaatattatttttaaaattgttctttcagcaaaatttaaaaaatgatagtaatacacatcttaatccacattttaaagaatggtttattttaaattaaaatttatcaaaaattgaaaaacaattttaaatatcacttattatttaaaataaaatttaattaatactccttccgtcccataataagtatcatcttaaattttcattattaagatctagaaaagttaattaataaattgattagagagaataataattttataaaatcaaccatcttattaatattacattaattgaaaacctaaagtaatacttgttaagaatattagtgaaaaacatttaaaacacacgatattatgtaaaaataataatattacatcannacaatatcatgacactttgagactttatttt

SEQ ID NO: 191556 - DNA, 411 bp, Glycine max
agcttgaaggcgtgtaacccaccatcttcttatagtagaacacaggtaacatgtctactatcattgttatcatctccctctccatcattgggggcactacttgagctgccaaatccatccacctttgggcgtattctttgaaagattcatgctccttcttacacatgttctatagttgcattctctctggagccatatcaaaattgtactgatattgcctaatgaaggcaacaattaggtccttccatgaatggactcaggaaggttccagattagtataccaggtgacagttgccccaataagactttcctggaagaaatgcatcaataatttttcatcttttgcgtatgctcccattttcctatagtacatcttcaggtaattcttggggcaagtagtccccttgtact

SEQ ID NO: 191557 - DNA, 358 bp, Glycine max
  unsure (1)..(358): unsure at all n locations
nttctacgagttntaaagtattccaacggaggagttcttgaggtaattaatgtcctccattggaggttttggcatatttctattagggtgatttttgttcaaaaagcaacgcttatgattctgagggaaaaagttgtgcaagatggagactttatgcaacaagggtgaaaattaattatagaaacaaaattagacacaaaaagaaaattagacaaccaaaaagcattatgcgtttctctctatgtatctatctatccttctcttaaaactgcagtgtctgagacgagcgaacgactatgacccgccgtgacttggatctccaacaatctaactaaaacggtggtgtatatcgggatct

SEQ ID NO: 191558 - DNA, 378 bp, Glycine max
gaccttacagccacctgccgcatgcaagcatgtagttgttacatatattgacatttatatgagcatacagatttcaactgcactctgtataagattctattgctgctgatgatgctccaaggtatagctgcgaacctccttcgattggtgtggtgtgtacaaacctcaatgttgacggtcagacaaaaagcattttaataaagccgctgttggagggattctgcgaaatgattctgggcatgttgcctctgcattatcggcttaatattcagttttgctgtgttaagagctgaacttggggatatccttactggttttcgcatttcgctctctcaaaatcaagttgtacagtataaatatacacctatttggggtaat

SEQ ID NO: 191559 - DNA, 347 bp, Glycine max
tcatgtagaagcgtatcaaaataagttattgtcagtaatttttgtcaaacttattaacaaggtcttatctgataagaacttgttgaatcactactaagttgatcacccaaacacatgtttagagtttatagtacgagtacagcaagatttatcatggagtcgagtacaatatagtatggagttgtcttcatgccattatttggtgtaaccactgaaagacaatttggcaggtttaagagcaaactagacggggcgtatgcatatgttagagagattaaaacttcctaccttccaccctgagcacaatagttaataaacggaaaagacagaaacaaagcaaaacttac

SEQ ID NO: 191560 - DNA, 394 bp, Glycine max
agctttgagctaattcaaacgacaataactttttactcggatgtctgattgagtcccgtaatatatcgagacgctcgaaattgaataccgaagctctgagcaaattcaaacgaacctaactctttactcgaatgtccgattgagtcccgtaatatatcgaaacgctcgaaattgaatgttgaagctctgagcatattcaaacgaacaataacttttactcggatgtctgattgagtcccgtaatgtatcaaaacgctcgaattgaatgctgagctctgagcacattcaaacgacaacaagtttttactcgtatgtttgattgagtcccgtaatatatcgaaacgctcgaaatggataccgaagctctgagcaattcaaacgacaatacttttta

SEQ ID NO: 191561 - DNA, 318 bp, Glycine max
tcaacattcaatatcgagcgtttcgatatattacgggactgaatcagacatccgagtaaaaagttactgtagtttgaagttgctaagagcttcaacattcaatatcgagcgtttcgatatattacgggactgaatcagacatcagagtaaaaagttattgtcgtttggaatatctaagagcttcggtattccatttcgagcgtctcgatatattacaggactcaatcagacatccgagtaaaaaagttactgtcgtttgaatttgctcagagcttcgataatcaatttcgagtgtctcaatatattactgcgactcat

SEQ ID NO: 191562 - DNA, 430 bp, Glycine max
  unsure (1)..(430): unsure at all n locations
agcttaagctcactattactaccccacaaagcccctcggaacttgtttcgaccgtattcttcctttcgggtcctctttgtttctcgttccaatgcttcggtggtggccatattgacgtctctcagttcgtcacactcttttcagaccttgatggttgttgtcatgcatttttccttgactgcttgtgccctttcaagctccacctttaaggcttgcacatcctcactctccttaggggtttcagcctcttcctcatttgaaacctttagctttaggagccaatccaactcttgcgcccgagccttcagccacttatgatagccaccgatgatcccattgttgcttccccaaagctctttatctttcctttgcactacgccccatgccttgcggactccttcaagtatcctcgcattgnggtcgctgaaac

SEQ ID NO: 191563 - DNA, 430 bp, Glycine max
  unsure (1)..(430): unsure at all n locations
taagctatttaagctaagtctagtccaacatgtaggatctgagaatgaagcttaatttaaattggtctaaacctacgagggttgtctaaattgagtctaatccaacatgnaggatctgangacaaacttggattgatttagtccaactagggatcgacggttagtaatttatgctacaacatagaacacaaaagcatgatcgataagagaaacatccttatattcatcagctggtctgttagaaagacccaacacttctacctactgctgtcaattttacttacttgcatttttactcattttatcctagacctagtttaattctgtttaaaccatcattatcaatgttctttcacaatgccttattcttgattaacccgtctagacagtttcctgagtcatactcgatcatagttaaatttaaaactga

SEQ ID NO: 191564 - DNA, 430 bp, Glycine max
  unsure (1)..(430): unsure at all n locations
agcttgatggtgtggtggtgaatgggagcttgtataggtctcttgnggggaattagaatttgtcatttgcttatgttgaaggggagagcttgctcatgggtttgaaggaggtggctgtgtccagtggcagtgcctgcactagtgctagtttggagccttcgtatgtgttgagggcgtcgggagttgacgaagacatggctcacacttctattaggtttggaattgggaggttcactacanaggccgaaattgatagggcaggtgagctcaccgttcagcaggtggagaagttgagggaaatgagtccgctttatgaaatggtcacggaagggatcaacatcaaggatattcaatgggcacaacactgattatcaagctttattatttagatatattgtatccttgatgttacatgacaattaagaattta

SEQ ID NO: 191565 - DNA, 412 bp, Glycine max
agcttggaactaagctcctttttctccaccacttgtcacccatagactgatgggtagacagaggtagtgaatagatctctatccacattgttaagggctcttctaaaatgcaatcacaagtcttgggacgagcacctccctcatgtggagttttcctatgatagggaggttcatagaactaccaggcaatcaccttttgaggttgtctatggcttcaatcctctcacacctttggacctaattccacttccacttgtcacttcttttatacataaagaaggggtatctaggtcagagtttgtgaagaaattacatgataaagttaggaaccaaataaaggtgtatgcagctaaaggcagtagaggaaggaaggagttggtgctcaatgaaggggattgggtttggctccatg

SEQ ID NO: 191566 - DNA, 455 bp, Glycine max
  unsure (1)..(455): unsure at all n locations
gcttcttattaatggagagttttagagagagaaaggtccacgttccagagagtttgagagaatttgttgtgtgaagatctccagagaccagagctagaagatgaagccgtcttgagagcttgagatgagtttgtgagccgattatgaggtcctaaaggtggaggagacatccctaatacttgtatttctgtaatctttcattctcttttctttgttgtaaaggaagcttcccagttatggtaagctaaatcctctgttggatcttccttgtaggtacttgatgtaaatatctgtttatctatataatgatgttntgtgtgttcactgtgctatcagaacttcattctaccatgcctttgccttgatcacgtaaatgcatgtgtttttaggatcattcaacagtggaaactggtatgattcttagaactcgatatgacagggctagtttgtcatat

SEQ ID NO: 191567 - DNA, 422 bp, Glycine max
  unsure (1)..(422): unsure at all n locations
agctntggacaaagcttcaaagtcaataatgacaaagtctctccataattatatatgcttatttgtataatatgaaaatgtatgtaaaggtgatactattcataaacattttaattttattcttatatataagaaacaaatatataattcatcaaaaccaacaaaaatagttaaattaattcattttaattaatattgttgtaaaattaaatttattctaaaaacacttatagtattaattggttgaagttgtagttacatataatgacttatattttaaggaagataaatgccagcgacattggttataatttattggaaatcatcattttttttgtaggttttgtgtctcatttaataattctctctccttctttatattaaatgagaagctaaacataccaaagttgatgatttctaat

SEQ ID NO: 191568 - DNA, 438 bp, Glycine max
agaaattattgggttagcataacttaatgtcccaatgcccatgctttagcaaacatctagaatggaatcttaatgcctcttaattattgagtcttcgcaaacggcatttggaagatatgtaattaaagtaggcttgtcatcgtgaagcatcatggacaagtagatgaatagatgtggggcataattagtttactggtattgataacagacaaatcctgaattcatatatctaggctgattagacttgttaggttttagtaatcttattatatagattttatttttcctttatttgaatttcgtagaagtagttatctttatcatatcgcactctaaatattttatctcttatcttgatctttcatctcttatctttctttaatttctaatttatcttaaatatctatcttttcttactttatcttccatcttcttatc

SEQ ID NO: 191569 - DNA, 422 bp, Glycine max
agctttcaaacccaagataagggactttctatttaagtttattgctatcaacatatgctatgatatcacgagtgtaatgttcatgatgtaatatcacaactataattgtttgaaagaaacatgtttaaccaaatgaataaaatttaggataataaatatgtaatctgcatattaaaaaatgatattccaaaatataaataaagtttacatgtttcctaggataaatttatttaatagagagtaaacaagaatttaaataagtaggtattctttataaataaggacaaataagcttatttgatagagaataaatcagaatttcacctagagagacacatgctatttataagtaaagatacacatatcgcccgaaataggatacaaatattttgtttgagataaattttttaataaagagtaat

SEQ ID NO: 191570 - DNA, 331 bp, Glycine max
  unsure (1)..(331): unsure at all n locations
gtgaactctgaaactaagcttcaacaaatntagtaagatattatccagattaggagcttagtgaagctgctttatattgccaggtgatgaattgtgagatataaaattgtcacaaataacttatcgcgacgtgtcgagcattctaattgtacctcggctaatagaactagaagaacgatattccattcctgcaggatcactacctctattattttgaacagaaatgtatttttgagtgcatcctgcacatctatgatagctatgtcgctcgcgtgtgaaagccatcacatgaatggtagatgtaagcatgtggccctaattgaaataaaat

SEQ ID NO: 191571 - DNA, 292 bp, Glycine max
gaaaattctatgagttcatcttagtggatacagattcaatatccattaaacacttcaaagactccaaagatccaatcctgaatacccattcaaccattcaaatcataaaagtaatgcaaccatgacataacagattaaacctaaaccaacccaagaaattctctattccatttgactcggcaagatatacgtattgggattacattgatgcctggaccaatgtattctggcattaaaataataaatttaaacactcatggttaatctactttaaaaacaacacagtgtataa

SEQ ID NO: 191572 - DNA, 260 bp, Glycine max
acattattgaacttggaaaacgcttgcggttctttaatcttttgccacgtgtgaagtttcccacacggtaataggaactggcagttgttactaacaaggtagctccaactttgtgtatgccaaagacatcagtttcatacacactcttgattcgaagggtaacttgtttctgtctcagtttctggaaggtgtcagcaccaacaattttgtcaccaccaaggtagtaaccaacttggaatctaccatgtgggaagtctttg

SEQ ID NO: 191573 - DNA, 411 bp, Glycine max
agcttctccagaggatgactcatttggaaacatcgcagaccaatcctcagggtccttcgccttcgttcgttcctgtaccaacaaccaacatgagtacggttcatcgcctaaagctcgaggtccttcggtttgatggctctgacccaactaggtggatattcaagatctcacaattctttaaatatcacgcaaagcctgatcatgaacgcctcacaatcgcgtcattctacatggaagggacggcattagcctggttctggtggatgtatcgcaatgggcagttgtcgtcgtggcccgcgttccttcatgcgctccatacacgattttcatcttcaacttatgaagatcccactggtatgttgtgtaagttgactcaacaatcatcagtaacgatgtatctttcagagtttg

SEQ ID NO: 191574 - DNA, 371 bp, Glycine max
  unsure (1)..(371): unsure at all n locations
atggtctgtagagatatttgagttctgactgaaattcgagctacaaagacctattaaaactcaatgcatggctgacttcatggcaaagcttccccctaaacttgtggaagcaatgccttccaagattattttgatgatgctaaagaatcaagagtcaaggaagttttaagaatcaagatcaagattcaagattcaaaaataatcaagatcaagattcaagattcaagtaaagaatcaagactcaagattcaagaatcaagagaagactcaatcaagataagtattataagagtttttcaaaacattgaaaaacacaagaattnttcataaagaaaaatcttttaccaaagggttgtactctcttgtaatcg

SEQ ID NO: 191575 - DNA, 415 bp, Glycine max
agctagccgatgcacaaggattatgaagttcttaacaatcatatgattgaaccaacttacaaggtcaacagttgaatataaagtcaaaccctgagtgcaatacaaccactcccaaccctctgcaatactgcagctgattagggagacccagcctagtccctacaatgtgattattccaggtaaactcacttaacaaattcttcatgttctcagcctgaaaggtagtgtccgcttatttttaaaaagacaagtttagcataactcagcttatacagtgcaatagttgtgaaaatacagctttgtgcaatagttgcaatctgagaaattaataatcaagaagtttgaataatatttacaaaccatgtgcagattttagagtatcactcaactgcaggaaatcagagataatttgcac

SEQ ID NO: 191576 - DNA, 274 bp, Glycine max
ctaccaaaaagacaagaaaacagtaccttgcttcgacaactaaccacgataactacgaacacgacattcctaaaaggttaccggcaaaaaacaagtcttcacgatatctccgcctaccataaaaagtgggcctaatagcactcgttcaaaaacaaactgaatcatattggtgcacacagaactttccactttatcaaaaattcttacattgcaatccaacaccaattttacaaccaaaataatagatttatttgtgagaactccacgaccttca

SEQ ID NO: 191577 - DNA, 412 bp, Glycine max
agcttgcttgtggagcttctatggaggctggatctttgagcttcaatgaggtccttcaatggtgattttacaccatggagatgcagcggaaggtaaaggagaagaggagaggggagacaccatccactagggaataagccatggaagaaggagcttcactaccaagaatgtgccatggataagaagcttgaagaggatgctttaatggaggaaaagaaagagagaaggggggagcatgaaattgaaggaataaaagagggagagaagtggaactttgaagtgtgtctcataagactttcattcatcaaagttacaacaagtgttacacatgcttctatttatagactaggtagcttccttgagaagcattcttgagaaaacttccttgagaaaacttcattgagaaacttga

SEQ ID NO: 191578 - DNA, 289 bp, Glycine max
tcatccctaactatatttgttatgaataccaaagtatgaaatattgatggactaatgagttattcttaagtgaacaagacctactatatatgagcacacttgatattattttttatcctgcaactcctattagtgtatgtccaatcacaagtggaaaccgataatattaaagaataatatccaacggccactatgttgtcgtaaaactagcatccactctttgtgacaaccaatgttcatacattggaatattattttcgtgtctaatagacctaatcacttacacaaa

SEQ ID NO: 191579 - DNA, 411 bp, Glycine max
agcttagcacttgaattgatattcaacattgacatgtgattctatagaacataagttcacaatttgtgcctttctaggcctctcgagggctccaattcattctcaaacactcaacacataattatggttctacatttgattcctaacatgttcttagtttttgaaagtaacaaaaacaatctcaacaacaattcacgaatcaaacaattatctctaaatccttaattcttcaagaacatcaaaagggggaaaagtgtgccatcaattaagcactcaagatacataaagtaattattaaatttgtgcccagggtgcacataatccatccaatttgaagaaaaaaaactgacacatcaatcctattagggtttaaggtcaacccctctacccatggctgatgacacacctatg

SEQ ID NO: 191580 - DNA, 313 bp, Glycine max
  unsure (1)..(313): unsure at all n locations
tgtgccacctacgtaacatatgttttcatggntgaacatccaacgctgtgaatgcaaatttgagaatctctcccgtacccaaatatgaaccaagtagtaaaagggtgaccaaagagttacctcttatcatcaaccaaactaactattgttttcttcaacagacctaaatcattttatatgttggcttaaaatattggtcacaaagctgattatctacaccaaggaaaacaaacttgctcaccaagccattgggagagaaataatctctgcaaccaagtgcaagaaatgttatgctcatttattccactataac

SEQ ID NO: 191581 - DNA, 404 bp, Glycine max
  unsure (1)..(404): unsure at all n locations
agctttgaccttcatgnaattgtattgccattggaataaatcttttggctacttgcaaggattttgtgcaaaagacgtagtgagatagccatagggtcaagaaggctacatgctcttcatcagagacttcctcttcgaccgatcctttgtgttcagctatatatttggaaaaggtgttctccttatatactagcttgatattatcactagatttagtgggatcatacgtttctccgctaggcctaaggcctgtgagggcagctacatctaagagagtaggggtcatcataccacatttaaattgaaaggtgttggtagaagactcgaaaaaatgcatagctgctatcaacatttctggtcgatattccggaccaaatcgagagaattgtattaggtcaaatatg

SEQ ID NO: 191582 - DNA, 363 bp, Glycine max
cctagcctcattacaagccaataaaagtccttcttattcaatttgtgcctttatgacactatgacatgagatgaagttcaaagaatggacctgttgctagtcgttattgataaaaagcttaaacacttgtgcttgagtgaaacagaagctgtgagaattcggttaagcatctttccatgaactctgtctcttccctagcttcatttagttgtgttgcttgctaacatgttctcttctctgaaaaactgcatgccttgtgaaaagcaattgatagaggcattatgtttcatttatgttcatgtgattaatatttttgtatacaacacacttttgtacataatcactgcatgttttttatcactt

SEQ ID NO: 191583 - DNA, 431 bp, Glycine max
  unsure (1)..(431): unsure at all n locations
agctngtcacgcaaaaattcaagataaatgatccatcaatcctataaagtactagccatcgagactctagtgtgcaccaccagataaaaagatgattgccctcattccattaaactacactccaaatacaagacatgatccaatattcctataatgtactagccatctagactctagtgtgcaccactagaaaggttattgtccttattccatcaacatcaaactacatcttgtcacaaaccaatataatatatacaacccaataagatttaattttttttttactacatcatttaatctgccccacttcctctgccactcttagccttttagcggttgttctttcacacagttgacagtgtaaattttttcaaaattataaagaatataatgaacttgctataggatataaaagaagcaaaatataaaaa

SEQ ID NO: 191584 - DNA, 400 bp, Glycine max
  unsure (1)..(400): unsure at all n locations
actgttcgagaaaatacccaattaanaagtgaaatgaatgaagaagatatgatacgggaaaaaatggaaaaagagaggagaagattgagaaagagaaagagaaagatgaaagagtgggacgacctcgttggaacgtgattggcgaagaagagaagtggtggctctggcggtgcagcgagcaagaggtgaaacagtgccgtttggggtgggattagtatagaaatgaggaagtgtgtacagaggggttctataacggtcgaggagatggatactgtcctaagagcagcaacaccactctcaaatgctgtagcaaaataaacaggggttatgaanatatcataaacacccctgttttataccaaatgtcatatttttatgttgtccaattttataaaatgaa

SEQ ID NO: 191585 - DNA, 429 bp, Glycine max
  unsure (1)..(429): unsure at all n locations
agcttgttcttgattttntcgaagttctttattaagctttgaacaatatacttgcccttcatttaactgtctctgggcttggcggccacgctcaacaaagtactttcgacacctactatacgttgatttgaccaatgctattatgggaatgttgcgacaatccttcaaaaccttattgatacattctgagaggttggttgtcatgtggccatatcgacgtccttctctatcataagccgnncgccatttttcttttgaaatgtgatcaatccatgttgctatggctggacttagctcacgaaatttttctaaattttgataaaaaaatgtgcttgcaaggagtgtaggctgcataaaattagttatgaataacaattntaagtatatatggaagttaaattaacgtgaccatcaaatatgaaatcttac

SEQ ID NO: 191586 - DNA, 329 bp, Glycine max
  unsure (1)..(329): unsure at all n locations
gaagaacaaaaatgttcaaccctcttggtatctgaaattcacttaaaattagtgagaaaaattattctcatgaagaaaatctaagccgaggcgcttccgtaacgcttctgtgactttttcgtgggtgatttcgcgaagattttcaaccgttcttcgtcgntattcgttcgttcttcggtcttcaaccgataagttcccgaaatcgaacttttgaattcattctatgtacccttagtggtcctcatttgtttcgcgtgcttnntatttcatttcatttactttctgtacccccttttgacgtcctttagtcatttatttaagtcattttc

SEQ ID NO: 191587 - DNA, 420 bp, Glycine max
agcttgcactctgtatatataaggacaatgtgcatgcacacaaataacgcatgaatttggaatgtagaaaggataggccaataggaacatctaatgtataatctttaccaaataagactttttttttaacatgatgttgatacgaaattgtcactgttgaaaacagtatgacaaatcttcatcagaattcacacaaagtaaatatttttctcttaacacgatttattacataattaaagatcaatcagaattaaaattctgaattacttgattaagagacacaaattactatcatttatataaatcattagtggttaacaaataggagtctaacatcgggtaaatgtaaagaaccgttgaatgatcaattaagatgccgattgagttgttcaagtaatataatatagtgaatatctaatg

SEQ ID NO: 191588 - DNA, 359 bp, Glycine max
  unsure (1)..(359): unsure at all n locations
aagctatagagcttctcatagcttctcgggctttttgagaagcttctcaagaggcttctttgagaagctacatccttatctatccacccctctattaactaaattaacttccttaaaaataattacggatgaaaataacgcancgaataatccaaacatcaacataattactaataatatatagatatatatatcagggtgttacacaccctgccatgacctttgcaatctgccacaagcttcatcgtgaccttcgaagtctgccgcaagctcgtcgtggatgcaatggtaatctgtctcagtcttgtccctgtcataccctaatttaatctggtgactatcgctcattgatctttgat

SEQ ID NO: 191589 - DNA, 413 bp, Glycine max
agcttaacaaatcgatgtcacatatgtactttgtaatgtttaccttcctgacattatcatagtttattggggctaaaatatgcgcctggttattggtatttttttaaatgataattggtttggcagagactagttcagcatcagcctacacagtatccaacatcataggagttgagtattgggaggatcaagtttaaagcttttgatctcgggggtcaccagattgcacgaagagtctggaaagattactatgctaaggtctttttctcttgtccctctcctaacacatacacacattggtgcatatttttatacctgattgcaccccaacagttgacttctcaactctgttttacacctgctaacatcacttgatggaacttggctatatacctataagactcgcctggaat

SEQ ID NO: 191590 - DNA, 419 bp, Glycine max
gcgtgactcctttgacatcatctgaacctgtaattgttgtagggtgatagttgagtccaacctttggatacatcgctacaataaaaagtgtaacgtctttcgctacaataaaaaggggatcattctcaacgatgtgtcactaacacacttattacctattacggtccaacctctgccaccaatcctcccaagtcttgatggttatataaatttatggcgatgatagttgagaatgatcatcacagatggatacatcgtgtaccaattcccaagctcccaactcaaaaaacatagtctcggagctcattatgaataacaaagtgagacctgtgacttattcgcgctaaatgagtgcaccacatgctggatagtcaccactcgttaattctcccacgtcttcgaacctctttaccactata

SEQ ID NO: 191591 - DNA, 422 bp, Glycine max
agcttgcctgtccgatgcagcagtaatgatggcccgtgttatgttggggaacggttacgaacccgaaatgggtttaggcaaagacaacgacgacataactagcttgataaatgccaaaggaaatcgtgggaagtatggtttaggctataaacccactcaggcggatataaagagaagcatcgcgggaagaaagagcggtggtcaaagctcgcagttgaggcaagaaagtgaaggaagcccgccctgccacataagtagaagctttataagcgcgggtctgggagacgaaggtcaagtggtcgctgtcgcaacctacccttcggcgggagggcgacgcgtgactcgcgggatgcgtgttccacgaaaggaatacgcgcggagtcgccaccaacgtttatttgaggaaaacgtcggaaaaaccg

SEQ ID NO: 191592 - DNA, 464 bp, Glycine max
  unsure (1)..(464): unsure at all n locations
cttgctgcctctacatcctctgcccttatgcttacatctgttctttcttcccttggtgtataagaagctgcctccatgaatggtagcttaaactctactgggtttacttcagggttacctgttttccgtccagagaaaagacaaaaacttgaaaaacaaatgcatgcttctgagtttaacagtactgatatggggagctcttcttttctgggcactttacaacaaccatcagtagcaaatgtgccactgacacactcaatcagcttgcaacccataccacaacccaaccaatcacaagctgcatttgcttcaggtcccccacctcctcattcccccgtgaacccaccagcaaatcagtttgttcaatctactggattaatggttgggggaattccttatcgatatggatcanacaacctaccacctccaccttcacctncttttactccacatgtggcaatggg

SEQ ID NO: 191593 - DNA, 426 bp, Glycine max
agctttgagccaaaatcctatctcaccatataccttgacccagggggagaatgtcaatccttaccctcggaagcaaaaaagaagagaaggaaaatttccgatcaaagaaaaaaaagagaaggaaaatttccaatcaaagagaaagcaaaaaaaaagagagaaggaaaatttccaatcaaaggaaaaaatagaggaaaggaaattcccaatcaaagagtgggagaaagcgaaaagaaaagaaagaaaattcccaaccaaagagtgggagaaagtaaaaggaaggaaagaaagctcctgatcaaggatcgaaagatatcagaagaaatgtgcagaaaggtctttggaccggacaatatatgtacaatacagaattgtcaccaaatgaacaaaaaaaagggaaaggaaaccacgatctgaaagtggtct

SEQ ID NO: 191594 - DNA, 312 bp, Glycine max
  unsure (1)..(312): unsure at all n locations
gtctaagaacggaaatttctttaatgtttgacattattgcaaaatgacttttcttcttagctaacctcttggaggagacacttacctccttacactcctccttaaccattaaagggtggcctttntttctttttctattcttttcctcatcccatttgagttttatttgtacttgatccttagctacttgtgaaggtgtttgaggatgcaacacaaatttagtgccaagatgggtgagggtaaccttattagttaggccatcgtaaatgatcttcctatcaaattgtcatgggctttctaagaaaatatgcc

SEQ ID NO: 191595 - DNA, 291 bp, Glycine max
aacttgaaatttggtcatgcccaccctctatcagccacttattctacactccaagggatgggaaagctatatgtacctgtaccatacagcgccaataatgattctttaattgaagacctaagttttatttaataacataaatgcctatatgaagcattgggtcaccttgatatgaatataatatcaatgaacaagggagtgctaagtgcgaggaagatatatattgatgttttggaatacttgacccactcactcttaaaaaccattgaccgtacttttataccaagtgat

SEQ ID NO: 191596 - DNA, 371 bp, Glycine max
  unsure (1)..(371): unsure at all n locations
gttaaaattgacttatgcatgaacaaatttatagaagctatcatttatgttctcaaaaagcttattttaacttataacctgaccaattttttacttatgagagaagctttagcttcttattttctcttctcttataaagaagcttatntaaccaggccctttagtcctttttagctagttatccaaaggaattggttacagtacaaggcaacttaccctgttggaatgtttattactactaatatagtgtagcggcatctcatttctcacggtattgttggttttagatcatctagaattataatgagcattggactttgatatcttgtgagtcatatttatgaacgtgtctaatgtatatgtatgtacat

SEQ ID NO: 191597 - DNA, 408 bp, Glycine max
agcttgtacttttgaacacttgcttatcttatccagagctttcagtttctaaactaagtgcttttaaactatttgcataacttttgttgattttgttacttatggtgtgtgtcaggtatttgtgttccattccttgtttagttatgatgcattttttgatgatactcaagtcatgtgtaacttttgaacatctacctagcccttgactggagatatctttcaagcatgcttttgatcatacaaaacttttcatttctattgcactttgatatgggaaaagcaagattttcctttcatgattctagctagtaaactctattctagtagtcctacttctattgtggctgatcctatgtctggaaggttgacatacttcaagttgattcttcgtacctttcttgatgctta

SEQ ID NO: 191598 - DNA, 376 bp, Glycine max
ttgatgcaacatatggagatgttaatgaaacaactagatgatgcgctccatgagaggttggatcaaatggagaatagagatcataatgaaaaagaaaggaggagaaaagggaatgatggtgtttctatacaaaaccgaattgatggtattaaactcaacattcctccatttaaaggaaagaatgatctggaggcctacttggagtgggagatgaaaatagagcatgttttctcatgcaacaactatgaggaggaccagaaggtgaagcttgctgccacggagttttccgactatgctcttgtgtggtggaacaagctacaaaaggagagagcaagaaatgaagagccaatggttgatacatggacggagatgaaaa

SEQ ID NO: 191599 - DNA, 383 bp, Glycine max
  unsure (1)..(383): unsure at all n locations
agctntgaaaagtgttgtgtttcaccttctcactaagccaatctgctggcttagcgagcatttgctaagcgcatcactcctgggctaagcgcaaggaagactctggaagaagatgagatgtataggatcgctaagcacaccgcttcatctcactaagcacaccgcttcagttaatccgctaagcgagaaaggcacgcactaagccaaaattcactaatgtgcgctaagtggtccataattgcactaagcgcacgagcacgaacaaggccacctatttaagcctgaaatcagatttcagagagggagtttggactgggattcanagctttgcatgtctatattttctagagagagaaaggtccaagttcccgagagtcttgaaa

SEQ ID NO: 191600 - DNA, 325 bp, Glycine max
gtgagacatttagcactaagtaaagttttcctgctggttgaaattgcctttagcgagatggtgtcactaagcatattatttcttttgggaagaattgcacttagcgagttgctgtcgctaagcaagctgtttagatattttatttttgcaaatcccaacggtcaaaacctgcagactggggttgcaaagctatactcaaagtttgaaggcgatccaacggttaataagtttgagattgtggttttactaaaacatgttttgggtcaatctcgaaatcagacagttccagcatagatcaatcaaactccatataacctaacatcca

SEQ ID NO: 191601 - DNA, 411 bp, Glycine max
agcttctacttatgtggcagggcgggttttcttcactttcttgtttccaacgcgagctctgaccactgttcttccttcccgcgatgcttcttttcatgtccgcctgagtgggcttatatcctaaaccatacttcccacgattcccttgggtttttatcagactagttatgccgccattgtctttgcctaaacccatcccgggttcataaccgttccccaacataactcgggccatcattatcgccgcctcggacagacaaggttgcccaaagaaggagtccacggaggaaatgctgaccacctcaaaagactggaaagcggtttctaacgattcttctgcggcttccacataaggcatggaggatgggcagcttaccaagatatcttcctcgcctgacacgatgaccaagt

SEQ ID NO: 191602 - DNA, 411 bp, Glycine max
  unsure (1)..(411): unsure at all n locations
agctttntgattaacattttgctactggttattgattataataatctggtaatcgattaacagagagtaaaaactctttggtaaaaggtttttgagaaaaattcatgtgctactcagtttttgaaaaaactttttaatacttatcttgattgagtcttctcttgattcttgaatctttaaaatcttgatcttgattcttggaacttgaatcttgaaacttgattcttgattcttgaaatcaaatttcctcttgaaccttgaagtgttcttgattcaatcttgaactcattctttgattcttgagatcatcatctttgttatcatgaagtgttcttgacttttgagctttgctttttgtcataatctttgttatcatcaaaactctttgaatcaatcttgatttatcatgaa

SEQ ID NO: 191603 - DNA, 324 bp, Glycine max
  unsure (1)..(324): unsure at all n locations
tcaagaacgaaggtctctatgggagtatttgagtaatattgctaactccattntagaaccctagtcagtggttggtgatttcaattatatacttcaaccacatgatagaagggggatcctataatctttcttgaagaggtacccatgattccacgaaatgatggatgttttttacttaattgatgtaggttttcaggggtatgctttcactttgaaaaggggatcgttgatggagcaacttgattgagttttcattaatattgattggagaactcgattttagaatactcgtcgtctccacttgtcattctttaaatctgatca

SEQ ID NO: 191604 - DNA, 403 bp, Glycine max
  unsure (1)..(403): unsure at all n locations
agcttcgtcctttctatctccgcaggctgcagacaaaccaaattttgagtcacacatacatgataccccctcctcactattcacttcctcaaccgatccatttttcttagtttttcgctttcctcaggttcgtaatcttctattctcctcttctttcctttatcgtttttgatttcatcttcttcgctgtaaatgcccccaatctctaaacccttatttttcttctaagtagaaattcggaatttttttttttttttgtgacaaagacgttgttattattatctagntttcttcttcttctttgntttccctacaaaactatgtgtggctattttgtcaccttcacctattcctgtttgtttgattctctctgcttgacatgactttatcatttttctttaaa

SEQ ID NO: 191605 - DNA, 396 bp, Glycine max
  unsure (1)..(396): unsure at all n locations
taatggtgatcctttatcaatggacaatggtgatcctttgtaggacatttcaaggacgctcgattagtgaactctctaaataatttatcaatggtgatatagtttattatctgtttccttgttaaacgtcaagcttatcccctatatctgactgaccaaattatttttgaataacaagaaaagttacaaaagatctctaccttattntaagttctaacgaatcctctggggttaggtcctcccccaagttttataattagtttatctttttatgtgctgtagtgatgccttaacaccccttttgcaaaaataaaaaaataaaagtctcttgttagcaatccagatttttatatctcttataatgcctctcggacatgtaagtgtaatgcgcaactg

SEQ ID NO: 191606 - DNA, 429 bp, Glycine max
  unsure (1)..(429): unsure at all n locations
agcttacccttatggcttgcctccggacttcactccccgtgccgctccggaagatttgagccaagcccctaccttcgaggggcaactccctccttatgccgactatcccctgcaagaagatgatgaaggagatgcccatctaggccctctgcttcccctcaaagatccggccccccatgaattaccccaaccaaacatagtctgccatgtcccgtcttcacccatacccgtaaaagaatccgttcccttcgcagaagataagagaaagattgattcacttgaagagaggctaagagcggtagagggcctcagcaattacccgttctaggatttagcggacctatgtctggtacctgacaccgtcatccctcccaagttcaaagtaccagattntgataagtacaaagggacgacatgtccgaaagggca

SEQ ID NO: 191607 - DNA, 394 bp, Glycine max
  unsure (1)..(394): unsure at all n locations
tttctctctcttcactcagcccccacactttttcagacagctctctctcttcctcacgttgccattttcttcttcttcattctccattgangctccacacaaagctccaacctttggccatcatttctgctccaaatcgcgaaaggagggcattnttcgggtcgtgaagtgcgtggctactaatgggacttccaaaattcaggtttgggtggacttctttctcctttgattatcgtgggtatggggtattgggagatatgatgggtagtattgttagttttctgcttcatgatggttatttgtgaagactcttgttgaaagtatgttgacatgccatgtttgatgagtanacatacccattctgtttaggttttgtatgatgttgtatgttata

SEQ ID NO: 191608 - DNA, 428 bp, Glycine max
agctggctttggatggacttctctccaaggtatatatttgtttatgttgaacgtgttttccaattgctgagaatctttctgtgtttgttatgcattaaggtttgaaaattgagaaaaagaagaaaaaaaaagagattagctcagaattcaaactatgtgtctctttaagttgacaccattgtaaaaacagtacatgtgtgaggataggaaccccattttggaattggataaaaaatggtatatgaacatgttttcgttcaagcaacccgcagtcccaaataatcaatctatcccaaacaagcataaggtgttggcctttgggtgcaatgatatgcccggaggaggacaaaggttggaactctggagtctgactatatatttgggggagggggtggtgtacatgtttcactattctaagaaataggagt

SEQ ID NO: 191609 - DNA, 229 bp, Glycine max
caaaactggattcgacccttccttcatatacacataatctaacttgaatctctctctcaactgatatgaaacatgatataattctgttttttgatgaatattgatatggatttatttaaaaaaaaaaaattaccatacgtgtgtaacatcatatctttaatcgttctcaacctttcatcatatgaccatgtgactggggtcaataatggaaaagtcaagaaatgtattc

SEQ ID NO: 191610 - DNA, 395 bp, Glycine max
agcttgaggagtctgcttcaacccatagatttccttgattaacttgtgttgggaagtccaatattgcctgccataattcatgtggtgcaacttataaaattgttggacaacttcacttaatgttatttgattttaagatgaaatctaacatggtataaagccttacaacccatctttgtgtattgcctatttttctacattggtggagtggggatgttgaaaagtcgcacatcgtttgccttaattctgagggtgcaacttatatacttattgggaaactttacttaagactaatcgatgttatgaatcttatgatgaaacctaacaacttgcaacgaagagacttgtcggttgctactctgttcaaagcttgggtattgttgcatacaaacctc

SEQ ID NO: 191611 - DNA, 394 bp, Glycine max
gtttatcttttacgcttaagtcaccgctccttcatttatctttccaaaacctgagtcttggaccatcacccaccttccatctcaaattgttaatgaagctggtgctgtgatggtggtgaaaaacagaccttcagtccttccaccattgagaaaaatgagcactgttcctaccagaaaataaggtattccaccctccatatttagatagcaagacactagcccagagctgattatggttgtttgccaattcccagccccatttaccaagccaggcttcattgaactcggagagatctctaatccctaggccctctttgctcttgggaagacacacagtgtcccaatttacccatgcaatcctgggctgctcaacaccccctccccatagaaaaat

SEQ ID NO: 191612 - DNA, 419 bp, Glycine max
agcttatagaattcaccctaattccaatcttgtatcctgtacttactcccatatctgcttgatattgcaatggtagtcataagcctaacaaagattcctcaacctctattttcccgaggatacaactcaaatgcgacatgtgattatcatgggggagtttccattgagcattgtataaccatgaaacataaggtgcaaagtctgattgacgcgggttggatgagatttgaggaggagaatcacttgtgaattctgatgtcgtcaagcaatactatgcataatgcttggggaaattcgaaggttgttgttagatgttcccaatgactcattgggattttcaggtttatgatattaatataaaaaacagtcacaatgttaataatacggatgaatttgatgttgttgcctctcatcctctc

SEQ ID NO: 191613 - DNA, 339 bp, Glycine max
  unsure (1)..(339): unsure at all n locations
ctatggaggctggatctttgagcttcaatggtgtcctttaatggtgattttccaccatggagatgcagcagaagacaaaggaaaatatgtgagaggaggcgccatccattaaggaataagccatggaagacggagcttcaccaccaagatgagccttggataagaagcttggagaggatgcttcaatggaggaaaagaaaaagggagagaaagagagaggggggagcacgaaattgaaggaataaaaaaggtatagaagtggaactntgaagtatgtctcacaagactctcattcatcaaagttacaacaagtgttacacatgcttctatttatagact

SEQ ID NO: 191614 - DNA, 419 bp, Glycine max
  unsure (1)..(419): unsure at all n locations
agctngtagntaattggtattcgctcaattactgtttgttcgattcctttaattttctatcaagtgctttcagctcttttatatataacttattcaaaaaagaaaaagaaaatttggcgtttattttatggattatttgcttattcttaaaaatatgagattggaaaaatttgttttcatgtttattataagataataaaataattaatataatatatattacatttaaaaaaaaaatctgagaataacattctcacatgttatatttttagaaaaaaaaattaacaattaaagaaataattcatgaaacaaatgctctctgtgtacttgcatttaaatcctttgaataaagtataattggaataatttaaaaatcaatagttgagactttaacagctttaaaattctcaatatatgga

SEQ ID NO: 191615 - DNA, 403 bp, Glycine max
taacgttttttttttttttatataaataagaaaggtatattgtttttatatgaataatttcttggaagtacgtattattcaatattgcttaattaaaaagtgtaagaatggtttaatggttttagtgtgaaaataaccctttgttccgtacatttgtgattatgtgcttattgcatagacggtggattcctatatagttattccttcgcgggtataaagttcacaactaagaattaatagagttatctcttaaattgtaagaactatttattgttaaaaataaatgcaagagtagagttatccttggcagtatcaatgcaaccccattgtgctgaactttctattcatgcagcttatctttgtcactgtgtctcagtctcaccgacccatcatcgatctctgt

SEQ ID NO: 191616 - DNA, 421 bp, Glycine max
agcttgtttaccccatgtgtgaattgcttacaatagagctgttcatagcaccactaattgttctccttttgaagttgtttatggttttaacccactaactcctcttgatcttttgcctatgcctaatgtttctgtttttaagcataaagaaggtcaagcaaaggcggactatgtgaagaagcttcatgagagagtcaaagatcaaattgagaggaaaaataaaagctatgctaaacaagccaacaaagggagaaagaaggttgtcttcgaacccggagattgggtttgggtgcacatgagaaaagaaaggtttccggaacaaaggaaatcaaagcttcaaccaaggggagatggaccatttcaagtgcttgaaagaatcaatgacaatgcttacaaagttgagctgcccagtgagtataat

SEQ ID NO: 191617 - DNA, 405 bp, Glycine max
  unsure (1)..(405): unsure at all n locations
agcgtctcgatatattacgggactcagntagacaaccgagtaaaaagttattgtcgtttgaatatgctcagagcttccgtattcaatttcgagcgtctcgacatattacgggactcaatcagacatccgagtaaaaagttattgtcgtttgagttttctcagagcttcggtatgcaattttgagagtctcattatattacgggactcaatcagacatccgagtaaaaaagttattgtcgttggaatttgctcaaagcttcaacattcaatttcgagcgttccgatatattacgggactcattccaacatccgacgtaaaagtaatttcgtttgaatttgctagagatccgacttaatttgagcactcgattattcggactcatcgacatccagtaaaattatgtg

SEQ ID NO: 191618 - DNA, 375 bp, Glycine max
gatccttaagtcacctgcggcatgcaagctaaagtgagaaagtgtttaagagtttttcttcctacttttattcgttgaccacaaagtggtacctggagatatgtcacgggggtcaagagaccttggggacgtcaggtggggtgctattgcccaaaaccaagcttgaccaatcccgacccaactcgggcatattcagtcagtgagaacctgtgatgtacctaaataggcgagctcctggcagtcaaccaataaaagaataaagaccacaaagcaaggaggcttgtgtggtggctggccagctatggatcttgagtgatatttggaatatggcctctggtaatccattaccaagggtgtgtaatcgattaccaggct

SEQ ID NO: 191619 - DNA, 381 bp, Glycine max
agaaacatcgtcttcgaccttggtgattcttgactccatctcattgaaacgcatgtctacttgtaactccaaagtatcaaacctttcaccaacaaaggtttgaagactatcgaacccatccaaaatcttttgaagaagagaggaatcttctccaccatgtaaatgttcttcttcatcaatgggtcaagcaccctttttcacccaagagccatcatgctctttttgataaccaaaggatgcaatgacagcaacgcctattagaaaggatctcttgattggaacacaatgttcataatcaagacggatgtttaagtgttgaacgaagagggtgactatgtatggatatggcaatggagcatttaatcgcaatgcctatgcatg

SEQ ID NO: 191620 - DNA, 402 bp, Glycine max
  unsure (1)..(402): unsure at all n locations
agcttggaaaaattattcttatgataaattctctctcgttcaatcattggtgcttttcaaaatcttttctaatagtctatctaaaacctatcttaattcttttcttgagacctttgcctttgcttgaaatcttgctctcttcattcttgaatgatctttatatttccttggcatcatcaaaataattcttgaagctttgcttctacacttactactctcaaaacatagaaccacgacctcacacgagaactcaaaatacagaggaagaagggaaactcactcgtggaactcacacgaggaagaatagtcccaagggattgagttttattactttttttatgaatcaatatgattacaataagatactgctatntatacaaatgaaagcaatgggacccgctt

SEQ ID NO: 191621 - DNA, 387 bp, Glycine max
  unsure (1)..(387): unsure at all n locations
actcagcttncgtaattgacttgattcttaaaagtatccagcgttgtttttgttctgggtaaaaatatatttttggttcctccatttattcctagtttggatttgatctttcagtaatttaattcacaaattgaatatttctatcttgtaaaatcgcgtaatgttgatctcagataccacagttgaacttataaaaaaaatattgactaccacgtgttactttnttattagacaatgactatcatgtcacgtgtcatgttttgattgatcaataaaaataatgcatttcatctttcatgaagttgacatccaatcaaaacaacacataacaattatcatcaataaaaaagtgatacatgacactcaacgctcttgttaatggttaac

SEQ ID NO: 191622 - DNA, 427 bp, Glycine max
agcttatggtgtccctctatagtaaataactttttcataatgaattactaatttcactaaatgttatataatatctgacaaagtcaaacctagtcttcttaaaagttacactaacacttcttttacactaacaacctttgtgtataggtacgctccaatacgtgtctaaaaatttgattgcactgagctcagctatccaggactagcttacttcatgtagtttctttgaaccccttatgtatgcttgagtaatgataatagatttgacatattcaaactttagttgcttcatttgatattattgacagtaaatgggaaattgcagtttataagtaagtgcttttcttgattgtagtatccatgtaatgcaactatgatagttatttgaagcaataaacatttttgagaccaaaatttattttaaaca

SEQ ID NO: 191623 - DNA, 410 bp, Glycine max
ctaagctgcttatgtttccttctttcccggagagtatacttggtcttgttctcaacgagcaacccttaccatttcctcttgcagtaattccactttccttacttgggctttactattaaacactaacctttgttcattatttgctcaaaattctagcctatgctcacacagtgtccttctagatagatctcactctatgtccttaaagagtcatatctcatccattccaagacatcacaataattttacatcaccatgtgtcataactgaggatggaaccatgaacaaataatacaacaataacctaagatattcatggcgtccacatcatcaatgacatgactcagaccaactcacaataatgcactatgtaatgaaatgcaaatcgtctttctctttttcatatgcat

SEQ ID NO: 191624 - DNA, 454 bp, Glycine max
  unsure (1)..(454): unsure at all n locations
gatctctgagtcacctgcggcatgcaagcttacaacagcttcatagtctatttcaccatgcttatcgataccagcagcatgaatcttaagaatttccatccttgattgttcattaggcagagggatttctatttttctatccaatctcccaggacgcaggagagcagggtcaagtacatcaggtcggtttgttgccattatcattttaacctacagcagaaatggagacagtagtgtcatcatgaatccaccattaaatttttgttcagcagtcatttgtagaaaaaatcaaaatatccataagaatacatgaatgagaaaaggtcaatgcttctatatttattacatttgaattataccttataaaggaatgaactgtctaataaaataataaaaaaaattccataccttaaaaggcatgtacaaaattgantttcaacttcacaaattatga

SEQ ID NO: 191625 - DNA, 385 bp, Glycine max
  unsure (1)..(385): unsure at all n locations
gtgagggacatgacgggctatttacaatctaacattcagtacttttgggttgcaccaaagcttcatgttatctctttgatagagaccttatcacaaaagcttggtagagaacttcatttctatcatcttctcttcttcacgataaagctttgaatttatttttttggtttttaattaacttaactattatactaatcacaattaattgttaaccgacataatacaagtgtatcacatcggtaattacttagtcaatacatataatttgtgagtaatcaaaatagtcaatttttcaaaatcatgaaaccaaatattntaatttaaatttcaaatgatcaaaattatagaatttanaagaatagcaaacaaaaattacaatttaaac

SEQ ID NO: 191626 - DNA, 415 bp, Glycine max
agcttgtgagttgtgtgacaccctttactccacacatatatgtactaataataaaaggaataagtatgcaaaattaattaaattttttaaaacacatttaaataaagcacttcaaaagagtgaaagactcacattcacttcactattatcaaataaaacttgtcagaaacatttttggttcaaaacatcatgtaattaaagaaaactcatgctccaatgtcacatcaacattgtgtcccgacgttcttcagtacaaggttccttaaagcaattcacctagtcatatgctcccacgaacacaaagttcaagataatcacaggatccaaacacaaataacacgcggggagtgagttatcacattcctaactaatagtgagaaataagacaacatgtagatatacatatcatataaac

SEQ ID NO: 191627 - DNA, 419 bp, Glycine max
agcttcttaatttcatgaaatgtttgaccatatgacaattatatctaagtttgtaatgtattttgtaggcaccaatgtttgatcgtatattgctaccatctgactttgttcatccatattatcatgtggatacttatataaattgttatgcatccattctggaaccaattaatagagaagatatgtggcagcaaactggacttccaactgtcttaccccctcaagttagagtctcaattggcagaccaaagaaggctaggagaagagaaaatgatgaagcaccaaaacctcataagctaaagaggacaaacacatctttgaggtgcggcgggtgtggcacatttgggcacaaaaaaaggttgtgtcaaaaatatgacaatccctaaactagatgctcctccaaagagaactaaagttac

SEQ ID NO: 191628 - DNA, 326 bp, Glycine max
  unsure (1)..(326): unsure at all n locations
tggtcttgcactccctcttcaatatccatttgatcttttaaggccgataggtccgcctttacctgttctttgcgctttcttagntatggtgagttccctaaaaaaacaaacaatggtgagtatgccaccanaacatgaatatgctaatgaatgatcagagcacttggatccacctcaaggcctttnttagataacgtgatgagtttcagaacttctctttntataaaaaggaacanagcttttatctagccaagatcatacaaaagtgttacaacagaacctaacggtttctaantatatgggccatcaaatctatcatgtgttga

SEQ ID NO: 191629 - DNA, 417 bp, Glycine max
  unsure (1)..(417): unsure at all n locations
agcttgcacttgngcatatagagtcaagatgtggagggttctgatatatatcatcactccccacagatccttttagtataacagtttagactcctgtgatttaacaagacaaaatgatgagtgaaactcaaaaaacacattattatctttgcaaaactgactgacactaatgagattcttagtaatagaaggaacaaataattaattagtaagagtaagagaaaactgaggattaaggggagaggaaaaggtggaaacacctggggagttaatgttgaggtcttggccattatcaatagtgatttggtcaggcccctcaaaaggtgtcacttgctgtatgttccgtgacatattaatcacataatgggaagcagatgatgaactagtcagataaatctgaggattggactgatgttt

SEQ ID NO: 191630 - DNA, 379 bp, Glycine max
ataactctttctaatgacattctatagaaaagttatggtaaagaagatcttaatattgttttacgaaactagaaattcaaaagacaagcatcagtatcataactgtatgcaaatcatggtgctcaagacaagtgaagtgtggccaacttagccacactcctcacaaacgaaacttatcacaagcattatgacatgtttcatacaatgaagtacaagatgaatggaagggcatcagtatcattaaagtgaataaacatgtacctcaacatcacatttcaactctttaggacaaggtttcaccataacaagcctctgcacaaaaaaaataaattgatgatgaagtgaagatatattatctttaaaaatcacattgaaatga

SEQ ID NO: 191631 - DNA, 416 bp, Glycine max
agcttgaaatgtccttaatgattaaagattaagtaaagaagcaatttgatgtgggcttcttagccatggctcgataccctgagtgggtggctaatataatccatgtcccaaagaaagatgggaaggtgcaaatgtgtgtagactatcgggacctgaaccgagtcagtcccaaggataactttcctttaccatacattgatgtcctcgtgcacaacaccgccaatttcgctttgttttcctttatggatggcttcttgggctacaaccaaaataaagatggcaccagaggacatggaaaagacgatgttcctcaccttgatgggaactttctgttataaggtgatatccttcaggctcaagaacgccggggcaacctatcaacgggcgatggtggcagtcaactatttcaccaaatg

SEQ ID NO: 191632 - DNA, 284 bp, Glycine max
  unsure (1)..(284): unsure at all n locations
tgttgttatatttacctcttcatctaattcagaatctgattcttctgatgcagtgtctaacatcangcagaggttgactttttcttccttttttgtctcctcgccgaacaatgtgtcatccagttcttcccatgtgctcattagtactttctttccttttggtttgaagtaccttttcttgtgatctgtcttatcaagatatggatattntgacttgaagtgtcttggtttcttacactcataacatatgatggagcctctatcctctgccttttgttctctat

SEQ ID NO: 191633 - DNA, 418 bp, Glycine max
agcttaagacatcaagtcatgtgactctgttttgttgtgtctatcaatttttaaaataactaggttatgttgagaactaaaattagaggatccaagttccttcactctgtttttttggcatattgtctggtcaactgaaggaatttatatcacctgttccttcactctcaccactaattgtcccttagatgttaatgatcaagttctttttcccttgttggaagcattgacaatggcaattccataatctttttgcaattatttgtccttttttcattttactttataaatacaaattatttttagctttttctgtggacttgattaactcaccaaatagctttatgccccaaatttctttgggtggctggtcattaatcttgttgtatcttgccaattaagcaattactgctataaa

SEQ ID NO: 191634 - DNA, 313 bp, Glycine max
  unsure (1)..(313): unsure at all n locations
tattagctgtacacttgacactgacaacaatattatgttgcgtttttgtggagtatttcacaagatttgaatctgaaaagcttaccggacagatagttaacatagaaagtttattagggacatagctatatnttgtctgcacttcccataaggaaagtaaactttatagtggtgactatgatgtgacagtgatatataacattttttattttagaacaactaatagaaaatagtgttttattaatacgtttaaagctcaacctttagatgtaactaacanatagaatgatgaatgatgacagctatcttaaaa

SEQ ID NO: 191635 - DNA, 406 bp, Glycine max
  unsure (1)..(406): unsure at all n locations
agcttcaacacagaagagatcaccacattcctgacattgagaacacaattnttctttgcattgcacaaaaaaacgactatttaaaaaggaatcgttgtaataatggctaaccaggtttcttcgaaattaaggcgagcttcttgcggcacacgagggagttgaggaacaaggattttccgacgttggagcggccaacgatagcgaactcaggaagtccatcgaagggacaatcctcgatcttcacactgcttttcacaaactcggcttgcaatacctgagcatcattggcgtagttactcaacagaatgttgaaaccgttcaagactctggaactttcgagggacacggtggtctccggcggaacgaagagcttctcaagggatagctctgttggggaaggggtaac

SEQ ID NO: 191636 - DNA, 382 bp, Glycine max
  unsure (1)..(382): unsure at all n locations
ttgaaatgtgctaaccnagttggatataagtatttttgtttctcttaataaaaatttttaatttcatctttttttgaatgtgactattgtaaataacatccaagtttacaagtttaaattgtttttgttctgttgtaactttaaacactgtagctaaagtgaggtatgtttcttcagttttaagagatttaattatttagagaagacacataaatattcaatgtcataaactctccaatatatattacattctaatctatatttttcacaactttctctcccatattcagttccttttctattattttctaattgtaatacattattcattctaccttttcccaataactgattatactttcttattcaaattcttatttta

SEQ ID NO: 191637 - DNA, 408 bp, Glycine max
agcttatttacatataatttttggcttattaatttatttacaagtaaatttatagacttaactaagaggtcttgctacaaagtgagttttcatgtcaagacaaacttcaaaagaaactagaattaccatatcatacctaaattatgtgagttttatttttatatttcgaaaaggttaaacctgaaatataattttacattctagattaggtgttctaaaaaacttaaaaggtgcagaaagtaattgtggagatgcaagacgcaattgaccttcatgtttttcagagataaaacattgaatacatatatatcttatatatttgggctttggcccagtagagttatgctagttggttttattttgtgataaaggacgggctagcctataactaataacaagagggaagat

SEQ ID NO: 191638 - DNA, 414 bp, Glycine max
  unsure (1)..(414): unsure at all n locations
tagatagggagtgctcctttatcagagaacttttctgctttgtttaactatctactttgngaaanttgctcattagccatttctaatctaacgctaagaatctaagatcattatttacaaagggactgtaatttacttggatattttaatatgggtaatatagtgaactacaatcccttttgcttttacacttttacttgagtctctttctcccccaactaagttagttagaagagtttggatcatggactcttccagtattttctcctgtaaagctttctatcaatttcatacacacgcctaacctangtttctacttgagtaatccactttaaaatcaaacatctcttcaaagccaagtctttgtttgacagtgtacttacatggttatgcaatgggttgtgcaaatcatat

SEQ ID NO: 191639 - DNA, 388 bp, Glycine max
agcttgaggtataatttgattgagtactctttcgtgacttcaatttcttctcgataaagagttctctgctctccttttaattgacttaggaattgcaattgtgatgtttgtaatatggtgcattctgcaggtaatgacttgtaggccaaggtcacatcttttaatgaatcttccaactctgcgcaaacttgacagcatgcttcttgttagtgtaggatcttactttcattgtgtgctagtagagtagtactttggtaaagaaatatctctaagaatgtgcaagccaaatactaaaagcttccatggaagttcttgagtcatactgggaaacccttcctaaagtatgcttttgtatataaatagaagttgatgtcattgtatattctca

SEQ ID NO: 191640 - DNA, 412 bp, Glycine max
agcttagggcatgttgccctctgaaggtgaggacgtgtaggtttccgaaggcgaggacgtatagtcctctgaaggtaaggacgtgtagccctctgaaggtgagggtactagtacccaagggtccacccttaggagaaagcaagagattgactcattgagagggacggtcatcccaaattcaaaatgattgaatattagatgtaggaaatctatgtagttaacatgaattttagggatccagatgcatgcaacctttctcttgaaatgcggtaaatgcagacttcgtatgcaacaatgcaatgtaattgaaagttgtacagtgttcatgacattctttccctattttgtgttattgattttgatttgattttattggaaaacacagattgattgtccttttgaaagaagtgat

SEQ ID NO: 191641 - DNA, 435 bp, Glycine max
  unsure (1)..(435): unsure at all n locations
tgaagaggatgctttaatggaggatattatagagagaatgggggagcacgaaattgaaggaataaaagagggagagaagttgaactttgagttgtgtctcacaagactctcattcatcaaagttacaataagtgttacacatgcttctatntatagactacgtagctttcttgagaagctctcttgagaaaacttccttgagaagcttctttgagaaaacttccttgagaagctagagcttagctacacacacccctctcataactaagctcacctccttgagaagcttccttaagaagattcctaaagaagctagagcttagctacacatacctctctaatagctaagctcaccttgagatgagaagctagaacttagctacacacccctattatagcttagctcacccccattggacaaaaaacatgaaaata

SEQ ID NO: 191642 - DNA, 403 bp, Glycine max
agcttgtttgaaggacaaattctcattatacaaagcttgcaggaactagttcagcagaggccaattatgagtgtagagcagttcattgagaaggtggcttggcctggagcccaaccttcttttgtgggagataatgaaagttttatagcccaagcacctcaacagcatgagccaaaaccagaaaacgattactcttctgaagccaccatccctagagctgttgattttgcaaaaagaagattagagacgagatccaatgaggctgctcatcctaaaccagtgccagcattagctgatgcaccatttccaggagtggatccatcttcacctcagcacccagcagactcttccattcctgtcttagagatacatgagggccaaaccataccagtcctgcctttgg

SEQ ID NO: 191643 - DNA, 348 bp, Glycine max
  unsure (1)..(348): unsure at all n locations
ntctttggtgctactgaggtggatatcatcaacttcatactanaggctaaattgaagggaattgggattctaatcttagaacatctcctagcaggcttgttgggagttcttactgatagctcaacgctctatgatgattggctcaagatcatggcgcttagaaagaagaagattcataagaagttcctggaggataaagatgaagagttcaagttgaagaattcaagtctaggtctttgacatattttggaagatagttcattagatcaacatgcatgttgtgctgccaaggcctagtaccttccaagaggtaaatgaccatggttctatgatccattactatctatg

SEQ ID NO: 191644 - DNA, 423 bp, Glycine max
agcttctggtgggacatcttgacttgctttccaatctgtctttcaccacagattctgccttcttctattttcagattgggaatgcctctaacagcacctttgtcaatgattttcttcatgcctcttaagtgcagatgtccaaatctttgatgccatattctgacttcatcttctctggagaatagacatgtggaggagtaactggtttcttgaggtgtccataggtaacagttgtcctttgatctgctgcccttcattaggacttcacttttctcatttgtcaccaagcattctgactttgtgaagtttacattgaatccttcatcacacagctgactgatgctgatcaagtttgcagtcagtcccttcaccagcagtactttgtccagactaggaagtccatcatggactagctttcccatt

SEQ ID NO: 191645 - DNA, 369 bp, Glycine max
  unsure (1)..(369): unsure at all n locations
atcaatcttgcacaaatgcagggagaaaagtcaccaaaattaaaacacaaaagcaatggcataaattaatccattggaaggcataaatatagaatagtcatacaacaacaacaacgccttatcccactangtggggtcggctacatggatcaacttccgccataatgttctatcaagtaccatacttctatccaaatcattaagtttgagatcctttnttataacctctcttatagtctttttgggtcttcctctgcctcgaatagttgccttctcttcatctggtctactctccttactacagagtctaccggtcttctctctacatgcccaaaccacctaagtctatttccaccatcttcttacaat

SEQ ID NO: 191646 - DNA, 423 bp, Glycine max
agcttgctaaaaggagaaaaatgaggcaaataatgtgtttggtgaaatgtgtacctctttatgggttatagaatttattttactttattaaattaatatacacaattaaattttattgcatatgaaagcagaaaaacattcaccttaaataaaccaaaaaatatatgtggtgctatcaatttctaaagtattatataagttatattcaaattaagataagtaacaattgatatgatgtgaatacactacaatatttaggatgctctaatcaaaattgtttgtcaaattagtagcaataaaagatattaataattataaacatgcatagtttggacacttgtttaatccgagtcatgactcataaaaatgcccaaactccaaggttaatttctaatggggaaaaaaagaattataaagattgaa

SEQ ID NO: 191647 - DNA, 165 bp, Glycine max
gagcaccagcaagtagtgacagcaaatcaagtttttcagataccaaattagacagaccttaattcatgcttatatgtattcaattcaatataggtattgagtgacaaatgggattgacattttcttccctccctggcactgactacaaagtgcttaatatggctt

SEQ ID NO: 191648 - DNA, 418 bp, Glycine max
  unsure (1)..(418): unsure at all n locations
agctngcctaattaacctgaaattgagagtaaatgattattaaacacacaaaatggaagtactaagtatttattacctatacttaacagataatacttatgacaactttttaaattttgcatcaaagtccaatctacgtgtcacaatctgggacaatttgccacgttggatagtctatgtggcactaaaattgccaacaatgcacctcactaacggtgatactttcaaatttaacggcaaggactattttgcaaaacttatgcaaagataggactatttttaacatttcaaaaagatagggactaatttgcaaaaggggtcaaaagtcagggaccaaaatgcctatttactcttataatacaataaaataagattcaaattatatgttaagcatgaactaacaattctattagatatt

SEQ ID NO: 191649 - DNA, 282 bp, Glycine max
ttgaaaaaaaaaaatcaaccctccctcttgtggtatattgtttacctcaatctcccttcttaaggtgaagcaaaagaataaagagaggttatcacctaaagggaccaatgccaatctaaaggtaaaggaaccggcaatgtccaacactttgctaaaataaggtttaaaaggacgaagaccagccttcctagaatgaaccagaagctaatccagaagtataaagctcttgttaaaagacagaaccagagaagttctaatccacttggatacagaagcatactc

SEQ ID NO: 191650 - DNA, 421 bp, Glycine max
agcttcagaccaaagcaactcaaaatctatgtatctaattcccctcaatttaatggactttcaaggtttgagaagtgaaaatgagaatggggtaaatttggagcaaactctcacctcaaacaagtctatatcatcaatctaaactcgctcaaactggttttatgacgaaaactctaccaaatcaaaatttgactcctcaacacccaattttaccctagaaatggctcttgttttcactttggtcactcatattcctcatttgcacagtctacactttctcataagtcctaaatgacatttcaaactaggattaactccctttaacctccaaataccactaaatccagatttggccttccaacactcaaagcctcactctttttccactcataacactacattttcactttctaaccctagg

SEQ ID NO: 191651 - DNA, 367 bp, Glycine max
  unsure (1)..(367): unsure at all n locations
ggtatttccaacccacaacagggtccaatttcttcagctgctttctcaatcgcaattatggcagccataatttctaccatgaatgcaaagtgaatgccagtattgatagcgaaagctttaataaacttcatatttatntagaaaaataccaccacacccgaccatacctgggcttccttttgcaaccccatcaatattgcattcgatccagggggtgtaggcagtctcaaaataatagttttgatttggttactttcctacgatgacagcaccaagaaatgcttgatgatttgaaatcacanatgagtgttttatggntctgtgaagtgaacccggatgtgactctatatgatctataacactgttg

SEQ ID NO: 191652 - DNA, 375 bp, Glycine max
agcgtcttcacctttgaggtcttcttcttctcgcgaccatagctccacgcgtctagcagtcttctccccacgtccaggtcttcttctccgcgcgcgtacgactccattgccggcatttgaagctttgaagcattcgcgttacgccctataggttaccggtgtaacctcatttttctcctttaatcgcttttgacggccatagggtagaagacatgcttggtctagtttggtttttgatggttttggttgcgcgaggttgaagacgagccttctttcgcggaaggttcatttcttccgcgcgtgtctgggtgccgttggaggtcgggcggaagattgtttcttccgcggactccagcgaaagatgacaaaaatggc

SEQ ID NO: 191653 - DNA, 442 bp, Glycine max
  unsure (1)..(442): unsure at all n locations
agatacacgtcttggctgagatggngagaagaaatatattgttgctagtgatgaatggcgggaagccaaaattcaggtatgtattattcaacgaanataaagcttctgtggacgctcagcttttattcttttgttttttatgtgtgattctgtcttaatgaaagaaggattaatagcttatctttgaattctgataaaaaaaaattgataatcatgaaattgaacaatgtgttctaattacaaagattctttatctatgaaaaaaagattaattcttgattgtagaacaaaacaattacgcacatttagtttatgtaacacacattnttttcacacaatttaatatcagaaagggtttatcatatgcttacctgctggagagatgcttgcatactttgtcacgacattctttttctaaacctagaaataaaagtattgatta

SEQ ID NO: 191654 - DNA, 419 bp, Glycine max
  unsure (1)..(419): unsure at all n locations
agctttgaacctcctctntcagccaaattataacgacagtagacacttatcccacaccattgatcatttatccacaaatctctttaagattatttacatcctgaagttgacttctacgtctccaagttgcttacaaataattcccctatctgaccaacgatcatactagatcatgattctaaataacagttcacaacaacaactacaacggcaacgccaagatattttgatacttcacaattatattatgattgtaattacaactgcatcagtcacctgcaacacaactgcgacccaggattgatttaagaataaaacaattaaaactcatacattaggcccataaaaaaacatatcctattaatatttataaagtaaaaaacatcttatatattaataaaaacattacatatgttagt

SEQ ID NO: 191655 - DNA, 328 bp, Glycine max
ctcagctggtcttgattttctcaagtctttaacaagccttgatttattacttagccctcatttaactgtctttgggcttggcgaccacactcaacaaagtactttcgacacctactgtacgttgatttcaccaatgctgttatgagaatgttgcgacaatcctttaaaaccttattgatacattctgagaggttcgttgtcatgtggccatatcgacgtccttctctatcgtaagccatcgtccatttttcctttgagatgcgatccatccatgttgctatggctggactcagttcacgaaatttttcttaaatttgataaaaaaaat

SEQ ID NO: 191656 - DNA, 418 bp, Glycine max
agcttgggatgagattcgctgaacattgatgcatcatggccggagagccatcggcagcagcagcagcaaacatggaccagatagaagaagcggaagatgaagctcaacgcaccaatggaatacttttgagtctcttatgattcagaaaatggatgtcatccttcacccccattaaaagcaccaagtcgacattcatagttgttagacttttggcacgcgtaccaaatttgtaaaaagagataatctctacaaggacttgagttacttaattcatttagataaaagttatcaattcaatagttatgtacaagtttagtcaaaatatcatgggtctgtttaactaatggaagataacttaaagtaacggaataacgaaaataacagatattagtgcgtcgaaaatacgtaaaactacata

SEQ ID NO: 191657 - DNA, 356 bp, Glycine max
  unsure (1)..(356): unsure at all n locations
tgtaatcgattacacacatactgtgatcgattaccagaggagtttttcacaanacattctcaacagtcacatctttttatctaattcttaggtggccatcaaaggcttatatatatgtgactagagacacgaatttaagtagagtctttttcagaacaaaaaggtcttatcctcttaaaaagcaaaatcgttttatcctcttacaaattccttggccaaaacacttgtgattcaataaggaattatttgagtgctcaaattgttcaatctatctcattcaagagagatttcttcttctcttcttctatattctgaanagggattaagagaccgacggtctcttgttgtgaaagaat

SEQ ID NO: 191658 - DNA, 405 bp, Glycine max
  unsure (1)..(405): unsure at all n locations
agctttgaactaatccaaacgacaataattttntgctcggatgtctgattgagtcccgtaatctattgagacgctcgaaattgaattctgaagctttgagctaattcaaacgataataatgttntgctcggatgtctgattgagtctcgtaatacatcgagacactcgaaattgaatattgaagctctcagcaaattcaaacgacaataactttttactcggatgtttgattgagtcccgtaatacatcgagacgctcgaaattgaattctgaatctctgagctaattcaaacgacaataactttttactccgatgtctgattgagtcccgtaatacatctagacgctcgaaattgaatgtttgagctctctagcaattcaaacgacataactttttactcagat

SEQ ID NO: 191659 - DNA, 283 bp, Glycine max
  unsure (1)..(283): unsure at all n locations
tattgtcgttnngaatagctcagagctgcattattcaatttctatcatctcganatattacgggactcaatcagacatatgagtaaaatagttattgtccgttgaatttgctgagagcttcaacattcaatttcgagcgtctcgatgtattacgggactcaatcagacatccgagtaaaatgttattgtcatttgaattagctctcagcttcagaattcaatttccagcgtctcaatagattatgggactcaatcagacatccgcgcaaaaagttattgtcgt

SEQ ID NO: 191660 - DNA, 409 bp, Glycine max
agcttggaagagaaatagaatctatccgttctagattttcttctgaacaagaattgcattgcgcattgagtcacattgtcatttgtcttcatgtgagtagactatgggtgatatgtactctgagtgcacattttactagggaggttagcacaataattgagaaagtaagcattatattcaaggcgtttaggatagaattgattactcttggtaaaaagcaagaatactcatttttggaaaaattctactttagtctttttaagtaaaaatttcaaaagtggggcacaccacatttggtagtgatggacaccgttttcatgggcagccacaagtccctcatgaagtcaaattgagtgattatgactaaaccacaccttaatccaatggtccaaagccttaattccactta

SEQ ID NO: 191661 - DNA, 244 bp, Glycine max
tatatgcgtatatctgtattatattcgttgttctgggtgttgtttggattctgttttgtgcacaaaaaaaaagaagacgtcgagatgagagtcgtcatcgctaaacgggcacgacggaccaaatcagtgtcctatctttgcttcctcttatctccgatgagaggtaagtaaagaggggcaactgtcataccctaatttcgttcggcgattattacttgatgacatgcaatctttggttagccgc

SEQ ID NO: 191662 - DNA, 404 bp, Glycine max
agcttgtcttgtgtagaattagggtacctcttttatgacagcttctacagacggtcagggcacagattttcagagcagccacgggcctatttagggaaaagagccctagaagcataaaagaggagcaacttatgcattgaagcctaggttttgtcatttgagagattattgagtaaagagtgagtgtgagatgttgagaagaggaggaggaatcccccttcttatgtatggaactatcattctctgcttttaatctcatttattattagggtttctttgtaatggctggctaaacaccctagttgaggatttttaatgaacacttgatgtaaatacccaatatctaattgattatgttttttgtgttcaatgcttccttcaatgcttaatgtttgtatgctttt

SEQ ID NO: 191663 - DNA, 417 bp, Glycine max
  unsure (1)..(417): unsure at all n locations
tggaaaccttagcagagcaaccagaagaaaatcttgaggaatcttanggagctactagagacccttatatcactaccagactacacacacgagcccgcttagaggtaagggataagtttatcgtgattggggttagagtgaacatgtgtaaggatccttataagatcaaattgggattaattatgggttgttttatgcattttagttgtttttgtacaatgataactttgaattgctcatgtttgaccggtcaattgatgccctgatgcgaattcgatggtttaattgcgtgtttggctttgaatgttagaaacctataaatttgngaattctttgatctttcatgttttcttgaaaattgattgacggattttgttccccatgatgtgatcacatgttctatgctattaactgaat

SEQ ID NO: 191664 - DNA, 409 bp, Glycine max
agcttgacaggtggcctttatggggtactgtgtgttggggaggtgggaaggagggtcgtaaggtggttaaggcgatcgagtaggagatcaaccttggaagcaaggttagagtgttgagagacgaaaaagtcgtgatggacggtgagctgagaaatggcctccttgagtctgtctgtagtggttttgcgggtggtatggtcggccatggcaagtcggaccaaatgatagagatagaggaagggataagtgcgattccttgtgtttgaggcccaggtacctcctcactacactaaatagtttgtatcaaatttcactctgtgtgatgttattcatatattgatgtatttatagagtttatcaggttgtatcataacagaaatgattccatttgctaatagcctatacaatt

SEQ ID NO: 191665 - DNA, 350 bp, Glycine max
  unsure (1)..(350): unsure at all n locations
tgcttgtggggcttctatgaaggctggatctttgagcttcaatgaggtcctttaatggtgattttccaccatggagatgcagcggaagacaaaggagaagaggtgagaggaggcgccatccactacggaataagccatggaagaagaagcttcaccaccaagatgagccttggataagaagcttggagaggatgctttaatggaggaaaagaaagaggcggagaaagagagaggggggagcacgacaatgaaggaagaaaaaaagggagagaagttgaactttgagttgtgtctcacaagactctcattcatcanagttacaacaagtgttacacatgcttctatttata

SEQ ID NO: 191666 - DNA, 347 bp, Glycine max
  unsure (1)..(347): unsure at all n locations
agcttgtaagataatcatacaatagtttttgctgtcttgggaattgattatgcttcaaagtcctataattgactgaggaaacgctttgaaattctgcanaactaaggaatgggaaatcaatgcaatgggaaagacaaaacgccaactttacagcttatcctcagtgtagttgccttcaagctcaagctgtatcacaaatatttatctcaaaatcattcaagattatgagcgcggacaaatcaaacacgtaaacacactttaacaaaccaaatgcttgctttgctaaaagatcaaaaagactcgatactaatatttaataatggttggctttactagcatatatacat

SEQ ID NO: 191667 - DNA, 330 bp, Glycine max
  unsure (1)..(330): unsure at all n locations
ctgctttagtgacctatgaaactaagcttacaattgtacaagagaacttgactattggatgtagctcaaacacataaagaaccaggaagaggacttgccaagaatggcaagaagggggacaaatgcggttgattattgtattgggcatatattattattattattattattattattattatcatcatcatcatcatcatattnttatcgtttgatgtaatgtgtatacgtttttatgttgttttgaaatatattatttccaatttatgttgtgattgaattacttcttttgtgttcatcaaacttttaaacaacacgcgtctagtaatg

SEQ ID NO: 191668 - DNA, 425 bp, Glycine max
  unsure (1)..(425): unsure at all n locations
agctngaggttgatgttgcttggggacatgttcttgatgtgtttttattcaaccacttctgcttacaaaaggctaacaaaatctattccttagtgtggccattccacctcccaaaaaatattaaacacttcatttggattgttgttctgtttcagatggaaaaacagtatttgtgaaaaccccgctcccgctgtcaaatttctattctcgtactggattaaccataaccctaacgtttgagtcatgcttctctactctgccttaagcttttcgattatggttgctcttcgaaagaagctaccatggctttgattaacaatttcacagaataatgtctgttgtagttgctttttatttttgacgtgttgaagactgtgcttttttctgtgttggtttgaaaggaaaacatggaccaatagaaaata

SEQ ID NO: 191669 - DNA, 425 bp, Glycine max
ggttctcttatcttttgtctggaagaatataagggaatggaacagaactccattaaccttgattgtgagttacattgtaaaggaacggaagtaaacagaatttattataatttttaacttcgctaactggctttttaataattcgtatgttgttactgccttacgtatctaaagttaaaaagaaaaagaagaacaaagactgatgatgttgtgcaaatttatctattggtgagtatcgtaccctccttttgcacgtagatgctcgcacttgcaatggtaaaacaaaagagtaatttaattattagaatattttaaaataatttctaacataaaatttactaactgtattgtctctataaatctaaattctattgctagtcattaataaataatactaaacttgaaatatacacacgttcgatata

SEQ ID NO: 191670 - DNA, 425 bp, Glycine max
  unsure (1)..(425): unsure at all n locations
agctntacatcctattgcttgaactgtgtgatgataattagagaaaatatgtcaaattggaagaaaaatgaatatgctacatgattaacaaatacacagattttatactaacttggaagtccacaagcagcctgaggttaaacaagttgctacaccagaaaaagggcaccccaaccccaagtcccaaacctgttagagatagggggagcaacacgagcaacatggtgaacaaactaaggctaaagcttgaagctcaaggaaaagcttgaagaagttttgaacaagttttggcttttacatgccaaactcccttgagttacatttgtattagttgttatcttggttgttgcatcttagtacatttgatatttgttttgcattgtgcatcatcatggttagtatgaagaaaatattctaagttagaa

SEQ ID NO: 191671 - DNA, 397 bp, Glycine max
aaacttacagccgattaagagatcctaataacaaacccttcacagtcatgctgaaccaaatggcagcacagaacgttgtttcacagacccgatttttgaagaaaggtattcgatagacagtgagtgctggagacgtgaggtcagtttctggaaggaatgatagtttgtgaatgtcttagctacgtcgcggcaacaaggatgttctctgactgacttgaagcacgatttcatttaattgactttgaagtccacgacagtgttagtagaaaacgtcgtggatatatcatttctatgacggtgatactaagagtcgtcattgtatgatccatttcaagaagggtttcgtccaccatcgttgttacaaatgataattacaaaatgtcactgtctattattt

SEQ ID NO: 191672 - DNA, 412 bp, Glycine max
  unsure (1)..(412): unsure at all n locations
agctngtatattgaattgagtatggcacactcattgcatgtctgatatgccttttagaggcttgaaaagtgcgagaaaatgagttgtgttttctgcattttttggaaaacgtgatgaactctctaagcgagaatgctgcgctaagtgagttcatcaatactcattgtatataagctttatctgaagaactcgccaagcgcacttactgcgctaagcgagttcatcccttaaggatgaacattcatcctcttgctgaactacctgtggctaaacccaggtaacttaaccatttttttttgtgataggcgcatgctaagctgagcattcctgagccaagcacaattggttggactgtagcaatttctgctaagcggctcttctgtgtcgctaagcccaatgtcgtttttgtgaa

SEQ ID NO: 191673 - DNA, 416 bp, Glycine max
  unsure (1)..(416): unsure at all n locations
agctntgaatgctctattcaatggagttgacaagaatatcttcagactgatcaacacttgcacagtggccaaggatgcatgggagatcctgaaaaccactcatgaaggaacctccaaagtgaagatgtccaggttgcaactattggccacaaaattcgaaaatctgaagatgaaggaggaagagtgtattcatgacttccacatgaacattcttgaaattgccaatgcttgcactgccttgggagagaggataacagatgaaaagctggtgagaaagatcctcagatccttgcctaagagatttgacatgaaagtcactgcaatagaggaggcccaagacatttgcaacatgagagtggatgaactcattggttcccttcaaacctttgagctaagactctcggatggggctgaaa

SEQ ID NO: 191674 - DNA, 309 bp, Glycine max
tgttgacacgtggagatttaggttatcttccacgctcacaagatctgtcatactgacttttgcttcacgctgacggccggaaatacccgagtggttatccgtataaactttttgcattctgtaagacgaaaagcctgataacacgcagagactaacatcgtcttctgcgaccttcgtcaatcgcggccgacaagccccgtgacacgtggagatttacgtcatcttccgcgctcacaagatctgtcatactgacttttgagtcacgctgacgggcggaaatacccgagtggttatccgtataaacttttt

SEQ ID NO: 191675 - DNA, 407 bp, Glycine max
agcttgtagtacagaacaatccaatgaatataaaaggcaccaaaatgaggcatcagaggcacaccttagacaaatgaaattagcaatggatttaaaaagtttaaaggatgaatgtaattgccaatgtttgatggaaaaaaatagagtataaaatagaagaatccaacaaagaatcacccttgccccatggtacacaacataaaaaatcaattctggtgcaaaaagcacccaaccctacaaatacaagcattaaaggactatcaagttccatcctttcatgaaaattgcaacatataactgacaatgcacaccctatacggcaaatagataaattattggaataagtaatccagtccaaaaatcaagtgtaactattcataaaagcacaaacctgaattgcaaactca

SEQ ID NO: 191676 - DNA, 446 bp, Glycine max
  unsure (1)..(446): unsure at all n locations
tgagaatatctctgcgtcaaagtcgctatccaatcgctttttttttaagatgaagttgtatcaactcaaaatcgagatgggaggagatcttcatgatcacatcaaagctttggttcaaacgttgcttgtgagaagatcaactttgaatctggatgaggttactgtcgcccttagagaaaataagagaatgatgagaactgaaaatattgatgatgaacacaatgtaataattatggtggagtctgagtgagggaggaatcattcaaggagacatgatggtctaagaggaagatcaaaatcacaattgcgtctgcaacgagatatgagtaacattcaatgttactattgtggtgagaatgatcatgtngcagtgaggcgcanaccaatgaaagaggacttatagaaattaagagatataaacaacgatggtgcccactccaactaat

SEQ ID NO: 191677 - DNA, 418 bp, Glycine max
agcttgtcattcgtagagttgaaagagattgagtcttcatccccattagacacaatagtgtacttcaacatgcgttgtgcttcctccggaatgtactcaaatctgttgtttctcagtttcccacttcgccaacaaacttttccgcgtctccttatgaccagttcttgtcccttgggttcccattcaagactaaaggcaccgggatccaaaacaaaatcagtcaaaggtgaaaccagtacccattgatggccttttttttagtacctcaaggttgcgcttcttgcttgatgtcctctataactcaacttaatgtaggtattaattcaatataatgtttttgttttttatttatgtaattctactatcctcaaaatacaaccaacattttcttaacctgcaaagcgtaagccgatatcta

SEQ ID NO: 191678 - DNA, 376 bp, Glycine max
  unsure (1)..(376): unsure at all n locations
taatttctctacaaatgcatcacctctcaatgagctggtgaagaagaatgtggcatttacctggggtgaaaaacaagagcaagcctttgctttgctcaaagaaaagcttactaaggcacctgttctagctcttcctgacttttctaaaacttttgagctagaatgtgatgcctttggagtgggagttggagctgtattgttacaaggtgggcaccctattgcttattttagtgaaaaaattcatagtgccaccctcaactaccccacctatgataaagagctntatgccttaataagagccctccaaacttgggaacattaccttgtttccaagggaattgtcattcatagtgatcatcaatcacttaagtacatt

SEQ ID NO: 191679 - DNA, 418 bp, Glycine max
agcttataagaacaaaattgctctaatcatttccaaatatgcatgtgaattaggaagcatcaacaagaatcaatccaaggctattgtgcaagcaatcaatggggcaaaacacaccaaatgattatgatgatggatggctcaaattctcacaaaggtaaactcatcactttcaaattgagctttcaaaactatcatgacatgtagaggagaatcaaagatttcaagtcacaaaatgtcaaaaacttttattttcaaaacaattatccatttcttgaacatatcctataattaaaagaaaaacatgcaaagtcgtacatgcgcacagaattgacccaaaatattaaactaaaaatccgacggaactaacaacattaacaaattaacaaaaccaacaaaactaacaaaaaccaaagaacac

SEQ ID NO: 191680 - DNA, 395 bp, Glycine max
  unsure (1)..(395): unsure at all n locations
ttcaattgctttattttcttctaagtgttcaactttaggatagttagcttagtgaatgttaggttgaatttttgttaatgcttagttttgttaagttagttgttagtttgactagaattacgttttattttggttacaatgtgcttgctttgattaaggttaaatggcctaatangggcctaagtgaaggggtgagaagcccctatttttctggaaatcacaattagcgtgctaagcgcggctgtgcactaagcgagttcatcgtttttgttgaatatctggatttctagatgaactcgataagcgtggccatgtcccgctaagtgcgttcatccttttttgagtaaattaaattacttgaacttgctaagcgcatcgatgcattaagtgagtga

SEQ ID NO: 191681 - DNA, 394 bp, Glycine max
  unsure (1)..(394): unsure at all n locations
agcnttgggatggtctccatcataacactcgctccacaaagttccctccctcacaaaccattccctcgttgtccgcaaattcccttgaaccttctttgcaccagggctcaaccaaacctcagactaccactgttccttttaaacgcttgttgtgacaccctctacccctcacatatatattaataaaggaataaaaattcaaatattaattaaaagtatttttaaaacatttttaaatacaaacttttcaaataggtaaaaagctcacattcactttcttctacatcatattcaaacttgtccaaataaataataaagtcatctcgactcaaagaaagtcatataagtctcatacaattaatatagaacctatatcctaatgtcacattctatc

SEQ ID NO: 191682 - DNA, 341 bp, Glycine max
  unsure (1)..(341): unsure at all n locations
attctgggttgtgtgctcaccataacaaagatccacgaactatggatcctttcatcctanagaatcaacgatcctcatagatggcaccattgttatggtgtatgacacaaaatgtgatttggatcgtgcaacgtgaaatagactgagagaattagagagaatttatagagagagatcgatctttgaagtctcatagtattgcgttgtgttatatgtgtcctcctctggtgtgattacagagtgtctatttatagtgtttccttacatggcactatcggctagtggcttattacaaatatttgtgttagatatcatattctgaaggtacgttggacttaccc

SEQ ID NO: 191683 - DNA, 410 bp, Glycine max
  unsure (1)..(410): unsure at all n locations
agcttatatatttgtgctgtttataattttctacgcnctatctctaagtcctttacaatttgagttttaatttatttttattttagttaaaaaaatcaaacacttcaattgagtgcattatcataggtccattacatgttgatataccataatgaactaattattttttttttctggataaacacaacaatttattgataaatggataacatcacgaaaaaagattaacacctaagagagtgatgccttttaatcacttgacatttttattgggataaaataagacatgaaacgtggcgaaatttcaattgttttataaaaacaatctaagataatatagaaaaccacttactgcataattatataaaactcttttaaattcttagccacttcgagtcttatattctatg

SEQ ID NO: 191684 - DNA, 355 bp, Glycine max
  unsure (1)..(355): unsure at all n locations
tctccattgtagccatcctactggaagagccaggcattctcatatggtgggtcacaccaactntttggtatccaaaatcttcatcctggtaacataaattttcacagatcaacaacaaagaccaaaacggccaacaacaataaaagtggaaaagccttatcttactacgtgaggtcggcttcataaatcatatgatgtcattcaattattctatacctgaatatccatagcctttgaagtggaaaatgagatttcaccactgttactagctgttctggaggcactgaatgcagaaccatcccacaagtcagtggtgaaactatgcatgtaacatttactgttgttgatattgcca

SEQ ID NO: 191685 - DNA, 401 bp, Glycine max
agcttcttcttccatggcatattccctagtggatggcgcctcctctcacctcttctcctttgtcttccgctacatctccatggtggaaaatcaccattaaaggacctcattgaagctcaaagatccagcctccatagaagccccacaagcaagcttccatcaagtggtaattagagcacaagagcttcaagtaggtgctccttaaacctccattaattttttgctttaccttctattccattattgtttcttcattttttctccatgtatctcctcacatgtcttgtgctaaatgttgttaacatgattctttagagtttacaccgattaaacttgctatagaagctagaattgattttctatggttcaaatttcttgttcttgttcttgaaccatgaatt

SEQ ID NO: 191686 - DNA, 396 bp, Glycine max
ctagtcttcatgttgttcatgttgctccccttatctctaacactttaaactgcttctaataactagcgtttctgattgtggagctctcaaacttcacctgcttaatgacatcctcaaccttgcccaaatcttcattagatttaaaaggaaacatagagagttttccaaaagcgacatcttaactcacaatgatctttctttcatatggagaccaaactcaaaatcttttgaatccatctctatagcctatgaaaaatcccttcttaacttaaggttctaacttacttttacttacatgatagtatatcgaacatccaaacatcttcagtattaagtatttagctagtctgttagaccatagcttaatagcgatcttgaagtctatagcagtggatg

SEQ ID NO: 191687 - DNA, 405 bp, Glycine max
agcttaagtgcatacactctctctgagatatttgaatattgtattcacttaaactgttgcttgaaaagctagtagtgacttagtgattaaagaataattaggtgttcttaatcttagtgaaagattaagagtaagaaagaagtgacatagataatacttgttgtatccaagagtgatagtaaaaacttgtttgtaaccaattataattagtgaaactctttacaatttatgaaagaacattacgtatctcaggttaagtgaaccaatattaacactatgcttttactatagcttatgtcataacttttagtttattcttagttacttctatcttatctttggatgcacaagtttagtaaaaactatctttgcaaaattctgttattaacatttggatgcgctggt

SEQ ID NO: 191688 - DNA, 406 bp, Glycine max
  unsure (1)..(406): unsure at all n locations
cttcataagtgaaatcaggtgcagtcatcttcctaagagttctttcacgaggtggaggttgagccatgttctcactataaaaattagtagtggaatgttcaaaatcagaatattcataatcaccctcaacagaatgctcagaatgcttcaaatgcacagaatgaccaggatgcacactatgcctaacaaatctatgaaaggttctatctatttcaggatcaaagggttgtaaatcacttgtattgcccctagtcatgcactatatgcagcaaataatgtgtttctcaacaagtgcctaagaagggggttaaactacaactatactcaaaccatatcaaatgagttgaaatttgtgaagaacaccctaaatcatgaaagataccnacagatttcaacaaaattcaag

SEQ ID NO: 191689 - DNA, 402 bp, Glycine max
  unsure (1)..(402): unsure at all n locations
agctnggttacctccttcttcactacattaagaatcaccgggttgagtcttctctgtggctgtcttactggtttagccccatcttctaaatttattcgatgcatacatgtggatgggctaataccaggaatgtccgccagggtctagcctatagctttcttatgcttcttgagaactgataacagcttctcctcttgctcatcaacaagggaggcagatataattactggaaaacttttgctatcatccaagtaagcatattttaaatttgatggcagaggcttcaattctggtgtggatggttggatagtggtagaaagagatggtttctcagcctgtacctcataaagaaagtcagaggtatgtgtacttcctgaaacatggttagttctatctgactct

SEQ ID NO: 191690 - DNA, 329 bp, Glycine max
  unsure (1)..(329): unsure at all n locations
tgaggagtatgggggatccatcacatgtggtactangtggccgacgggtgatggtgcaagacaattctccacattcacaaatcacacataaacccaccatcccctgttgtccaccttcaactgagctcctgtactcccacgtagcccttatcctcgttcctctcaacgccgggtccccatcaatcctctcaagctttcacaatatccaagtaattcatcatccaatcgtcatgaactaacacagccaagaaaacagggcagaggcagaaaactctgcccaaaacacaaaccaaaatcacagctttccttacttaaagaccccagtaaca

SEQ ID NO: 191691 - DNA, 331 bp, Glycine max
aacaagcttgttgctttcgttcgcgtgatagattcctttccacaaggttcgaaagaaaggagagcttctaccctataacgcaacgtggcggacaatagtggacagctaactcgaatggtcatcattgtcaatgcaaaaggtatatgcgcttactatccatgttacacattattgagctcgtggtatgtgatcataacaactccaatatataatgttgttatcaaacaacacatcttaaaactactctgcacaatggtggctctgggaagaaacagtattctcttcgagaccatgacactatcctgacactacattgtgcgaagtgccaaat

SEQ ID NO: 191692 - DNA, 337 bp, Glycine max
caattgatggagatatattacacttagagggatgcttttgaaaatgagaatgagataaattgttattttcatcatgaagtagatccaattatagaagaagtcccacagatgttgtacttggaatgtcatccaattccagaccctgttgctggtgagtagagggatgttgatgttggtgagcagagagatgctgatgctggtgagtagagggatgctgatgctggtgagcagagggatgttgacgctggtgagcagatagatggtggtggtgaagagagagaatgtggtggtgggcaagcctattataccatgcttgaagaaatagaagtacatcatg

SEQ ID NO: 191693 - DNA, 432 bp, Glycine max
  unsure (1)..(432): unsure at all n locations
agctgtcgccttctcctccaagcactaccttgttatctctgccattttattcctatnnagctntaatcggtctagctcttgttctgagatcttgaccactttttctattcttgccatagaaggatagaatctggaaaaaaaggtatggcttcctcccgcctaacgggcatcctaagatcccttcgaactcctctatggttggtgctaactgaaagtccccaaaaatgaagcatctgagtgattggtcataatattgtgtgagagatgtgatggcttcaacagacacatctatcgttgcgagatcccagatcttcacatataccttgctgaaggcttgacgccaaacttgatccatccgcaaccctagttttcgcaagctggctagctctagattcttgacttttgacatgatagaacctttgttaaacaatg

SEQ ID NO: 191694 - DNA, 379 bp, Glycine max
  unsure (1)..(379): unsure at all n locations
ttctggttttctaaaccttgaanacttgngctcttcatactctatattcttttctccctttgccaaaaagaattcaccaaggactaaccgcctgaattctttttgtgtctctcttctcccttttccaaaagaacaaaggactaaccgcctgaattctattgtgtctcccttctcccttgtcaaagaattcaaaacgacacagcctgagaattcttttgattcttcccattccctaatacaaaagtgttcataggactaaccgcctgagaattcttttgtttccccattcacaaagtatcaaaggtttaacagcctgagatctttgtctcaacacattggagggtacatcctttgtggtacaaatagagggtacatctac

SEQ ID NO: 191695 - DNA, 310 bp, Glycine max
  unsure (1)..(310): unsure at all n locations
tgccacagtagcggcacataacagaatgataaaaatcggttgagtgaacgnttgaattatttattgacattgacgtcacaaatgacataattaatgcaggttcatacaatatctattcattttataatcttaccctacaaaaacttgacaatgccaagcttatgatcttgcacacactcaaagtaagcagcatgatttcatttgataaaactgtacagataaagtaattattgaatttttaaacttatggtgctaccttcaccgtgcctcttagaaacgcgtgcgtattgttgagattgatcctctgatg

SEQ ID NO: 191696 - DNA, 418 bp, Glycine max
  unsure (1)..(418): unsure at all n locations
agctnttcatttgatccagcataggatgatttacaacctatttcactcaagtcacacccatggaattcaagcacaagagactcgatcattgccatcttgaaagaatgctaaacatgaaaaaaaaggaaatatgcaaaagaaaatttgaagaagtttcaaatggaggaatgcaaatctgctagcacactaatgaatcanaaggagaagttcagaaaagaagaaggtgttgataacattgatgaaggatattatgggagcttgattggatgtctaatgtatctcactacaacaaggccaaacattctatttgctcataagaacaaaactggaattnttgtgacaatcaagtagtcattgctattgcanacaatcctgtgtgtcatgggaagactaaacatttcaacatcaagttctatta

SEQ ID NO: 191697 - DNA, 470 bp, Glycine max
  unsure (1)..(470): unsure at all n locations
tatcccatgcttctttggccgtcgttgcgttggatatcttctctatgtatcttcatccacccgatgataaatgagaaagagagctttcttgtctctctttcttgactccttcaacgtctcctttacaccttggcttatcgaggcttcatcttgctcctcgaagccattctctacgatatcccacacatcttgagctcctattagcgccttcatcttgatactccaattatcatagttgttctttgtgagcatcggcatttggaaaggaaaacctccattcgccatcttttgaggatcttgaagctctgataccaatttgttggaaataaggctttttatgtttaggaaaagtgtttaggaatattggagactttgaatagaaactngataggaaggagaattctttatggaggaagaaaacttgtatttttgcttgatacaaatgtgtatgattacatctctatgtatac

SEQ ID NO: 191698 - DNA, 496 bp, Glycine max
  unsure (1)..(496): unsure at all n locations
agcttcagatccgggatcagaagagctcannctagtataagattcacgcaagttagatgcataagattcaaacaacttggacagctttggctgcattccctggcttagcttgaatgcagttgggtccaatttcttgcactggaaaacaaaaaccaagaaaaagtaagtagacaaaccccatatgatcacagcaagttgcattaaaatgtaatttggttcggcaagaaaaattgcagtttagcaaaagagttcagtcaagcatgcaatttcgacaaatcacaacatgaaatttgaacccatttcgttaaaaaacgcaaggcattttaactacacaagggtcaaaatttacacaatacatcacatcaatgcatgaataaactatgtgaagtttaaatggtaattatcataatcactacaagacaagatatatcaagataagagaatatcacctcttgatagaaagcatnngattcctcctctgtaaggccttcatctc

SEQ ID NO: 191699 - DNA, 358 bp, Glycine max
  unsure (1)..(358): unsure at all n locations
agatagttactntcttgtatataataagccactaggaattttatgaatactatagaacgggacatgaggatttatgagtttgaaagaaactaacagaataaaaaaagaatatgagaatctgtgatattataaacagagatgaaagattacaaatccatgttctttaatgaacctgtgacctccaaacccaatacaaattgataactaatccattttcctaacgggttaagtatactgaatgtaatgtttactgccaaaaatgagaagaaacaacttagcacaaattatgatactaccgtagcttcctccacgctgttaatttaaaagtccctagaaaacccttgtagttcttctaaca

SEQ ID NO: 191700 - DNA, 432 bp, Glycine max
  unsure (1)..(432): unsure at all n locations
aagaagtttggcttttacatgcgcaactcccttgagtggcatntgtattggttgtttcatcttaatacaattgatatttgggttgcattgtgcatcatcatagtgtgtataaagaaaagtttctaagttagaaaaatttcttcaaaggaaaaaactctctgttttaatcgactacagcttcattgtaatcgattacaataagctgtctgaagcttntagagttgagtcttgtatgagttcaatcaattaccgatatctcatattcgattacactgttgtttgagacaatgactgatttatntaggagtctgctttaatggattaccaagtgtattaatcaattacttctctctcgttctagtgttcaaaggtgaacaagaacactttaattgattatgtagagcatctaaccgatacattattcttgagttg

SEQ ID NO: 191701 - DNA, 418 bp, Glycine max
  unsure (1)..(418): unsure at all n locations
tctagtttctatttctagaccatttttcatttattaacatcttttgtattaataagttgaccaatttttgaccagagaattntctatgaattatccttatcctttgtagactttaacttataaacttaagagtttaaccatgcctatgtatcctatggtaacatctcatttttttaccatttctatagtttaaaaacactatctaattgcataacaaaataataatactgtctaccacacacacatggaaaattgggatgttacaagcttcgacaagtcaatcacttgcaacattctaaaattccaacctaactttcctcaaaatcttgaatgtgtcatcaagtacatgtaattccaagttaactgtaataagtacatacaaaatttattcatatattcatttatcaatacgtaaatt

SEQ ID NO: 191702 - DNA, 405 bp, Glycine max
  unsure (1)..(405): unsure at all n locations
tataaatggaaaanaaaaaggtagtactggtgagacccaacaatttacgtaccttgattagttgattgtacgatgttcctgatgagttccgataagttccagtgagctacgtggttctcttcttctcaatggaattttcgatctccagtgttgaagtgaggagagatacctgcaaaaggaacttcgacgatgtgtttatgtgtcttcatgtgggatgattaaaatctacatgaaggtatttcctttgggcctgtatatatatgcatgttcgacattgaggaggttacatcacactcagagtcacgttggccaatcgtccttctatgcgtagtgctgagtttgtaggagcccgttggagttcatcatgcaccaagtacatgtttggtttgtgggctgtatggtaca

SEQ ID NO: 191703 - DNA, 392 bp, Glycine max
  unsure (1)..(392): unsure at all n locations
gagctggattgaaatgatgctatgcacagctaggagcctaatagcaatgatggagtgggcccaataatgtccaacggccattttccaatgtattttcattctagctattntgagagagattgtgtgtgtaaagatgaattaaaaaagaatgaaactgatagtgtgaaggatgaaaagagataaagaagattatgataaagaactttgaattgttttgtataaatgaaagtaagttaataagatgtaaaatgtttgaattaaaatggctatgtgggcaataaaataaaattatattatggtaatagccgctttattatagattatactatgatgaatttagtcattatattttggacaaaatataaatactccattagcatatataaaaatat

SEQ ID NO: 191704 - DNA, 404 bp, Glycine max
  unsure (1)..(404): unsure at all n locations
agcttgtcaattgaagagagcctacctcaatggtcttcttgtgtgctttatggggagtttttgagagcatcttgaagcaatggaagcattccaaacaagaaaaacttgagcaaaaatattcgagagagaaatttgcattttttgcttcaactctctctttgagagtgactcacttctgtatttaacttgaaaactataatagttaaagtgagaaaacacattccagtcaaaattacagatactctntaatattgtaagtcccacaatggttggcaaagttgaaatctagtggtgaaactcgtctacttgagactatgttggatgtccagtgggagtactaacaatatgtngaaatctaatagttggtggccaataatagctgggtgtgtagtgaaatctcatat

SEQ ID NO: 191705 - DNA, 347 bp, Glycine max
  unsure (1)..(347): unsure at all n locations
gctttgaaattcatgatccaatatgatgtatgttgctggtttttatgtatagatttagctatatatttatttatattaatattttatgtaaataatattgtagtgttgttatagtgtgattccaagaattttctcgatgaattagggaaagaacaagataatgtttcaatgtttagtgacagtcaaagtactataagtcttgctaagaatccagtcttccattctagatgcaagcatattcaattaagataccattttatcagggagttgataaataatggagacttatctntgttgaagatcttatgatcagagaatccagcagatatgttgattaaagttgttac

SEQ ID NO: 191706 - DNA, 375 bp, Glycine max
  unsure (1)..(375): unsure at all n locations
gttaatataantaaatattttataatattagtgcatattaattattaaaacataaaatttgaattatatatatatatatatatatatatatatatatatatatatattttattcgaccacaagattgaatgcttagaccacagtttaaagccagaattttctaacgtgttggctaatcatataatatcaactcctaatcagggttcgatgtgttcatataattaaaaagaatctcataagttggtctgtatgtaaaaggagaaattaataaannaattctctcgaaataactagaaagagaagaaaagaccctcaaaacataaaaattaatcatatcggggtctataatnttacatgtntaattttatattattt

SEQ ID NO: 191707 - DNA, 471 bp, Glycine max
  unsure (1)..(471): unsure at all n locations
aatgacatctttcttatggagattatcacttattttgttagcctatnnttaattgatccttcaaacaaaaagtataaccttggaggggacattcaactcccaaataaaggagtacttgttgggaataaatatgtatatccaaaatccaatccatcatattatcaattgtagtaaaaaattattctttattttattatcatatatattgtttcattaaattgttaatttgacaagtctttgattaaaattagaggtttgttatcatgataaagattatgatgataagaaataagtcctttataattntaatctaaatggttcttgatcgtaagattattgtgaataggaaatcaataatccgaatagattaatatatatgtaatgatctgtatcggataaagattaataaattntatttattanattgcatatataaatgatatttatgtggatgtcatcattgaattgact

SEQ ID NO: 191708 - DNA, 386 bp, Glycine max
  unsure (1)..(386): unsure at all n locations
cgacatagtttaaatgatatcataaaataaacgtatattcatataaagtattttttctggtaaaaaccacgactcacctttggttttatgtgaagcaatatatgagaataatatgaattatnttactataacatgatgtttttgttatgcttactataacacattntaatataaagtcagtgattaaaagtaagtaatataagcaagtttaaattaagcaatatttaaaattattttgcatactgtnganagggtaagacaattaagtgattagaacatattaattaatgtgttaagtaagataatattttagaatatcaatataatctaatgaaaaattttaatagatttacttatnttattaatttaatagcttatccttttct

SEQ ID NO: 191709 - DNA, 440 bp, Glycine max
  unsure (1)..(440): unsure at all n locations
tgcaagcttcttatccaaggctcatcttggaggtgtatctcctncttctcatggctnatncctgagtggatggcgcctcctctcacctnctttcctttgtcttccgctgcatctccatgggggaaaatcaccattaaaggaccccattgaagctcaaagatccagcctccatagaagccccacaagcaagctttcatcaagcgggttgcaccactcaaaacattcatcataccacctattntagggacttggttcctaataatacctattttggcaccaacaaagcacaaggatttaagctcttgcgaaccaaaccctcatccaacaacttctttacttgaggaataaactcaagcccatgaggtgtggcaatgctagcaagtgccttntacaaagagatatgtggaggttgctaagaggaaagttcttaatggttgatt

SEQ ID NO: 191710 - DNA, 425 bp, Glycine max
agtttgtcgacataatatctttacatcccgatttcttgtttatttgagcctgaaatgtcagaattagggtacacacagacacaactgaatttctagagtacaatactgggctcagaattcgagagagactctggagcagctatgcagagaagcctatggttctacattttttgagagattagtgagtgttaaagtgatcgtgaggtgccaagaagaggaggagggatcccccttcttgtgtaagcaacaattattctgcactctctatctcatttgtgttaaggtttctatgtatggctgactaaacaccctagttagggatttctaaggaacaagtaatggaattatacttgatatctaattaattgtgttttgagtgtcaatgcttctttaatgctaattactgatgctcttggactgacacc

SEQ ID NO: 191711 - DNA, 409 bp, Glycine max
  unsure (1)..(409): unsure at all n locations
gcttgaggaatatggggtacccatcacatgtggtactatgtttatgtcgggcganggngcacaacaaatnttccacatccacaaatcgtgcataaacccaccatcccctgttgcccacctccaattgagctcacgtactcccacgtagcccatatcctcgtttctctcaacaccgggtccccatcaatcctcccaagcttccccaacatccaagtaattcaacattcaaacaacacaaactatcacagccaagaaaatagggcaaaggcagaatactctgcccaaaacaccaaccaaaatcacagcttttctcacttaaagaccccagtaacagttccttcgttccagttcgttaaccggtggatcgactcgaaaanttcactggaagtctctagtacataatcctaca

SEQ ID NO: 191712 - DNA, 363 bp, Glycine max
  unsure (1)..(363): unsure at all n locations
gtgtggaatagtcagtcttcctacttttattcgttgaccacagagtggttcctggagatatgtcgcgagggtcaggagaccttgnggatgtcaggtggggtgctattgccaaaaaccaagcttgaccaatcccaacccaacccgggcatattcagtcagtgagaacctgtgacgtacctaaacaggcgatctcctggttgtctaccaatttaagaacaaagaccacaaagcatggaggcttgtgtggtggctggccagctatggattttgagtgatatctagaatatggcctatggtaatcgattaccaagggtgtgtaatcgattaccaagggtgtgtaatcgattacaaggcttaaaaatg

SEQ ID NO: 191713 - DNA, 217 bp, Glycine max
catacattcaatttctgctacccccctcttgattaaccttgtctaatacagaaaaatgctgatggccaatcaatgctggcgtctacgcttattccacagccatattccatgaatcatgcattcctcgaggaggatgctcatatgtcttttggcaggattgatttgttgggggagctataatgactgcccttgccttttgatatatgctatcttcaat

SEQ ID NO: 191714 - DNA, 404 bp, Glycine max
  unsure (1)..(404): unsure at all n locations
agctatggatntataagcttttttaactatgttcgnngnctctaaagggacatatatttattcacatgcgtatgaattttatagccattggacgtttaatatttgcattcaatgcagatacttcttcatgttagaaaattactcttggtaactttcatgtagaacacttcaacagaaaatcacttcctttgcgtcagagcaggtttgtcatagtagggcgtgtcttttgatactttngatcttcaaagtgttgaacattcctttgtgcttcttacgattcaacaaaccctaggagaatactatactgtctaagaaagttcctgcaaaacanatttcanacacacaatattaaatgaagctcttacatgcactntntaatgctatatcagatcatggagtgtctc

SEQ ID NO: 191715 - DNA, 499 bp, Glycine max
  unsure (1)..(499): unsure at all n locations
agcttagtgcttcttgagcacctttctntttcttatttgntngntntcctttagtacaatccacacaaatattcaaatcaataaaatatagatttggaagaatttcattctttattaatctttccattntttctctaaaaaatatggcccaaatgtttatgccacaagaaagcataacgtttattcactaaactacgtttagtgccaacattatggtgcaaagtcaaaatcatttcagcatacaaaccatttaaattcaacttatataaaccatcacaaagaatattggtaccaatgagattattatacttaaataaactgaaatatccattaccaaaattaaaagagtacatatcctttaacatcgagtntagataatgaaactaaattcctagataaactaanaacataaagagtttctaatanatctaaatgatgtctaatgtcaaggattaaatgatangtctcaactgctttcactctaatccncataaagacg

SEQ ID NO: 191716 - DNA, 409 bp, Glycine max
  unsure (1)..(409): unsure at all n locations
ggcataacttcggtgccagattccaatatacataccccagtttctctatattaatcaatccccagaaagcaagtgctagcccctctcattggggcattatttactaactaacaaacagactcacttatttgttacttgctttgtatgtctgaaacagtaagaatctataatacaaatgttcaaaatgtagtgttaattaccatgtactaaatttccacagtccatgtattcttccaaattcacatgtctactttatcaaaatcatggaacaaggcaataattaataacttaccttaagtccaagttcaatttgtaaattcagcattcaacaaagtcttattcaatgttcacattactttattctttgaacattccanaatctctccaaacatgatcaacctagtacata

SEQ ID NO: 191717 - DNA, 383 bp, Glycine max
  unsure (1)..(383): unsure at all n locations
tctctcttgatagntnttgaaccttccaaacttaatcttctcaagcgaggtaacaaaagtggtgatttgactccacctctatcctcacgattcacgggtttgtcagtctttacagcgctgcagttctcaatgctaagtcttcgtgggcgcaatggagttttctcagacaccagtgttgacttctctgatggagtgtgtggttctttaattctttggaacagtaccctctgagcttccttggctgccaatgcaatcttaaggttctcaacctaatattcatatataaaaaaaaggaaaactgaatcagtttaactccatctgagttanaacacatanctctcaaattcaatcttacgatggtatgatactgatgactgccaatt

SEQ ID NO: 191718 - DNA, 438 bp, Glycine max
ctcatggtgatacatacatgtgttaatcaaatccttgttgttctttgattataaacactaaaatgtcatgatatatctttatttcaaatttaaattatcacgcgctttggacatgaatagtttaaatttattgataaaccatgattaaaaatgtcatgatatttctcatggtgatacatacatgtgttaatttaaatataaatttatcttgagattttgctctgactaaaaataataagatgtcatgatatttattgattaaacattcccttgtatttttttatttttttttggaaggcaaaaatatgtatattaatattaaacagaacagtaccagatgttctgaaaataacatatacaatacactatagtgccaccttccatatagcataacaaacccaacaatatcccatcacatggtacccaatacatattaac

SEQ ID NO: 191719 - DNA, 313 bp, Glycine max
  unsure (1)..(313): unsure at all n locations
ctcagaagatctcaatcttatcgtgtcatgtaacactccaaataaatcacacttaaatgagagggattcagaagcaatgcaggtgtgggatgtatagttgagtgtgacttgaaagacttaattggcacttgttatacaaacacgatgcatgtacttttcggtcgctcatgtaacaccccgaacgaatcacaccaaaatgagagagaattcaaggttgtgcaggtatgcgatgtacaattgagtatgactaaaagtaattaattggactactaatacanacaagatgcatatacttgttggtagctatcactta

SEQ ID NO: 191720 - DNA, 467 bp, Glycine max
  unsure (1)..(467): unsure at all n locations
agctntntattccatcaaaatcacttttattctcacatganantataaaacaatggtcacatatccatntgcttctcattgatagttcctaatcctcaaatcaactgtattttaattttctctcctttttattctttttttcttttctgtcaagttggtgtgatccatataggttctaggcagntaattttaagattccttgtattttgatactttaaagagtgaatntttaagctcctagaatctccatttgggtgcaggaataatcttcatccatcctttcttcatgtatttctctctaaggagaagacaagagttcgaatcattttcggttntgaagagtaaagataggtgggaaaaggtgaggattntcctaatcctataantttcaatntgcatgccgaattgattcttagagcactaagtctctcttttgctaattggttggtcgtgtagtctaatacata

SEQ ID NO: 191721 - DNA, 524 bp, Glycine max
  unsure (1)..(524): unsure at all n locations
atctctaagtcacctgcngcatgcaagcttgtgtattgttgcattctactaatatatggaattgtctactgctttgcctaagaataacaattgcatgaccacaacaatgctggaggcggtaagggacaatggtctttcaaataaacctgttgtacatgaacaaacattatatcatgcggtgaccgtgtcaaacgaaccaacgaagtcattgcataattgttatactaattatattcaatgtacctgaacaaaatgatttccaaacacgtgaccgacacatatcatgcggtgcccagaagaatcaggtagtggttgacttctaagaggaaaaaatgtcatgctctgttgttgggacaacgatacaaggattacgttataccgtgatgctatcacatatcccatctncgttatatccatccacttgtccacactaacctgaatgaaccanacatacacnatgtagtaatttaaagaatggtattaaaaaaaatacctaaaacataccttncaaaaccatcaacaag

SEQ ID NO: 191722 - DNA, 345 bp, Glycine max
tcaccaccaaaaggatgcgttggataagaagcttatagaggattcttcattggaggaagagaatgagagagagagagagagagagaaagaggaggggggcgtgggatttgaaggagaatagggagagaagttgaacttttcccattcatcaaagttatgacaagtgttacacatgtttttatttatagcctatgtcactagcacatgggaagcttccttgagaagcaaggaaggtagcttccttgggaagctaggaagaaagcttccttaagaagctagagggtagcttccttgggaagcaaggaagtatgcttccttgagaagctagaaagagggggggggggg

SEQ ID NO: 191723 - DNA, 430 bp, Glycine max
  unsure (1)..(430): unsure at all n locations
acctgaagctgcagctgctacagagtcactgacacattatgtttgctattaataacngacatatattatgtaggtactattcattcaagcatgctaacagtggacaactgaacatatattctgaacatacttgggttcatggatgcagtggctcgtgatgatttgggtaaagatgttattgacaaagaagtggcggagaaggtcagccaaaagtttttgtgaaatcaactctggttgtctccaaatgaattgctatatgatttgatttattgctttaacaattgtcaattgacaatgcatggtaccatgatacgtatcccagaattgctagttattcacccactgggcacaatatccatctagagctttgttctctagtttaaactggtgcggtggatatatatactgacacaaaattttattttctgtc

SEQ ID NO: 191724 - DNA, 429 bp, Glycine max
  unsure (1)..(429): unsure at all n locations
ctttatatagactaatgtggtgctttcttttntatatatatatatatgtaggtagcaagttctcaacagactctgaagctattctttatatatgagttgaaatattctttatactttatcaataaattgttggcttatataaaaagatagagcataagttataaacttatattgcagacccgtacagaatatgagttaggaagtattcggcagataaaatttaatgtgaaaggaagctaaggttatgtatggctcagtttttttagaagttattttaaagttaaagtttataataacaactgtaaaaacaaagtagaagttagtcaataattattattggttttcaagtttaaagctctttgttaaattaaaatctatgtgataaaaatatgtaaaatgtatgtgaaaataatcgtctcactcaatata

SEQ ID NO: 191725 - DNA, 383 bp, Glycine max
  unsure (1)..(383): unsure at all n locations
tgcaagcttctggtgggacatcttgactagctattcttctgacattcaccacagattctgccttcttctattttcagattgaggatgcctctaacagcaccttcgtcaatgattttcttcatgcctcttaagtgcagatgtccaaatctttgatgccatattttgacttcatcttctttggaggatagacatgtggaggagtaactggtttcttgaggcgtccataggtaacagttgtcctttgatctgctgcccttcattagaacttcactcttctcatttgtcaccaagcattctgactntgtgaagtttacattgaatccttcatcacacaactgactgatgctgatcaagtttgcagtcagtcccttcaccagcattac

SEQ ID NO: 191726 - DNA, 437 bp, Glycine max
tggatcacgatggggtatgttccctcacctttcactcatataggctgtcttggaaattggttgaaccattggataatgtaagtcccattggattgcatttaaagtgtttgtgaaaatgtctggctcgtcttttgattctgtcaaatggggtggcaatggatgattgatatcaccccatgtttaaattatggactttgtcaaatggagtggatgattgatctcaccccaagtttagataattagagtggtgattgagttgaatcatggctacagaattctctcaataaccctgtgtatcgaattcaccgtactatgtgccaggttttctttgaaggaagtcttgttataataattaataagtgatggaccatcgcaaatagtacccatactatgttcttggtaactatgaattgaatatcacttttgattctgaattg

SEQ ID NO: 191727 - DNA, 417 bp, Glycine max
  unsure (1)..(417): unsure at all n locations
agctngtanggttaggaacggcggaaaaggattgatatatatagtcaagtcactggaaagtggctntattctagaagccgcgtgacatgagccttcgcattcgcccagaacacaggaccaaacttggaatgggcaccaggcgcaaccaagtaagcccaattctgttcaaacattctagttccgggtgttgctaggagcacttctgctggggcacccaaacatagtgaaaaaataaaaatctcagttaaatattaatttaaaattaaatagtttatgcatgataatgtaaaaatatttctactttcatttaattataaacttctattagtatatcagcaaaaggatgagtagcaacacatttctaacatactctnttctgttgtttcaaaattattgtaaactacaaaatcatgaatt

SEQ ID NO: 191728 - DNA, 462 bp, Glycine max
gagcgaagatgttcgcattatatattcatgagaatcttccattcatgtttccaattcagcattgaacactaaaggcatgggaaggactacccataatggtcagaatggtcgatgcagatcaaagtcaagatggaaaggtcagagaaaatttcaaagtgacggtacttgttggaattgtgacaagagaggtcactttatcaatcagtgcaaggcaccaaagaagaacaagtcgcacaaaaacaagaagtgcgatgatgatgaatctgcaaatgcagcaactgatgaacttgatgatgcattaatttgaagtttggatagtcctgttgattcatggatcatggactcaagtgcgtcgttccacactactccctctaaagattattgtctaactatgtttctggaagaattggaaaagttaccttgcagatggaaaatctcttgacattgtctgaagaagtgata

SEQ ID NO: 191729 - DNA, 407 bp, Glycine max
  unsure (1)..(407): unsure at all n locations
gagttacaacctanagttcccatgttgaatgttattccacttaaaatatttaccctttccaactaagtacattctgttacagctggtatcactgtttccactgtcatgtgaaggcaactacaagttaacatgttcatctctaacagctaaaaaatcttctgtggcaattctaggaacaacaccttacaagagaagaaatacacttacaaaggatcaagtagagaaggatagacaggaaaaactcagaaatgttttggaagaaaggaggatcaaggagataactccttcaccagagtggcacctttcacaacctatgactaggcttagtacaacaagacaaatcccttgtacaatatatccccctaactattaagtgtccncaccctcaactgacaatggatcaagta

SEQ ID NO: 191730 - DNA, 368 bp, Glycine max
  unsure (1)..(368): unsure at all n locations
ttttgatgctgcaaattgatggtttctgagtggaaaattctaattnggttaatcctgaatttctgcagcattgcaaagcaaattcaaattaattgaagttatgtacgagcattgtagcttttacaaaaataagcactgtagcttatttaatgcacaaattctgcagcatctgcagtatgtgggtggaaaaagggtgggagtggaaatttaaatggagaaggcacttgtttgacagagagcttgagatggcagattgtttccataatgatgttgctggcagctgtattcatattcacaaaaaagatgactggagaactttgacaaggacttttgcttcacctacagctattggtcgtctaacataacat

SEQ ID NO: 191731 - DNA, 389 bp, Glycine max
  unsure (1)..(389): unsure at all n locations
agctntgagccanaatcccaacttaccgtattaccttgacccagggtgagaatgtcaatccttgccctcggaagaagacaaagaaaagaaagttcccgacccaagaatcggaagagaacaaagagaacattcccaatcaaaagagtggaagaaagcaaaaaaaaaggaaagaaaattctcgatcaaggattggaagaaaacagaagagatatgtagaacaatatctaaacaacacagagttgtcaccaagtaaaaaaaacaaaaaaagaaaggagaacacgatctatagtggtcctctccctttgattgccaaccaaaaatcttgtgcgctagcgactttctcgccccgcactatacaaaaacagattagganaaggcaagaacactca

SEQ ID NO: 191732 - DNA, 280 bp, Glycine max
atcatcctgcttgggcgaatgagaaaactactgcaaatgaataacgtgaggatgagggagaaacccatgctgtgactgccattcctatactgccaattttcccaccaacccaacaatgtcattactcaagcaataacaaaacctctacttacccaccacccagttattcacataggccatcactatatcaaccacatagcctgtctaccacactttcaatgacgaataccacttttatcatatacaaaacaccaacatagaaatgatatttgcagcgaaa

SEQ ID NO: 191733 - DNA, 418 bp, Glycine max
  unsure (1)..(418): unsure at all n locations
atcctctgagtcacctgctgcatgcaagcttgtgagaggattcttattatagatattgtanggagatgcaaatgaaatactcatttctgtgctgctctttattctttaatttagagcacaactcgttcaaatctttaatgctttattactgcagtatattttatatcttaacattatgaaatgctntgataaaatgttagcaactgttaagtgaaaatgttcctctttttgtaatacagaattcatggcctcaaatctggaaagatgttgaaagagttccgtggccatacatcttatgtgaatgaatgcaattttacaaatgatgggagtcgtgttattactgcctcaagtgactgtacaatcaaagtctggtacttggcattgtactagaagttccttggtcatctggtgttcatat

SEQ ID NO: 191734 - DNA, 403 bp, Glycine max
agttttattatatatgattcgagacatggaatgctatctggccaaaagcattgttgtaaattatgagatgcaaaaagttaatacataattttttcttgacgataatactatattggtttagattatctgtgattgcagggttcatctttggttctcttaatgtctccatgatccttcctagtaatattaattctaactataaaagttaaatacaaatgacttaatagtttagacacctttattgcttgaaaatggttgaagtatcagttgaaattattgcaatcccagcagttactagaagcatcttatgtaactggcaatatgtacaataagcacgtgtgaagattaagcattgatagaactttttattgtatttgatgtgaggaattaaggaaatttggat

SEQ ID NO: 191735 - DNA, 385 bp, Glycine max
  unsure (1)..(385): unsure at all n locations
agcttgagatgaggaagtgttgaagggtgattcttcctgctnttatngnngaccacagagtggtacctggagatatgtcgcggnggtcaagagaccttggggacgtcaggtggggtgctattgcccaaaaccaagcttgaccaatcccgacccaacccgggcatagtcggtcagtgagaacctgtgatgtacctaagcaggcgagctcctggcagcaacagataaaaggaacaaagaccacaaagcaaggaggcttgtggtggctggccagctgtgaaacttgatngatatgtgagatatggtctctggtaatcgattaccaagggtgggtaatcgattacaatgcttaaaaatgaagacaggacgctangatggtctctggtaa

SEQ ID NO: 191736 - DNA, 429 bp, Glycine max
cacctagtaccacatgtgatggttaccccttaattctacaagcttgagatgatgaagtgttgaatggtgaaactccctgctcttattgttgaccacagagtggtacctggagatatgtcgcgggggtcaggataccttgtggacgtcatgtggggtgctattgcccaaaaccaagcttgaccaatcccgacccaacccggtcatagtcggtcagtgagaacctgtgatgtacctaagcatgcgagctcctggcagtcaacagataataggaaaacatgaccacatatcaaggaggcttgtggtggctggccagctgtgaattttgtgtaatatgtggatggtggcctcttgtaatcgattaccaaaggtgggttatcgattacaatgctctatattgaggacaggaggctaaaatgggctctggtaatc

SEQ ID NO: 191737 - DNA, 359 bp, Glycine max
  unsure (1)..(359): unsure at all n locations
attaccagaggggtggaacgttntanaacagccttaaagaaatttgaatttaaattacaagttatgtaatcgattacaatgaattggtaatcgattaccagtcttaanaattcaaatttcaaagtgaagagtcataactcttcaaataaataattgtgtaatcgattacaccacaatggtaatcgattacccactgagaattttgaaaatggttcccaacagtcacatcttttgcattaactnttgaatggccatcaaaggcctatatatatgtgacttggacatgaaattttctcagaagttttactgaccaanaagtcttatcctctcanaagaacaaattgtcttatcttctaaaa

SEQ ID NO: 191738 - DNA, 484 bp, Glycine max
  unsure (1)..(484): unsure at all n locations
agcttacanaactcatatggngccttatatctaatcgcttctgccatggaatttcttccncagcttgtggaaaacccctgaattaagaagtctagttgggctactatatttttttattggtatttttttttctgaagtctaagaaaaaagttaaaaaaaaaagtgatttttgttctatggaataatttagggaattttgacttatgattttttatctttattagtagattatatgtgaatttcattatgattatagttggagatggtgagggatcctctggatctgaggcggtatgcgaaaactgaggacggtgatgacctaactcaagcattggtggaggaaatcatagagaaatgtcttggtttcgaagttgagcagaggaagttggtggacctttcattttgctaacattngatattggcagaccaatagctttgaatgaaatgataccctatcttatctctatcattattttttaatcat

SEQ ID NO: 191739 - DNA, 359 bp, Glycine max
tctctgagataacttcctttagaagctacttctttgctacacacatccatctaaaaactaagctcacctgcttgagaagctagagcttatctacacacacccctctaataactaagctcacctccttgagaagagaagctagagcttagctacacacccctattatagctgagctcacccccatgacaaaaatacatgaaaatacaaaaatatccctaatacaaagactactcaaaatgcctcgaaatacaaggctaaaaccctattactactagaatggcaaaaaataaaaggcccaaacgaaggaaaaacctattctaatatttacaaagataagcgggctgatacttaacccatgg

SEQ ID NO: 191740 - DNA, 350 bp, Glycine max
  unsure (1)..(350): unsure at all n locations
agcttgtaggcctaggatcttcttcatcaatggattcctttgcttcttggaagatgaatggcagcggaatggagaaggaagagagagaggagacgccacttcaaggagaagatgagtttagaaaaagctcaccaccataggaggtcatggataagagcctggaggaagaagatgaatgaagggagagggagagaagagcaggaaattttgtgctctaaaagagctctaaaatctgaagtttaatattcaaatgatcaaagttgaaaaaaatgaacacacatgacctttatttatagcctaagtgtcacacaaaattggaggggaaattgaatttcaattcanatttcact

SEQ ID NO: 191741 - DNA, 460 bp, Glycine max
  unsure (1)..(460): unsure at all n locations
tgaagaggatgctntaatggaggaaaagaaagagagaagggtggagcacgaaattgaaggaataaaagagggaaagaagtggaactttgaagtatatctcataagactttcattcatcaaagttacaacaagtgttacacatgcttctatttatagactatgtagcttccttgagaagctttcttaagaaaaattccttgacaagctttcttaagaaaacttccttgagaagcttctttgagaaaacttccttgagaagctagagtttagctacacacacccatctaaaaactaagctcacctccttgagaagcttccttgacaagctagagcttagctacacacccctataatagctaagctcacccgcatgacaaataaacatgataatacaaaatatatcctactacatagactactcataatgccctgaaatacaaggctaaaaccctatactact

SEQ ID NO: 191742 - DNA, 438 bp, Glycine max
  unsure (1)..(438): unsure at all n locations
agcttagcagtcgtgtacaacagtatatgattgtgcanttttttaattgatcgngattnttttaactggtagtgcagtttttaaaaaattatnggtttaaatatttttttatttctataatttagtgtgtttttttctctttcttacttataattcttttttagtccttttaaaatatgtttattntatttttcatcctaacattntaaaaataaaaagaaaaaaaaagcatattttacaagaactaaatgaaaaaatcactaaattacaaagatcaaaaaaatatttaaaccaaaacttatttattcttatgaacttaccctttgaattnttattcttataatttttcacaaatctatccagattcccgaacatcatccgcttgtcttcacttgtatatattcaagcttaccacaatcaattattgctcagtttgat

SEQ ID NO: 191743 - DNA, 368 bp, Glycine max
ctatacaaaagttagtcgtataaagcatctatcaatagactaggtagttttcttgagaagctttcttgagaaaacatccttgagaagcttctttgagaaaacttccttgagaagctagagcttagctacacacaaccctctaataactaagctcacctcctagagaagcttccttgagaagattcctaaagaagctagagcttagctacacatacctctctaatagctaagctcacctctttgatatgagaagctagagcttagctacacaccccctataatagctaagctcacccccattccaaaatacatgaaaatacaaaaaaaaagtccctactacaaagactactcaaaatgccctaaaatac

SEQ ID NO: 191744 - DNA, 375 bp, Glycine max
  unsure (1)..(375): unsure at all n locations
agcttgttcgcacatcgntcgcgtgtatgatatccactcgttaaggtttaaagtagaggagaccttcaatcctataacgcaacgtggcagacaaaagtgggcagttaacttgaatggccattattgtcaatgcggaaggtattctgcgcttcactatccatgttcacacattattgcagcttgtggttacatgagcatgaactactaccaatatatagatgttgtttacacaaatgagcacatcttaaaagcatactccgcacagtggtggcctcttgggaatgaagcggcaattcctccttctgatgatgcatggacacttatccctgacccaactacaattcgtgcgaaaggtcggccaaaatcaacaaggat

SEQ ID NO: 191745 - DNA, 464 bp, Glycine max
  unsure (1)..(464): unsure at all n locations
caaatcgacctagaggtaacactaactactgtttaacatatagaactatctatctgactnttttaaggagtttatctttcatttttaattgtatgctgaacagtatttctttttcaggtgttactttgttattcaatgaacccgcagaggctcgcaaaccagatattaaatggagactttatgttttcaaggctggtgaagtgctaaacggttaatgtttgtggtttctgcttatagtatgtgtgttacaataaattatccaacttgtatgccatatgtcaatattttgtgagagcatttcccacacaagtgctatgacaattagacagacctgtagtttttgttctcaactcttaagtgttttcaattataaactgttttgtccttttccgtgcattatgacctggaatttttctagtttatattggccacatttcttgttggttcttatgttataatcatcg

SEQ ID NO: 191746 - DNA, 436 bp, Glycine max
  unsure (1)..(436): unsure at all n locations
ccaatgattctccatctattatgtncttattatcatggcaactcgccttatcgaccttacactactccacttaacaattcataatctatacttcatgaatcattgtgttcactttntgcacattgtggcatccaacacaagtctactcgctatctcaaaatactcaggatgcctcacaaaattttaaactacaacacaccatcccaatttccaaaatacaaagtaacatttactaacactataaggtaatgtttgcgctctcaatactctattacacctcatggatcatgatactccagatcttcccttcccttccattgtttttctatccaatccctgctttactattctctaattctatatcttacccaacatcaggcaatttctatccttcttatctctctcctcttcattcgacaccagactgccactcaac

SEQ ID NO: 191747 - DNA, 435 bp, Glycine max
atgctccatgtgtttggatgttcgacattctatcatgtaagtgaaggttagatggagtccaaagccaagaaaggattctttatgggatatggagatggagtcaaaggattataagtctggtcttcatctgaaagaaaggccattctgagtagagatgtcatctttgacaaactctctatgttgcattcaaaattcaatgaagatttgggcaatgctaacgatgtcattaagcaagtggattttgatagctctacaataaaaaaacataagcaattatgatcttcaaatgcaccttcaacatcaaaacacaacaccagttaaggggattgactggacgagtcaaaaccattcaaagaatcttaataccacaacacccataaagacataaaggcaaatcatagctcttgaaagatatgattctgagatagtgtctat

SEQ ID NO: 191748 - DNA, 473 bp, Glycine max
  unsure (1)..(473): unsure at all n locations
atctctaagtcacctgaggcatgcaagcttatagagctntgtagtgggttgagaattttataatgtattanatagnagaattaatatattcttaattgaaagagattaaaatagtacatatttattgaaataacacactcgacaaatagtacatagaanttattaatgaaaaaataattattttattcaaatataaaatttcaaaaaaatgcatttgactattttatcaaaataagaaattgtgaaaataaagaaattcaatctctttatccaaatacaaaattctgaaaataatgaaatttaatttgtttatccaaacatagtaatttgaaaatgaaagaatttcacatgaagcattngaaatttttagaattctaaaattagaattttaaagtgcctcatccaaacaaactctaaatggtaatttgatccccctanttttcaaaatatgtaattgtggccactctatttta

SEQ ID NO: 191749 - DNA, 397 bp, Glycine max
  unsure (1)..(397): unsure at all n locations
tgctctattcaatggagttgacaagaacatcttcagtctgatcatcacatgtacagtggccaaagatgcttgggagatcctgaaaaccactcatgaatgaacctccaaagtgaagatgtccatgatgcaactattggccacaaaattcgaaaatctgaagatgaaggaggaagaatgtattcatgacttccacatgaacattcttgatatgccaatgcttgcactgccttgggagagaggatgacagatgaanagctggtgagaaagatcctcagatccttgcctaagagatttgacatgaaagtcactgcaatagaggaggcccaagacatttgcaacatgagagtagatgaactcattggttcccttcaaacctttgagctgggactctcggata

SEQ ID NO: 191750 - DNA, 411 bp, Glycine max
  unsure (1)..(411): unsure at all n locations
aacctataaatnataagagtggaacttacttagtattagatacaacaagacataatcaatatataataatatataaaaaaacaaagagtcaaactagagtagtgcacaatattccaaactatgatgagttgcatatgatgttgtgacacataatacttggttctatagtgttgatacttaataaaataaagaatattaaataaaaaaatcattctatgttctcaggtgttacgtganaattaagtacaaacattgcaatacaaatattattgcgggctcagaggccactttcaatttaccttctaagaaaacaaatgactgagcctctaatgatgaagagagctcacagatttgtcatgcttacgaactacctgagaaagaaccaactatgataataatttcaactatatc

SEQ ID NO: 191751 - DNA, 448 bp, Glycine max
acacttttgttactcaagctcattctacttacaaaatcgagtgtcaattcttgaagaaagttttttaccacctctctgatattaccaatttgataattgagaacaaaggctcaagattcttcaatgtactctaagattttttgctaagtaaacaaaaattagattaactacaaaagctaactagtaatctgttgaaaataaaaaaaacctcttctcaaccttgcattttgtaatggaagataacaaattataatatgcaatgataaagaaaaagttgcagacaataatataaaagaagacaggagatcatcaatgtaattgtagttaagttcttgggtttctgcttttatttcttaacatacgaagcccatccattatattcaaaatatattttttatattgtattcaagaactgtctaattattgaaaaagatgtatgggcacatat

SEQ ID NO: 191752 - DNA, 429 bp, Glycine max
  unsure (1)..(429): unsure at all n locations
agcttgagcanattcaaactataataaccttttactcggatgtctgatagagtcccgtaatatatcgagacgnctcgaaatgaatgttgaacctcagagcaaattcaaacgacaataacttgtttctcgtatgtttgattgagtcccgcaatatatcgagacgctggaaattgaatgtttaagctctgagcaaattcaaacgacaataactttttactcggatgtctgattgagtccagtaatatatcgagacgctcgagattgaatgttgaaactctgagccaattcaaacgacaataaatttttactcggatgtccgattcagtgacgtaatatatcgagacgctcgaaattgaatgttgaacctctgagccaattcaaacgacaataacttnttactcggatgtctgattgagtcccgtaatatat

SEQ ID NO: 191753 - DNA, 367 bp, Glycine max
  unsure (1)..(367): unsure at all n locations
acttttgttactataccttcacatcataccacttccgtgtgctggaactacttcacattgtcttatggggcctatgcaagttgaaagccttggaggaaagaagtatgcctatgttgttgtggatgatttctccagatntacctgtgtcaactttatcagagagaaatcagacaccttngaagtattcaaagagttgagtctaagacttcaaagagaaaaagactgtgtcatcaagagaattatgagtgaccatggcagagagtttgaaaacagcaagtttactgaattctgcacatctgaaggcatcactcatgagttctctgcagccatcacaccacaacataatggcatatttgaaaggaaaaac

SEQ ID NO: 191754 - DNA, 476 bp, Glycine max
  unsure (1)..(476): unsure at all n locations
agctnggtgccatgtctcagcacaagtttgtttcttatttntttcattggtatttcctgttctaattttcaaaagtttgtaaatgagtacgtacaaagctatgcctttttttttcttttcccttttaagttcaacaaagccatgcattttgagtttgcaagtttcaagagaacttagattgtggcaaagttgcgaaatctatgcaccagatttaaatganaatgcctctgctttcctcaaaatataagttccaaattccaagttataaaatattggctgttttctgtccagaatccatacatatatattcttagctccactaacacatagaaaaatgaaaaaaattaaaaaaaattcaatactatacaaatgcaaattggaattaagttggagattcaaaagtagttagttntgagggtatataattggcgtgagaaaatatagttaaaggttcaaattggcatttcatacctact

SEQ ID NO: 191755 - DNA, 321 bp, Glycine max
  unsure (1)..(321): unsure at all n locations
tgtattatggattatgtggctaattntgcacaattctatttgacatatttgatctatattntacatttctttaatgttttcagttacttttataatttaattttacaggttgcaagacgacagattaaaagtgtgtttgctacaagctatttttctgtcaataagcttggagatcgtgcaggtataaattccttcgtcctggaccatgcattattcttatagtttacttaatgttatttgcttatataagaaactgatttttttttttctgaatgtagctgtatttattcataattatgttggtttgggaattaacattct

SEQ ID NO: 191756 - DNA, 418 bp, Glycine max
  unsure (1)..(418): unsure at all n locations
agcnnttgaatttagtcagattactcctcgatcatattctaatactcatgcaccttttacattcaaaaccggaaacttagattcctaggcatgagtcatccttttggcactttagtctagcttctacaaactacccacacactcacaatgcgcacaatttgtttcgcaaactaagttccacaatatcatgcgcaaatgccattgaggcatttcaccgaacacttggtgggcacatgtttaagcatgaaaatcaagggtatgggggcaatgtggcatgccccattatcttagaatgcaccctangcctaaggccaccccctacaacccctcaattcaacaaaaacaagcaacaattcaaggataaatccctcancgtttgagcaaacacatgcaacttagagcaccaaaatatatcaat

SEQ ID NO: 191757 - DNA, 374 bp, Glycine max
  unsure (1)..(374): unsure at all n locations
caaaaagtgccttatgaatcctcccgtgcttatgccaccagtacctggaatgcctctcattttgtacatgacaatcttggacgagtcaatggggtgtatgctggggcaacatgacgaatccgggaagaaagagcgcgctgtttactacctaagtaagaagttcacgacctgtgagatgaattactccttgctcgaaagaacgtgttgtgctttagtatgggcatcccatcgcctaatgcagtacatgctgagccatactacctggttgatatccaaaatggacccggttaagtacatctttgataagccagctctcacgggacgaatcgcccggtggcaagtcctgctatccgagtntgatatagtctacgtca

SEQ ID NO: 191758 - DNA, 445 bp, Glycine max
  unsure (1)..(445): unsure at all n locations
agcttattcaacaatggcaaatcacataacttatttttaagaaactcagcctcactagtagcagtatctaaagcaataatttctgtttccatggtagaacgtggaataatagtttgtttagtagatttccatgatactgcaccaccagctaaagtaaaaacataaccacttgtcgattttgtttcatcagaataaaaaatccaatttgcatcattaaacccctcaattactgtaggaaaacatgtataatgaatgccataattaatggttccttttaaaatactctttctaatgcaatccaatgagaatgattaggaatattattataccttcctaatctaccaactgcatatacaatgccaggcctagagaagtttgtcaatgcaaaaagaaccaataattggaatattatatgaagaagttccttactcanattttctttaac

SEQ ID NO: 191759 - DNA, 392 bp, Glycine max
acccatctcgcccaggctttcttggttgcttcctccatattcaacagacttctggaggaatcttctggagggcccaagtgggcctggttgctatttgcacccccatttttactaattacacccccctgccttttttggtgattctttttttcgtaaagttacggaaacttacgaatttcgtaacgataacttgtttctttccgtaatgttacggaaccttgtggattacataatcatcccctttttgacttacggaatgttacggaacctcactaattgtgcaacgatgcttccatttgatttccggtgtgtcacggaaccttacggattgtgcatcaatattttcttttgttttccggcacatcccgtgatttcacatattgcctaatgat

SEQ ID NO: 191760 - DNA, 368 bp, Glycine max
  unsure (1)..(368): unsure at all n locations
attatacaaaggaacttaaacgattaattaacaagttgaacttggatagttcacaaataggttggcttattcatatccctaactcttcattttttatccataggaatggaataagatataaaaaaatttacaacactcagacaccctgcttaatcaactaagttagacacctttaatccctaactcttcatatggttataatcatattctagtaacaatatgcttcatttcactaccttactaaattacaggactgacttcattattttgcaacaccctttacatcacatcattcattcataaaatntgcattagttaaataaaattattcatcatcaacaactatgtaatgtataccaccatacaat

SEQ ID NO: 191761 - DNA, 366 bp, Glycine max
ccacttccacaaaacaaacatgaacccaccatccccaattgcccacctttaactgagctcacgcactcccacggagtgcttatcctcattcctctcaacaccgtgtccccatcaaccccttcaagcttgcacaatattcaagcaagtcaatttccaaatatcatgaactaccctaaaccaagaaaacagggcatatgcagaaaactctgcccataacacattcaaataccacagctgttcctactcaaataccccagtaacattctctttgttctgattcgttaaccattggatcgacttgaataatttactagatgttcctaggacataagtctacatcttgaccgttgggatctactagaaaat

SEQ ID NO: 191762 - DNA, 506 bp, Glycine max
  unsure (1)..(506): unsure at all n locations
atcctctaagtcacctgcggcatcaagcntgggaaaaatatcagaagttataattgtttatgtnagaaaagccattatcaattggagtgtcactattcaacccccttttacatgagcaattgatccaccttattaaaggccccaacttttcacgttttcacccttggtcactaagacataattcagccaagtcatatatttaggtaaaaatattggccaagtgtgtatatctttatgaaacttatcttgatggtactagttataggtgataagaatggtgcaatagtaaggattgaaaaggttgtgaagggacaactcttattcttcctcattgaatgttaagtaaggggcaaatatatgtttgtgctctttaacattatctagaataaggatctgcacactgatngtagttcaattggtggagaatcttatgactgtaggaaaggagtggtgctaataatntcttcattggntgaggactccttatgatctagagaatcattatg

SEQ ID NO: 191763 - DNA, 399 bp, Glycine max
  unsure (1)..(399): unsure at all n locations
ctctctctggtcttgccaatattatgtgatgatgtgccttgaatggcacttgaggagtttcctttccttttcttttatatgttgtctctttgtttgcatttcattacatgctcacattgaggacaatgtgcatatcaagtgtggggggagggtttagaaaaaatttgtctatttcttgttttctctggtattactggttctgttattattntttttatgtattatgtttcagctttggagtctatatttgctttttgtttttggttagctgtattttattctgtctatttttctgtatttgtagatgcttctgttgtggtgatggcttctatcttctgtttaggtgtatattgttggtttactattcttacatactgaaaataaaaatatagaatttac

SEQ ID NO: 191764 - DNA, 425 bp, Glycine max
  unsure (1)..(425): unsure at all n locations
agcttattcagcctcccattaatagggccttcatagaaaagtattggatgccaaggcaggcacaacagcagggtcaggcacagcagcagccagccgcagatgcaccgctgccacctctacgacaaccaccatctctggagtccatctctgctcacatgcggaggatagagctccagatgcacgcatatatgcagcatgtgatcgactagcaggcagccaatcataggggtcagatacaactgaatgagagcttttaccagtacaccctgcatcagcagtgccaggaccccagtccttacccatggcctactcccgagcatttcggggccatggttgcatgacctagagacaagcccaattntcaggcaagggcaggacccgcagtgacccccagagatgaggatggagctcaatcagggtctatg

SEQ ID NO: 191765 - DNA, 436 bp, Glycine max
tggaactacttcacattttcttgatggggcctatgcaagttgaaagccttggaggaaagaggtatgcctatgttgttgtggatgatttctccagatttacctgtgtcaactttgtcagagaaaaatcagacacctttgaagtattcaaggagttgagtctaagacttcaaagagaaaaagactgtgtcatcaagagaatcatgagtgaccatggcagagagtttgaaaacagcaggtttactgaattctgcacatctgaaggcatcactcatgagttctctgcagccattacaccacaacagaatggcatagttgagatgaaaaacaagactttgcaagatgctgctaaggtcatgcttcatgccaaagaacttccctataatctctgggctgaagccatgaacacagcatgctacatccacaacagagtcacact

SEQ ID NO: 191766 - DNA, 507 bp, Glycine max
  unsure (1)..(507): unsure at all n locations
aagtcacctgcngcatgcaagctngtggaactaccctaaggaaagaggatatgatgntctaattgggtattcgaaaacaagttggacgaggcaagtaaggttgtgagaagcaaggcaaggttagttgcaaaaggttactcacaattggaaggcataaactatagtgaaacttatgctcatgttgcttgtctacaggcaatacgcattntattatgatttttttgctcataacaaaatgaggctatatcaaatggacataaaaagtgcattccttaataggctaatacaagagaaagtttatgtagaacaactcctagggtttgagaatgacacatttcctcgacatgttttcaaactaaacaaagctttgtaaataagctcattgagcttggatcaacgtttagttcattntttagaaaatggttntgaaaangnaaatggcacaactntantcacaaaattatgactacaattatattagctaagctatggaatatatcatatttt

SEQ ID NO: 191767 - DNA, 367 bp, Glycine max
  unsure (1)..(367): unsure at all n locations
agttacttctattggtgtctttatagatcttgncttgtcttaatacacttaagcaaactcataaataggcattaattgaaaaggtttatgatttgtgtctagaaagtttgtaataattaaagcatcaagggttttggactcaacatatttcccataaaataagatgtaaaaacaattatcaaagagacattggagaacattcaccatacaaggatagagagcaaatatgaactaatcaaactgaatggtacacatactgaaataataagggactaaacaataaatatctaaacttcatataaccggttaaaattacctgctacaacaagtcgaatttggtgattcatcgtgcactacccatttcaaa

SEQ ID NO: 191768 - DNA, 366 bp, Glycine max
  unsure (1)..(366): unsure at all n locations
tcctctaagcacctgggctgcagctnaaattataatttaatgtatattgtcttgaanttntaancctaaaggttatantttaaattttaaaaaatttatcggtagaaatctttaactaacagaattaaaaatttccaacaccttttagaaattaaaatgtaaattccaggaattaaaaaaatttatttattaaattgtagggactaaaaaattcacttattaattataagtactaaaaaggaaaagtttggaaattataaaaattaaatggataattaaacctaaaataaacttttgttttttaaggaanaaaaaatgatatgtaacaggaaactctagtcagattagaattttagtggtcactgg

SEQ ID NO: 191769 - DNA, 403 bp, Glycine max
  unsure (1)..(403): unsure at all n locations
gcatgatagacattattaaaaattaacaaattctactttttcttttttctccttggttagagatcattgtctcccaatctacaaaattaaagactaatctcacttatgatatattattattaaataaaaatttataaaaaaaacttacatgtctttgttgttttttagctatcaattaaattaataactaattttactaaattttctaattcaacaagcaaacacaacaaccttcaacttaaaatttagaaattttgttcagttttaaattaacttttaactatttttttttctaagcagactgatcatctaatcattttgtattggtcanatattaacatgaataagacaatgatgcaatttaatggtaggtgcaaaatcattttcattttgatgactctaa

SEQ ID NO: 191770 - DNA, 320 bp, Glycine max
  unsure (1)..(320): unsure at all n locations
atctcaagcnactgagctgcagcttaaatataaacgtcacacgcctttattctattatttaagtaagagtcnattctgaggctattaggagacgtgagaagaataccttcaatgcgaaatgagaacgaggcgcaggaaggagaaggagcagaggatatgagggtgggaagatagaaaggaaaaaaaatgagaagaagggggtgtggtggggtgggatgagggagacggaaaggaatgggcggggctggttccttttgttattttactcattacttatctacttacgtttatatataattgaatatttgtctgctttctta

SEQ ID NO: 191771 - DNA, 371 bp, Glycine max
  unsure (1)..(371): unsure at all n locations
gggccataaatttgtcaaaccctggttcatcaagtcttctggtttaagcagtangcangctgcaagcttcatatatctcagctgtttgggtggtaagggaaaaggaacaaagggaaaacaagagcatcagaattctaaacgggcactggtcangttaagatatcaatctcttacatactaatgacactgttctaaatctaaattataggaagttgccagataaaagataaatgcatttatgaacattgcattctacctgcatggaccattaagtctagtaagcatggtttctcctcctagaagcaccactctgacttgcaacctggaacaggtctaaatatcagaatgatgaatcaggaatactataacaa

SEQ ID NO: 191772 - DNA, 476 bp, Glycine max
  unsure (1)..(476): unsure at all n locations
cttgatctctaagtcacctgcggcatgcaagctngacatgcanagctngacattggagtttatccatcttttgccccaattcttgcaaactagcaacctctatgcttttaactttgacatgatagaactttttcttaagcaagggtgcttgattcaatcccatgttttgctagaatgaaaaaaaaaatggtttgatcaatacctcgacaccctatcatggaggaaatatgatgaattcagaggaatgcttatgttatgcatgacacanatgcattttagagacacaagagcccggaagatcatctcttctcactcacaaacatttgggcatcatggttcatttgcagtcatcaccacagtgcctcatgtatgcatttaaaaaggtgatgcggaccttccgacttcccatgacaaatgacgagacatatgcaacgcacaagtggtgatgcaatacatgcgtgagaccacgtggttga

SEQ ID NO: 191773 - DNA, 379 bp, Glycine max
  unsure (1)..(379): unsure at all n locations
gactcatggtcactatttatgacaaattccttgttattaaggtagtgctgccatgtnttcaaagcccgtactgagacatacaactccttatcataagttgaatagttaagggtaggaccacttaaattttcactaaaataagcaattggatgaccttcttgcaacaacacagccccaatcccaacattttgagcatcacactcaatttcaaaagaattttgaaagtttggcaatgcaagtatgggggcattagttagcttttgcttaagaacattgaaatcttcttcttgtttctctccccatttgataccaacatttgtcttgagcacttcattgagaggtgctgccaatgtgctaaaatccttcacaaatcgtctat

SEQ ID NO: 191774 - DNA, 409 bp, Glycine max
  unsure (1)..(409): unsure at all n locations
tctaagcacctgcggcatgcaagcttgaactctagggagtgtgttgtgtgtttgtgaganatgngcagnagggtaacagcttctaagagttatgtaaacttacgggcaggaggttaacatttgtaaaggacaagcccttcgtcctctcctctccccaatttcattcactactttatagtttggtggaaggacctgctctcatcacaacagcagcagcccaacagtgtaattaaaataaagacagcttggaaggtgggcaggggagataaatttagaatctgggaggaccgatggttggaatctgaagcactgctaatggagaaatacccaaggctgtaccaaatctcgtgtcagcaaaatcaaaccataatgcagttgaggagtcacttgagtagcggatgggaatgga

SEQ ID NO: 191775 - DNA, 360 bp, Glycine max
agaattgttggagaaaggttgggtccaagagagcctaagcccttgtgttgccagtgttgttggtgcccaaaaaaggatggtaagcggagaatgtgtacagattgtagggccatcaacaacattactgtaaagtatatgcaccccattcctacaattgatgagttgcatggtgctaatatctcttcaaaaattgatcttaaaagtgcttatcaacaaatcaagatgaaagatggtgatgagtggaaaaccgctttcaagaccaagtctggtatgtatgaatggctagtgatgccttctgtgctcactaatgcactaaacacctctatgatgcttatgcatcatgtcttaaaggatctcata

SEQ ID NO: 191776 - DNA, 354 bp, Glycine max
  unsure (1)..(354): unsure at all n locations
agctngcttctacacacgtggttgtgtggtgtttttgctttggatggcctgtgcttttttccgcacatcctgcacaaatcgaacattaatgaaccaaagaatactacaatctattataagaactgaatttttagtggaaaacaattcaaattaaaaagtatatacctctcacgagggatctctggnggtctgacaaaactgggcccatttatccttgctgatgtcatatttntcacagacagtgtcgtccacaccatccttttcggctgcaagtgcccatttcctggtcaaatcgaatttaaactgcatgcaccgctcgcccacagtctaatgaactttcttctttgtcttact

SEQ ID NO: 191777 - DNA, 340 bp, Glycine max
tttattgttgaccacattatgtacctggagatatgtcgcggtggtcaagagaccttggggacgtcatgcggggtgctattgcccaaaaccaatcttgaccaatcccgacccaacccgggcatagtctgtcagtgagaacctgtgatgtacctaaacaggcgagctcctggcagtcaacagataaaaggataacaagaccacacatcaaggaggcttgtggtggctggccagctgtgaattttgtgtaatatgtggatggtggcctctggtaatcgactaccaagggtgggtaatcgattacaaggcttaaaattgatgacaggaggctaagatggtctct

SEQ ID NO: 191778 - DNA, 355 bp, Glycine max
gctgaccaattaacagcagagccacctcccactgttgatactgccaaaactagtactcttgagtgcacagaatcaaggatccctccaatttcatataattgattcatggaagggccttctagagatgaataatcctgacgagtataatagtttcctttctcaagaacaaccaccttgtgaccagcacttgaaagaacagcagctgcaactccttcaccacaacctgaaccaacaactagtgcatcacatttgactttgaggatgttgctttggagtctattgaacattgatgcctttaaggcaatagactgttgaatagtggagtcagattcatcatggtttcttaatccccttt

SEQ ID NO: 191779 - DNA, 436 bp, Glycine max
  unsure (1)..(436): unsure at all n locations
attctggtctctaaatgtgtttcatatcacacatggagcgtaanaatggtgtctgtggttcacaagagatcatttcccttttcccaaagccacaccagccaccaccctttggtttgcatttgagtgctgataaggatcgcgatatatgtggcggtaacccaaccaaactgagtaatcactttattggcaggttgtgggcgaggagggattcaaaccccgacacatcttgattcatagccacgtgctctaatccttagggttacacgtnccaccccatcatcacacatccttgatgccccaaatcttngcaactcacgcactaaggcctggccccgctacaaaagatcgagtcttataagaactgagataatanatccgctatcttctacgactaatatgattattcattcacatcttaatcatgtgcaacttctat

SEQ ID NO: 191780 - DNA, 412 bp, Glycine max
  unsure (1)..(412): unsure at all n locations
tatggctgtcatctccagcaacaaggtctaaatctttgctctgagaagcaatcatagtatcaatanactccgctggagactgactaaagctaagaaagaaagctcgtcttctatgatgctcctggatcttctttaacgaggtgcgaatcgcctcgtcataagcttcaatctctttttgactctcaaagcctgccaagaatgtatacatatccttttccagtggaaaaggcacatcaacctgtatatcataacatgcatatacagctggagaatgtccagaaagcttgatgttatgctccatatgtataggttgtggttgtgtcaaatgctgtgctaacttctgagataccatggtgaaatccatcttctcttccccaacaccatgtgtagagaagatcacatatgaagaatg

SEQ ID NO: 191781 - DNA, 379 bp, Glycine max
agctaatttgacccttgttatggcagaattgttctaagtttatatgtaacaaaattgaatatctttttcttatctttccagggactactcacacattccatttggagttttgtagtgtcctttatgccctacacaagacagatagctcaagtaagcacaaaacctgaaattaagctacaattctcaattaagcccaaatcatttgtcttagaccaaaatgagttaaggtgagaaaataagagtcaaagagatgtcaattgagctgagacgagtaaaaaaaacatattaaacaacaaatgctctatcagtgacatgtactagacgtaatggtgtgctcttgcatacgtgcctcttacaaagtggcacatactagagacat

SEQ ID NO: 191782 - DNA, 331 bp, Glycine max
  unsure (1)..(331): unsure at all n locations
tatgccgcctgtgcatacataatacagccccaccatctcacatttgcaaaaatcatattcatatatcattgnggcatttcaccgagcacttggtgggcgcacgtttggacataaattgcaagagaatggggacaatgtggcatgccccattgcttcataatacaacctatgcctaatgccttctcattcacatcctcaactcaagaaaacaagcataaaaataaaccataactgccccacaaatacaagcatattcccacaatttgaagcatcaaaagatgaagaaaatataccaatgggaagctgaaaacatcaaggattgaatacttac

SEQ ID NO: 191783 - DNA, 499 bp, Glycine max
  unsure (1)..(499): unsure at all n locations
agctngctaactnttataataattattctatttccaaaatgttattggccatnnggattntacattattggctctcatcgttctttgttaaaaatagagccaacaatgtcagacttttcaagtatgtatgtgttcctcaaatcacaatcatgatgatatcagaattcaaattttaactgtctcgcgtcaaacagaatggttgtgctccctttatacagtcgtgctccatataacatggttgtgctagttccaaaacacccatgctaaatccaagaagatcattatctgttnttcacaaatggagccatcaacgttatacttttcgagaatggtcatgctcctcaaaacacaaccatcctaatctcaaaatttaaatntcaattgtcttgcctcaaattgcacgaatgttcttcctatagcatgagcatggttcatatagcacactcggcctagttccaaacacccatgctaaatccaagccattcttttatttttacaa

SEQ ID NO: 191784 - DNA, 364 bp, Glycine max
  unsure (1)..(364): unsure at all n locations
tgaaaagataaacatcccatttcaaaagctatggtccagccaattccagatttgataatgggatctgcattatacattacataagagatttatcttaattagataacaagacagttgcaagatgtgccaagaaaagagagaatcatggaagttgtgacttacatgccattttctgataaggttgattagctctgaccatctgactgccaatgataacgttggtttatctggggntttnagatgaattattggtgcatattttcacanaaaaaatgggcgcttgtataagtttgtagcgaaatcttaattgtatatctcttcatatggtttatacacgtgattcatgttatcacaagtgtatata

SEQ ID NO: 191785 - DNA, 402 bp, Glycine max
  unsure (1)..(402): unsure at all n locations
ctaattgtcataacatatgattcatgaaaacaatggaggactttcccaaaaactagatgagttcagatgtttttgcatggacttgataaaaaaaacatttgaaacactgatttgatttgaatatggaaacaagccttaagttttagtgattgtgtgcaaccatagattntacattgagtgttctctntgatatgttctacagctgattttgcacaaatttctaattgtcataacatatgattcatggatatcatttaggttttcttgctttctttacattntaagccactggccaaaaagttatcccaatgtatattattnttgccatttgcanaccctttgagccagacacttgattnntttgtggaacactaacctanngataaagttcctaccttacac

SEQ ID NO: 191786 - DNA, 391 bp, Glycine max
ctcatacctatacccatgcaatgcatgcttctctgttggacctcaccatttacaagcatcgacgcattgttgatgtgctatgaacaaatgcaaatttatttgcctagtagccatctgacatgttgggaatccatcccatcataatctgccacaaactttccatttgcccgtatgccaaatcactatcacaaaagataaggaagatgggagaagaacgacgtatggcagtcaaagaagaagttgacaagctcctccatgcaaacttcatcagagaggttaagttctctacctggctcgccaacatcgtcatggtcaaaaaggctaatagcaaatggcgaatatgcactgactacactgatatgaacagagcatgctctatagacacatacca

SEQ ID NO: 191787 - DNA, 477 bp, Glycine max
  unsure (1)..(477): unsure at all n locations
agcttatgcgcatatttccttacgaacgttctctttgcacattacattctattaactaagaaaaatgcacccatatacaatcaaggcagcttcgttacctagattatttacatgtacttccaaggtgtatttgttacttacatcacacacatttcttttgctaaattcacatacatgcatactctaagcactttggctatcgaaaattgcatacgtgcacatcctggtatttctaatacctatacatacacaaactntatgataaaccttgactatctacacaataaggtgttacatttcatgccttcttttttcatgttttttttttttttactacctaaagccgcatgcaaactcaagtatattttcttttgctcacntaaaatgtattcaaaanaaggtatttttgaatggatttcatcaacatattatagattntgtgagacatttgataccaaaatctatgacatacatcag

SEQ ID NO: 191788 - DNA, 425 bp, Glycine max
tatgcaacatcaaaaagccaattttctcgagaatcaacacttatataataatggagtagaaaaatataaatatcaaagtataaggcataaccatccaaactcacaaattagatataaccaaaccagaatccaaataaatcaaaacgtcaaaaaccacataatgtctaagcagataaagctgaaatccaaataccacaagataaataaagtacttaacataataatttaaaagacatataattagaaactaaagtctaagaaggcggaggtggtggtggaagatcgaaactctgacgaatgtaacctacatcctcttcaagctgtgtgaggcgaatgtccataccggcaaagcgtgtatctaacgagtcatatcggtcaccaacataagaacgaagaccccgtaattcggagaggacttcattcat

SEQ ID NO: 191789 - DNA, 388 bp, Glycine max
  unsure (1)..(388): unsure at all n locations
agcttctttgggaccttgaacagacaactatcttctctnttataaccatgctatgtgctcgcgactggtccctctcttcccttcgcagcttgagttcattgttgctaccccacagagctccgcgaaatttgttccggccatactcttccttgcaagctctcttggcctctagttcaagggctctcgcggtagttgcattctcttcccgtaatccggcacactccttccggatgtgtgtagcggccaacttgaacttctccttggcaagcttcgcctttcctaactcgctgtagagagctaggactatttcgtcctcttccggtgcttcaaaactctcttcgctgacgacttttaacttggcgagccaatctaaacctcgtacatgaac

SEQ ID NO: 191790 - DNA, 350 bp, Glycine max
tcttttattcttctaccgtgtggtctttctatatcatgctacccaaaaaaaaaaaaaaaaaaataactcattgatttcaatcgaatactataaacctatctaaaacaatgtcgggcaaacgatgtggccctaatccttttatgtttgatgttgttgatgcctacattattcgtcaacaagattattgtaaccttctgagttgttacttgcacttactgattcacaacacaattgtctgaccatgtaaggttcgctagattgggctctttctaataagcctgcatttttattgaatagattcctgaagtcgtaccatttgtcagcatagctcatattatattttagtttat

SEQ ID NO: 191791 - DNA, 477 bp, Glycine max
  unsure (1)..(477): unsure at all n locations
agctntntatntacacatagatagtattatttatggatatgacacctcctanatacgttaataaaaaattatatatggatgtaaaataaaatgcaatagagctagtgttaaaatataattatgcaaaagctcttgagtacagttaaaacactgcaaatatacaaattatgttttagcaaatattacaaacccttgctcaaaaaataaacccgctcatatgaagaacatccagacctaccgaanaggagttgccaagccttgagaagaggcaaggcgtatgttgtggttttgtttatgtcatgggaagagaaaatgagttgtgttttgtgtatgtctggaccttntttattntaaaaatcctaaagttaannacaaaaaataaaataataaatcaaaagtggctcaagtcgtatcaaagccatatcanaaacagtgtgagccttatcggagccgtgtctagccatcctaagcctatcg

SEQ ID NO: 191792 - DNA, 144 bp, Glycine max
  unsure (1)..(144): unsure at all n locations
ttttgtgaatttttggaagttcgcctaatgtagatanctgtctatgtccaatggaagaccgataataactacatctatgggctatagtaagactaccctaaacgactgacataaggagtttttaaaatataccacactgtcgag

SEQ ID NO: 191793 - DNA, 406 bp, Glycine max
  unsure (1)..(406): unsure at all n locations
gggagctttccgattgagccatctaacacgcatactagcaggattctctacctgcanattagaaataccactcctagtaactcctatggctatcctcatgacataactaaccacatctgtaccgaggaacaccttngactggaaaaccatttgattatgaccatgccaaatgccatttagagccaccaaaaacacaatgctcttcaagggcacccgttctaaagcttatcccgactatccaaattctcattaatccatcacccctagctcgttgagaaaaaaactaacaggtaactagaacaaagatcatgccatatgggaacaacacaattggaatctcacanaatatgaaactgtngcctcaacagcctgccacacaaagggcanaatcacttatcatcatata

SEQ ID NO: 191794 - DNA, 344 bp, Glycine max
taatatattaataaaaaagtattcatctctttatattattaaagagacaagtcttttttttattttataaaatgtcaaattgtgatgtgcaaaataaaaatctaagatatccacactttcttttgctggttattatttctttctctatcaatcgtatcttttgcataattcctattgtattaggtctaattactagaattggtttttcttaggtgttgttcaaatagattctctagctaagactctacacaaacataaaggatatgtctattgtatttcgaaaacggattattaaatctctatactattaaaatattaaaaagagttagattttctaaacaaaa

SEQ ID NO: 191795 - DNA, 405 bp, Glycine max
  unsure (1)..(405): unsure at all n locations
agctaggcgatccctcttattttatatnngttaatataaacgngngtctaaatttcaaattganaattaatatgttcaaatgatcgaaatattgtagaaatactttgagattctattaaagaatcgaagactatattaatcagagttgttaaaaaaaagtgataagtgagttttctttttttcttntttcaaagtcttccgatttttcaattcaaatgaaaggcacgattggtaaaatggttcanacggagatacgcgtccttcttanttgtatgtcatcgatgagatgctgaactctaaagaatgggagtgtctatttatagtaagtagtaaagcatcatntaaagaatgtttcatgaacccatgccacgttgactaaaaataatctacatagagaanatatac

SEQ ID NO: 191796 - DNA, 318 bp, Glycine max
gatatatggccaataggtcaaggcatactcaaatttcaatttcccaattattaatccaagtcctaattcattctcaaggtgataaataaaaagaaaacattaaagattgacctagagaccaactctaataatataaaaggagatgtgaacttgaaaaataatttaattacaaaaggttcaaagtaataattcttcctaacctaaccctaagaaatttagaagttgaaagagaagataagaacaacaaatttataagagatagattaggttgaagtcattaaatcttcaataattgtttcaatccctggaatcttgaat

SEQ ID NO: 191797 - DNA, 273 bp, Glycine max
tgagatgaagatgaaagcaaacaaaacaagaaatgaatcgaaagtctcggattcgaacacttatcggttgaagaccgaagaatggacaaagaacagcggaaaaccttcatggattggctcacggaaaggtcttggaggcgttacaaaagcacctcgccttggattttcttcatggaaaacatgtttttcacccaaaacaattgaaatgcatagccaaaggggttagggaccatttggaacagccccacttcacctatttataggaaaataggg

SEQ ID NO: 191798 - DNA, 467 bp, Glycine max
gctctcataccgagtgtatgtaccccgaggacctatattctaaagagtctgtcaaggcctctccctcttgattcatgtccaaccccgaaaacattttaatgcaaaaactgtatatatgaattatacaaaacacataactcctcaattattctcaaaataattttaacttgccgcacctcaaagttattcaacttgtcaggctcccacagtggaccctatcacaatactcggcgtgcattaactttttgcccttaaagggtcttacaagtcgttgattgtatggtttatagctcataactcaatgcacacaacatctcaatatatgtatgatctcataatttaacacatactcaacttatcacatacactcaatctcaatcacaatgttataatcccaaagtaacacgttatcacacctcatgaatcatatacaccacatattattaatatatacattgcacatacac

SEQ ID NO: 191799 - DNA, 445 bp, Glycine max
  unsure (1)..(445): unsure at all n locations
agctnggccttagncttaagctaggttttttatggctggngntatgatttccaccaacataattggaccangtatcattcataatcgatagcttctgacatgtgtatacacttatttttctttgcatacatgtagtaaattatgaactatgttttagttgtcagaacattaaagaaaaatgttctcttgaaagtttaattttttgtaggaggaaccaattcgttgtaggtggaaccaatttgtaacctaattgcagctctctntctctcaagtattggaatgttcatacatgtttacatctgttagtgcttagctntactgagctntaaaagattggctaanattntgttaaaacataagcacttagacattgaagganagctggagttgctgcacatgatgtccaacgttatgtcaaggaatcagatcgggctgcacaatgcac

SEQ ID NO: 191800 - DNA, 402 bp, Glycine max
  unsure (1)..(402): unsure at all n locations
tgcaagtngaaagccttggatgataaaagtatgcctatgttgttgtggatgatttctccagatttacctgtgtcaactttatcagagagaaatcagacacctttgaagtattcaaggagttgattctaagacttcaaagagaaaaagactgtgtcatcaagagaatcaggagtgaccatggcagagagtttgaaaacagcaggttcactgaattctgcacatctgaaggcatcactcatgagttctctgcagccattacaccacaacaaaatggcatagttgaaaggaaaaacatgactttgcaagaagctgctatggtcatgcttcatgccaaagaacttccctataatctctgggctgaagccatgaacacagcatgctacatccacaacatagtcacac

SEQ ID NO: 191801 - DNA, 431 bp, Glycine max
  unsure (1)..(431): unsure at all n locations
tctatcacccttgttgcccanattccttctatctctaagtacattagtcaatacacgttccatttccaaattccatgtaaaataacttcttgtttcctcattatttttccctaaaactnttcttttgtccgtcatntttttattatatgactccattgaagttaatgtcacttattcaacctgcacataacaaatattaaatataacctactttattcatttgactagtccactgcacaatcatagaaaatatttcaagcaaagtttttatgcaatagcaaagtacataaaagtctatcttcaatagaaaagtacaatagtaacanagcacacaaagtttgtctgcatagcanatatcattaaaaagactatccctaagcannagttctctactngatagtagcnacatatcatagtaatgatctcgaatc

SEQ ID NO: 191802 - DNA, 411 bp, Glycine max
attctgctctttctctctgcctgcgcagaactctttctccttgaccgcgccctccatgcccaaatcttcgaatcctcatatctttctcatttcttatccaaattacttcaaacaaagtgcaaatttcatctttttcaattctctacaaacccatcgaacataatctgtagaaacactaccaaatggtagaaccctttaagaagagaaaaggctcaacctccacaaccaccgttgtaggacaacatcgccacgacacttccggtgtgccaccatcaccacctaatccttccttttcctcactatggtacttaactctattttcttttgatgaacagtatcaaaggtactattctttgatttcacatcgtatcattcttgatcctaaatatctagacatagaattctttgaag

SEQ ID NO: 191803 - DNA, 514 bp, Glycine max
  unsure (1)..(514): unsure at all n locations
gatctctaagcacctgagctgcagcttaatatttatgtatgtttacaatatattgtctattttgntngggtccttntaaattttntatctcctttntaaaattttaagagaactaaaatataaaataatgaatacattataaagattaaaaatttatttaaacccaatattaaatatgagtgaaattgtgttggtaaaaatcaaatcccagaaaaaataactgctagaaacaatttttggttaggatgcaccttanaaaatcaaatataataatgtatacaagataaatataatttgtcatattaaaaagactaatagcgcacaaagtgttgatattggaattggtctctttatttaaggtgttcaaaatttgtgaatgaaaaagatatttatcattaacaaagcccaataatattatatatcaataacataattacattataaanaatatattcgttggtgtatgaaaatntgccaatttgaattaggaatgatactacatattaacatgatg

SEQ ID NO: 191804 - DNA, 296 bp, Glycine max
  unsure (1)..(296): unsure at all n locations
aagaganaccataattatctcctaatcacacaatttagttatcttgcacacattctattacaatgagagaacagaccttaacgcataatgtgctctaccccactcaatgtatttattgcaaaacaccccaccctgcctcacttgcattctttgtaccgctgagatagatcatcgaatttacctctcccaagattgattctcattttcataaaagtgacaatcttacctaactgcttcttgtagcccattgatatacatttttaaacacacctgtaaacaaccccatccgtgataac

SEQ ID NO: 191805 - DNA, 173 bp, Glycine max
gcataaatatctgaggaactctattaaaatgctagatactcatttgtacaaatttatatcaaggaagcgagcactgatactgtaacgttcttcagccaaatgtctataaagttttaaggtttaatttcacccctctattccaatgcatgaagatttacttcgaattggttatt

SEQ ID NO: 191806 - DNA, 217 bp, Glycine max
tctctagcttatcaaacaaaaaaaaaaactctgattaattttagagttcgactaagaaataaggaaaatctgatcaagaattattttactaagaatcgaatttagattactaaaaacattcaatctaatttcattatattaatcacttatgctcaatcacttcattaaccgtaatgttaactttatttaatcatacatgaaagtatccatttataat

SEQ ID NO: 191807 - DNA, 393 bp, Glycine max
  unsure (1)..(393): unsure at all n locations
aagtcacctgcggcatgcaagctntctcataagtcctaaatgatatttcattctatgattaactcactntaacctccatttaccacagaatccagatttaaccttccaactctcaaagcctcactctntttccactcataacactacattctcactttctaaccctaagttaactctatccttcatttctaacagttttccataagcaatttcagcacataaacatcacaagcatcatcataaaaaacctaaaactgaatgggtaagcttaactcatccaaacatggcaagttcaacatgctttcaacaagtgtcttcacaaataactatcatgaagcagaaaactagcaaaactacccatcatatnctccaaaaccccatacccacgaaaat

SEQ ID NO: 191808 - DNA, 345 bp, Glycine max
gcatcacacctttccactcacaggactacattctcactttctaaccctatgttaactctaccctgcatccctagcagttttccatcagcaatttcagcacataaacatcacaagcatcttcatataaaccctaaaacagaatgggtaagcttgactcacaccaaacatggcaagttcaacatgctttcaacaaattccttcacaaataactaccacaatgcataaacctagttaaactacccatcatatctgcccaaaccccatacccacaaatatttaggtgagaagaagtctacccaaacctgaaatttcgtagtcccacacgtagagatgcgcttcacgact

SEQ ID NO: 191809 - DNA, 420 bp, Glycine max
  unsure (1)..(420): unsure at all n locations
gtcacctgcggcatgcaagcttaatgaatgaggcattatagtaaggaacattgctagttttgttgcaaaaggatacaaccaggaggaaggcattgactatgatgaaacctatgcacctattgcaaggttggaagccattangctactgcttgcttttgcatgtattatggattntaggttataccaaatggatatgaagagtgcttttctcaatggatacattgaagaagagatatatgtagaccagcctccaggttttgtagacttcaaacaacctaatcatgtttacaagatgaanaagactntgtatggtttgagacaaacacctagttgttggtacggaagattgagcaatttcttaattgaaatntttttgcaagatgtcaagttgacaaaacgttgtttatcaagagattaaac

SEQ ID NO: 191810 - DNA, 352 bp, Glycine max
caatcgccttctggttgttttttttgaaaggcccaagtgggcctggttgctatttgcacccacatttttactaaatacaccccttgctcttttttggtgattctttttccgtaacgttacgaaactttacgaatttcttaacgatgcttgttttctttccgtaatgttacgaaaccttacggattacgtaatcatcccttttttgccttccgaaacgttacggaactttacggattgcgcactaacacttccttttaatttccggcatgtcacggaacttcacggattgtgctacaatgctttcttttgacttctggcatatcacggaacttcacgaattgcctaacgatcg

SEQ ID NO: 191811 - DNA, 425 bp, Glycine max
  unsure (1)..(425): unsure at all n locations
tctcagagtcacctgangctgcaagctggaattgcattgngcacccatttcttattcnctattctgtccctatatatataaaacagcctcacaattccaatcttacaaaatcatattcatatgtcgttggggcatttcaccgagcacttggtgggcgcatgtttagacataaattgcaagaaaacggnggcaatgtggcatgccccattgcttcaaaatgcaacatatgcctagggccatctcacacaaaccctcaactcanaaaacaaacatggattcacatgtgaattgcttcacgaattntgcanaanataagcaactaaagcaccaaaacacatcaatggagagctaaataaccaagggaaatngcacttacttgtggggagtgaattatagcgtgaaaagggaagcaaaaactcaacaat

SEQ ID NO: 191812 - DNA, 396 bp, Glycine max
tcaataactgctggtaatcgattaccatccatgtgtaatctattacacagtgtaaaatgtgaattcaaatttctaatggctgctataaatcattttggccactggtaatcgattacatcctctggtaattgattaccaaagagtaaatcttttgaaaaatacattttaacttaaatttcttggccaaacctcttgttgtttcaatttggaattcccttcctaaatcactagagatcttcttgatgatgtatcttgaatctcttggatttttgtcttgatctaaacttgagaagcgcatgatcacatggcatcaaaagatcatgatcatatggcatcatcaaaacatcaaagtcaaagtctttgcttctcaatctcccctttttttgatgacaatta

SEQ ID NO: 191813 - DNA, 440 bp, Glycine max
  unsure (1)..(440): unsure at all n locations
tgcagcttgaaattatgttttttgctttcnctangctctaatgcttagaggtacttcctcgntgacatcttttgtcttgaatgagaatgccatgacatggttaatcgttactgtcttttgatattggtagttgatattgtgttgcgggaggtaattccaattggattaactcaccatccttcacttgccaatttgttatgacgtttgttgttggatcacctatgatgtcttgtttccaagggtaatctatatcctttctgatggcataagcatgaaaccaatcaaagaaaaggacattatatttgactctttcgacaaattcgtagaacttgtcttggattnntttttctgttcgacccttgtatgtggaaaaccattctttangtcattctcggaaataaaatttcctaaggtttctttcatgctaaagtgcaatacat

SEQ ID NO: 191814 - DNA, 360 bp, Glycine max
  unsure (1)..(360): unsure at all n locations
cttctatccaaatggacttacctttgatttattcctttgatatttcttttgagccttgnttccctttccttggtttgaagctcactacaagccttaagtgaaaaaccatgatattaccatatccttaaggaattttggagctttggaattgtttggggaataagtgtggggggtttttgtttcattggacaacttgttttggtggctatgcttcatgatgtatnttgggccatacttgatgtacattgtatattggttaaatgttggacatgctgaatgaaatgttgtttctcaaaggctaaagagtaaaaaaaaaaaaaaaaaaaaaaaaatcgaaaaaaaaaaaaaattcgaaaaaag

SEQ ID NO: 191815 - DNA, 440 bp, Glycine max
  unsure (1)..(440): unsure at all n locations
tatcaaacgataccaatttgtgagacatgtcttgtttcatgagtctctgctttaatcaattaccaggttatcataattgattgcatcgntctttganagtggtcccaggagtgatcaagaacactttaatcgattaaatcaagaaattaatcgattacattgttcttgaaagttttccaggttttgggaagaatactntaatcggttaaaatgagaatctaatcgattacttctttgagataatcaattacattgaanatttaatccattacaagcggttataactattttttctataaataaccaccttgtgttctcacttttaacagcgaanatgaatgagctnttacgactcacattctagtccttggttcttgaagtttcanagggtaaagtgagtnggtaatatctcttgagatcaagaaagagatcaattcatc

SEQ ID NO: 191816 - DNA, 412 bp, Glycine max
  unsure (1)..(412): unsure at all n locations
gcggatttggtcttcgccattgttttgatcgatgtgggtcctatatagatgcttatttgatcatcccactaggacaactgangaaaatggggcaaatgaagagggtgagaaagagggagaaacccatgctgtgactgccattcctatacggcgaagtttcccaccaacccaacaatgtcattactcatgcaataacaaacctgctgcttacccaccaaccagttatccataaaggccatccctaaatcaaccacaaagtctgtctaccgcacttccaatgacgaacaccacctttatcaaaaccaaaaacaccaaccatatatgaattttgcagcgagaaagcctgtagaattcaccccaattccaatgtcctatgctaacttgctcccatatctacttgataatgcaatga

SEQ ID NO: 191817 - DNA, 490 bp, Glycine max
  unsure (1)..(490): unsure at all n locations
agcttgagatgaggaagggttgaatggtgttttcttnctgcttttattgcngaccacagagtggtacctggagatatgtcgcgcgggtcacgagaccttggggacgtcaggtggggtgctattgcccaaaaccaagcttgaccaatcccgacccaacccgggcatagtcggtcagtgagaacctatgatgtacctaagcaggcgagctcctggcagtcaacagataaaaggaaaacaagaccacaaagcaaggaggcttgtggtggctggccagctgtagaatttgtgtaatatgtggattgtggcctctggtaatcgattaccaaaggtgagtaatcgattacaaggcttanaaattgaggacaggaggctaagatggtctctgngtaatcgataccaagggggtgtaatcgataccaggcttganaacgaagtcaggaaacttatggagcctctggtaatcgataccagccggtgtaatcgatacaca

SEQ ID NO: 191818 - DNA, 442 bp, Glycine max
  unsure (1)..(442): unsure at all n locations
tttcagatgatgtatgtttgttngtagctacctccttctctcctctaatgactatggcatcatttctggcgctaaactgttgagagttggaggccatcttctcaattaaatttctggcttcagcangagtcatgtctccaatggctccaccactggcagcatctatcatacttctctccatattactgagtccttcataaaaatattggagaagaagctgttctgaaatctgatggtgagggcaactggcacatattttcttaaatcgctcccagtactcatacatgctctctccactgagctgtctaatacctgagatatctttcctgatggctgtggtcctggaagcaaggaaaantttttctaagaatcctcttggacatctggnggtttcatggtggagcagacaatatgaaattccttcaaatgtttgtgcgggtct

SEQ ID NO: 191819 - DNA, 430 bp, Glycine max
gtctgagagaccatacaacgttcctaacgatttgtaattatgtgggccattaagtctatcatatgctgacaatagccgagaagcccatgaatctcttcgggggcggagtaggtgtctgccatcgccttggccttggctaacaatcggtgaagttcttgactcctgttcaaggtaagagcaaaccgatccatccacatggttgcctcttggtgtaaagagtcgatcaaccttcctctagcctctttttccgcgtatacttaggcatattcatccgcaatcctatgctcgtgggccagcggtagacctaactcttcttggtacttggcgatgatagctagcatgttggtctccgactcgcatagacgctgagacaagcttcttttggaccttgaacagcaatcaactcctctctcagaccatgctatgtgtc

SEQ ID NO: 191820 - DNA, 342 bp, Glycine max
gaaaagaatgggagtttacctggggtgaaatacataacaagcctttgctctgctcaataacaacattactaggcacctgttcgaactcttcctgtcctatctaaaacttttgatctagaatgatacgcctctggattggaaatggagctgtgtttttcatgtgtgcaccctattgcttatcttaatgaaaagcttcatggtgccacccttaactaccccgcctatgataaagagccttatgccttaataaaacactccgaacttggaacatgtccttgtttcatagaaattgtctttatagagatatcaatacttaagttattacatgtgaagcagtaaaca

SEQ ID NO: 191821 - DNA, 264 bp, Glycine max
  unsure (1)..(264): unsure at all n locations
tgacgctgactttactttggactcatatcctaaatctaaaccaacaaatactaactttgccacagtctgaaatgggtcttaatctacaacatcaagtctacatttggttgtgaaagtaattatataaacaaaacataatgtgtgtgtgtgtgagagagttgaaggtaaattatatatcctattcctgttngaaaccaaaccaactcttgctgtgataccaggctttgaggctaacccatccattattataaatcctattcttga

SEQ ID NO: 191822 - DNA, 402 bp, Glycine max
  unsure (1)..(402): unsure at all n locations
aaggcaatattcaatccaattttgtgtaacatttggtagactatgacccnccttcagagtgctttcaaaaattgaactttattttatggatgtgtaagaatcaaaaccataattctacaatcctaaatttggaattattgcctaatctagaatgtattatgatttctcaaatctgaaatctagtcttcataattgtggattgaataatccataatacattctaaaatacaaatgtatcatgaatcactcaatctgaaattataagattataattatgaatctgaaatccaaaggtggagaatgttgtggtagctacgtatggaaagatagacgtggggaaagggttgattccacagttgcaaatgcaagatggtgcaatgtgatgaagaggaaaatggagag

SEQ ID NO: 191823 - DNA, 215 bp, Glycine max
  unsure (1)..(215): unsure at all n locations
tccaacatgataactgttgtctttntatactaataacatcaaaacttcagaataaactataagtatgaggggctattgaatgcatcatccacaatattactcacatctttcctagtgatcgtactctccatatttaagaaaatatgcaactgtggtcctttatggtaatgatgattaataatgtggcaggattatgatgagggggaaataacact

SEQ ID NO: 191824 - DNA, 343 bp, Glycine max
  unsure (1)..(343): unsure at all n locations
gaacgggcgagtaccttacttttnctggtggtggacccaattcanacatggggcacttcattacattgactttatacaagaggtaatatatatacacatacatgtgtgtgtgtgtgagtgtgaaatttgactttattttgttgaatttaataatgtgtccataaatatgtagatctgtatgtattacttatgctgcgtgttccataaatagaaatcatgtgttctgtcacaattgcagtatccaccaattatattntatcttcctttgagcaaatttcccatccaatatttaatnttgcatcttctatcttcttatttctttggctctctgattacctcattc

SEQ ID NO: 191825 - DNA, 460 bp, Glycine max
  unsure (1)..(460): unsure at all n locations
tacggacacttgaaactaagcttctaagatcacattgatgactctcacattttccatggatgctttcccaaggaaaagtgtgtcatttgcatactgcagtatgctgactttgacttcgtttctgcccacgctaaaactttgaaacaggtttttatccattgcttctctcaccagtccatttagtccttccacaacaatgttaaacaagaacggagctagatggcctncttgtcttatgcctctttggggaatgaactcagatgtaagactaccgttaaccaatatggatatagaagcagactttagacaaccttcaatccaagatacccattttccgataaacccatcctcttcaacatatataataaagacttccaagatactgaatcataagccttttcgtaatctactttgaagacaaacacggtttgttctatgtctttgcttatggatcacttca

SEQ ID NO: 191826 - DNA, 266 bp, Glycine max
  unsure (1)..(266): unsure at all n locations
agctngatcaacacccaagattctnggtcctactaagtcattgtaggctctgaacaaatcaagatagacctgtgtatgatgctctggctcaaagactcaatctataatcgtcctatagatgactatgcaaacaactgcttactactttttccactcaggtgtacaacaagataagaatgtttctctagccatgcaacaatatacaaaccgcttgaagaccaataatagatgatagtagttgagcaagatcctctgttctaccctgc

SEQ ID NO: 191827 - DNA, 370 bp, Glycine max
ctaagctgcttatatcctaaaaatatgaacgacttgttcgctcattggcgtgcgtatgatttctctccacatggtgttgaagagaggagaccattgagtcctatatcacagagtcggggacgaaaatggacagtcaacttgaaggatcattattggcaatgcggaaagtgttatgcacttcactatccatgttcacacattattgaaacgtgaggttacgtgagcatgaactaatacaaatatatacatgttgtttacacaagatgagtacatgttagaagcgtatgtccacacaatgggggcctcttgtgaatgaagcggctatacatccttgtgacgactcatggacgcttatgcctgacccgacaac

SEQ ID NO: 191828 - DNA, 389 bp, Glycine max
  unsure (1)..(389): unsure at all n locations
agcttgtatcanattcaaacgacaataacgttttactcggatgttngattgcgtctcgtaatatatcgagacgctcgaaattgaaaacggatgctcgtagcaaatgcaaaccgcaataacttttaactcggatgtatgattgagtaccataatagatcgagacgctcgaaattgaaaagagaagctctgagcaaattcaaacgactataactttttactcggatgtctgattgagtcccgtaatatatcgaggagcacgaaatggagaacagaagctctgaccataatcaaaccacaataactntatattcggatgtgcgattgagtcccgtaatatatgaagacgctccaaattgaaaacagaagctctgaacaaattcaaacgacaa

SEQ ID NO: 191829 - DNA, 405 bp, Glycine max
  unsure (1)..(405): unsure at all n locations
gagcctattcaaacgacaataactgtttactcgaatgtctgattgagtcccataatatatctagacggtcgaaattgaatgttgaatctctgagcaaattcaaacgacaatagctttttactcggacgtctgattgagtcccgtaacatatcgagacgctcgaaattgaatgttgaacctctgagacaattcaaacgacaataactttntactcggatgtctgattgattcccgtaatatatcgagaccctcgaaattgaatgttgaagccctgagccaattcaaacgacaataactttttactcggatgtctgattgagtcccgtaatatatcgagacgctcgaaattgaatgttgaacctctgagccaattcaaacgacaataacgttttactcagatgtctg

SEQ ID NO: 191830 - DNA, 485 bp, Glycine max
  unsure (1)..(485): unsure at all n locations
agcttactntgtgttgaagccaatntatcgttattccatnttatatcgcttctaagcttattgtttgaaacaacaagctnttgtgcttcctcatgtatttcatgaaaggcttccaaaacttcctcaaattaaaaatntacctcagtttcttcaatggttgaggaatcatccatngaattatccattaagcatacatatgcaatttatttttcactagaagagtcagaggattntgatgcattgtcttcccaagctatgtaggctnttttcagtttccatccttctttcctttcattntcagcaagttgttttcttgaggtagacaagacaatccgacctgatgtggccttgcttcccgcattcgaagcatgtgaaggtnngtgtttggtttcacctttttgaaagttagagaattattgtcttggaccctttanngaatttcanactttagaccattannatcaatctatgcatcttgtatcact

SEQ ID NO: 191831 - DNA, 352 bp, Glycine max
cgagagtacatctgtctctaattccctaattgacatgtattcttagtgtggagcagtggaagaagcgtaccatgtgtttagcggtatgaaagggaagaatgtgatttcgtggaatgtcatgattcttgggcttgcatcgcacggtaatggagaagatgcgttaacacttttcgcgaagatgttacaacagaatgtggagagaccgaatgattgtacgttcttgggggtgttaagtgcttgtagccatggaggattggttgatgaaagtagacgatgtattgatattatgggcatggactataacatccaacccacaatatagcactatgggtgcgtggtggaccttttgggt

SEQ ID NO: 191832 - DNA, 85 bp, Glycine max
agcaagcttggctctcaagaagagatcaaccaatggatggagattaaatatggatctcatatgatccataattccaagtctgatg

SEQ ID NO: 191833 - DNA, 486 bp, Glycine max
  unsure (1)..(486): unsure at all n locations
tcactaataattaagtatttacattgacagcatgatacattatatgaataaataactntgtgtgcattgcttacaataaaatgtattacactaccaatataattaattaattataattttttacattaacaaagttatttattaatataatgtatcatactgttaaatgttactccctatattttttttaaaaaagttactccctaaatcttaaaacagaaacatctataaaaactactaaataaatagtttaataaatacttaatcaatatctgggagagatgaacaatcgttgtatgtgtccctatatcacgttttccactttatagagccgnacaagattctggaattagatatcattatatcaagagggaaaaaaactaaaatgatatgttgcttttatatataaaatattgtaaaaaattatcaatattgttataaattgtnngtattttgttctcaagtgacactcaattcattcatctc

SEQ ID NO: 191834 - DNA, 424 bp, Glycine max
  unsure (1)..(424): unsure at all n locations
agcttcttcagaaacgtgttattngtgctattacacaatgtctggcaacaaaatggtgtatcagaaaggcgtaataaaactttaatcgatatggttagaagtatgttaatcaattcaactttactcgtatctttgtagatgtatgcctgaaaactgtcatgtatttatagaatagggtccctagtaacatagttccaaaaacacattttgaaatgtggacgaatatgacacctagtataaggcacctgcatgtttggggttgccagacagaaataaggattcataatccgcaagaaagaaaataggatgcaagaacaatcagtggatatttcattagttattcagaaaattcaaagggatatatgttntatggtcttaatcatagtatgagaattgtcaaattggaaatgcagttcattgaaat

SEQ ID NO: 191835 - DNA, 259 bp, Glycine max
ttattgtttcttctaaaccatcattgtatcttcataagatcaattgatctcaaactcccgaacgggcttcgttttcctctcatgtgctttgttccgaatttttcattgcatgttcggcgtttctctaatgctggcgttcttatctcataaaacttcaatgtttattctccaaccccatgaatgtggctctgtttccctcctcatgtgtgtttttttcactgcatgttcattgtttcttctaaagctaccatttttatct

SEQ ID NO: 191836 - DNA, 374 bp, Glycine max
  unsure (1)..(374): unsure at all n locations
agcttccgcatcacccgctacttctaattttttctttatcatccttttgtggtgtatagctagctttcggtatttgaacaattnttcaatataaaattattccctaaaatgaacactgcatgaacatgttccaacgttgcaactccacctttaacgtacgcatatattttaatactttgaaaataaaattaaggtgtcagttcatctcttatgttagtgcacagtgatattgtgtccataaaagactgcttatcattatagaatatttctattttacatcgcttcttgttttatttattggtgtaagtacttttcttatttcaatgcgtttttgtatgtgtgggtattattgcttacactatgaatacatgtac

SEQ ID NO: 191837 - DNA, 459 bp, Glycine max
  unsure (1)..(459): unsure at all n locations
ctcatatcttagtaattcgtggtatgctacttctgaataccattttgtatgcatggcaatatttccttgccccataaattaaatttcaggataataagtaaataagttcattttgtcttttttaacaaaactcacttgacaaaataggaagttcacctatcggatctacttatcatgtttatgtattcaactaatatattaacctagtaatccacataattatccatacattgtggtggatttaaggtgagtctatcaatatatttttttaaaacattttcattctccaaatttcaagttttcttttttggtatacaatggttattagaaaccttagatcttgtgtatactctctaattaaggggtttgatagaggataaatttttagttgtccaaaaattataagttgggaaccttaatgtttcatatgtgggattaattgtaaaanataacattcat

SEQ ID NO: 191838 - DNA, 427 bp, Glycine max
  unsure (1)..(427): unsure at all n locations
aagatctgtgtggtggtcggcagaggagcataaaccacagagtctggcgacaggtgcagatttttgattcatggccagttggcttaccaggttaaccaaggcatctagtttaccttcaagcttcttagtctcagctaatgaagatgaatttgtggccacttcatgcactcctctaatgacaatagcatcatttttggcactaaatttcggagagtttgaagccatcttctcaattaaatntctggcttcagcaggggtcatgtctccaagggctccaccactatcagcatctatcatacttttctncatgttactgagtccttcataaaaatattggaggagaagctgcttaaaaatctggtggtgagggcaactggcacatangttcttaaatctctccaagtatttcatataagctctctcactg

SEQ ID NO: 191839 - DNA, 435 bp, Glycine max
  unsure (1)..(435): unsure at all n locations
tgtgatgttaaatcaataaaattgtagtcgcgatatgtaaatatgtaaacatttatgtgccactttntgaatgcttagtgggacaaatgggtaatgacaaagcttctattcccagtttcccactacatgtagtgtttagtgaaacaagttgaagattttgtcggtgaatacctttctaattatgtagcaaggcttttaatagtctctttgggatagaataatttcatccatttcaactatttttagaagaaaaaaaagttttttataaaaaaaatctctttatataattaattatgttatatacatggtgatgcatntcagcctcaaaatattctttcaagtaactatatcaactactagaataatgcagttagcgcccgatatagcgaccgcattatcaaccgaatagttntagtcgatatcagcgactgaaat

SEQ ID NO: 191840 - DNA, 421 bp, Glycine max
  unsure (1)..(421): unsure at all n locations
atccttaagtcacctgcngcatgcaagcttgctctanattacattgttgtttgtatttatgggaggaggttgtacgccattnttgttntaagagtagtgtcccactggtaaaactaactttccaaatttttgccttcgcaggaaatggccccgaggaagcttgcctcanagaggtccaggaaggataaggcagccgaaggaactagttccgctccggagtatgacagtcaccgctttatgagcgctgtacaccagcagcgcttcgaggccatcaagggatggtcgtttcttcgggagcgacgtgtccagctcagggacgacgagtatactgatttccaggaggaaatagggcgccggcggtgggcatcactggttactcccatggccaagttngatccagaaatagtccttgagtttatgc

SEQ ID NO: 191841 - DNA, 396 bp, Glycine max
gctattacgtgacctataaaactaagctttaccacccatccccatatttttaatccgagccgggtattctctcccgactcatgttaaaggaccacccgcatcatatagagcgccggcccaatgcacagctccagccgctccccggccaattaataatacagcccctggcgcatgctataaatatgcacaacacccgcccccgaaagataacttctcccctattcccatggcatactccgagttatggccttcattattggagaatcatttggtggtggccatactcaggaaggtcttccagccaccctaccccaagtggtacgacccgggtgccaagtgtgtgtaccatagtggagctcccggacacaatattgactcctgtatccagttcaagta

SEQ ID NO: 191842 - DNA, 522 bp, Glycine max
  unsure (1)..(522): unsure at all n locations
gcgatcttaagtcacctgcnngcatgcaagcttggtctctgcagatcttcacacaacataatctctcataactctctagaacttggacctttctctctctagaaaccctagacatgcaaagctctgaatcccaatccaaactttcctcacaaaatctgatttcaggcttaaataggtggccttgtttgtgctcgtgcgcttagcgcatgtatggaccgcttagcgcacgttagtgatttttggcttaacgcttctttctcgcttagcggatgaactgaagcggtgcgcttagagagatgaagcggtgcgcttagcgaacctatacaactcatcttcttctggattcttcctcgtgcttagcccaagaagtgtgcgcttagcgggtgctcgctaagccaacatattggcttagcgagaaggtgaaaacaaccttttccaaagctttgcctaataacctgaaatngagagaanatgattatanacacacaanatgaaatactaagtattattactacactaaca

SEQ ID NO: 191843 - DNA, 431 bp, Glycine max
  unsure (1)..(431): unsure at all n locations
tgtactatatganaagataaaatgatacaagggcaaaaaagtattccttgaaaatgatgaagatgttgcctttgtgcaattttttaaagctcgccccatgcatttgtttaaacatgagcttgaagtgctcaaacacaagtttgggcgcacgactctcgatggccatgccatacaaacattctatagattgcagtagtattgctttggcttggaacctaaaaagaagccacctattggttcttatcatcattaaattgagtgttgttatcagactgtgaaccacttcacttctgcttcactcaagaaactcccttccatgatctattcatggcaatgggatttctatgctacgtctaatcacaccttctcttttatgatgatattttcattctctcgcttcttcttcacccatcatgtagaccccatcattg

SEQ ID NO: 191844 - DNA, 357 bp, Glycine max
  unsure (1)..(357): unsure at all n locations
agctngagatgaggaagtgtagaagggtgattcttcctgctnttattcgttgaccacagagtggtacctggagatatgtncgcggggtcaggagaccttggggacatcaggtggggtgctattgcccaaaaccaagcttgaccaatctcgacccaacccgggcatagtcggtcagtgagaacctgtgatgtacctaaacaggcgagctcctggcagtcaacagataaaaggaacaaagaccacatagcaaggaggcttgtggtggctggccagctgtgaaacttgattgatatgtgagatatggtctctggtaatcgattaccaagggtgggtaatcgattacaaggtttaaaaatg

SEQ ID NO: 191845 - DNA, 430 bp, Glycine max
  unsure (1)..(430): unsure at all n locations
cttggaaaatgatttctatacaaaagttagtcgtgtaaagcgtctaacaatattttctttggtttggatctcttcccattgatttgatataatgctcattggntatatatgttgatatttatttgttttatattaacatattgatgggtttaagaacaaaaaagtagtttcagaggaatgtatcttgtggaatgaaacctgtttccttagttttgtattgctaatgtatatttttgacaaaatttcatagtcattgaaattctataactcattttgtacttgtgtagtgtgagctcgcatgatggtatggcaatgaatgtgctgggttcaataagcaaaacatgagtgtaaattaaacttggatattgtggcacaatggaatagtaaaatgaacaccatttgcaaaattcaacaattcccaaaataacac

SEQ ID NO: 191846 - DNA, 413 bp, Glycine max
  unsure (1)..(413): unsure at all n locations
agcttctccttccttttcctataaatagggtgtggagggaagaacaaanatcttcaacccttctggtatctgagattcacttaaaattagtgagaaaattgtttccgtgaagaaaattcatgccgaggcgcttccgtaacccttccgtgacgtttccgtgagtgatttcgcgaagattttcaattgttcttcatcgntcttcgtttgttcttcgtcgttcttcggtattcaaccggtaagttcctgaaatcaaacttttcaattcattctatgtacccttagtggtcctcattnttttcgcgtgcttttattttcatttcatttactttccgtacccccttttgatgcgctntagtaatntatttaagtcattntctcgcctaatcaaaaataaaataaatttccaccgatca

SEQ ID NO: 191847 - DNA, 399 bp, Glycine max
  unsure (1)..(399): unsure at all n locations
tctacttattgtgatggcgggcttccttcactttcttgtctctaatgcgagcattgaccactgttcttccttcccgcgatgcttcttttcatgtccgcctgagtgggcttatagcctaaaccatacttcccacgatttccttgggtatttatcaagctagttatgccgccgttgtttttgcctaaacccatcccgggttcataaccgttccccaacataactcgggccatcattaccgctgcatcggacaaacaaggctgcccaaagagggagtccactgaggaaatgctgaccacctcataagactggaaagcagtttctaacgattcttctgcggcttccacataaggcatggaggatgggcagcttaccaagatatcttnctcgcctgacacgatg

SEQ ID NO: 191848 - DNA, 439 bp, Glycine max
  unsure (1)..(439): unsure at all n locations
aatgtagctatctttnnttagatatggaaaaataaaacactagtggtaagctagtgtgttggttgaatgttttctcatgatgcagaaattattaattggatttggcatccatataaaaggagaaacaaaacaaagagaaagtcaacacagatcaagggggctgtatctggatttatcttacactttattaaagcatagtaggacatagttgaagtttcaaagggacgtcatataacatgaaccgcgtcaaaatcattatgttattatgcatagaanaacaataataagaaaaactttgctttgaatgttccctttntctataagatacgtngtcaaccaatgccttttctttngcctgagatgttaggacaagtcgatactacaccatggngtggatcatggacgcaagaaacatagatattaatcgacgcgtcacatt

SEQ ID NO: 191849 - DNA, 454 bp, Glycine max
  unsure (1)..(454): unsure at all n locations
cttgaagagtgtcagtgantaaaagcattaatagcacattgtctttctgaagtttaatatacttctcttatagaaaactaaaaatatgtgaatatctgttaataagtatgtataaagtaataaagagcttaagagataaaatgactcaatttttttataaattaaaattaaattatatacttcaattcatagagaagataaatgataaagttgtttaaaaaagttgaagtttataaattacttgtgaggagaagtcacattaggagattcaacccacactcatggacaaaagtaagagtttatatcaaattcttaattacttgtgtcagcttgcattgacaaaacttgtgcttgcttgtccgcttcctatctaacttaattaattataaacatttgtagcattttatttgggtttggcttatgtttgattgcggaagtatctcaaagtaccgta

SEQ ID NO: 191850 - DNA, 377 bp, Glycine max
  unsure (1)..(377): unsure at all n locations
cttctgggccatttttgcgaagcaaaattattaatttancnaccaagaaatgctactttaaaaaaaaatggatacaccctcctccaaaaacacaaacagaatgtaaattagagcaaactatgcacatacttccttacgatattcactcgcacaaatatttttaattaagaaaaatgcacccatgcacaataggcaccttcgaacctagatcacttatatgtacttcaagatatttgtacctacatacatgcatttcctttgtaaattacatacgtgcatacataaagcactttggctataaaaattgcatacgtgcacattctggatttctaatacctatacatacacaaacttatgatgaatttggtacctacaca

SEQ ID NO: 191851 - DNA, 425 bp, Glycine max
  unsure (1)..(425): unsure at all n locations
agctntagctcaggctatagggaatcagaattatgttatgcttttggagctactgagtatcaaaggatggaccacttccaacaaaacaattgatgcaatcctaccccccaagatcattggatagaagactccaagaagattgggccaaagatgcaagagaaggccctagggttctcatgagccttagggtagatttctaagcacatgggccaaggttgggtccaattatctttgtacatattagactaggatgtcattatatttggtccttgtatttagggctccatattgtaggtagggtatcctagaaatataggatttttcagcccttgtattttagggcacctagactagtttttgtattaggggtagttttgtaatttcacatgcactaagtggatatttgatgtatgtgcgtggaaata

SEQ ID NO: 191852 - DNA, 417 bp, Glycine max
tgcaagctatgctgtagcgggttggcgggtggtcttttgtataatttgattcatatctctgagagattccagtgttaattacttccgtgcaaaatgtaaattaattatgaattgaataaagctaatgctgtatcagtttgtgctgtgatttccaatctctgttaatgggcacgttatgagtttctattttcttacaggagatcttattcttaggtaatctgatgagtgaaccaaaactatggtaaccaaataccgattgaaataaaatgtataagaaagacccattcaatgatcaatgtatatacatcttagccctgtgtgtgaaaggaataatctaatttttgtatgagattatcaatgattcaaaagtcttttacagattgtgtttgcttgctataaccctatcgtgccggtgtt

SEQ ID NO: 191853 - DNA, 335 bp, Glycine max
  unsure (1)..(335): unsure at all n locations
ggcaatattataatactaatgggctacaccctcgcccaataaagncaccacgataatgcatattagaagaacactgatgcaaatacattccctactaatgttcataaacactggatatgcttcctattactagaatgagtgattgcactatgtatgcccttattcataacatatcagtgatatgcacacaacaaagtacatttaattcgaatatcaaattcatagcatatgaattatgaacgcaaccactaacgaaatgcacggatttttttcaatataagctcacaatatagtttcaacaatcacaaactaagccatacaatatctaattgaat

SEQ ID NO: 191854 - DNA, 304 bp, Glycine max
gaggaagagagatatggagtttatatataaggatccccgacccccattgagcatatggtggttgaataactaaagagtaaatagcttacataaaataaggcttacggttttattatagaaaaatttgaagttaaaaaagaatggtcaaatgaggaagaattaatgtttcaaaaaaaaaacttactatgatgtaggactttggtattttataagatggagattatttggaatcatgtaaattaatgtgaggtaatggagagttataagtaaaatcctaaagattataaataataaagtttggttg

SEQ ID NO: 191855 - DNA, 380 bp, Glycine max
ctcaaaagactggggagcggtttctaatgactcctctgcggcttccacataaggcatagaggatgggcagctcaccaagatgtcttcttcgcctgatacgatgaccagatgcccttctactacgaatttcaacttttggtggagtgtagagggaacaacccccactgagtggatccacgggcgccccaacatacaactgtagggggggttaatatccattatttggaacgtgacttgacaggtgtgagggcctatcttgactgggagatcgatctctcccctaacctctcggcgggtgtcgtcgaaggcacgaaccaccattgaactcggctttaagtgggaagcattgaatggtaatttctccaaagtgctcttaggca

SEQ ID NO: 191856 - DNA, 409 bp, Glycine max
  unsure (1)..(409): unsure at all n locations
acctttgtgtaatcgaatacatggttttggttattgaataccagcgacaagttttgaataanaatcaaaagatgtaactcttccaatggttttcaagttttctcaaggtcataactcttccaatggtgttcttgactagacatagagagtctataaaagcaagaccttgacttgcatttcaactaacttttccaatttacttttgaatatcttcttcttcctttgccaaaagctttcaaagttttctagtttccaaaccttgttctttcacaaaaacaaaagtgtgttattcatcttttcattctctcttctccctttgccaaaaagaattcgccaaggactaatcgtctgaattctttntgtgtctctcttctccctttgccaaaaagaattcgccaaggactaaccg

SEQ ID NO: 191857 - DNA, 252 bp, Glycine max
aaaaaagccatttttggtgtggtccccccctaaaaataaaaggggggtaataatattctaaacttaataaaaaaattatttttaagttttataatgtaaagaataagagtaaaaaaattaaagaaataaaggaaataatgaaacgaagtaaaagtaggaaaagaacaaaacaaattttatatggtgaaaaacgtgctaatcataccaggactgggtctgaatttttaactgaatatttgacgtataatagat

SEQ ID NO: 191858 - DNA, 391 bp, Glycine max
  unsure (1)..(391): unsure at all n locations
agcttcttgaacgtgatcagtatattcattgtttcttttattaggatgaagacgtggttcgtgatatcttttggtgtcaccctgatgcagtaaagttagcatgtaatttggtgtttttgatagacaacacctacaaaataaaccagtacagactctcactgctcgattttgttggggtgacaccgactgggacgacattctttgccggttttgcatatgtggagggtgaacgcattaataatttggtttgggttttacaacgcttatgaggcctttttttaaagcgtgatgccctccctggagttattgtcactgacagagaccaaacattgatgaatgcagtgaaggctgtatttcctgattgtacannnattgtgtgcagctttcacat

SEQ ID NO: 191859 - DNA, 432 bp, Glycine max
  unsure (1)..(432): unsure at all n locations
gacctctgagtgactgcngctgcagctgagataggaagtgagaggggaacttttgcttttattcgttganacagagtgtacctggagaatgtcggggggtacgacacctggggacgtcggtggggtgctattgcccaaaaccaagcttgaccaatcccgacccaacccgggcatagtcggtcagtgagaacctgtgatgtacctaaacaggcgagctcctggcagtcaacagataaaaggaacaaagaccacaaagcaaggaggcttgtggtggctggccagctatgaacttgtttgatgtgtgagatatggcctctggtaatcgattaccaagggtgggtaatcgattacaaggcttaaaaatgaagacagaaggctaagatggtctctggtaatcgattaccaggggatgtaatcgattaccaggcttga

SEQ ID NO: 191860 - DNA, 417 bp, Glycine max
  unsure (1)..(417): unsure at all n locations
agcttgaaggcgtgtaacctaccattagtcatagtatatttctggtaatgngcctactatcattgtgataatcttcttctctgttattgggggcactacttgagctgccagatccctccacctctgggcatattccttgaaggattcatgctctttttttcacatgttctatagttgcatcctatccgaagtcatatcagaattgtattgatactacctaacgacggcaaccattatgtccttccaagaatggactcgggaaggttccaagttagtgtaccaggtaacagctaccccagtaagactttcttggaaaatgtatcagcagttcctcatcttttgcgtatgcccccatcttccgacaatacatcttcagatggttcttggggcaagtaatccccttgtacttgtcaaagt

SEQ ID NO: 191861 - DNA, 420 bp, Glycine max
  unsure (1)..(420): unsure at all n locations
agcttcaacattcaatatcgagcgtttcgattattattgtactgaatcagacatccgagtaaaaagttattgtcgttttaatttgcttagagcttcggtattgcatttcgagcgtctcgatatattacgggattcaatcagacatcagagtaaatagttattatcgttttaacttgcttagagcttcgataatcaatttcgagcgtctcgatatattacgggactcagtcagacaaccgagtaaaaagttattgtcgtttgaatntgctcagagcttcagtattcaatttcgagcgtctcgacatattacgggactcaattagacatccgagtaaaaagttattgtcgtttgagttttctcagagcttccgtattcaatttcgagcgtctggatatattaccggtctcaatcagacatcc

SEQ ID NO: 191862 - DNA, 365 bp, Glycine max
caccatatatgtgtaatcgagtacacagcgtcaatcttgaaatctaactttaatagttgtggtaaatcattactggccactggtaattgattacatcctctggtaatcgattaccaaagagggtatgtcttgaacaagactttttaacttaaattgcttggccaaacctttggctacttcacataggaattcccttcctatttaacataccctatctagaactctagagactgccgtgatcatccatgtagaatatgtctaatgcctatgtcttgaatgaagctttaagaggcatgtgatcctttggcatcatccaaacattcagctcgatcttcgtctacaatgatcactatgagtgacaaatt

SEQ ID NO: 191863 - DNA, 354 bp, Glycine max
  unsure (1)..(354): unsure at all n locations
cttcacctntaagacctcacaatcactcacaaactcatcttaagctctcaggacggcttcctcttccagctctggtctctgcggatcttcacacaacaaattctcaaatggggaagacctgctcacctgtcaacgatatcggaggagtttcgtgctcttgacttccattaaatgcttttttcaatcgcttgtaacggtgataaagttttacaaaacaccgatgcctagcgtatactatttttctatcatgattcagtcgtatgtatgtgtgtgtgtatgcgtgcacatggttgtgagtttgacaatgccatcaagtggctacgtaattgggaattggtgccaatgaaaaacatt

SEQ ID NO: 191864 - DNA, 374 bp, Glycine max
ttactcggatgtctgattgagtcccgtcatatatcgagacgctcaaaattgaatgttgaagctctgaggaaattcaaacgacaataactttttactcggatgtctgattgagtcccgtcatatatcgaaacgctcgaaattgaatgttgaaactctaagccaattcaaacgacaatatctttttactcggatgtctgattgaggccctgtatatatcgagacgctccaaattgaatgttgaacctctgagccaattcaaacgacaataactttttactcggatgtctgattgagtctcgtaatatatcgagacgctcgaaaatgaatgttgaagctctgagctaattcaaacgacaataactttttactccgat

SEQ ID NO: 191865 - DNA, 410 bp, Glycine max
  unsure (1)..(410): unsure at all n locations
catgcaagctgggacatggatcaagttgcattcctttatcccgnccctgacacagcnaagattatgtggtgaatgccaataatacattgaaacatgacttaaggaatcccaattagaggtgtacctcggagcttacttccatcagtaagtcatgtttaacaataatactttaaccgatgtttgtgttatacatatgtaacgtgcatgaaatgcagggcccataggcagctcgtagttttgtgtcctatgcaacatgttgtttggttatgttcgttgcgtaagaaacctggtattcatatcaaagccgcaattaacaggctaagtgataacatataacttattccatgccttcttaaatgtgcatgattgaatatcaaacctgaatatgtngtccttttatatgcgttgat

SEQ ID NO: 191866 - DNA, 280 bp, Glycine max
tccaaggaaaatggaatattatggcctggcatcattttctttaacctactggattaatcatgtctccacatatctctcactggcatacaagtatatccctgcattcttttgaacatatcccctgctatctgaagcccaacagacgaactgggatctgacttacatgctactgctgtggaagtattcccttgaatatcgggattgttctccttcgagatgcacaaaacgttcaataaccttgcggcttggtctgtctcctatatctcaagtaaacacatgt

SEQ ID NO: 191867 - DNA, 300 bp, Glycine max
actgggctgccctataatatagaactggtgattttttttttttgtgaccagccattacaaccatatactaaatatacggagctattatgttgacgttactatatagctgattgaatccaaataatatgcgccaaatacattttttaaactgcggctgaacaaaattctactcatcattactaagaatctctaacattgtgattgatgataagatttattcaaattatactcttactttatgctaactcttgcagcaaagccaatttcaccgtttcatttttcactagaagaagagtatct

SEQ ID NO: 191868 - DNA, 413 bp, Glycine max
  unsure (1)..(413): unsure at all n locations
ctgcagcttttaactggtcttgtcacctacttatttttataatgggtactttcatgttggattttgtcaacctangatgggatcggagttttatcgaatgcacattaacaattctattcccaattgtcttcatatgcatgggcaactcattgtaccgaaacaatgttccaaagggaagccctctaattccaatcatccaggtattatcaattccttttttacactccctacaatatactaaaccaccaatttcatctttcagatattatcttctctcttaagtgttcctatagaaagacaaaatatttaagtagtcgtaaaagtattagaaattctgttaaatattcgtattacaaaacccttttaaattgatctcagaactttcctgaaatacattaacttaaaagattaaa

SEQ ID NO: 191869 - DNA, 424 bp, Glycine max
  unsure (1)..(424): unsure at all n locations
agcttctagccaaatggacttaccttgaattattttctttgatagcccttntgagccctgtttccctttccttgttttgaagctcactacaagccttaagtgaaaaaccatgatattaccatatccttaaggaattttggagctttggaattgttttgggaataagtgtggggggtttttgtttcattggacaacttgttttgttgactatgcttcatgatgtattttgggccatacttgatgtacattgtatattggttaaatgttggacatgctgaatgaaatgttgtttctcaaaggcaaaaaaaaaaaaaaaattcgaaaaaaaaaatttcgaaaaaataaacaatcaaataacacaataaaacgccttaaagttgagtgaataaaatctttattggcacaagaatgatgaaactcttgg

SEQ ID NO: 191870 - DNA, 405 bp, Glycine max
  unsure (1)..(405): unsure at all n locations
gcttgttttgactcatgagaactttattcttgtttgtatccttcactttgatgtggagactacaagaggtaagagggggtcttttcacttcttgaacctgaaccttgttgtctttggaagtttggcttcattccatgttgtgttgatctttaaatttcgtatctactgccatgacttgaactggatgatatgtttttttcttggaagttntaaggttaaaattgagttatttgagtgttaaaacatagggttggccttaaatttcacttaaatcagagttttcaagaaaaagttatgaacaaaaccaatttaaggatatnttgtgtgattaaatntgntataaaattgaactgattgtacagctgtatggactattttcctaaatttttacctcacaaatgattt

SEQ ID NO: 191871 - DNA, 372 bp, Glycine max
  unsure (1)..(372): unsure at all n locations
gcgacgatccngattcattttagttctctcctccctcgctcagaagctcactcaaactggcatgatatctgggatatttgctctcttctcttgcgtcaaaaaacggtacggtgaaggatattcgtcagagagatttctcatatgctctaaacttgggttcccactgtatcgacatatgaaacgcacggagcaagaccgacttgccatgatggaagacgtctaccacaacacgaaagacgtggcagaatataatttgagaagagaggaatgactaaaagccgctgatgaactgactgccaagaagcgagcgagacgtgaaaagaacaagcacacgaaataggagcacaagaccaaattacatgctggaaagag

SEQ ID NO: 191872 - DNA, 365 bp, Glycine max
gacaccccatagattgcatgttcttttatactataaagacaccacaacgaatgttaggtggggggagagagagagagatagttgtgttatgttctgcctaagactctgaacatacttgtgctgtgttacagcaggtgtgatggcggcttcgttgtggtttcctttcacaggtgcacaatggagggagcttgagagacaacctatgatatacaagtccatgatggcttctggtcctgttacacatgatctcctcacacactctttttgctcttgctgcagtgtgaccctttgctttctatctcgtgcgtgttaatcactacattttctttagcattattgctgcacaaacacaagacaacaacatg

SEQ ID NO: 191873 - DNA, 365 bp, Glycine max
tcttctccttgaagtgtcttcttcaatcatctttcttccatctccattccgcttccattgatcttcaagaagcaaaagactccattgatgaagaagatccaaggcctacaagctccacatggagctacgtcaggtttggacttgaaatttgtttgatccaatgtaacttcacaatattatactcatctctcttgttcatccccaatttactaatgtattctacctcagcttccgcatggttgcagattctaaactacttgctagatacccaatcccttggatatgctgacataagcaatcaacattaatggccaaaaattaacgaggcttaaccaagattattctatcactaaagataatctcaa

SEQ ID NO: 191874 - DNA, 417 bp, Glycine max
  unsure (1)..(417): unsure at all n locations
agcttattgagggataattccatgcgggagttttttgtcttattataaaatagggcctntaactaaattatcttgaacgtgatagtcttatactatattaacataataaacttatattatattaacatgttagacttgactcttatagaatccagatcgcctatttctatcttttcctcatgctttgagtaaggatttttatatattatagtttggatcanagagtttttctcaccgattcatgagtttgttgtccaatatacagagaagttagacttataaaagctctaatacaaaatatttctttaagtaagctaacatgctaagctatgctttcaaacatgatatatcaaacctaataataaaacacattactagaatctatagatttaacatgcccaggttaacattagtttt

SEQ ID NO: 191875 - DNA, 421 bp, Glycine max
agcttggatttccttggctccggagacctcttctttttatgtttacccaaaaccaatcttggggttggaaaacaacctttctgcgccccttgtctgcatgtttagcatagctctcattcctcttttcaatttgggccttgactctttcatggagctatttcacatagtccactttggctcgtccttccttatgctttaaaactgaaatattatgctttggcaacaaatcaagaggagttagtggattgaaaccataaacaacctcaaaaggagaacaagtagcggcgctatgcacagtcctattataagcacattcaatgtgaggtaagcaaacttcccaatttttaagattctttttcacaacggtccttagcaaggtacccaaagtcctattcacgacctccatttgtccatccatttg

SEQ ID NO: 191876 - DNA, 423 bp, Glycine max
  unsure (1)..(423): unsure at all n locations
agcttcgcacttgataatggagaacacatgatctgctttttcaatgacattcatggtgctccaaacaaaggtggagtatggaggattgccttgagggtccgcacttaagcaatcatgaaactcagctccaaactcgaaagtggaggacacatgaacagccctaagcaataacattcatgtggctccggaaaaggatgagaatggaggattgccttgagggtcctttcttaggcaatcatgaaacataactccaaactcaaaagtggaggacacatgaacagccctaagcaataacactcatgtggctccggaaaaggatgagaatggaggattgccttgagggtcctctcttangcaatcatggaacacaactccaaactcgaaaatgaaggacacatgaataacaacgcaattcattcatgg

SEQ ID NO: 191877 - DNA, 405 bp, Glycine max
agcttgcctgtccgatgccacagtaatgatggtttttgtgattttggggagtggttacaagcccgaaatgggtttaggcaaagacaacggcagcaaaactaacctgataaacgccaaaggaaatcgtgcgaagtatgggttaggctataaacccactcaggcagatgtaaagagaagcattgcggaaaggaaaagcggaagtcaatgttcgcgattgatacaagaaggcgaaggaagcccaccctaccacataagtaggagctttataagcgcgggcctaggggacgaacgtcaagtcgttgcaatatacaaagatgatgttccgagagcattgaatttggtacgaccgtgccctcctgatctccgactatgaatatggcaagtggaggagcgcccggacattta

SEQ ID NO: 191878 - DNA, 413 bp, Glycine max
  unsure (1)..(413): unsure at all n locations
agcttctcgagaaattcaaatggtcatttcttttttctcagaggtctgattcacgcgcataatatatcgagacgctcgaaattgagcaacgaaagctctcgagaaattcaaatggtcataacttttcactcggaggtccgattcacgcgcataatatatcgacacacccgaaattgaacaatagaagctctcgagaaattcaaattgtcataacgtttaacacggaggaccaattcacgcgcataatatatctagacgctcaaaattgaacaacggaagctctcgagaaattcagatggtcataacttttcactcggaggtccgattcaggcgcataatatatcgagacactcgannatgaactacggaagctctcgagaaattcagatggtcataacttttcattcggagat

SEQ ID NO: 191879 - DNA, 411 bp, Glycine max
  unsure (1)..(411): unsure at all n locations
agctngtanataacactgcggctgcattattattgcttatcctttccaacctccgtcacccttgttgcccaaatttctttgatctctaagtacatcagccaatacacattccatttccaaatttcatgtaaaataacttattgtttcctcattattttttcctaaaacttttcttttgtccatcatttttttattagacgactccattgaagttaatgtcacttattcaacctgcacataacaaatagtagatatgacctactttattcatttgactagttcactgcacaatcatagaaaatatttcaagcaaagtttttatgcaatagcaaagtacataaaagtctatcttcaatagaaaagtacaatagtaacaaagcacacaaagtttgtcagcaatagcaaattaca

SEQ ID NO: 191880 - DNA, 367 bp, Glycine max
cggagcgccgagctcccgtgtactatagcatgaaagccttcatagtcctccacctagctatcgcgaccctcaacaccaagctcagaagaggacgagacccgaacacccccacacaacaggagtgaggtggcacctgactaggaagaaaatagacgagagccttgagggtacatgtttaagcaatgataaaccactagttcaaacatagctaacgaagccacaccaccacatccttccaaatacacttttcgatgcctcagaacatgatgagaaaggctgacagcttgaacggacatactaacgcatcaatggacacgcatctgcaacagtatgcgaagactcatgactataagcactgtggtaccat

SEQ ID NO: 191881 - DNA, 389 bp, Glycine max
  unsure (1)..(389): unsure at all n locations
gactgggcaaagcagacacacgacttttcttgtctttcacgcatcnnggngctccctacacccgttcctcatgtttggttgtctagggagaaccaccataactaaacgcgccacaaggcatccctatcggaccagatccacatctgaaacgacgggtgatcaagatgagaaacaggaacagatgaaagccgacatgtcggctctgaaagaacaaatgaccttcatgatggaggccatgttacgtatgacgcacctcatggagaaaaacgcggccaccgctgccgctgtcagctcggctgccgaagcagagccgactctgttggacactgctcaccatcctctctcgaacatatttggaccgcgaagggacactctgaggcacgatggca

SEQ ID NO: 191882 - DNA, 316 bp, Glycine max
cacataaaacaacaacagctactctattactggggtattattccacgattttattcttcagcatccaagtacttgtcacacaccttggcttttatagacttgaccaaaatactctaattctaaagaatgataataaacatacaattactttaataactgtctctcgatgtaatttttctcgacctccactactagttctcttgaatcttgagagactttcattggaataatgcctctatttgttccacaacgctgcctacgagccaatgttatatcatctagttatgaagagcatgtgactaacatgctatgaagc

SEQ ID NO: 191883 - DNA, 341 bp, Glycine max
  unsure (1)..(341): unsure at all n locations
cccttgaagcctataattctttgatctctaagtacatcatccattacacataccatgagcaaatatcgagtagaacaacttattgattcctaattatttcttcctactacatcactgtagggcagaatttgtttattatgacaactacatctgaattgaatgtcacttatgacgaccagcacatatcacatctgctataggagcaactgtatgaattggactagttcactgcacaatcatgnaaaatatgtgatgcttagattttatgcactagcacattacataacactctatcttacatataagagtacggacgagacaagctcacagagtttgtttta

SEQ ID NO: 191884 - DNA, 342 bp, Glycine max
ctacttgtgccacacattggagaaagaagttgagcaatttgggttaagttggtaaccaaaacatgtcaacattttctttttctttctattccttccttcttgtttgatatcatttgctttgactctatgctaaattgtgtttctattgaaaaacaggagggtttaccaggactattgtgatgccatgagcaatctttctttggggataatggaacttttgggaatgagtcttggagttggtaaagcatgtattagagagttctttgaagagaataactcaataatgaggctcaattactaccctccttgtcaaaagcctgacctcactatgggcactggacc

SEQ ID NO: 191885 - DNA, 416 bp, Glycine max
  unsure (1)..(416): unsure at all n locations
acataaatnttagtagtgatgcactgttctattattaaaagaacttaatgccattaagggagggaattaaaagaacttaatggctgagtgtaactgaaattatggcaaccaaaagtcacccccaacagccatcaagtcagccaccatttggtctcccaaaaggctgatgcctaggttgccaattgggcccttattgcaacttgaactaaacctaactaaagcccttttagttgataaacccaaaacatattgttggtcagccaactttacaaggattgggccattatttagacaaactaaacactctaaaattgagacaaagtggtgccatttagtcctcctccatttgggccatgatacaactcacaaccttggacttttctccttgaaacttgggcttgtattcaaatagtatg

SEQ ID NO: 191886 - DNA, 414 bp, Glycine max
  unsure (1)..(414): unsure at all n locations
agcttcgccaagatgcagatggaaattctatattctaaccttncaaagttagcgagagagctacactgataaattacgggaacttatataaactaaatccttaattgaaggcgtatgtgataaccatagtgaattacttaacaagattggtagtttacttaaagtcattccagatactccccaagcctcggaaaatacttccgaaatggtaacaagaagtacctacaaattaattaatgttataattgaagatagtgaccaaagctcatataacacaactgagataggatcagtgtcagaaatgaatataaatccaattaattccaaacactgggaaacaccctccatattatattatcaacgtccaactgcccctgaccttctattacaagaaagaggtgataacaattttaa

SEQ ID NO: 191887 - DNA, 409 bp, Glycine max
  unsure (1)..(409): unsure at all n locations
agctntataagagttgcaaatatctacacccttgtccctattttctaattaanaaacatcatagaaatcacacaatcttaatatatatggctacttatttttcattgaaagtcttctaataagtttacactgaagaatcaatgcataaaattcctacgtactctagagttacaaaaacagagaaaaatagtaattaataaaaaaatatcataatcaaattgaagtaaaagaatacattagtcctctaacaacttgtaaatatagaatatttttatattgaataactaactatatttataactactctacttataatcaaagagagaatacatgagaggtatatttataagttatcctagagaagctgaaaacaacatgagaatataaattttatactctctctgcaaca

SEQ ID NO: 191888 - DNA, 358 bp, Glycine max
atacgggggtggtgtgattatccacaattgttagaaaatacttgagtccattcaaagaatgtgcggcacaagggccccaaatatttatatgtttcaaagagaaaggattagagagatatgaattattattgggagatgacagtctctctgctttgctctatggcaagtatgatagacggacgttttatcacaaggcaatgtaggattagtgtgtttaacaatagtgtcctatcatatgaatgatgacctaacggaaaaagccaaacatcaatgagatctttattacaagacagcataaacttaacagaaatgaaggtggtgcttgataactgtaaaatctgagctaaagtgatagtca

SEQ ID NO: 191889 - DNA, 337 bp, Glycine max
tcccacactcaagatgatggcactgcgtgctttgtcgaacaagatcttcttatcttgtacctctccattcgtcaaatcaaggattgagttcaccattctaagcatctttgagaccttgatgcacaagaagagccctcgtctttaatcaccaaagattgaaatcatcttgacctgtgaatttctcgacttcatactttgcatatgccatggctaattattccatgttcaccgcaccagcttatcgcgcatagtatcacaaaaatgacacacagacatgtcataatttctttatcaagatgagttttagaatacaatgagtatttctagagagaatcga

SEQ ID NO: 191890 - DNA, 411 bp, Glycine max
  unsure (1)..(411): unsure at all n locations
ngcttgcctgagcgagcagttttatttttgtttttgccacgccgcggaacgggggcgaaccacgaatgggtttacgcaaacccaacgacgacataactagcttgataaatgccaaaggaaatcgtgggaagtatggtttaggctttaaacccactgaggcggatataaagataagcatcgcggaaagaaagagcggtggtcaaagctcgcggctgaggctagaaagtgaatgaagcccgccctgccacataagtagaagctttataagcgcgggcctgggagacaaaggtcatgcggtcactatagacgaagatgatgtttcgagtacattggatttggtacgaccatgcccttctgatttccagctgggaaaatggcgagtggaggaacgccccggcatttacgcaacga

SEQ ID NO: 191891 - DNA, 422 bp, Glycine max
  unsure (1)..(422): unsure at all n locations
agcttgctcaatcagccccaactcttctctttgcagttgatttatcctcacagcaacactataggattctttcaacttctcaagcgcaaggataagcagcttggtatcatgcttatatgataaaggtggaaagggaataggggagaacttcctagattccaaccaatgtacagttgttgtatagatggcaacagcttcttcaggagtaacatatggaccatctttcaaataattgtgttggcgttcctgcaacaggcatcaatgataaggaagcgacttcacagataattattaaattttctatagaactaactcanacaacaattctttgaaaactgagccagcaaaaaaattatatcaatcatagagaacaataaacacacctgttctgccttcagccagaggcgtgtcaatcttccaag

SEQ ID NO: 191892 - DNA, 418 bp, Glycine max
  unsure (1)..(418): unsure at all n locations
agcttcaaggatctcttcctggtggtggaagtttttatttttcttcaaatatgcatgggatgtgagtaaaattttctgaaatgaattagtgtagtttgtttactaattcatcatcatcattcaggtagtcttttctcatctgattgataaaactcttctttctctatgactacagtacatgctataaagtgtaggcctgtaggactcttatatctatggtagattaccatggtgagatgggttagtctataggcttcattntggtctgcatacaattggtaggattcaaatttctgttttcttcaaatgtcatttaccagtttcatttgtgtctactaaagcaaacaagacatagtttcttgcattatcttttatgnttactataagggaatacaagtaattttgcatgtgagacatg

SEQ ID NO: 191893 - DNA, 352 bp, Glycine max
catcattcgcgactatcatgctacttgtagaggtgatttatgtgaattttaactcttgtaagctgatgttatacttcttctatgcatgtggtgaggttgttctttcaatgtttatacatatattggcatgttgatagtagtacatggtaaaaaattaatctccttggtatatggtaagtgttgaaggctgggattactttcaatggtaactttattttatgcacgtgaatcagagactcaatccaagatcacctttactagaccaaagctctttctactcgaatattggtattgtgaattgcttcaaatgacgtgaaaatcttgaccaaagttcagtctataactacctgaa

SEQ ID NO: 191894 - DNA, 410 bp, Glycine max
  unsure (1)..(410): unsure at all n locations
cagctngccacccatctcgctcaggcgagctattttcttcctctagaangcaccgccttctggaggagacttctggaaggcccaagtgggcttggtttctatttgcaccccctatntactaaatacaccccatgcctttttttgttgattctttttctgtaatgttacgaaactttacgaattccgtaacgatacttgttttccttccataatgttatggaaccttacggattacgtaatcatcccttttttggctttcggaatgttatggaacctcacggattgtgtaacaatgctttcttttgatttccggcatgttatggaacttcacggatcgtgcaacaatgctctcttttgacttctggcatgttatggaacttcacgtatcgtgcaacaatgggtgccaagta

SEQ ID NO: 191895 - DNA, 300 bp, Glycine max
tgtaattgatatcatcatacctgcaaaataatatccacttacaaaagagctattgatggatatattaatgacgtactcatacctgtatgtaacatgaatgtgaaatatttaaacgatctttatcatatattaagaaattctaatttattcttcgtatatatatatatttcaatttttattttatgtgctacttcttacagaaaacactttaataacttctacgtacatttgtgaatatccacgaatacgtgttctaatgctagggaatgaccaagattactatttactacccatttatat

SEQ ID NO: 191896 - DNA, 415 bp, Glycine max
  unsure (1)..(415): unsure at all n locations
ncaagcttaggggngtattagagggagttgagacttggtttgtgtnnnccccntggcgggactccctttttgtagatgctggagtgcacatgggcctgtgtactcgcactaagcctacggtgctcgcttagcacaggtgcctgtattcccgctgaacgcggattgagatgtgccttcctcgcgcttagcgtgtgcttttcgatgagcgggctgcgcactgagcagacagttctcactactcctgatgtgaaaaccttccctttttatatcttttctatgatctacatcttttgtatttttaatccctcctttttatatctgcaatccataaataagacaaacattaattcttaacaattcagcataaataactgctagataaatactctcaatgttattcttattataaaaaata

SEQ ID NO: 191897 - DNA, 420 bp, Glycine max
  unsure (1)..(420): unsure at all n locations
cttgccacccagctcgcggaggcgagcggttgtttatatctcntaaacgcaccgcctatcggagggagtgtctggaatgcccacgtgggcttggcttctattagcaccccctatttactaaatacaccccatgccttttattgttgattcgttttctgcaatgatacgaaactttacgaattccgcaacgatacttgttttccttccataaagctatggaaccttacggattacgtaatcatcccttttttggctttcggaatgttatggaacctcacggattgtgtaacattgctctcttttgcattccggcatgttatggaacttcacggatcgagccacaatgcttcctctttgacttctggcatgttatggaacttcacgaatcgtgctacaatgggtgccaagtacctagaaaca

SEQ ID NO: 191898 - DNA, 410 bp, Glycine max
  unsure (1)..(410): unsure at all n locations
agcnnnaacctcatcggctctcacagtctttagtgattggagccaatccaatccttggggtcggactctcagccacttatgatagccgccgatgatcccattactgcttcccctaagctctctgtcctttcttcatgccgcatcccatgccttgcgaactccttggagtacccccgcgttgtggtcactgaaaccccatgcgatgaaaggcgtgatgctttcgtctgatggcactcctctcatggggtagccaagctgtcttatggcgaggacgggattaatacaaccccttgttcccatcaagggaacattnggacatccttcgcatgaagatagaatcctgattcttccttccttctagcgagggaaccaattaacagacgcccctctatgctagccaggagttagtc

SEQ ID NO: 191899 - DNA, 419 bp, Glycine max
gaccttaagtcactgagctgcagcttgaagaatgaagatgtattgaatttattaccaacaaaaaaaaagttttcttgtaagttagaaaagctctcagaacactttgattaccttgagagaaaagacgaagtgctgaaagtatccatctgtttataagatgattgagtgttagtcattatgcaattgaaacaagcaaatcttcaaatttgtgttagatccaacagtggcttggtaggataaagaatattggttgtaactagcttggtataaggcttaagttaaaaagccagaagttacaatgataaatacttgtaaattattgaagttagtggaacttggtggtttgtcaagaactagacatagcctcggtgattaagatgaactagtataaatttctaatgtcttatactgttcttctc

SEQ ID NO: 191900 - DNA, 326 bp, Glycine max
aagaacacgtcctgataacgaagatgatgatctcaagaatcaaagaatgacttccagactgaatcaacaacactctcaggatcatgaggagatttgatttcaagagtcactaagcgaacttcaagagttgagttccaagaatctagatcaagattcaagactgaagattcaagaatcaagagaagacttactgcatataaggatgaaaaagttcttcaaaaactgaacaacacatggattttttctcacaacatgcaatcatacagtttttactctctagtaatcgagtaccacattgtcgtgatcgattaccactaagcaaactg

SEQ ID NO: 191901 - DNA, 418 bp, Glycine max
  unsure (1)..(418): unsure at all n locations
cccccatgactgagctgcagcttgaantccataagcaagaaggatatcgttattttacacgaactcgctcgccttcacttaactgataatacttctgacgactctctgcccaattttaatggtaacctcttaacgttacatgaacagaactattgttgatgctatcaaacatactttgcatgtccatggtaaatctcacgccactctttaagtacgatgtctttgaatcgttatgtaagtaaaatcattgactgaccttttggtttattgagaattaattactgacatgattttgtgctttacagtctcagttaagccgtgctgtgtatttggaggattatgaagatgctgccatgcttaaggtggcgtttgcagctgtacctaactaccactgtgttagaagagtgatgtcctatct

SEQ ID NO: 191902 - DNA, 421 bp, Glycine max
  unsure (1)..(421): unsure at all n locations
agctntgagagccttgtaagagattatgcatgtttctttctttgttttggtagntctgaatgtttagtacttgtttaggatcattgaaatgaggttaggatgggtgggtacaccattgatggccttctaatttgtgaaaaccttgttcaaattcctttctggatgtgtcattcccatgacatctaccacgagcaggccatggtagaatctgactttaaatttgagtctttctggggtgtgccatgtctatggtgtttaccacagactggttgtggtacatcttgattgtgtagttttgtcagtttctcacttttctttgcattttcaaggttcttaacttcttattacttccatgattaacaagggagggattgaatatgtgtctatgatgaatataaagtgtccttcatcgagtttcatg

SEQ ID NO: 191903 - DNA, 354 bp, Glycine max
tgcaatcttgacctttgacaacgaggatagctttttttttctgttgacacgcatccacaccaaggtcataaacataatgaacaactcacctcctcatcaccaacgaaatatatacaacctctatttttaccaatacccgacttcaccgtgacgcgccaaaacacctaacgttatgatgtaaaccctgacattgcccccaccttacttgtttcccagacggcatgcattatgaccaactcaatatcattatattaagctggatgggaagacactgctacgggtcatacatcatctataggtaccttagatacacaaccctacattctgtatcgacaacctacaatcaaactgaaa

SEQ ID NO: 191904 - DNA, 291 bp, Glycine max
atcctctatagagaacatggcaaacctatatgtcattaatcaacagggacgcaattgcgacaggagctgtgatacggatgtttcacacacagagtttgtaatcttgggctctcattgcatgggttggagctattgtggcccgagctggaagagcacccccctatgacatattgactgcagtgactaatattctctatgatgccataatggaagacatcccttctaattgattacacggagaaatggcaataacaatgacaactaacctaagtccctcgtgattgatatctc

SEQ ID NO: 191905 - DNA, 399 bp, Glycine max
  unsure (1)..(399): unsure at all n locations
agcttactggaacaagaggtgtgcgtgactnattatgtgcctaagggacatactggctcagatgaataccctggaagttaccatgtctgaatccttcttgggacatttcattttgtgcaccctacctcaacagtatacaccctttaaaatctcctacaacacacataaggataaatggtctattaatgaactgatgaccatgtgtgttcaagaagaggagagattgataatggaagagggtgagaaggtaaatttgactacttctacttttggaaaggataagaagaattctataggcaccaataaaggaaggattccgactcaaccaacaattaaaaagaagtcaacgtgtttcttctgtaaaaagaaaggacacataattaaggactgccccaaatt

SEQ ID NO: 191906 - DNA, 428 bp, Glycine max
  unsure (1)..(428): unsure at all n locations
cgcatgcagactngactcataccaaacatgacaattttagcttgttttcgacaaatctcttcacaaataactatcataaggcataaacctagtgaaactacccatcatatctaccaaaacccaatacccacgaaaatttatctgagaagaagtctaaccaaacctgaaatgtgaagtcccacaatggagaggtgcacttcacgactccgaatatggcttcctttctcgatttggagcagaaaatgtgtgcaaaggttggagctttgatggagcttcaatggtggaggaagaagagagaatagcaatgagagagagaaggaaaaaagcttctgaattttctgagtgaggagagagaacatagctntttatgagaaaaagctttccttttccattattttattatttaaaagcacttgtcacttgtccca

SEQ ID NO: 191907 - DNA, 369 bp, Glycine max
acatctgctagtcgatgatgtattctgacatgaatctgctatactgctcctctgtcaacatgctctctgacataatgcagatctatctctagatgcttggttctttcctgatatgtggggtttgctgcaatgtggattgctgctttgttgtcacaatagatagatgcaaataatgtcttaatgctcaaatcattgaccaagtctcgtagccaagtaagctcacttgacacagatgataaagctttatattatgcttctgcaaatgatctactaactggcttctgtttcttcgccttgcaggaaatcaacgaatttcctaaacatatacaatattcacttgttgattcccgactgtcaatgcatgaaccc

SEQ ID NO: 191908 - DNA, 418 bp, Glycine max
  unsure (1)..(418): unsure at all n locations
cagcagctataagaacgagaggttctttttttttttatgcatgngaattaggaagcatcaacaagaatcaagccaaggctattgtgcaagcaatcaatggggcaaaacacaccaaatgattatgatgatggatgactcaaattctcacaaaggtaaactcatcactttcaaattgatctttcaaaactatcacgacatgtagaggagaatcaaggatttcaagtcacaaaatgtcaagaacttttattttcaaaacaattacccatttcttgaacatatcctataattcaaagaaaaacatgcaaagtcatacatgcacacaaaattgacccaaaatattaaactaaaaatccaacgaaactaacaacattaacaaattaacacaactaacaaattaacaaaaccaactaaactagca

SEQ ID NO: 191909 - DNA, 349 bp, Glycine max
ggacatactggctcagccgataaccttgggaattaacatgaacgtatggttgagtgacactgaatttggggcaccctacatcaaccccaacaccctctagtaactcctcctttggtcatccagatggctgatgtctaagtggcctgatgagcccttattaccactaggactaaaccaagctaatgctctatggtgaaatagcccaaaacatatcttcggccagcgcacttgacaaggagagtgccattagttagaaaaactaaacactctagaattgacacaaagtggtgccatatagtcctgcttcttatgggccatgatacgactcacaaccttggactgttctaca

SEQ ID NO: 191910 - DNA, 376 bp, Glycine max
tacagcaatatctttaaaggctaccgcgtcaacaacttgcaaactaagaaactcgtcatcagtcgagatgttgaagttgatgagtatgcttcttggaattgggatgaagaaaaagtggagaagaacattcttatacccgctcaataacctcaagaagaagctgaggaagaagacctatgtgaaccaccttcacctccaccacaacaacaagatcaagaactatcatcaccagagtctactccaagacgagtaagatctttggtggacatatatgaaacctttaacttggccatacttgaacctggaagctttgaagaagcgtcaaagcatgaagtatgggtcaaggcaatggaagaagagatacagatgatcgaga

SEQ ID NO: 191911 - DNA, 414 bp, Glycine max
  unsure (1)..(414): unsure at all n locations
agctttctctttctctatttatatctcaactatattttattcttcttcgncatttcactttgtttcttccattttattgccaaaaatttgtggattttccattggtgatgaacatggaaggctaaacacttcatcgatccaagcatccactccaagcaagggctgaatttgagttttagtttagtatttctaatctttgtgaatgttcatctttctctttaatcctattttcgaatttcatgattatgattatggttaagattgaaaaaggattgggttatggattcatttcctaattttgaaatataataacagattgtttggatgattctccaacctatattgcaatctcacacaatttagggattgattcgactgaactatttctaatgcattcgactgaactctcacatt

SEQ ID NO: 191912 - DNA, 420 bp, Glycine max
  unsure (1)..(420): unsure at all n locations
agcttggtagagttcacggagaaccatggaatgtttgtgctangatataagcctacacccatcgatgtgaggagaagtgccctagaaaggaggggcagaagcatgggccagtcgcaaggactgcaaatgaaaggggttcccttgtgtcacatcaacgaaagctttgtcagcacgggttggatgtgtgaaggtcacgtcaccatgacacatgaagaggcccctcaagagcaaccaaaccgggtgcattcgtgccctcctgagttcgagttgggaaactggcgaattgtcgaacaacctggaatttctgtgacaaacacaatgtaattcgttagtcctaaccctattgttgggccaaggctttagggtttttcctccctgtttggggatgtcttttgctatcaaaatatataaatatacgat

SEQ ID NO: 191913 - DNA, 314 bp, Glycine max
  unsure (1)..(314): unsure at all n locations
cagcttttgcgtangtgctcttgctgctcagatattcctatattctatccctcttataactagctattatgaattctctagtgcctgaatgtacaaccttcaaattgttgctcgttctcctctttgagaatgaggaggatcctcataggacttcatccagctgatgtgggtcacattatatcagaactaacacggcctggaaatgatcttgtctcatgtcttgtttaacgtacatacctgattctatccttctactgatgagtatgctggtatcatatcataccccgggcagacacttcatttccattaaagac

SEQ ID NO: 191914 - DNA, 422 bp, Glycine max
  unsure (1)..(422): unsure at all n locations
agcttgtactaccatcgaactcggttntagactgtgattcattaaaaggaagtttctccaaggtggtctttggcatcacatttaaacttgaaccattgtcgatgagtaccttagggatgacatggtccatgcatctgacagacacatgtagagctttgttatgctctctcccctcaactggaatctcttcttccgcgaacgcgatatagttattggtagttatgtgattaacaatgccttcaaaaccctcgactaagatgtcgtgtgctacgtgggcttcgttgaggacctttaccaatagtgcacgatgaggctcggagtttatgagcaattcgagcaaagagatccttgttggggttttattcaattgctcaactactgtaaagtcactttgttggatgagacgaaggaactcatgagcc

SEQ ID NO: 191915 - DNA, 413 bp, Glycine max
  unsure (1)..(413): unsure at all n locations
ngcttgtnaagaatgaagtcggagcattatcttttctcggactgaacanaacttaatgaggagatcgattctttacgtcttaatgtccattgcggcccattataatatgtagttgcttcgctatggaacatttaagttgtaaaagattcattatgagtctttacgttcttgcaatgtatcattgaggacctttattataattttctgttagaaacattaatgctctgttagtttttacattttaaaatgagttaacgtcactttagagccatcatgttttaaaagctccattcatgctttgccgacttgaattgcatcgatctagtcattgtctcaatctttagttagaaacattagtggtttaaattttaaaagcgctaaggtaacatattgacagctacaaaccactacta

SEQ ID NO: 191916 - DNA, 300 bp, Glycine max
ggtcgaactcctgtgctgaccactatacagacctatgtcatttcatgccgcttaccgctgctactgtacttcctgaagctgatgcgtgttgcgtttacaatatactctcctcatcctcccaatcagagtcaaccacattataaacattatcgatctcttcagcaccatgatctgcgcttggatggaagcatctccctaatctgagatgggtcataccgtcaaaaccacaccactacccttcatcttgcttacacattgccgttagcgcaaggagagcatatcattcctacgccaattcaa

SEQ ID NO: 191917 - DNA, 385 bp, Glycine max
  unsure (1)..(385): unsure at all n locations
cgcgcgcacgcgagctnctatataagcggagccgtnggattgatttacacaaggggaggtttaccaacgaagacagaggctatcccttttatcttaaagagagggatactcctacattctggagtgaatcaacaacaccttggctgtatcaaaggacattcacaaccttcgcgtgctgccctagctggaaagagtgatcctctccctccatacatcatcacccttgttctttcaaaccacaagtccacaaaaaccacctctgaccagaattatctcgcggccataactcccatgatacgcactcaaattaagcgattctggagcctaaattgaatctcaaaacgagacccttcacctcatggcggaatcacctaatgcggagccc

SEQ ID NO: 191918 - DNA, 422 bp, Glycine max
  unsure (1)..(422): unsure at all n locations
agcttctaagatctttatgctgtacaggttattttttttgggttatngcactacaacatgcttccaacccaatgaatttttttttcctttgtcaagcattcctttaaaaacatggcatatcttggtatttgcttcaaggcttccgagaatgaatgttgatattaagttgtttgaaaatatccaagaatcatttaaactactcttcttgtcaatcttagttggattcttcagataatgaagctctatagcaagagaagatttggctctaaacttttcctctgtggtgcttcgaactctaaccttctatactttgacttcctccattgcttctttttcttcacccccactcaccatatcatactcttcaccacttaaggtaaagattacactaccattatctntaggattaacttgagtattga

SEQ ID NO: 191919 - DNA, 291 bp, Glycine max
  unsure (1)..(291): unsure at all n locations
actctcgtntaacctactacagataatggaatgctgatttaaggcagattgtcaatccaagtgatccatttggagcaaaagcctatctttcttagcatgtgtaacagagagttccaattgactaagtcatacgccttctcatagtcaactttgaacatcatgcaacttctattgcatctgttcacctcctgaaccactacattggcaatgagaacactatgcaacatatgcctgccctctacaaaggctattagtctctcatctatgatattacgcatcaccctcttcacc

SEQ ID NO: 191920 - DNA, 350 bp, Glycine max
tagagatattattgtgagggagatttggttgttataaatttgatctaaattggagttagcaacctaatatggggtgtatgttggtctattgaatttggttttaagaaaaatatgataaaactatgggatcgatatattgtgtcgaacatgcacttttcatgggatcgatagatgctctcggtgcgttttcaaatgaggaaatggcggagtcacaccaatgttacttgggaaaaataggaaaaccgaatgaactggtaaaagaatatcaagttcggagtgtattactttgacaaagattatactctagtttgctcaaagaaaaacttttttaaatgtggaaatggttacct

SEQ ID NO: 191921 - DNA, 235 bp, Glycine max
aatagcattatcgttacatcatatttataaccaaaacttaatccgcatatccctcttgtaagactaagtgttgatcactgctcaatcaagctctacggtaatagatcatttcccaatgctaaagtcagctaactatggcacaaatggatgatcagaccacaagcatacaaacattattcattgtaggaagattgaacccacaagacataatcaattataatttatgtattaacat

SEQ ID NO: 191922 - DNA, 91 bp, Glycine max
aaacttttggaaaatttattgggacatactatagccccccctttagggactgaattaggtgctgcaccaccctgagggactaaaaatggga

SEQ ID NO: 191923 - DNA, 226 bp, Glycine max
ttgaaaacaaactgtgcttctttgttttgaaaaatctttcaatacttcccttggaagtcttctgatttcttttcttgatcttgaatcatctttcttgaatcttgaaacaaacttctcttgttcttgaacttgtcttgaatcattctcttggcttttttgtcatatcttgttatctcaaaacacttgaatcatcttgtcatcatcatgaacttgtttacaacctaca

SEQ ID NO: 191924 - DNA, 454 bp, Glycine max
  unsure (1)..(454): unsure at all n locations
atgcaagctntggaaatgatttctatacaaaagttagtcgtataaagcgactaacagccattctactaccatccttactcaaaaaccaaatggtcatagtaagcccgggaaaggtctatcaaccttcatttccctaatggtacaatcctaacgccatatgcacctatcacggtggcgtctcggggcactccatcgagcaatttgtagcttttaagcacaaagtacaaagtttgattgatgcaggatggcttacatttcaagaggatagttcaaatgtaaggactaatccactttcaaatcatggaagctcgttgatgaacgtggtggaagaatggaaatctcatgagttgaaacagataggggatgtgtcgactacaaaatgattcatattggaggcgttgcacgaggctgatgtgattaaatgtgatggtaataagggagatcaatgcttgat

SEQ ID NO: 191925 - DNA, 461 bp, Glycine max
ggaccttgctcttcaatgccaatctctgccgaccgattggcctgtggttctcccatggtatgcgctatttgcgctatggttataccattttgggaacagagactggaagatctttcccggaaccaccatggccaattggttggcgttgagagacggcaagagttccccatacgtcattgggatcagggcgaaaatctgagcctgccttggcgagaagttcctcgccgtgttggggcttgcgccaaggtgagcattgttggccgggtaatgccgggtcggatctggggcctgaagagccccgcatgtgggggcgtggacgttcttggttgggcgatcgctgtatcggaagatgccccatcgtgagctgaaaaactcgggtgatgttgtgcatattggtgggtaccgtgaggggtttgcggcggcttggccacgcatgtgttgaattgacagtatgggcatct

SEQ ID NO: 191926 - DNA, 188 bp, Glycine max
tgatgaactattgtgacgtcatatggccaccgatgaagccttggtatgagaaaccaataaggctcgaaaggaagaacacgaccaaaacaagttttgaggggctgtatatggcagcaatagtgagctcaaactccgaagaggtgaaaggaatcatcacgggtcataggcatgatcttgaaggatgagct

SEQ ID NO: 191927 - DNA, 300 bp, Glycine max
  unsure (1)..(300): unsure at all n locations
atgctgcanattgatggtttctgagtggaaaatcctaatttagttaagcctgaaattctgcagcatttgcaaagcagattcaaattaattgaagttatgtacgagcactgtagcttttacaaaaataagcactgcaacttatttaaggcanaaattctgcagcatctgtagcatctgcagtatgtgggtgtgtttcagtgtgtgtgtgtgtttctgtctgtgagtgtgtgtgtgagctcttgtgtgtgtgtgattctgtgtgtgtgtgtgtgtgtgagggtgagtggctgcctatgtatg

SEQ ID NO: 191928 - DNA, 365 bp, Glycine max
tatcttaagaaggggggggttgaattaagatattccaaactgttcccctaattgaaaatctatttttctttttacttaaattatgaattcccttaatgacaatcttcttatatattaattcaaatgaagcaacttgaatatgaatataaagcaataataaataaaggagattaagggaagagaaaatgcaaactcagttttatactggttcggccacacccttgtgcctacgttcagtccccaagcaacccgcttgagagttccactaacttgtaaattccttttacaagttctaaacacacaaggacaacccttcctttgtgttagatatactttacaacaagagactcacagtctcttaatcc

SEQ ID NO: 191929 - DNA, 308 bp, Glycine max
taattactctcggaatgaaaaagcctcttgatgaaaaattaagtcctaaaacaagatatttacattaattagccaaacaaatgatgattgtttttttacgattttagcagtgatgaaatgtgcgtatatttaacatcatctagacgtttcctaattccaagtagggggagtatcggacaaggtgagtaaagaggatgtaagattagattacagcatgagtgtgacactacaaacaaagagacacgtgtcctgttatgtggcaaacggatgtgaggagtctgtgtgttctcctgtcacgtgttgccgcc

SEQ ID NO: 191930 - DNA, 388 bp, Glycine max
attggtctgatgccacgtgcatgctcactatatatattctaacacataatttaatgtttaagccgcaaatgcattcttatatgtatatattttgcttctttcttttcggccttacataataatcacggatcttctaatatgtaaaaagtgcctctgatataaacaaacgaattcatgtatcttaaaaataataaaataaaatatatattctcattattaataacaaacattttattatgaataatagtaaaaaaatatattttcaaatctattaaaaatcatataatgtaaggacgtcaatctaatgatttgagtgtaatgtaattccttataatacagtgagttcttccgtattcataaatataactgtaatctttctcgccttata

SEQ ID NO: 191931 - DNA, 404 bp, Glycine max
  unsure (1)..(404): unsure at all n locations
tccatcattgtgagtacttgccggccctgctctcttctttttcagcttncctatttacaactctagttgtctcaccgtcggcattgcattcctcctcttctcgccccagtgtctccctagatcacatttatacttttgatgatactgattcgatgtagagcatgggatacagactagagtagagaaactctgactgactgtgtgtcttcttttgaccaaaatctcattcagttagttggggttcataactcaaccaatgctatgaacgttttccttcanaagagtttggtgattctataggagaatggacaaaggcaatatgaagctctgagcaaggcagcctctttagagtctgagattgcaaagtggacagccattacttgaacagtatagagaatgaaaca

SEQ ID NO: 191932 - DNA, 268 bp, Glycine max
tagacagcggagtccattaagtatatcgatagaaattcaactataagtcatgtatatgaaaaatattttgccttaagagagaaacaaaatttacttaaacaatctctaatctctatgtttcaaaaagtttattctctaactatatagatagatggaagacaaaggggtgatcatatcaaacaaagaatgttgacgtcatataaaacacatgtgatgatcaattaataaaaaaatttatttcctgaactaaaccttgatgttatgtata

SEQ ID NO: 191933 - DNA, 448 bp, Glycine max
acacttaaatactcacttaaaatccaccaaaatgttcagattctgctggttatcgattaccatatatgtgtaatcgattacatatggcaaatttcgaattcaaatcttaatagctgttgtaaatcaattttggccactggtaatcgattaccagagagtaaatttcttgtaaaaaactttgtaacttaattttcttggacaaaccttttgctaattcaattggaattcccttcctatttaatataccctttctaagactctatagactgtcttgatcatccatcttgaatatatttaattgctttgtcttgaataaagctctgagacgcatgtgatcttttggcatcatcagaacatcggcttgatcctttgtctaccagagagatgcgtccagctcatggacgatgagtacacaaatctttatgatgagatatctcgccgacattgg

SEQ ID NO: 191934 - DNA, 423 bp, Glycine max
  unsure (1)..(423): unsure at all n locations
ccccacatgtccgtcacaagggacggcagcctttaatcaaatgtgcaaatatgacatcaatttatattcttttccccttttacgttcttatgtcttttttatgcctttntatgtttttaactttttgtggtcgacaagggcgtttacctttgctcctacgtattcctcaattgtgatgagaaaatcaaacctacgtagttctttggtgaacaaagcgttttggctatttttatacctttttgcaagatatgttttttttaatgaaaggtcatttaaggcgttggaccattagacaatctttcgattcttttgaaaagtgagaaaccattaaggcatgggaccattaatgatttctttatttgtgaaagaagaacaaagtcacatattgattntatgcttgttagaaatctacacttaaccagt

SEQ ID NO: 191935 - DNA, 436 bp, Glycine max
  unsure (1)..(436): unsure at all n locations
tcaatgatatattgatntcgcgcacgccgacccgccttattattatcttatgtattatactacccccggttctatttataagaaacaagttgtagtgtaaaatgcaaaacaacttgtttcttaataataggatcggaggtagtataaaatattcaaaacacctgagcgcatgtggaaccttctgagttcattcactctattataaactgtgctgaatccaccattgtgattattctgttggtcagtttctaatgataacaaaattagccatttccttacaggccttcaattatcttattatgattgtctncaaatcccataactctgatgatcagcattctatctaactgttaatctatgagaataggtttacaccaacaggtgacttctgctccataatttcttaacttggtgattgacattctgaaattgcaca

SEQ ID NO: 191936 - DNA, 362 bp, Glycine max
gtttcaataatatgcataatgttgggtacattgaatatggaatttatgtttgtcatgtacaaggttatggtcacgctaaaaattaagtggctgtcatcgtgccacaagaatactatgttagaattgtattaaaattgtatactaatgttagatagatattattctgtctatatgattatatatgcatcaacatgtattgatatcgacttttttactctatatggagtctagaattgatgaatgaatattacaggaattgctacgatatatcacagattatgatgcagattactagaacacctatggagatgttcatcaccattataccaatgatcaagttgaacaattaatgtgatattatt

SEQ ID NO: 191937 - DNA, 451 bp, Glycine max
  unsure (1)..(451): unsure at all n locations
acgcaacgaagatgacacgacttgctctttgaagaagaaccttggatcgaatggagctccaatctctgtgaacatacttcttcacgtggttcatgcacctcatcttcttctgcttccgatggccctttccttatgtactcttcttgctcctttttcccgtgcattatttccactactcatgcaatgaaagacaagaccaataacgcaacacaacacaacacaacacagtgttttttctctcacactattgcttaatcaattaccttttgttgtacccgttaaaatatcgcttctcacacactaatatatgactattactatgttgttctaatgcgaactttctttggtgattatacggttatgcatggcagntattacctcgttcccactaacttgcccatagtctncctctctntattattttactatagtataaatattatagtatact

SEQ ID NO: 191938 - DNA, 319 bp, Glycine max
tcatttagatcccatgtctaattaccggtgcacatattcctgtatcaagaacctgaaaattcaagtgggacaatttaccaaacaaatgggtgaaagacccactatcagctttggagcccattcagataataacccatatgaggaatgcaaagcagtgttgacatgaagcctaagaagagcacatggagaacaatgagatgaaagagaccagtctgaggaatgaaggattaacaatgaaggagagaaagaagataagaagaacgaagaagagaaagaacgtcttaatctcttataccaaaagccagttatctcgagaagc

SEQ ID NO: 191939 - DNA, 290 bp, Glycine max
acgaaatatagatgggaatagaggtaacaatggcgggtatgacggaccgaggcagaaccgggttgagggagtaaagctcaatgttcctccctttaaaggtagaagtgatccacatgcctacctgcactgggaaatgaagactgagcacgtatttgcctgcaatgactacactgatgcgcagaaagtcaagctagcagcagctgaattctccgactatgcccttgtttggtggcataaataccaaagagaaatgttgatagaggaacggcgagaggtacatacatggactg

SEQ ID NO: 191940 - DNA, 417 bp, Glycine max
  unsure (1)..(417): unsure at all n locations
gctgaccatttctcaattccacacgttgagttntattcagaanattagagttcttagtgagagtgattctnctaaattctcgagtgattcaagaacaccctggctgtatcaaaggactttcacaacctttgtgtgttgccctcgctggaaagagtgattctttccttcctatcatctccacccttgttctttcataccacaattccagataatccacctctgcccaaaattatctcgtgaccataactcccatttcacacactcaaattaagtgattcttgagcctaaattgaatttcaaaacgagacctttcacctcgttttggaatcacctcatttggagccctgtagcttccgctattgccatttttatatttctgtccagccaccacttaacctacgttttaccatcccattc

SEQ ID NO: 191941 - DNA, 370 bp, Glycine max
acccatcttatgtggtactaggtggcggtcgggcgatggtgcacaactagtttttccacatccacaatgcgcgcataaacccaccatcccctgttgcccacctccaactgagctcacgtactcccacgtagcccatatcctcgtttctctcaacaccgggtccccatcaatcctcccaagcttccacaacatccaagcaaaacaacattcacacagcacaagctatcacagccaagcaaaacagagcaaaggcagaaaactctgccaaaacaccaaccaaaaatcacagcttttcccactcagagaccccagtaacaattccttcgtccaattcgtaaccgttggatcactcaaatgtactggagtcaca

SEQ ID NO: 191942 - DNA, 406 bp, Glycine max
  unsure (1)..(406): unsure at all n locations
cttcaattacttgccttttacatttaaggcacttancttcaaataacagcccacaaaactttgtattcttgaaaattacttctgttttttttattttatcaacttttatttactgcttcttgacaaatttctatgtggctgttatttgtcttaacactcttgtcatcacccaataatctcccccaaatttggggcaaattgtctttgaaccataatgctttcctacaacctaagaaaaggtagatggagattatgactntacaggctcaagtttcagctcaatcaatcaaaaacaagctcaacatgggtgcataggatttaatattcatgaacagggtaagccttttggctacgtgtctattgtaatcaatcatggccctcatcatttccaaaattcatgcattca

SEQ ID NO: 191943 - DNA, 348 bp, Glycine max
  unsure (1)..(348): unsure at all n locations
agcttgtcttttgcaattccaagacactattgagcttccaagtatatgacatgtcccactnttactnttcccatctaatttgcatcttgcaaaatcagaatcttgaaaacctattaagtttaaggaagtaccttanggatatcacaaacctacattggttgtgcccttaagatacttaatgatcctcttaacaatagttaagtgagattcctttggattggagagatatcttgcacataagcagaagcttagcatgatatctagtctacttgcagttatgtagagaagtgatccaatcatacctctatatcttgattcatccactnaattacctttctcatctaaatc

SEQ ID NO: 191944 - DNA, 357 bp, Glycine max
atatatatatatcatagaaaattataataacattaatttcacactatcacaccacatgttttgcacatattattatttgtagttggtatataatattaaaatggttgtataaatactaaactgataaagttaaaaattaacttaagaaaatgtttcttaaattaaaaaaaaaggttataaatgaactaaacaacccaagttcaagctttaatttttttatttaaacccaaacttttaattaaattcatgtaaataaatgagtcaagtttgaaccatttatttgttcaagtcaagtctaaattgtagtgctgactcaattcatttacactctaaaagacacatgtggtctctaacagc

SEQ ID NO: 191945 - DNA, 344 bp, Glycine max
  unsure (1)..(344): unsure at all n locations
agaaaatccttgccattttacttttctgtaatagaactgaatcttntataaaatataaccagaggattgcttgatgcaccaaactccgacatttcaacatgttagactgataaaagtagggatgggcatgcttacctcaacaattccttagcagctatcaagcatggtaatgatggagattttatatttgtctcacaacaaactattgggagaaataccacaatcattaatttaattgagtcgtttatcctcattggatgtgcatatatatatatggatggggaaatcccagaaaaggacagttcataccttccacctcaagctttcaggaaagatgatctcta

SEQ ID NO: 191946 - DNA, 439 bp, Glycine max
ctaagcttaacttagtctattcgcctccttattctacatttagaaatagatccctcatctaggatgggaaagatattctagatatttgcatctatgatgacgaagagaatgaaatattattgcataaatatgagcttatgaacccttcgaataatctgagatccatattggttctgaatatcaaagagttgagtgtaagtctgactaatattatttatcattttaagagtgtaatttattttaaaatatttattattgtaaaatatgaagaaatatgttgtctaacatttattcattagtatcaaacttacacttaattaattgtactgtattctaactcctttaatatggatattaaaagaaatcattctatcataataacatgtatagctaattgacttatgcattctcaaataagaaaaaaattgactatgggatt

SEQ ID NO: 191947 - DNA, 272 bp, Glycine max
  unsure (1)..(272): unsure at all n locations
tggtatcatcaaactttaaataccattggcgggaagcttgcttaagaccgcatattggcttctttaatctgcacaccatgtgttcctttccttaaactgagaaccccattggttggttcatataaacattctcctcaaaatcttcattaagaaagacagtnttcacatccatctaatgtagctccaagccataatgggctattaatgccatgataatcctgaaagaattctttcatgagaacggagaaaatgtctcttaataatcaatgtca

SEQ ID NO: 191948 - DNA, 318 bp, Glycine max
gaatacatggttgatggcagcctttactgccttgttgttggtatgtaatgtgaaaaatgctttgattagatgcactagtgttatctcttttaacttcagtcacatttaatgtaccagcttattaatcttgattaacttatttgctttgacaataaaaaacagaccaaataaaagggtaatgtctatcctacacatctttgttggtgtaattttccagccccacaacctggcatggtttcattttcctgaacacaacacaataatgccctcatttctcatacaaaccaaaacaacataatgagttggcgtattattttg

SEQ ID NO: 191949 - DNA, 327 bp, Glycine max
  unsure (1)..(327): unsure at all n locations
atttcaaatcccagttcattgatgaaaactcacgtttcattaagcccaacatctagtccaacatgtcattttaatatgtttctacgtcctgcacaaagtntagtaattcaaccctcttgtatactactgcaaaaaaaagacatttaatgatggttaatagatgcattcaacgacagttacaaaccttctttatatccaatattgttgaaacttgagacctttaatgatggttataagacaaccatcctaaaaaagtttaactttctatgacggttgtcattaaacaaccgttttaaaaagtaccatttttatgacggttattaactg

SEQ ID NO: 191950 - DNA, 437 bp, Glycine max
  unsure (1)..(437): unsure at all n locations
tcaactgactttcagctgattttagccttaatttcactttatttattagtcaattcaattaagaaagagaaatcccaaagagaaacgtccgattgctttttntggtttattttactaaaagatatttgtttgattattatattattattttacctctttttggtttccaacgtggttatggcatgacccaacggtcggatttcattttaacagaaattaacggatattacaaatcaaatgatcggtggaaatttattttattttttgattatgcgagaaaatgacttaagtaaatgactaaagtacgtcaaaagatggtacgaatagttaatgaaacgaatataaaagtacgcgaaacaaatggtgaccaccaatggtacatagaatgaattgagaagttcgattcgggaacttacatatgaagaccgagaacgacg

SEQ ID NO: 191951 - DNA, 420 bp, Glycine max
  unsure (1)..(420): unsure at all n locations
taaatactatatcagcaccgagcaatcgcgagacccagatgaatcagaactgaaaaagcttcaacttgatgaattgttgagggtgcaccactcccaccatagtctaattgaacctcaaaagcttcaattgcagaatatatatattcaattattattcataaacctatagagttaattaaataaatgaataaacatttcagaaagatagatagagataaagaatttagagagagagagagagagagagagagagaggagaagacttacggagagaaagagaaagcgtggatgtggtttcggtaacagcttggtgttgggaaacgcttggaaatgagaagatcagagatttctgtgcatcatggttacatattcttnttaaattattatgaaataaaagataattataatatttttttatac

SEQ ID NO: 191952 - DNA, 468 bp, Glycine max
tatcttggtgattcgagaactactccgattcggaactgtgaaagttcttctcaaactcacatatggaaaacactggctgtgaatgatgtgttacatgttccctctatcaaagttaaccttgtttctgtagcattgttgggaaaggttgggataaagatatcctttgagtctgatatgacaattatgactaagaataatgtatctgtggggaagggctattgtgatcagggtctctttgtgctcaatgtttcttaagtgattaatgagaatacatcttcttcttcttggttgattgattcttatgatatatggcatgctagattaatacatgttaatccaatgtatgttatgaaattgcgacgactacgtttaattaatatgcatgataaacaaattaagaaatttgaaacacgtgttgaatcataattaactaagaaaacatgtccttgtgtacaacgtgaaactgat

SEQ ID NO: 191953 - DNA, 343 bp, Glycine max
  unsure (1)..(343): unsure at all n locations
actctctggtaatcgattaccataaggctataatcgattaccgaaagcccaacatttttgaaaatggtttttcaaaggtgtaatcgattaccatgaatntgtaatcgattgccaatgcttataacgttaacaaatattatgaaaaaccttgtaatcgattacacaaaacatgtaatcgattaccaatggctctgaacgttgaaaatttaaattttaaatgaagagtcacaactcttcaagaaagataattgtgtaatcgattacaccaagatggtaatcgattaccagtgagaagttttagaaaatctgccaacagtcacatcttttcattgngattttgaat

SEQ ID NO: 191954 - DNA, 403 bp, Glycine max
tatccacggtccacgagcatataatcgccgatgagtatgcccaagtgtatgcggataaagatgctagaggaagggtgatcgactctttacaccaagaggcaaccatgtggatggatcggtttgctcttaccttgaacgggagtcaagaacttccccgattgttatccaatgccaatgcgatggcatacacctactccgcccccgaagagattcatgggcttctcggctattgtcagcatatgatagacttaatggcccacataattagaaatcgttaggaaacttgtatggtctctcataccttgactaggtacgacttcctctttgaaataaaatgagttggtcccatgttttactccataaaataacttgtgcatatcatatcactcctacatctcatctc

SEQ ID NO: 191955 - DNA, 385 bp, Glycine max
  unsure (1)..(385): unsure at all n locations
agcttaggttctaagagagcattcatccatatatcaattgttttcttttattccatctctattactggcctttccgcacttagctnntttcttttcttaaatagcagcacacacacttttattntatacttacagtttttttttaaatacttgttgcttattagatgattatgtgtgttgctcttttcttaccattacaagctgtcaccccataattccctcaaatttgggcaaatttgctttgaaccaaaatttccttttatgaatgatgctctcctacaacctaagacaaggtagaaggagataaactgtataggctcaaggttcaatcaaacaatcatactttcagctcaaaatgggtgcaagggataaatcaatcatgcac

SEQ ID NO: 191956 - DNA, 385 bp, Glycine max
atcccttgcgttctatatttcaaccagttgtgataaccgcctatgacaccattgctacttcccctaagttctttatcttttctgtccactgtatttcatgccttacggatcctataaagtatcttcatattagcttcaatgaaacctcgcgcaatgaaaggcgcaatggtttcctccgatggtgcacctctcatatggtatccaaactgtcttatggccaacacgggattataattaatacaacccctcgtccctatcaaagggacatttggaaatccttcacatgagcataacactcatgccactctttctttccactgtgggaaccaactaatggatgcgtccgtcatgcctgccaaaagttcttccgaaattgctttgtcct

SEQ ID NO: 191957 - DNA, 274 bp, Glycine max
  unsure (1)..(274): unsure at all n locations
gttctccatactngccagcaacaatatttttcccattcaattttaactaccacaaaataatgactaacaatagcaaattggaaaaaataacacaacagccaaacaccacagataacctacttgtccaatgcttctaagtacttctactttcgtatctcaaagaagatcttcatggagtatttattgtcatccaacttcataaaaccagacaagtacttatccaccttatcccactccctatttctcaccatatnctcannaatacctcatgtaa

SEQ ID NO: 191958 - DNA, 463 bp, Glycine max
  unsure (1)..(463): unsure at all n locations
cttgctccggatatntntactcctcatgtgttcccatacccaatctacgggttggaaaacaacctttttgcaccacttgtttacttgtttagcattgctctcattcgtctattcaatttgggccttgactctttcatggagctctttcacataatctgctttggcttgtccttccttatacttaaaactgaaatattatgcattggcaacaaatcaagaggagttagtggattgaaagcatatacaacctcaaaagaagaacaactagtggtgctatgcacaaccttattataagcaaattcaatgtgaggtaagcaaacttcccaatttttaagataaatcaatccatggagaattcggaattggtaaagtggtaaagtggtatacacaagcaagtttctagtataacacttggacacacatatattattttctttgaaanggagcactcatatctataaaa

SEQ ID NO: 191959 - DNA, 351 bp, Glycine max
  unsure (1)..(351): unsure at all n locations
gatcttcatcacctgcngctgcatgctgaacgaatgtgattttttgtgttgataaaaaaatacgggtttacgaaaagaaattaaagctattcttatactatntaatttaatnttaatataatataaataactaaggtttaatattcatgtactgtccgtggtgtataatattttaaatgattaactaatcccacatcacatttagtatgaattaaagttattattataaaagttaattaacaataataatcttattatacatgacaattataatccttgaatgatagtataaaatatnttatattactaatatatttaaaatanattcataaaattatgaccaatgtatta

SEQ ID NO: 191960 - DNA, 352 bp, Glycine max
ccttatctgagtgatgctgaagcaaccaatgtttttcataagtacctagatgaatgccatactgctaaatgcattatcttggcatcaatgagttcagaactccaaaggcaactttaagacatggacctgtatgagatcgttgaacatcttaagaagatgtacgatggtcaaagcaaggacgactagatttcagttatctaaggccctgtttagatcctcacttgctgcaaatgaaaaggttggaccccatgttcttaagatgattgatctcatagaacaacttgagaagttggggtgcactcttgggaaagagctttctcaagatttgattctacaatcactttctgattca

SEQ ID NO: 191961 - DNA, 422 bp, Glycine max
  unsure (1)..(422): unsure at all n locations
tgatcgcccatgatctgggacttgtangattcaatttgggcaaaattggatgatggaaagagtggttttcgaaatctgcactttatgcagaattttgctgttgaaatgtgcaacagaattttgtataagtgcagaaaaatacttgtgcatggctggttgtgaaaagggtagtacatatggggttgtggacatttgctagcagatcccaacggtcaaaatgtagacttatgtactagagacttccagtaaaatattcgagtcaatccaacggttaacaaattggaacgaaggaaatgttattgcggtatttgtatgtgaaaagctgtgattttgagttgtgtcttgggaagagttttctgcctttgccctgtttcgcttgattttgttagtccatgatgactggatgtggaattacctggatg

SEQ ID NO: 191962 - DNA, 416 bp, Glycine max
  unsure (1)..(416): unsure at all n locations
gcgctgcagctgacagcctttattcctttttttttggcnattnttcacactcctatgtcttaaccaattaaattcatatctaccattcatcatcaccctctttttttagaaaaacaacaccctattgatgaaacacctttattgagactctnattatgcatgtaatcatcaaccaacaaaagctcgttccttttctacaatactattggatttggaccaagtttttttgttgtaacctctccatgatcgatatctccaccatgaatngttgtaacacttgcttctaatcgtggttcgcacatttcacagtaatttgagtgttattcagtaatgtgcttctacactctcacaaaccctccagaacctgacaacatctctttcctaaatcccttgcactaacttaaatccaagtggaa

SEQ ID NO: 191963 - DNA, 381 bp, Glycine max
acacaaaatggaagtactaagtatttattacctatacttaacagaaaatacttattacactacaaaataaccataaattggaagagtttgaaacaatttacacaaaagttagtcatattcatcgactaacagagaccacagttgaaaatgaaatgaatgagaagctagggttagcaaaggaacaaatacgaatgcggttttttaagaaacccgttgttgtttaactcttcaataattgcagaaatgtcacaatgtcacattctaagacggtttttgataatcgccttagaatgtgcgtcgtaaaataaaaaatagtgattgtaattacaaaaatgtcactgcctcacattataagacggtttttgtataactgccttataa

SEQ ID NO: 191964 - DNA, 370 bp, Glycine max
  unsure (1)..(370): unsure at all n locations
tctaatattctccacaccttttgttgtgggccattcttggatggccttgatattctcaaggtccacttggaccccatttctaccaactacaaaccctaagaaaactatattatctacacaaaaaagtacacttctctatatttgcatagagggtgtttttcctaaggactgaaagaacttgcctaagatgtcctaagtgatcatctaggctcctactgtacactaaaatatcatcaaaataaacaactacaaatctacctatgaaatcccttaagacatgatgcataagcctcatanaggtgcttggtgcattagtgagcccgaaaggcatcactagccattcatacaaaccaaacttggtcttgaaagc

SEQ ID NO: 191965 - DNA, 391 bp, Glycine max
tttaaaggttatatgtacgggaatgatgcaattctaccccgctagggcattggattaaaaactccaagtagattgggcccgagatgcaagataacgccctatgggtcttatgagccttacggtagatttcaggcccatgggctaagtacgagcccacttatcattgtaaatattaaattaagagtttcattatctttgggccttgtatttacggttccgtaatgtatgtaaggtaccctataaatataagatttgtcaaccctcgtattttatggcacctatactatcttttgtagtatgggtagttttgaatttcaatgcactaagtggaaatctgatgtgtgtggctggaaataaatataattgaattggtcgatgcccaatccaatta

SEQ ID NO: 191966 - DNA, 343 bp, Glycine max
  unsure (1)..(343): unsure at all n locations
agcttagctattatgatgtatgtgtatctaagctctancttctttaggaatcttctcaaagaagcttctcaaggaggtgagcttagttattaaaggggtgtgtgtagctaagctctagcttctcaaggaagttttctcacagaagcttctcaaggaagttttctcaagaaagcttctcaaagaagctacctagtctataaatagaagaatgtgtaacacttgttgtaactttgatgaatgagagtcttgtgagacataactcanagntcaacttctctctctttttctgtcttaaatttcgngctcacccctctctctttctctccctctgtctttttcctca

SEQ ID NO: 191967 - DNA, 375 bp, Glycine max
  unsure (1)..(375): unsure at all n locations
ctttcgtgacacttagaaactcagctggcttggttatacatgacgacacgttatttgtgacttgtanganntgatttgngcaagattggatgagatgaagtgtgatcttcgaaatctgcacttatgcagaattttgctgtcaaaataggtgcagcagaaattttggctttgtgcagaaaaatgcttgtgtgtgattgactgtggaaagagtagtgcacaatgagttctggatgattgctagtagatcccaacggtcaaaatgtatgcttatgtactagagacttccagtaaaattttggagtcgatccaacggttaaaaaattggatcgaacgaattgttactgggatctttaagtgagaaaagctgtgattttg

SEQ ID NO: 191968 - DNA, 306 bp, Glycine max
  unsure (1)..(306): unsure at all n locations
gttatcttagtaagctacttggaaaaccttcttgaatcttggtagttcctactagcctaaaaactcttatctcaaagtagattaggactctcctactcaagaacggcttctatcttagagggatctacagctatacccccttgagatatcacatgccctaggaaactaactttctctaaccaaaactcacacttggacaacttagcataaagttgttggtccttaagggtatgcaacacaatcctcaagtgttcttcatgttcctgtctgtcttagagtataccanaatatcatctatgaatacta

SEQ ID NO: 191969 - DNA, 440 bp, Glycine max
ttaaaactcagctgtctatggccatgcgagacagaaaccaacatgttatctatcatcgccaagtaccaagaagagttgggtctagccacggcccacgagcatataatcgcggatgagtatgcccaagtatatgcggaaaaagaggctagaggaagggtgatcgactctttacaccaagaggcaaccatgtggatggatcggtttgctcttaccttgaacgggagtcaagaacttccccgattgttagccaatgccaaggcgatggcagacacctactccgcccccgaagagattcatgggcttctcggctattgtcagcatatgatagacttaatggcccacataattaaaaaccgctatgaagtttgtatggtctctcaaaccttgactagatatgaattcctttcttgaaataaaatgagttggtcccatgtttctac

SEQ ID NO: 191970 - DNA, 321 bp, Glycine max
  unsure (1)..(321): unsure at all n locations
actaactttatccccctcccttcgacgacttagcttctatataccctatgtgcctctgttggcacaactgtacacgcatcttgtatccacaatactcaaatatggtctgacactaagccatctttggcttccacctacaaataatgattgtttggatacacgaatgtttgatactgaccagattgcgatacgcaacttaactcgaatacgaatatatactntggtttgtcaatgacgcactacttcaccactattagtgctcgcccactgacctgacaatatgtcaatgctgaacgctctatgcctgaacttcgaacttac

SEQ ID NO: 191971 - DNA, 464 bp, Glycine max
cgagaatgagaatgagatatcactaatcaaacatgtgtcataccaaagtaaaaaaaaaggaacaaaggaatgcactatcgaaacgactagaaagcattgtatgcgtgagagatttgagatggattccaaattataaaagaaaggattgtataattcctctgaaatctgtttcaaattttcagatgattttcaaactaatttaagaacaaaacgaatttgtgatcaaactttctgagaatcacgtgaaatatttttggtacattcttttggatgaattacaaagtaaattaatatgggacgaaatctcttctatacacaatccatatcaaatctattccaaatacgtgaggaagttatatatatatatatatatataaccacaatctgaacctcatgttattattaatatttaaatttcctccctcttatgtttaattaaagactaaaattgtacctgacaaaaa

SEQ ID NO: 191972 - DNA, 443 bp, Glycine max
  unsure (1)..(443): unsure at all n locations
tgcacttatagcttctaacaaaatggagacataagtatggttcttctacttcaaaatgaaggggagtatattgataaggatgtgaacattgttctatccctactgtgagatgctaagaaattcttatttaacacattccttactcctttcgtgaaaggtctttctgcaaagccttatatgtagaaatgtcatctatttcttataaatccttgggttagaataatccaagaaaagtgcagaaattccttagatattctcttatgatgaaatcattgtaattcttagcaagacaaaaagaacatgtggactaagtatcttttgtccttctccacttgagggctntgtccttctccacttgtgccttcgtccttctccacttggacctttagcctgtatttcaccagtttcaggattctcatcaggtacattagaaagtaaatgct

SEQ ID NO: 191973 - DNA, 383 bp, Glycine max
  unsure (1)..(383): unsure at all n locations
agctntgaatgctctatacaatggagttgatcataatatctctagactgatcaactcatgcacagtggccaaggatgcatgggagatcctgaaaaccactcatgaaggaacctccaaagtgaagatgtccagattgcaactatcggctacaaaatgcgataatctgaagatgaaggaggaagagtgtattcatgacttccacatgaacattcttgaaattgccaatgcttgcactgccttgggagaaaggatgacacatgaaaagctggtgagaaagatcctcagatcttcgcctaagagatttgacatgaaagtcactgcaatagaggaggcccaagacatttgcgacatgagagtagatgaactcattggctcccttcaaa

SEQ ID NO: 191974 - DNA, 421 bp, Glycine max
agtctctatatatcgaaaagtcccatctttgattaacacactattcaacctcccttctagtgtgattgttgttaatttaagtggcatcacagctttggctcacagatgtagagtatttaacaacacttaggaaaatatccaacaatcaaagaatgatatggaaaaaagatactctacccacaaaccacccatgttcagaggtgccaaatatgattactataatgaacacatgaaagctcattctgagtccattcacattgacctatgggatatggtagcaaatggaaatcacattccatatgacgatgagttaaacgaaattcttagaagccaatatatggaggagtaaaaactcaaatttatgctcaactccaatgcttgaaatgttattgtatgcgccttatctgaagaagaacacacc

SEQ ID NO: 191975 - DNA, 311 bp, Glycine max
tgccaaccgctttggacgttccatatctcggcttcaatcccttggaaaaaactttataccacgcttaatcgaaagatttctccgccctaaaaataagtgaaacctttcgatggacaaaataatttctaacaagtaaacattttctccaggattaacaggctaacatatccataatctgcaaaaatcatttgttttgatttaatacatcaaatatttgatggcagaaggtttgcctaacatttaaggggacattttgccctttcgatctacagccaaaaatgactaattttgcacttgtttggcacgtttta

SEQ ID NO: 191976 - DNA, 63 bp, Glycine max
tattataaaatatatgtcttcgaaggttatcatgtaagattaggagaagtaggaaagttagga

SEQ ID NO: 191977 - DNA, 314 bp, Glycine max
ggacttaccttgatattaattccttgatagcgcctttgagtcttgtttccctttccttgttttgaagctcactacaagccttaaatgaaaaaccatgatatcaccatatccttaaggaattttggagctctggaattgttttgggaataagtatggggggtttttgtttcataggataacttgttttgttggctatgcttcatgatgtattttgggccatacttgatgtacattgtatcttggttaaatgttggacatgctgaatgaaatgctatttctcaacggctattgagcaaaaaaatcgaaaaagaaaa

SEQ ID NO: 191978 - DNA, 439 bp, Glycine max
acgttcagatactctggtcatcgattaccatatatgtgtaatcgattacacagtgcaaattttgaattcaaattttaatagctgttgttaatcgtttttggccactggtaatcgattacatcctctagtaatcgattaccagagagtaaatctgttgaaaaaaccttgttaacttagatttcttggccaaaccttttgcgacttcaattggaattcccttcctatttaatatacccttcctaagactctagagactgtcttgatcattcatcttgaatatctctgtcttgaataaatctttgagaagcatgtgattcatgtaatcctttgacatcatcaaaacattcagcttgatcttttgtctacaatctcccaccttttgatgatgacaatacctgaaatcaaaccaagctgtaacaagatgatatgcacgtcacac

SEQ ID NO: 191979 - DNA, 174 bp, Glycine max
ctaccacttgatttcgaatctttatcctgacaactctttgtgtaacgaagctcctgcgtatgaaagctaaatcctctttggatcttccctgatgactcatgtaatatattctatctattaatgagctttgaaagtcttttgctataactttctcctagatgcctttcctgtcac

SEQ ID NO: 191980 - DNA, 310 bp, Glycine max
tcacacatatatgtcttggatttatacctggaattctgcggcctcgattataataagcaaaagatttctaacatactatgatgccggacttgaaaaggttactgagcgaagacctataagtggatcctcctccaaatgctgaagagactatgaattatggctcatccactgaagctattgtgatcccctaaacaccttccatagaagaagacacagaattatcaaaaggtgacaaaacagacaaggaacaaggtgatgcatgcacctcaccagatagaagcctgaagaatccacatatagtgcttccatg

SEQ ID NO: 191981 - DNA, 386 bp, Glycine max
agctagtaactcctatttaacatttatgtttgttatttaaaagggcaggaagagggaaatgaattctcatgaaaaaaaaaaaaaaacttgagatagttgtgttaaaacctctgtttattttactaaatctcacctttattgtagaaatatattacattgataaaattcattgaaggactaggatctcatatagtgataatgtcattgcagagaatccattcctatggaagagacagatgggagagatcgattgctctatctgaagacaacttgatgttcaaataatgagtacatgacccatcatcattcgtggagagggaataaagattaatctcatagtcatctaaagtaccaaagcttacaagatcggaatacctcatagtctc

SEQ ID NO: 191982 - DNA, 360 bp, Glycine max
  unsure (1)..(360): unsure at all n locations
tagttgcaagaagttgntgtgatcaactcatccaaatcaatcaaataacacaagaattaccttaaacatcaattgtgagttatcgaaattccagggcattacaaatgtagcgatgttaaaaccattctttctagtagtgattattactactgcatatggtacatttgtccttgtgcgaacactattttacgcatcacatgtaatgtacttcaactaaaaaataagtttgtgtatgttaaatggttgtaaagtttgctaatatacacacactggatttttagttcaagtgcattaacaacttataactaaagattgtcttatagtacatcgacattatagcttgttaatgtactccaacta

SEQ ID NO: 191983 - DNA, 219 bp, Glycine max
tttttattttttggcaccttatggacctttccaacctggtttcgattcatgggagaaatttttcctgacgtaatgaaaaatttccgcccttatataggtaaaacctttctttgcaataatttctaaaattaaattttgcccggttcactgaaatataccaaattggaagaattcttgtttgatcaaaatcaatttttggtgaaatgtctccttacatta

SEQ ID NO: 191984 - DNA, 346 bp, Glycine max
  unsure (1)..(346): unsure at all n locations
ccatgttccttcatgggaagatgcccacgatatgagttntcagaccttaccttgcttcaacatactatacaccactaatacatatgttcttgttctttttacaggtgttgaggaaaaaagcccaacgtttcaagaacctcgggatttgaggtcaaatccttttcaagggggagggaatgatgcaatcctaccccgcaagggcattggatagaaaactcccagtagattgggccagacatgcaagagaaggccctacggctcttatgagccttatggtagatttctggcccatgggctaagtacgagcccacttatctctgtaatattagattaaagttcattattt

SEQ ID NO: 191985 - DNA, 438 bp, Glycine max
  unsure (1)..(438): unsure at all n locations
agcttagctattagagaggtatgtgtagctaagctctagcttctttaggaatcttctcaaggaagcttctcaaggaggtgagcttagttattagaggggtgtgtgtagctaagctctagcttctcaaggaagttttctcaaagaagcttctcaaggaagttttctcaagaaagcttctcaaggaagctacctagtctataaatagaagaatgtgtaacacttgttgtaactttgatgaatgagagtcttgtgagacataactcanagttcaacttctctctctttttcttccttaaatttcgagctcccccctctctctttctctccctctttcttttccccattgaacatctctccagcttctatccagactcattggtgggaactcatcttccaagctatcctagtgatgcgccgctttactctctctttgcttcg

SEQ ID NO: 191986 - DNA, 352 bp, Glycine max
  unsure (1)..(352): unsure at all n locations
actaagctggcttggttanacatgatgatacatgatttgggacttgtangatttgatttgggcaagattggatgagaggaagtgtgattttcgaaatctgcacttatgcagaattttgctgtcaaaatatgtgcagcagaaattttggctttgtgcagaaaaatgcttgtgtgtgattgactgtggaaagagtagtgcagaatgagttctggatgattgctagtagatcccaacggtcaaaatgtaggcttatgtactagagacttccagtaaaattttggagtcgatccaacggttaaaaaattggatcgaaggaattgttactgggatctttaagtgagaaaagctgtga

SEQ ID NO: 191987 - DNA, 330 bp, Glycine max
  unsure (1)..(330): unsure at all n locations
tctaatgntnnaaagntatatgaagtattatttaatgttgttttgaaatatctatactactgcacctacattttactaaccatattgttctttaaaatgcaagtatactaaactacattttatgaaaatgtgtgaaagtctatgaattcaagtgttggtccctgatatctatataatgacaaatgtatgacattgatttaaccgctcttgtatagtcagattacatcaagaactttgtattgataaggctagtgaaatgttttcctaagattttaagaatcaagtaatttttaattcaccacagtcatactgggttgaccacacgccaat

SEQ ID NO: 191988 - DNA, 412 bp, Glycine max
ttgagccacatcctgtctcaccatataccttgacccattgtgagaatgccaatccttaccctcggaagcaaaataaagaaaagaaggaaaattccccaatcaaagagtgggagaaagcaaaaagaaaagaaaggaatattcccaatcaaagaatgggagaaagttaaaaaggaagaagaagaatgatagaaagctcctgatcaaggatcgaaagaaaccagaagaaatgtgcagagaggtctttggaccatacaatatctgaacagtacagaattgtcaccaaatgaacgaaaaaagaatgaaagggaaccacgacctaaaatagtcttctgcctttgattaccaaccaaaatcccgtgcgctatcgaactttttttctcgccccgcacttaaaaataaaaaaaaataaaaa

SEQ ID NO: 191989 - DNA, 401 bp, Glycine max
  unsure (1)..(401): unsure at all n locations
cttactctaaatcagtcaaatggtgatctatccanctaacttgactaccacatcatttacatatactttgatgttttgcccaatggcatcatgaaaaatgagattcatagccctctaataagtggcaccaaccattntttagtctaaacgacatccataaccattcatatatcccaagagctctgagacaacagaatatcattttttgcatatctacaacagccataaaaatcttattctaaccaaaatgaccattaataaaggtaagaacaccatatttggttgttgcatcaactaacatgctagctatgggtataacatactcatctttagggcgttgtagtgtagaagcanagtttcatggtgaatcanaggtgattcaaanggtgtttgatgataac

SEQ ID NO: 191990 - DNA, 433 bp, Glycine max
  unsure (1)..(433): unsure at all n locations
tctctcccacaaacggaaagtgtattcattcaatggcaatatgacaaacttatttattatacacgtaggcacatttaaatgatatgcccgtatttaaattaataacacattaactcatgggagaaaccgtatttaaattaataacacattaactcaagggagaaaccgtatttaattaaattaataacacattaactcaagggagaaaagacaagagtgtattatatcactcatttatgatattgacttccaaaaataaaaaggcattgctttattaattatgctatgtaccagttataatatgtacgcatacttgcgtagatggaaattgctttctatatatattgaacccagcacccgtgcttctttcgcaaaacatanatcactttagtcaatcctcaagtcttgatcttccaaagagaattcaacaaag

SEQ ID NO: 191991 - DNA, 350 bp, Glycine max
  unsure (1)..(350): unsure at all n locations
acacccattgaggaagtactaaagttctaagcgattaatgcantaacctaggtaggactcgataagacagagactctagatcttgatccaaggaccgaggaaaaatatatgtaaaactgaatgaggaaaccagaccccacaaactaggattggaatagaggcaagcaacctttctaggagctctatttaaagaaattgagcaatcacttgtagttcgagtattgaatgctaatgctaatctatttgcatggttgttagtcgatatgtctggcatagatccaaactatcatttcaatgtattgtcaatatgtcgagatgctaaattggtagcaatgaagaagacgaaagta

SEQ ID NO: 191992 - DNA, 424 bp, Glycine max
tcgagcaatcagggctcctaatcacattatacccacatgtttccattctgagagctcctcgttcatctgagcctgagtctctttgtccagttcctcatacctcgttaaatcccttctcacagttcttatgaaaatgacaataacaataccggccaggaaagaaataaccataagtgaatgtaagattgaaaaccaatgaactcgggaaccctccatcttcaaataagcatcccaacgtgatggccatcttatatcacttttcacaaattcaacctcatatgggaatgatatcctttccttctctcttatcacttgatactcgtcaagctcaaccgggcaacttataggagaaagagtatcatacctctcgtgctgtgtcatgacttccagatcatatttaatactacaaggtacaacctgaaaa

SEQ ID NO: 191993 - DNA, 395 bp, Glycine max
  unsure (1)..(395): unsure at all n locations
gcttagcatttatggctttggcaacctctttgcatatcctctcacgtgcatcagtttatatatcccttccccagcatgcctgtgccacgtataactctgccaacgatcctgcttgtgctgttgattcatcttccccggatggagttgagtcgagagcttttgaccgcaccttctcctcaacatcctgcacctgttttgtcaattcctgtctttcagcaataacagcagccacactggttggaacaaagtccttcccacgatatattacaatgtaatatttattccttagcagtaaggtacctcctgttaatgcctgcgcanatgaaagaaaatcaaaccagaatcctgatatccaaataaacacaactactgtgttctctttctttaaantcatg

SEQ ID NO: 191994 - DNA, 350 bp, Glycine max
gcattatgtatttgcagagatgttgtaatcgaatagagtgggccttactgtttcagtcaatgggaagatgctttggccagcatatctacttactgagctcgatgatatcggtggaatgcatggaattggccggatcgacatggttgataatcggcttgtgggtatgaagaagccgtggagtttatgatactccaggtggaacacatccttgttgctgcaacacgcgatctggagtttatgacacttgatcgataacaatacagtgaaagattattagcccttaatatgctatgtattatttctggcaatggtttgaccgcttcggattcatggtgctctatgcaaaacac

SEQ ID NO: 191995 - DNA, 412 bp, Glycine max
agcttgccacccagctcgcccaggcgagcttgttgcttcctccataagcaacagccttctggaggaatcttctggagggcccaagtgggcctggttgctatttacacccccctgtttactaaatgcacccccctttctattttttgtaattctttttccgtaacgttaggaaactttacgaatttcgtaacgatacctattttccttccgcaaggttatgaatccttacggattatgtatttactcttttttagctttcgaagaagttacggaaactcacggattgcgcaaaaacacctcttttcgatttccgccacattacggaatttcacgaatcacgcaagcctgctttctttcgagttctgagacgtctcgggacttcatttatttcatgtcatcaagtaataatccc

SEQ ID NO: 191996 - DNA, 447 bp, Glycine max
  unsure (1)..(447): unsure at all n locations
aaatactaagctatatatattatttattctctcgtattaccctatagttgacgtatttgtttattattcataataaagacaaaaaatataactattaaatatacaaaacatgtgtgtgacatggttgatatataacattattccttaaatatgtatgtagttagggattcaatctcaatttcatgtgtatgaaaaaaaaatctattatgaaaggtcaattcctcaaatggatcttattacattggtggatgagtaattgacacttgatcaaggaatgccacatattcattaaaaaaaatcttgacatacctatttaagtttaattgttaatatgctatgaataanaaatctaaaaaagtcaatagtttatcataaattctatattaatgcattaaaatgtgcataaaaatatatagaaattaattaaaatgtgtcatcttcatctac

SEQ ID NO: 191997 - DNA, 403 bp, Glycine max
  unsure (1)..(403): unsure at all n locations
aagacttattacacaaagagggtgagagacattgacgtaattcaaagtcatcaattgtccccgaggattaaataagataaaagaatcttacagcaacacatgagaggaaatccattttaattattgggagaaaagttagatgacattagaaaacaatattatgtatttgttagagacttagaattggtctcaaaggaagaagaacacattagagagtgagagggggcattaattaccaattctcttccaagctcaatagcagcgtttccttaactatttggtgtccctgtactactgccacagaatacacatatnctcttgaacttggattgcttcatctttgtttatttctccatctctctctctcagacacacaagaacagcttctatgttccacactgaa

SEQ ID NO: 191998 - DNA, 400 bp, Glycine max
aaatccatacttggagcattagagaatctaatgtgcgtgatctaaatactttatgaatgcctagcacgtgcagatacattatctgttatgtctgatattgagtcgagatggcaattttccaacactgcgagggctatactcttatttgttggatacaactatatgactttccttctgaacatagaaatgtttaagatttgtttcatcgggagacttaatatcttttgcattcttataaaattatgaaattataaaatgcaaactttgtacttgttaatcaagaacaacgtgtatacattatccatataaaaacattatatgtatattgattatatacttaactgacgtataaatattatgtctttattgactatatgtttaatcacacttatatatatga

SEQ ID NO: 191999 - DNA, 387 bp, Glycine max
  unsure (1)..(387): unsure at all n locations
tacttaatactttttagtctctgctctatgtccctctattaatattgaaaactgtattatatgattatgtnaaatatcatgacctctcctantatcaataccaagttctgaggatgctagtttagaggcaattcatctgcaaattatatcaacatgaactgaatacggacgagtttgtcacacatgaaatggagttcaaggttttcagaaacactattgatttattgattgatggactgtgtcttccataagtgaaatacatcacttgataatattgagagttgaatattcattacaccaaccaagaatataaataataccaataagaaataggattcctacctactgatataacacatatattcagaacatattatctaatgcatt

SEQ ID NO: 192000 - DNA, 364 bp, Glycine max
  unsure (1)..(364): unsure at all n locations
attatntacattccaaaatattgatatcaccgggctgccatggaagttatattttcttccttatgcttgcttcgaacagctcttttgatattgtattctaccatatgaattttgtattttgtcataatactttatgcatcctaagcatttctaagaaattagtctgacggtaggaagttcccttgattgtctgactgctggagcgatttgtaaaaagaagacaacatcttgtgggccccaattcttccaccttgaatgtgcgcattttgtgaaaatttatttttcagcaatggggggataaaacactgtgttacttttgcttgagttttggtctgctacaacaattgttggttcaatttgaact

SEQ ID NO: 192001 - DNA, 255 bp, Glycine max
  unsure (1)..(255): unsure at all n locations
gaagatgcgccttttatgattggtgctcctttntattttattcatttggcatcgaataaagtaacgctcccaaattttgacaacctaatatttttttcgagtcatttggcattggtgctccttttcttatctgacatatcaagcgaaaaagagaagggccttatcatagctaagaatacccccacaacccccctgngttacttgtgttatctcacttattntttggaccatttttgtatcgggttcagttttgct

SEQ ID NO: 192002 - DNA, 333 bp, Glycine max
ctactgaagaaattttgtaacttttaaaacattcttcttactcctacatgatgatgcatgatgcaaatatgaaatgatagatactaagatgcaacacacacttcaatgatcaatacaaatgccactcaagagagttgggcatgtacaagacaaaacttcttcaagcttcaaggctaagtcttcatgctgctcccccttgttggatcgagtggccttagaataattaagaagaggggattgaattaattattcctaaacctttactaattaaaaatttattcgtctaaggctcttactaaattgtttagagaatgacgagtagaagagatactt

SEQ ID NO: 192003 - DNA, 321 bp, Glycine max
  unsure (1)..(321): unsure at all n locations
acaaaaatcaattgagggagccttcgccagtttccccattgaaaacctttattcatacctttcaaggttgggaggaaggctaacgacaaattagagaacttataaaaactaaatccttatttgaaggcgtaggtgacaatcatagtgaattactaaacaagattggtagtgtacttaaggtcattccagatactccctaagcctcggagaatacttccaaaatggtaacaagaagtacctccaaattatataatgttattaatgaagatagggaccanaactcagataacacaactgagataggatcagtgtcagaaaaga

SEQ ID NO: 192004 - DNA, 347 bp, Glycine max
  unsure (1)..(347): unsure at all n locations
ttaatgctagccagaatgggtgcttgttggcttggcatggcaatgggcatggtgaacatgaacatggggagatgctangtgcacccagcaacttttatgaatggacaattttgtcctttaatagaaaattataaaaagcccaccccgctctgtggaagaaacttttctgctgctgctcattcattacgcgaagcttggtctccgttctccgcgaactgcttcttcttctccggcaaggcaagcgcgaacctcgtcttcttcttctccgcgaacgacgttagtctccctaactccacttgcttgatgatacaacatgttatacgtgtgcagtgaaacttagatattac

SEQ ID NO: 192005 - DNA, 312 bp, Glycine max
  unsure (1)..(312): unsure at all n locations
tttttttttttttataatttctatgacttgattatctcttggtagggtatttcaaattatgtgagaattgattaagggtttgtgtatgtactanaacaccacagtgaaatttttgtgattgatgggtttgaaaactttntgtaagtttgttctaattttttaatgtgttgtttacacaccgattttatcatggaaataggagtgtagttggtaaggttctatanctaataaagattggtcgaaatgataagaatataatatagtaatatctcacaagggtatgagttcgaattgcgctactgatatgatgac

SEQ ID NO: 192006 - DNA, 447 bp, Glycine max
atatacaaactcaagcttatcttcaagctggattaagaacgagtcaactgattctgaaataattttaataataataatgaaaaccagagagaaagtgttgtctcctacagtatccaccttgtagcgttcaccaaaagttgattattatttgaacatgctctctctctctctctcaacaccgattgcagaatattacgaacgtcatgttccatcgccgttcagatacaggtatctgcacaaccaccacttgtcactcaaactccattcttcttattcttattcttcttcgaagacagcgtcgtcgtcattgtcgattcgtttcatttaacgattttcacaaattacaatttacaacctacagttcttatcttcggatattcatgaattagtgtaaggtgtccgcaatctattgtggacactgagcgtgcgtgttaattgatatgcatg

SEQ ID NO: 192007 - DNA, 368 bp, Glycine max
  unsure (1)..(368): unsure at all n locations
agcttccatcaatcatgaaagtagttgcttgtaacaacaattacaaaaagattgatcatatcgggttctttattctttatttgtctatttagtaggatttctttgtaattaataaattatcccttttaatttatttgtctaccaacattgaaatccttcattcatggttacactntgtttagagattaagaaagagtttagatttagaaatcttttgtgcaaaaagttaaactattttaataaagtgttcattcttcatttgttttgacctcttaattattttttatcactgcttaatattagtttgggtagcaatgacccatgtggaatagaccacgactatggatcccgggtggacccacattcct

SEQ ID NO: 192008 - DNA, 427 bp, Glycine max
  unsure (1)..(427): unsure at all n locations
gtacaaaacttgcgaaaagactcaataaattntccaaacatcatattgaactaaaagaaatccatcaatctaaagatattagttctttgaaaaaaactactcagaacaatgatgcttatatgaccttgaaaaaggatctttgtttggaaaatgaaaagttttccaaagaacaagatactttaatgaagggctttcacattttggtacgtaaaattgaagttctacaaaaagaattaaaagaactcactgaacttcaagaccacctttgagttaaaagaaaggtataacctcttgaaagagtgtgcaaaagctcacaaagattataaagtcttgaaaaatagtaaacatgatctttgggtagaaaatgaaaatcacaaaaggctgtgaaattcttaaaggataagcctttanagaatgaagtcttaaa

SEQ ID NO: 192009 - DNA, 420 bp, Glycine max
  unsure (1)..(420): unsure at all n locations
acagccggcctggttaactaacaataataataataataataactttattttatcaaatcttatcttatccagattttattccatctagattttattttatctagaatttattccatctagattttatttcggccagattttatttcatccaatcttatcttagtttggccagattttattttatttcgtttatgggcttggacttaaaatagatttgtaagctttagggctgaggacctaatccatacantttttaatattatgctcttnttattntctttggatatactntgtgctntaacgacttgaattcaatatgaatttgttatncaatatnttgggattgacattacttatcccgaaatttataagtttcttttttaatgtagatttcactagggtntaaaataaataataatc

SEQ ID NO: 192010 - DNA, 396 bp, Glycine max
  unsure (1)..(396): unsure at all n locations
acatcaaattttcctaagttatcttttccattattcaatacaaaacatttacaccaaagatattgaaatgtgagatgtttggttttctgccattgaacaattcatatggagttttctgtaagatgggtcttattacagccctatctaaaatgtagcatgcagtgttaacggcttcagcccaaaaatattgtggaagacgtgtatcatttaatatagttctagcaatctcttccaaagatctatgtttccttttaacaacaccatcttgttgaggggttcttggtgtanaaaagttatgctcaatcccatgcttatcacaaaataattcaaattcttattttcaactcaccccatgatcactctaatagattaatcttggattttcttatttgatga

SEQ ID NO: 192011 - DNA, 404 bp, Glycine max
  unsure (1)..(404): unsure at all n locations
agaatctaatattgacaaccacatcacaagcacatgcacatgaggatcaaaaggtcttttaagggtgtaatggggccaacgacaaggtatatgatagtatgggatggtagctaanacccaaaggaatagaggagcaatggtgaataagtgggaagtaagaaaaagtagtaaaccccaaaaccaaaattaaaaagtaagcccataacataatcaactaagtcttcaaccaatccaagtcttcaaaccaagacctcatctattcaatttcatcattntnttaaatttgttttgaacgtgaacaatagcaattgaaagcactctgaaaataaagcaacatttatgcaatatatgtatatacatcaagcatggccaaaatacatcatcaagcatggccaacaaaaaca

SEQ ID NO: 192012 - DNA, 449 bp, Glycine max
  unsure (1)..(449): unsure at all n locations
ntaactttacccggcctgtacgctcttttgatgtgaatctacatataaattgtgtgatacgaatcaacttatatgatcatctcgtaatcaatcaaaggaaataagaggaaattaaccctaactgcaacctattggttaaaccaaagttatcaaaaagaacttgaccttaaatgtgacctaccggtagaaccaatcttatcaaatagcatgaccctaactgcaacttgccagtataactaacactattaaatttttaacccatgaacaaaatggaagctctcacaatggaaaatacaccccttgtattaatattcagattactttaattttccattacacgacttcctatctataggaaaattagaaacaaatcataatcttgtatgactaaagataatgataaagtctcatagaggaaatagatcttaataaatatgatcctcatcata

SEQ ID NO: 192013 - DNA, 223 bp, Glycine max
ccaccgtaactgacaatggtaactccacagaagacgcatactcacagtttgccgctacatatgagctggacactgcttccctttactgactgtcctaggtgcacgcttctccttcttcttcttcaacagccgttgcagacgaatagctgctacacgggcaccttgtacaaagcaacgacatgctaacgaagactgtctcccgacaactgagatccttatagaa

SEQ ID NO: 192014 - DNA, 460 bp, Glycine max
taagcttcctactccgacatcaatggcggataggtagcggtgcttacctcgacgaccgacgctgacaatgctccctcgacagtggacgctggttcgtggttcgtggctcctcttcacggcaacacggctcctcttcacagaggttcgtggttcgtggctgctcgtgcttcgtcgttcatggccgatgaagaagaagaagaatcaaacggagaagaagaagaaagtagcgcgaggaagaagaaaaatggctctggggaagaaggtagcgcgaggaagaagaagaatgactctgtgcgaggaagaagaaaagaactgctgggtgaaaggagagagagagtatcgggagagagagagtcatacatcttttttttaaaataacccatgggcataaaagaactgttatctaaagtgctgggtacaccatcaaaaatgctgggtgcacctagcagcactctaatct

SEQ ID NO: 192015 - DNA, 364 bp, Glycine max
taaactgagtttcgtccgtagatccctcttgtaagactagactcagctcaagcagcttacaaaagtttagcctaatttagcctaaccttcatccgcagatcccttttgtgagactaggcctagactaaacaacattattgtaacaacataattaaaaccaaaacttaatccgcagatccctcttataagactaagtttcgatcctgcttcaatcaagttctaaggcaacaatacatttcccaatgctaaagtcacctaactatgcatacaaatggatgatcagaccataagcatacaaacattaagcattgaaggaagcattgaacacaaaaaacataatcaattagatattaggtatgtacat

SEQ ID NO: 192016 - DNA, 348 bp, Glycine max
  unsure (1)..(348): unsure at all n locations
gctcacctgcttgagatgagaacctagagctcaactacttacccntatatgagctaatcgtacccgccatgaatattccaggaaaatactggaaaaaagtccctattacaaagatgactacaagtgccctggagtactaggctataaccctataccactagaatggccttgaacaaggcccaaagaagggaaaaaccgactgtaatagttactaagaaagtggagccaccttacccatgggataaagattgccctaagtcaagagaccctaggcttttggagctctaccaacctttgggttttatcaaaccctaggggtggatgctccgaagatcttgggacacatct

SEQ ID NO: 192017 - DNA, 456 bp, Glycine max
  unsure (1)..(456): unsure at all n locations
gttcantgaggaagaagacgttcatagagatttattgtcttgtaaggattgattgaataagtgaagaagtgtattgaaaagcaaatcaaagccttgcatttatagactcttcatgtctggccaagaggaccatgtgaaaaagttataactttgagataaacttataaccaatttgaaaaagtcaaaaaccatttgaagagttacatcttttgatttattcagaaacggtcactggtgatcgattaccaaatcagtgtaattgattacacaaggcttttatgtgaaaggacgtgactcttcacatttgaatttgaatatcaacgttcaaaggcactggtaatcgattaccacaacatagtaatcgattaccagggttttgaaagtcaattggaacgttgtaaattcaatttgaaaacttttaaaacattttgctactggaatcgatacaacatctgg

SEQ ID NO: 192018 - DNA, 425 bp, Glycine max
  unsure (1)..(425): unsure at all n locations
tcctttcataaatgtgcttttctgtttatgctatagttctgcttgttgtatttgtgactattaaagttctttttctttgccatattggattangaaactttcctgcgtttgatgaagtatcttgcttgctttgtataattttactgcacaaaaacttatataataaaaagaaagataaaagaaatgattaatgtggtaaaactaggtaatgttgtaaaattattgtaatttttttatatgaatagtagtataattttacggtaagtgtccccttggtttaactgatgtggaatcgaagagattaaaagacgtaataattgtttactattagattgtttaataatgattagatatgacaaataaatctatattagcatatatcactggaaacctatgatcagtgtgacacacaaataaatctacaa

SEQ ID NO: 192019 - DNA, 282 bp, Glycine max
cacgtgcttcagtagatatatccacttcccatcatgcctgtgccacgtagaactctgacaacgatcctgcttgtgctgttgattcatcttccccggatggagttgagtcgagagctgtgcaccgcaccttctactcaacatcctgcacctgtgttggcaattcctgtctttcagcaataacagcagccacactgggtggaacaaagtccttcccacgatatattacaatgtaatatgtattccttagcagtaagggacctcctgttaatgcctgcgcaaatg

SEQ ID NO: 192020 - DNA, 465 bp, Glycine max
  unsure (1)..(465): unsure at all n locations
ntngtcttgtgatttcactttatatatagccacacattcttgaaagatcgcattatgtattgcagatatgtggaaattgagatagagtggggccttcctgtttcagtcaatgggaagaggctctggccagcatatttacttactgagctcaatgagattggtggaaggcatggaattggccggatcgacatggttgagaatcggcttgtgggtatgaagagccgtggagtttatgatactccaagtggaaccatcctgtttgctgcagcacgcgagctggagtttttgacacttgatcgagaaacaatacaagtcaaagattcattagcccttatatatgcagagttagtatatgctggcagatggtttgatccgcttcgggagtccatggatgccttattgcagaagatcacagagacaacaacaggttcggtgactctgatattgtactaaagttctgttact

SEQ ID NO: 192021 - DNA, 297 bp, Glycine max
  unsure (1)..(297): unsure at all n locations
accaagaatntgtggcttatcagtatggcctaactcaatacacttttatggtccttttgaccatgaccccacctacttcttgttcttcattgctctccaatgaggtaaagaacatcattgtacttacctattcgatgcttaacctattaaaattccatttgtttttgcttgaccccaagagaacaactatttatttcaactggtggcctgctgtgaaagacaccctttttttcaaaaggttttcctttttacctattgcaagccaatgatcatttatcaccagatcccattgatcaa

SEQ ID NO: 192022 - DNA, 299 bp, Glycine max
ccttatttttggatttccccaggccccttttcttagctaataaagcatgacttctatgtaataacactttgtgctctatgaaaactcacaaaacctttttatgaatacagctgccaccataccgctttgatgatttagaactttagaactgacttattagctctagatcgaagacctaaaaatgtctgacaactatcatgaaataaaataaaacaacacgctttaaaaacaaaagtttaaataaaaaaccaaatttttcttttaatcaggtaattacttgatgctaaattttgtacttt

SEQ ID NO: 192023 - DNA, 404 bp, Glycine max
  unsure (1)..(404): unsure at all n locations
ctgcagcttacaagcatccttcttgaagtttagtgggccttattattatcctcttgatctccctatatgaaacttcagctcttccatttgtttgtggatgatagtgcgatgctactctatgtcaaacatcataatgttggaggacctttgagagttgaacattacaaaagtgtgtaccttcatctctaatcaagagtctaggcactccaaacttatcaaagatgtttctctataagaacttaatcaccatctttgcatcattggttggactagcaattgcttccacccactttgagacatnagccactgctaccaagagaatatccgtgccatgaaaggatgggtaggggaccaacaaatcaattccccaacaatcaaagacttttacgtcctggatggtcagt

SEQ ID NO: 192024 - DNA, 305 bp, Glycine max
ataaactcttcaacaaatctccttcaaaaagcttattaacatctatggaaaggcaccatttctaccatagcacacaaacaaaactctcacgtggtaagcttgacactagaaaaaagtatatgaaaatcgatccagctgttgagttaccctttggaaccaatcgagctttgatctatcacagagccatcatttatattaactttatcacccatctacaacctatacatgctataagtggtaagaacaatcttatgtggaattgtggacagggctcatatttaagggaggggataataatctacaat

SEQ ID NO: 192025 - DNA, 356 bp, Glycine max
  unsure (1)..(356): unsure at all n locations
agcttgaacttgacagttttactaaatgattttagttgggatttgggttgggccttaaacggatcaagccataagcctccgacgaacaacccatcctacttcctaccctacctatgatcatttcaaatattgatctatgtactttataaatgttaactgacacatatttatntattattaatatgacaaatggtgttagaaatcatttaattgctaccatgcttaatttattaaaaaaaagaattaatgtagtacacagtcaagtcttaaattgatcaagaaaactgaagtcacatatgtttttataagtagggaacagagtatttcaattaaaaaaactaatatcatggatttta

SEQ ID NO: 192026 - DNA, 440 bp, Glycine max
acctggcactacttgtgcaccgctagctaatttctataaaattactttgtttattggaataaaatgatcaaacgcttaaattggatattcaatttggtgggtcactaaagctcaatgtcttctaatggctcgtgtaacagatcatatggccaacttcatcaacttgaactaagtttccattgatgcaccacatattgaagaaagatgatgtagaaattttttaacaaaattagagaacaaatgcagaaaatagataacttaaccaaggtaagttaacatagttaacattaatgaatggtctttgctttttaaaaactacagttaggggaggtcaatgcaatttttccactaacaattatacttgtggtaattatgaaactaagagttatatctctacatagggaatgaggttctttcttttaatgaataatgcatttata

SEQ ID NO: 192027 - DNA, 351 bp, Glycine max
  unsure (1)..(351): unsure at all n locations
tcgttgataccggtagttgcgctcgcttgtaataactctgcagtgtataaacatggatttaaagaatgaataatatccatgcaaaaggtttacataattttctctctcatagggaggtgtacctctccctcgaagaaaaggttcactcacatactctctcaccctcttctctctcttccctcaacctctgctctaacatggtggctgaattaatcattgagatactatatgccacttgtatgatacattattctatagccacatctcttcctgcatggtattgatgtattctagagagacatgtcaagattgggatgtgctgattatcatgcatgtngctcatattttaat

SEQ ID NO: 192028 - DNA, 394 bp, Glycine max
  unsure (1)..(394): unsure at all n locations
tncttatgaagattggtaaacagcgagagcttagctactcatacntntttaatagctaagctcacctgcttgagatgagaagctagaactcagctacacaccccctataatagctaagctcacacccatgacaaaaaacatgataatacaaaaaaaaaaggccttactacaaagactactcgaaatgcccgaaatacaaggctaaaactctatactactaaaatggccaaaatacaaggcccaaacgaaggaaaaacctattctaatatttacaaagataaaagggctcatacttagcccatgggctcgaaatctaccctaaagctcatgagaaccctatggccttcccttggatctctagcccaatctacttggagtcttctacccaatgccc

SEQ ID NO: 192029 - DNA, 311 bp, Glycine max
  unsure (1)..(311): unsure at all n locations
agctttngagaaattcatatggtcacatcttttcacacagatgttatattaaggcgcatcgcatataaagacgctcgaaaatgaacaacggaagctctcgagaaattgaaatggtcataacttttcacactgaggtccgattcacgcttataatatattgatatgctcgaaattaatcatcagaagctctcgagatattcaaatggtcataactnttcacatggatgtccgattcgggcgcataatatgtcgagaggctcgaaattgaacaacggaagctcttgagaaantcaaatggtcataacttttca

SEQ ID NO: 192030 - DNA, 432 bp, Glycine max
cgaatcggacctcagagagaccgccattttcctctgaatttctcaagatcattcgatgggcaattctgagcgcctcgatatgtgatttgctcgaatcggacatccgtgtgaaaagttatgaccatttgaatttctcaagagcttccggtgctcaatttcgagcctctggacatatcatgcgcctgaatcggacatccgtgtgaaatagtatggccatttgaatatctcgacagcttccgatgttctatttcgagcgtatcgatatattataaccctgaatcggacatccgtgtgaaaagttatgaccacttgaatttgctcagaccttcagctgttcaaattcgagactctcgacatattatgcgcccgaatcggccctcgtgtgatgagtatgaccatgtgatttcccgagagttccgacgctaatttcca

SEQ ID NO: 192031 - DNA, 312 bp, Glycine max
  unsure (1)..(312): unsure at all n locations
ttctaaagtctttaacaagcctaaaacaatatacttggccttcatttaacttgtctttgggctggcggccacgatcaacaaagtactttcgacacctattatatgtntgattgaccaatgctgttatcggtatgttgcgacaatccttcaataccttatatatacattctgagaggttcgttgtcatgtggccatatcgatgtccttctctattcataagccatggtccatttttctttgaaatgtgatcaatccatgttgctatagctcgactcagtgtgatggaatttttaaattttgatcaaaatatgc

SEQ ID NO: 192032 - DNA, 374 bp, Glycine max
  unsure (1)..(374): unsure at all n locations
aacatagtactttcgacaactactatatgttgacttgaccaacgctgttattggaatgctgcgacaatctctcaacaccttattcacacattctgataggttggttgtcctgtgaccatatcgtcatccagatgtatcgtaagccatgctccatttttcctctgaaatgcgatcaatacatcttgctatggctggactcagttgacgatatatctctaagttttgatcaaacacatgcttgcaaagagtgtacgttgcatcaaatgtgttatcatcacaatttgtacgtagacatcaaactcacattaaattaatgtgtaaaagaaaccttacncaatttcttgaacatctctttttgttcacgttgttgaatt

SEQ ID NO: 192033 - DNA, 330 bp, Glycine max
  unsure (1)..(330): unsure at all n locations
ttagtttggcaaagaagttatcaggaaacactccaagcagacatgtgaagagatcttgaaaaaagctgtgattgggtaccaatccatacttctttaatgacagcttccattttagaatagtttcaacaagtntagaaattcccgatctctgcaagttaataatagaactatatatgaatacattgttctttacttctaaactacaagtatcaatatgaaagatatatgtgataatctggtatttttgggataaattctacttataagaggagaaaatgaaactaaggtaaaaacttacatacagtaccatggtatggtaccataagtact

SEQ ID NO: 192034 - DNA, 394 bp, Glycine max
  unsure (1)..(394): unsure at all n locations
tgacactttaatactaatcttgtttttcgcgccgctatggacgatggatctttgagctttaatgaggtcctttaatggtgattttccaccatggagatgcagcataatacaacagttatgatgtgataggaggcgccatccactangaaataagccatggaagaaagagcttcaccaccaagatgagccctggatataaagcatggaacgatgcttcaatggaggaaaattaagagggagaaaaagagagacgggggagcacgacattgattgaattaaagagggagagaagtggactttgaagtatgtctgacaagactctcattcatcaaagttacaacaagtattacacatgcttcttttatagactatgtagcttcctgagaacattctt

SEQ ID NO: 192035 - DNA, 357 bp, Glycine max
  unsure (1)..(357): unsure at all n locations
ttattcaaattctctaccattaggcttgtcttaattaattagtaggttaacttaaataaaatctaaaatgtactgtggatcataaagtagattcaatttcgcttaaatgtactatttctttattgaacgtataaagataacctgcagttcatcgactttgtggctgaccaaggattgttctacctaactgcagttngtgcaactgtagaactatcttttatggtttaattaaactttcaatgattttaatttcgaattttgtaatttaattatagggtttggagtaataagttattttaaatgaacaattatcttatttacttcataaagtttttataaattctaaattatataatt

SEQ ID NO: 192036 - DNA, 407 bp, Glycine max
tctgttatacctatcatatttcgccaccccccgatttgaaatcttttaagtgatgattaaccttcaacagttatttgaagcataatggatgtaactaccatattattttcattttgtccttcttgcactgactttctctttgatcccaatagcaacaatataattggtttaattatattatataaaggcaatatactattgctttctaaaatcccatacatattgctaattcagtttctctgtttcattatcttaaaatattctccctcaaagacatttgtcatttgtcagatagactaagtctttaagcagttacttattgggctaaacagataatatagagattgcgagcccttttaactatctaagtcttgctctaagaatggaaggattttctcgttaatatt

SEQ ID NO: 192037 - DNA, 293 bp, Glycine max
aaaagtggattaatagcttctcatccttaaagtgtgcgcccatcttgcggcaatacattttgaaatgggtcttgggacaagtcgtccctttatatttgtcgaaatccggtactttgaacttcggggggataacaacatcgagtactaagcataaatccgtcatatctgcgaacggatagtcgccaaatccttctacggccctcaatctctcctcgaggagatcgagcttcctcctttcctcagttgccgggggcggtccttccatggacaaaactattggttgtgctgtgatg

SEQ ID NO: 192038 - DNA, 382 bp, Glycine max
tataccccctattgacgtgcttaagcgcatttacttaagtcgtttctcgcttaacttaaaaataaaataatattccaccgaacgtttgaattgtattatccattaacttcagttaaaatcaattccgaccgttcggtcgtgccgtaaccacgttggaaataaaaaaaaagaggtgaaagaataatataataatcaaaaaaacatcttttagtaaaataaagcggaaaatcaatcggaagttttctctttggaatttctcattcttaatcgaattgattaataactaaagtgaaactaaggctaaaatcaactcgcctagtcaagctcgtccacaaaaataagctttggaagttcgtcatttcaattcctcactaagtaaaat

SEQ ID NO: 192039 - DNA, 329 bp, Glycine max
ccagttccgctcttgattatgacagccaccgctttaggagtgctgaacaccagcagcgctttgaggccatcaggggttggtcatttctccgggagcgacgcgtccagctaagggacgatgagtatgccgatttccatggggagatagttcgccggcggtgggcatcactggttacccccatggccaaattcgacccagacatagtcctcgaattttatgccaatgcttggcctacggaggagggcgtgcgagatatgagatcctgtgtgaggggtcagtggatcccgttcgatgcggatgctatcagccagttcctaggatatccttta

SEQ ID NO: 192040 - DNA, 410 bp, Glycine max
atcgttcgcgtgtatgacatccactccacattgtttgaagtagaggagaccttcaatcctattacgcaacgtggtggacaaaagtgggcagttaacttgaacggtcattattgtcaatgcggaaggtattttgcgcttcactatccatgttcacatattattgctgcttgtggttatgtgagcctgaactactaccaatatatagatgttgtttatacaaatgagcacatcttataagcttactccgcacaatggtggcctcttgggaatgaagcggctattcctccctctaatgatgcatggacacttatccctgacccaaccacaattcgtgcgatatgtcggccaaaatcaacaaagataatgagtgagatggatggtgtcgaaccgtctgagcaccgaataaaatg

SEQ ID NO: 192041 - DNA, 364 bp, Glycine max
  unsure (1)..(364): unsure at all n locations
agcttgtcctattatgtgaagacgcttattatntgaaatatgaactagcctttgttgagtaattccatggtatggatagcttctgatcatctcttgcaacctttcccaaacttcaggtagactctcttactccctttacacaaagtttccaatatctctaatgtattgatccgctttaatgggagagaaatgttggatcgagtggcctcagaataattaagaagggggggttgaattaattattcctaaacctttactaattaaaaaattactcttctaaggcttttacttatgttgtttgagagaataaggagtagaagagaaacttaaccaatagtaaaagcggaaattaaatacacagcga

SEQ ID NO: 192042 - DNA, 328 bp, Glycine max
ctttctccaccatcttctttcttcaactttacattcacaaccaatggtatatcggttggcttgtaatcaaacatcccaaacttttcaatattttttcaacatctttctttcgacaaataaaaactacatcatcctctggtgaatttctattctaagaaaatgatgtagcaagcccaaatcattcatctcatatctcatcatcatctcttttctaaaatcttcaatcaactgtgaattatttccataaagactaaatcatccacataaagtgaaacaattataatatcatgcacaccttgccttttgacataaaaataagctcattctt

SEQ ID NO: 192043 - DNA, 245 bp, Glycine max
  unsure (1)..(245): unsure at all n locations
tattagtataatatcttgaattgcagattcgaggtcagctaacacttaatactgatgagaataattaattaattaattaatntgaagtgcacatttcatgaagccagctcacgatcagtacgtttacagccatgccaaagggtatatactattcattcattcttttgagatcctacttggaatcgaatggtgcgagtattttgtttcttctcttttataatgctctataacgggtgttgttacct

SEQ ID NO: 192044 - DNA, 455 bp, Glycine max
  unsure (1)..(455): unsure at all n locations
tctcctccttcgcttactagacctgcaaaccgaggacctccttctaacatagnnnagcngaaataatccaatcctcatttaacataccaatacctcatagcttcaattctccattgtagaatccaaaatttatacccaaccaaaattcgatcaaatgtaacataagttacataacagctgggttccaatttccataggatttttcatgcacctatctaaaaagctaataatcttcacattattttatcagatcctggaaggatcacaaaccgtattcatccccatttttcattcattcacataagaattaacaacaataaaaaatagttcttattatacttcaattggaaaaattcccaatgtcccatgatgaannaaagagtgaaatgtgaaagaaaaggaaaacaatgggtggattgggacataatcgatgtcatacaacggaattgactggt

SEQ ID NO: 192045 - DNA, 334 bp, Glycine max
  unsure (1)..(334): unsure at all n locations
tcttcccgttccaagcttcaattggagtcttgtcttttacagacttaattggacatctgttgagtatgtaaacagcagtgtagactgcttcagcccagaatgtgttaggtagtcccttctccttgagcatcgatctagccatctccataactgtgcgattctttctctcgaacactccattttgttgaggagaaatatgcgactgtagttattgctcaatgccttcatcctcacaaaatctttcaaactcgcgagaaggtactctntgcacgatcacttcttatactttatncattttcactttgttttcacaaggccttgactcttgatactc

SEQ ID NO: 192046 - DNA, 344 bp, Glycine max
caatgatggcgctgggaatgaagtcaaattcttcgacaaaagaagtcaaccagttcggttacaacactagcacctgctacacgttttcgttatccatatctgtggaagataaggctcgataccaaaacgcctgtgtctgaaggctgaataacatagcaatttttgaaagattggaaaatgaaatggtgtggaatgtgggttcaggcatttcggctaattacatgggcgatgatatggccattctctttggtctatcagagaaaaaagcggcggatattattcgacatgaaaaagaacagtcctcctctctgttttactccttgacgaagtggtctcctcaactg

SEQ ID NO: 192047 - DNA, 335 bp, Glycine max
atggacatactggctcagttgaaaaccctggaagttaccatgtctgaatccttcttggtacatttcattttgtgcaccctacctcaacagtatacaccctttaaaatctcctacaacacacataaggataaatggtctattaatgaactgatgaccatgtgtgttcaagaagaggagagattgataatggaagagggtgagaagggtaaattgactacttctacttttggaaaggataggaagaattctataggcaccaataaaggaaggattccgactcaaccaacaattaataagaagtcaacgtgtttcttctggtaaaagaaaggacacat

SEQ ID NO: 192048 - DNA, 319 bp, Glycine max
catatgtgctatcaaatttgtcgaattcaataagttggggcaacataaaacattcataccagacacactttgtacatctagcatagataaatctgatatctctgccagtcaaattggtagtgactcttggatgaacctgatatggaattatttagtgaatgatcaattactagaggacgaaattaagcccaagatagttaagttgaagttgccccattatgcttatcattgatagagagattatcatatagtgaatctatgccccattgctgaaattttgaatgatgatgaacccaatatgtcatgaacaagatcatat

SEQ ID NO: 192049 - DNA, 373 bp, Glycine max
  unsure (1)..(373): unsure at all n locations
aagctatgctccatattattctngcagttgttcttcaatatatttatcatggatgcatttcaatatgttagtcgttttagatatttactccataatttagtcttttgtaataatatactaacaacatatcaaacaacaataacctcaataaaattagatatgtatttcattgttcataaaagtttaaaacatgaataaccatgaatatcatcgaagctaaatagacagtgttattctataaagtatattatatatttcaatcatattagttttggttctcatttagtaagttctatacaattacacatatactatgttagtatctatgataactatgattgggtataatattcattttctctcttctatatat

SEQ ID NO: 192050 - DNA, 432 bp, Glycine max
agcttcttatccaagatactctcttggtggtgaagcttcttcttccatggcttattccctagtggatgatgcctcctctcacctcttctcctttatcttccgctacatctccatggtggaaaatcaccattgaaggatctcattgaacctcaaagattcaacctccatagaagcttctcaagcaagcttccatcacagcgggttggtcccaattgtggagccaaagatcttgcttgatggtgagcatgggattgacaagacatttgaagtagcccaaaaggagtgggcagagtattcttctacctggcagagaacaatgtcctgttcgaggtattctcctcaacctagcatggtactcaggagccgagtcaaggacattccactcttaaaagttgtgatacacctcaagctctttttgtttttttggaatat

SEQ ID NO: 192051 - DNA, 326 bp, Glycine max
tctcaagaaagcttctcaatgaagctacctattctataaatagaagcatgtataacacttgttgtaactctgatgaatgagagtcttgtgagacatacttcaaagttccacttctctacctcttttattccttcaatttcgtgctccccttctctctttatctccctctttcttttcctccattgaagcattcttccaagcttcttatccaaggctcatcttggtggtgaaactccttcttccatggcttattccctagtggatggcgcctcctctcccctcttcttctttgtcttccgctgcatctccatgatggaaaaccacca

SEQ ID NO: 192052 - DNA, 317 bp, Glycine max
  unsure (1)..(317): unsure at all n locations
ttataataggggagaagtgaagtgaaaaagggttgagccccttatgacttctctcttttcgaattgcttaaanaatggttccgtgaaaaaaatcaagccgaggcgcttccgtaacgtttccgtaaccgtttcgtgagtgatttcgcgaaagttttcgaccgttcttcaacgttcttcattcgttcttcatcgttcttcggtcttcaacgggtaagtacctcgaaccaagcttttcgattcattctatgtacccgtggtggccacattgngtttcgagcattttcttctcgtttcatttactttccgacccctttgac

SEQ ID NO: 192053 - DNA, 438 bp, Glycine max
  unsure (1)..(438): unsure at all n locations
tgtctntatcccctccatgtcacctacaaattagactagctactccaatgactgaccaccttgcagaccactcaataacaacaacaaccccaccacactcctcttcatcttcctcccctatgcagtcatcgccaccagccgcccccataccgaccacgcctgccatgctaactccacttccacgacccgaaatcatgcagcaacgttccacatccttgtcggctccgcttaccatcagaagagacattatggggaagcttgtagcaccactccaccctaccttgtctcttgagagcgataacaacaaccatcgtggtacccatcttcctctttacatgctcagtgtaggtaacagagtaccgtagaccatccctgagaaagtcttaatgactcacgagccaacagcgaatctgagttcataatgtttgcatgtgcgac

SEQ ID NO: 192054 - DNA, 368 bp, Glycine max
  unsure (1)..(368): unsure at all n locations
gattttaaatggtgtaatcgattacaatatattggtaatcgattactagtgtacctgaacgttgaaattcaaattcaattgtgaagagtcacatcctttcataaaatgctntgtgtaatcgattacatggttttggtgatcgattaccagtgacaagttttgaataaaaagtcaagagatgtaactctttcaatgattttcaggtttttctcaaggttataactcttccaatggttntcttgaccagacattaagagtctataaaagcaagaccttgacttgcatttcaaaatcttttttcacacaacttttgaacatctttttgaacttcttcttcttcttcttcctttgccaacaactttctaagt

SEQ ID NO: 192055 - DNA, 341 bp, Glycine max
aatctggatagatatgtgaaaaatcataagaataaaaattcaaagggtatgatcataagaataaataaattttcggttaaatattttcttgatctttgtaatttagtgatgttttcatataattcttagaaaatatgctttttttttctttttagctttaaaatgttaggatgaaaactaaaataaacatattctataaggactaaaaaagaattatgagctagaaagagaaaaaaacacactgaattattgaaataaaaaaaatatttaaaccataattttttaataactgcactaccagttaaataaatcacgatcaattaaaaaaatgcacaatcata

SEQ ID NO: 192056 - DNA, 433 bp, Glycine max
ctcagctttatgtgaatattattttagtcctccaaagcttttacgtgaaatatcttttcagtataccgaccataaaaagttgaagagatcttgggatgtccgctaggaggaagaaatccatatcttgtttctgggttctatccctccatggtgagaatatccaaggtagtcaaaatctcagtgcaagaattggaccgagtaaaacaaaatagaaatggggtggtcggaataccgaggaagcaaaggctttggcatatcaaggtgaatgggcttcattcattgatgttctagcactattggtgttcggagtcatcctcttcccaaatgtggatgggctagtggacctatcagcaatcgacgccttcctttgaattctgaaatgaatgggtaagtcacgttgctccccgtcctcatcttttcatgtctaaacatg

SEQ ID NO: 192057 - DNA, 345 bp, Glycine max
caaagcgctcaaaggatcgctctaccgatcgaactcatgtgactcaagatcaatcgatgatccacccatgtgcctcaacagctactcaagatgtccacgatttgaagctggaataattctggactcaggaacaatgtctatagtcccgaatcgagagtcaaggttcaagatcttaagaatcaagatcaagattcatgactcatgattcaccaatcatgagaaggcttcatcatgataagcatgaaagttttgtctatgagatcgagtacacatgatatttctagaacatgttaccagagagttttactctctgcaatcaattacccgatcgttgaatcgatacta

SEQ ID NO: 192058 - DNA, 415 bp, Glycine max
  unsure (1)..(415): unsure at all n locations
tgatccatcaacttcagtgctagccctgatagcactcatcaaaagcatgaaaggatgcactaccattgaaaacatctactacaactagaaaagatcattccacaatttacctatactgttacaagttatgcagcaatttcttgctggtatggttgtggaaaaggaaacatttccaatgtcaccactaggaggtcaaacaatagagagttttttgaaatttcatcatcttttttggagttttagaccgtgtatcaatgggtttcaatatttcaagctcgtggtttaggtcgatggaacatggctgtacgatgagttcaatgngatcctctctgtgataattgcataagatgacaacaataaattccttacaatagcatttaccactgtctatggtgaaacaacagaagcatgactc

SEQ ID NO: 192059 - DNA, 337 bp, Glycine max
  unsure (1)..(337): unsure at all n locations
tgaatatatcaaaaagtaaaatgtatgttataaagaacatctaatactttggcttctctataaaattggaaatataatacaattagaatatattagtaaaaattaatgacaccgataataattaagtgataatatctccttttaaaaaaaatctgaaagtagaataattcatgaatttctacatcaattatgtattatataaacagatataatgatctcgtgtattaatagaacaagaaanaaatacaatgaaaaaaaattacttgtaacgaataaaataaaattaaagaaacacgtctcaagagaagatngtatatgaatggaatgtgacaacaaa

SEQ ID NO: 192060 - DNA, 358 bp, Glycine max
  unsure (1)..(358): unsure at all n locations
ccgggtagtcaaagagaagttcaagtccatagccatcaaagtctgaagagagtatgatgaactataggacgtcaatatggccaccgctgaatccttggaacgataaaccaagaaagtctgaaaggaagaacacgaccaatacaaattttgatgggctntatatggcagcaatagtgagctcaaactccgaagaggtgaaaggaatcatcacgggtcaaaggcatgatctggaaggacgagctaaaggcttgccttatgtcgaaaagaaatttgtctcaacagttaaagtgagactgaaggggatatgtgggccatcatcgatgagtgcaaagagaagctaaatctagcggcgactcac

SEQ ID NO: 192061 - DNA, 394 bp, Glycine max
actggctcatactgagagatgtccttgttttaaactaatgaccattgcttccaagttcatggccttgcaggtgaagacccacacaagcatctgaaagaatatcatattgtctgctccaccatgaaaccaccagatgtccaggaggatcacatatttctgatggcctttcctcattctttagagggagtggcaaaggactggctatattaccttgctccaaggtccatcacgagctgggatgacctcaagagagtattcttagaaaaaaatttcccttcttccaggaccacgaccatcatataggatatttcatgtattagacaactcagtggagagagcctatatgaatactggtagagatttaaaaaaatatgtgccagttgccctcaccact

SEQ ID NO: 192062 - DNA, 463 bp, Glycine max
  unsure (1)..(463): unsure at all n locations
gcttatattcgtattgcaccatgtttcatgacagtagatggtgccatattgttgaatggttttattagcattttgttagttgaaataaaggcccaaacttgtgtttaagtggctgtcaattctcttgggatttgcaccacctatgggcttgttttaatttaaataaattaaggtttaataaggtgaaaactctaggattgtgactgcctcttggctgaccaaggagttgcacaattttccatatgtgtatgtgtcttaattctagttctaattaggtataattacaccatcaattggtgttatcaattctagttttaattaggtttaatgacaccatcaattgttggtattggtgatcatttcacttgtgtaaccaacttgatgtcattcctatntatatgctgcacatcttctaataaaaaaatagaccttgaatgtgagttgtaatcaccttctaaagtat

SEQ ID NO: 192063 - DNA, 435 bp, Glycine max
  unsure (1)..(435): unsure at all n locations
tctgctngctaacccatggaaactcctaatatctcctgcactttttgggggggtggcagacttctcctgcggacactatttgttccactctttctctctacacatatattcaaaggaaatcctggtttccggaaagcacaccggatcgtcaagtatttaaaaattaaaatggatgaatccgagtatctaacacagggaactaatgctagcctgagttgagttcagaaatgaagcattattgagagaacatgtgtgattgataatgtctaacagaattgtaactaaacctttatgctgaaaactataaaaatgccaggtagtaaaagtgattcgattggtcaaatgttggtctttctacacacaagctgatgcatataaatatattcttaatcaatcatgctcttgggtctatagtgtaccctaatactgacctca

SEQ ID NO: 192064 - DNA, 369 bp, Glycine max
  unsure (1)..(369): unsure at all n locations
cttggtatcggcgcccttctctttcttctcttcttgttttcctaaccaaattagtgcaagcttctcattcttggttcccaaacttcattgttcattcttggaagcttgagacatcaatgatttgagctcctttctatctaagccatcattttagcttcatcaaggtaaggaggcctctccaattcttgaaccctaatcttgatgtctttggaagctaagtttcattgaatgttgttttgatgttcaaaaattcgtagctactgccttggctangatagtatgattttttgcttctcttgaaattgtaaggttaaaaatgagaactttgggtgtcacaacttaagattagccttatatttcacttaaatc

SEQ ID NO: 192065 - DNA, 301 bp, Glycine max
  unsure (1)..(301): unsure at all n locations
gatcaagaattcaagagaaatgatttacatttagtccatagtatgttaaaagaattccttaaaagagatttcatatgtttggccttaggttaattcctcacaacatcttacagagttttttaaaatgaaactctgtttctaacaatatgattttatctctggtaatcgattaccaaaaactgcaatcgattaccagangcaaagatgaagtttaaatagttntacgaactttttgaatgtgaattgtgaattgtgttatcgattacaaagagattgttatcgattaccatagacaaaactg

SEQ ID NO: 192066 - DNA, 386 bp, Glycine max
taatttccacaatgataatgttggtattctgtccagatctcttatttgcatatttctcattttacttaaccttttcagtgttttctttgcctaaattgcatttcaaaatgtactctttcacctcattctggaatcgttccaattcgagttctgtaggctgaacaatgaataaaagttacaatacgttcgttactcaattgatatgtgaatttcatcctagaattaatccgaattgaagcaaggtaagggggattcacatcatgtgtgcatataattatacaaattattatggttgcaaataagtgtgaagctcacacatatgcaagaaaatagtggaagatatcaacagcatgtattatttagaattgacaaacatatctattcaa

SEQ ID NO: 192067 - DNA, 239 bp, Glycine max
  unsure (1)..(239): unsure at all n locations
ctaagctgcatttttatatcttccacatcttnggattagggaattcctatgctggataacttgctaactttggagtccattgttccttttttgggtggggggactcaatctcctcttgatcttgntttccctgatttatatagaaatagatagaacttgccttttttttttttcaggttcaaaggttagttgttgatttttgttgcagggttagcttttgcccatggattgtatctctt

SEQ ID NO: 192068 - DNA, 376 bp, Glycine max
  unsure (1)..(376): unsure at all n locations
ctcttcccaaatggtcagatcatagagtgagactatgttaagaaatgtgcttgggctaatcgcttaaaaagcgaaatcttccacgagtaaagagtcaacgtgacataacacaatagttagacatgtgtattaataattgtgacttaagaatgatgtgttacttgaagagttgtattagtacatggctaatgaaaaaatagaggatgtctatatctctttttaacatcttgatcttatattttgctctatatgttgattcctttaaaaatgagtatatccttgcatcttatgttgatctgtgatgaacgtgtcatttgataaggagcagattatgatgtagcctctgagtancatatcacttggtggtgatgtggac

SEQ ID NO: 192069 - DNA, 375 bp, Glycine max
gcttagcagctaacttctgatgatcatgcctcaggagtgcaaatctagagtatgtgcacaagttctccccctcttccaacactataggagtcttcaagaatgtgttaagagtatcctcatcaaacttaatcagatgacctctcaccctgacctgcttaagtgatttgtcatcggggtcatagaggtttgcatagaattcttttacaatggcaacatgaatgttgccatccagaaagtcagtcaaatcctcgtcccaatggcgtctctcgagtacctccttgaactcatcaaactctgtataatggattaccacattcctttgtgggtaaacttacagaaacctagaaatttactcaagcgctagcgcagcaagct

SEQ ID NO: 192070 - DNA, 407 bp, Glycine max
  unsure (1)..(407): unsure at all n locations
aagcttgataagtgtaggtgcaagagctgctactggntgaagcacttgaatttggttcaactgagtatccaactgccccatctgatttgtcaaactctgaatggaggctctcgtctcttgctgaaattgtatactctggatagtcatttgcctcactaactcttctaaagaaggttgaagatgaacctcaattgcttgttgtttttgttgtgactgttgctgtattggaagacgaacatatggcttgcttggatatcaacattctggaaaggaatgacatgctattgttggtgtggaggacttgcccatctcagatttagatgatttcctcaacctacattgtatctgttgcttgaaagacataatattctgctgttgttggtttgctggtgaggagctattataat

SEQ ID NO: 192071 - DNA, 297 bp, Glycine max
gttatatatatacttttctataaacttacgagagtccatatatctatcggtgagtgcgagactctagcgcacggaaataatatcattcattagacttacccttggttactacatgcgctcaaagggtacaatcttttcacatgatcatttactacaaaattgatatatgtgtgatgagatttactattactatcttaaatttgtttatcaaggttgactataattgttagaacacacaataaaatcctttgtattattttttatgatcatattatagtatcatatgctcactactat

SEQ ID NO: 192072 - DNA, 313 bp, Glycine max
gatactggacacttgacatattctaatatgattaacttgtctaatttgcataacaaattttcttcacattacatcgacttagagcccttaattctgcagctgataatatcacttgccaataccagtcctgtgccatgattctatgctgaatactgggtcatcaaatgatcaactcgtactactgctgtatattcgtggacagaaagcctgtaatgattgcaactttatcaacacttgtgaaacccttattgccgaaatgctcttgcttctagacgctttcctcttacaatcttgtgctcattatgccgatgat

SEQ ID NO: 192073 - DNA, 303 bp, Glycine max
  unsure (1)..(303): unsure at all n locations
agctnttcntcttacagaatgcanaaattttatacggataaccactcgggtatttccgcccgtcagcgtgactcanaagtcagtatgacagatcttgtgagcacggaagatgacgtaaatcaccacgtgtaaacgggcttgtcggccgcgattgacgaatggcgcagaagacgacgttagtctctacgtgctatcaggcttttcgtcttacagacagcaaaaagtttatacggataaccactcgggtattttcgcccgtcagcgtgactcaaaagtcagtatgacagatcttgtgagcgcgga

SEQ ID NO: 192074 - DNA, 404 bp, Glycine max
tgataatcaccagagactaacgtcgtcttttgcggccttcgtcaatcgcggtcgacaagcccgttgacacgcagagatttatgtcatcttccgcgcttacaagatctgtcatactgagttttgagtcacgctgacgggcggaaatacccgagtgggtatccgtataaactttctgttgtttgttagacgaaaagcctggtagcacgcagagactaacgtcgtcttctgcgcccttcgtcaatctgggccgacaagcccgtttacacgcggtgatttacgtcatcttccgtgctcacaaaatctgtcatactgaactttgagtcacgctgacgggcggaaatacccgagtggttatgcgtataaactctttgcgttctgttagacgaaaagcctgattacacgca

SEQ ID NO: 192075 - DNA, 407 bp, Glycine max
  unsure (1)..(407): unsure at all n locations
caccggtaacgngtctactatcattttaaatcatctcccctctccattattagatgggtgcttacttgagcctgcccaaatcccctcccacctttagggcaaattctttgaaagattcatgctccttcttacacatgttttgtagctgcattctatctggagccatatcagaattgtactgatactgcttaatgaaggcaaccattatgtccttccaagaatggactcaggaaggttctagattagtatacctggtgacggctgccccaataagactttcccagaagaaacacatcaacaatttttcattttccgagtatgccccaattttcctggtgtacatcttcaggtgattcttggngcaagtagtcccctttgttttataaaatctgataccttgaactttg

SEQ ID NO: 192076 - DNA, 412 bp, Glycine max
  unsure (1)..(412): unsure at all n locations
atatcaccttatccttanagtattttggagccttggaattgttctgngaattagtgtgggggggtatgtttcatcggaagatatgattattggtcatgcttaatgtcttattttggccatgtgtgatgtatatatatattgcctagttcttgctttaatcttcaaattcaatctataaaaaaaataagagaaaaaaaattcagttgctgtaaattctgcatattcgtactattaaaaaaattgcgtaaataaaaagaaaagaagaatagaagtgaagttgaataaatgaggtcttgttatgaagtcttgttgatattatagggtttgggtttactacatgtgtttaatattccacttattccacattgctcctctattgctttgggatttagctacttattcccatattttt

SEQ ID NO: 192077 - DNA, 398 bp, Glycine max
  unsure (1)..(398): unsure at all n locations
atgctctattacttcctaatctccctttgagggaatttatgggtctaatccaattgcccctcttaatttggtacctttgcctaacgcttatgctatgatgaatagggatgagctttctaaagccaattttgttaagagtttgcatgagaaggtgaaagcacaaattgagaaaaaggttgaacaatatgctagatattccaataatgagagaaagagaatggttatcaaaccgagtgaattgagttggattcacttgagaaagaataggtttacttccaaaaggaaatctaaacttcaagaaaggngatatggtccttttcaagttttaaagcgcatcaactataatgcatataaaatngctttaccactagactatgatgtaagcaacacttaaatgt

SEQ ID NO: 192078 - DNA, 287 bp, Glycine max
ctcagctttatattcgctcctaccctcattctcttcttattttctgtccatgtttgtgcaaactctcatacttggttccaaacttctttttcatccttgaagcttgggaacattcatatctgaattcatggttcatctgggcatttttgtgcaacctccatcaatgtaacgggggtcttttcacttcatgaaccttgtgcaatagttatgaataaaataacgttaatgatattctgtatgatggaatccattatgatattaaagtgatttttatagttgtatggact

SEQ ID NO: 192079 - DNA, 348 bp, Glycine max
  unsure (1)..(348): unsure at all n locations
attacatatngaattccatccaaaatttttgacaagatcattgtacttccatcaatattgatattgtatcattcttaaatatatgcatttgcttattcttatcattgtgtgttgtgtgattatttcttccatgcacgtacacgatttctattttgtgtgagagtgaaatgatggccatcagcaccaactgaggtgagattatatttccttatttttggccttatctttgttagattggtatatattttcttattttatatgttngagatttaaatgtgtaaaaaataaaaaatccctccctgcattgatagagtttctggtccatttgataatttgcttcatattttt

SEQ ID NO: 192080 - DNA, 415 bp, Glycine max
  unsure (1)..(415): unsure at all n locations
gaccttagatactcagctgagctgcgtgctaggaagaataaacaagagccaaagactatgatcatctgcttgcttacgaatctgggccaaccgaggcttgagaggatctgttttcagagctagaatggatctccttattgactcaaatccatgtgcaacaccaccatcagaaccctagttcaccaccacaacaacgattagtaacctagcttcatcaaatcttatttatttctcagaaagaaaaaacaatttaaagaaaataacaaactttttccctttctagcagtaacatttccattgaaaattttccacactacaagaacaaatcaaataaaataaaaaataaaaacaaaccctgtttgtttccaatgaaaattagctcacatcaagcctagntcaaaagtacaacagcaat

SEQ ID NO: 192081 - DNA, 383 bp, Glycine max
atgattattaaaaagggataaatatgtgagattcttgcacaaattataagaaggaagcgaacctggtaaggtattggaagacaagtctagataaacaagttggctgagttctgagaatgaactaggaagtggtccattaaattggccagtagatagatcaattgcagataactgcttcaaattggaaattgcacctggaagctttcctgaaaaatatgtatagctaagattcaggtcatgaagagaaccatgttgtgggaagtttggcaaaaacccccaagatctttgttgtctgagatgtcaaggaactctaacgttgatatttggaagatatcttttggaagagaaccatcaagccacaacttcttaactctagtgtgact

SEQ ID NO: 192082 - DNA, 453 bp, Glycine max
agatcaagtacaactgcatggacatctatgtgtggtccatcacttttctttataaattctgaacgctgttctctgtcaagattgcacctatcaataaatacactcttcccatccttcaatgctctaattgcactgcttaggcactgagctttatttcctgctttaccatttccaatagtgtcctaaagcgaataaacagtataaccagtgttagataagatccaaagtcatgttgggtgagcattaaataccaaatagaatatccttagataatagttctcaagagtggagattaatataacttaaccaagaagcagactctgcactaagagaatttatcaaggcattattcaaattgcatttacatataaatggctatacaaattaaacattatcaataaaaggcctaaactttactttcaccaaatacactgattacatctcatcttatat

SEQ ID NO: 192083 - DNA, 427 bp, Glycine max
  unsure (1)..(427): unsure at all n locations
agcttagcttgcttatatagcccacacaacttttgttattttttntatttcctagatatatcctagnaggagatgattcagtacaagacacggtattaaatgtaggtgcctcttccaattatgatgcgtcactgtaccagagactagtttagtttctttcactagaccaaactttcattggtaaagcactaaagatcccacaaatacttagacacaagacaaaatcttgaaaataactacaattgcataacaatagtggcacaaagcaacggaatcatgattttaaattgcagttacatttggtgttaggattgcattaccatcaccaaaattacaaaaaaaaaaaagcaaatgctgaggaattttcccaaccataattaccgctgaggaccataattcaaaacacgcgatggacacacacaattca

SEQ ID NO: 192084 - DNA, 467 bp, Glycine max
  unsure (1)..(467): unsure at all n locations
gcttccatcaagtggtattagagcaaaacgttggtctttattgcataattgctttttgtattcattaaaggatggccttcttcttgggggtagatttcttcagtagattcttcgtcttttcctccttcaattacgtgatcccccctctctctttatctatctctttcttttcctccattgaagcttcctgtctaagcttcttatccaaggcactctcttggtggngatgctccttcttctatggcttattccctagtggatggcgcctcctctcacctcttctcctttatcttccgttgcatctccatggtggacaatcaccattgaaggacctcattgaagctaaaagattcagccttcatagaagcttcacaagcaagctttcatcacttttgacgactgttaagtgagaatccttagcattggcctgataccttgcacataagtaagcacttagcatgacatat

SEQ ID NO: 192085 - DNA, 315 bp, Glycine max
ctgcagctgataccgcaagacaagtactttgcccttcttcacttggcgcaacctgtgacacccgagattacgtcatttcggctccagactgcatctgacttgatcacgttgacgggggaatcccagtggtatcgataacatctttttgtgttgtagacaaagccgataccaccagacaccatgttttaccctttcaatccggcgaaagcgttgacccgagattcgtatttcggctctaaattgctactgacttggcacctgcggcgaataccagtgtttcgacaaatctttttgctttgacacaaagcctatccc

SEQ ID NO: 192086 - DNA, 448 bp, Glycine max
  unsure (1)..(448): unsure at all n locations
ggcttgtggggcttctatggaggctggatctttgagcttcattgttgtcctttaatggtgattttccaccatggagatgcaacagaagacaaaggagaagaggtgagaggaggcgccatccactaaggaataagccatggaagaaggagcttcaccaccaagatgagccttggataagaagcttggagaagatgcttcaatggaggaaaagaaagagggagagaaagagagaggggggagcacgaaattgaaggaagaaaaagggagagaagttgaactttgagttgtgtctcacaagactctcattcatcanagttacaacaagtgttacacatgattctatttatagactaagtagctctcttgagaagctttcttgagaaaacttccttgagaagcttctttgagaaaacttccttgagaagctagagcttagctatacacaccc

SEQ ID NO: 192087 - DNA, 272 bp, Glycine max
  unsure (1)..(272): unsure at all n locations
caaaagaatctacctttcttattactgataccaaccacacatataatctatttaaattggcaaactatctgaaactcttatagagcaagggaaactgttaagccaccaatataatgcggggtatcacctttcctatgccttgcgttcatcacagtggcatctagctgtaaaacgagcaaaatctagatgattactaaaaacggtcaaaactgcaaacaaaattgcacttttctattactattacaaacaacatgcacatanatctatgttta

SEQ ID NO: 192088 - DNA, 383 bp, Glycine max
  unsure (1)..(383): unsure at all n locations
cagcttccttnccnccgnngagaagagaaacacgagttattcctattttctatcagtggggatgtctcctccacctcttcggccttacaatcactcacgaactcattataagttcttagaaggataactctcaagctctggtctctgcagatcttcacataataaaatctctcaaaatctctggaacttggacctctttctctctagaatccctcacatgcagcagctccttgagaaaatggccaaactccctctctaaatctgatttccggcttaaataggtggctttgttcgtgcttgtgcgcttagcgcaactctgatccactcagcgcacattagtgaatatcggcttagcacgtgcctttctactcaacgaatggact

SEQ ID NO: 192089 - DNA, 431 bp, Glycine max
  unsure (1)..(431): unsure at all n locations
agcttatacgaccgtccacagctgagcctttattgaanagtactgcatgcccaggcaggcacagggtcaagtgccgtatcagccagctgcaaatgcaccattgccgcctctacatgagataccatccttggggtccatctccgatcacctgaggagattagagctccaaatgcataggtacatgcagcatgtgtctagccagcaggcggctaatcacaggggccaggtgcaactaaacgagtccttctaccagtacacccaacaccagcacagctaggaccccagtcctttcccttggcctatccccgaacagttcggggccatagttgtctggcctggagatgagaccgattttgagagaagggcaagatncgcaggagcccctggggatgaccaaggagctcaagtggatgacgacatggctgacatgc

SEQ ID NO: 192090 - DNA, 471 bp, Glycine max
  unsure (1)..(471): unsure at all n locations
taaagcataaggtcctagaagtctctatatagaaccaacatactcacacgtgtgaacacaccccacaatntctatgctattggtaagtagtaacatattgtttaagatggtaattttgattcaatctgtgtgttaggttctaaaatcctaccgtctatcaaaatgagtagaatatatcatatttcccttccttggctgtaaatatatagaagttntaattactatgagtatgtgagcaatttctaaattagtacctttaaagagaaatcctagtgcaacaggttcccactatgagaggtttattgagggtaaatgtatacaactctacacctagcaagtggagggatcatgtcctagatttgaaaccatgacttttatctcacaagacaggaggaacctacctttacaccaagtgtcacccacaaatactcctaatgagggccttggaatcactgaatttccacttttttg

SEQ ID NO: 192091 - DNA, 359 bp, Glycine max
  unsure (1)..(359): unsure at all n locations
agcttgagcagttcgatcggtattagagcttatgactatacatctatcggtaaatgtatataaatgatcctagctaggcataataaggagttgccgagcgtttcttaccaataccataataataaattgattctattattgtanaggaatttaatctacatattatatagcttcactcgaattggactaaaaaaaataattgaaacgctgacttatttcctgttaaatgcgtaaccatacttagaaagataaatatgagatacttgtatacggcacgtctactttagtgtcaacaaacgtttattgaactataccaagggatgacatatagcctatactttgctgccgatttgatactt

SEQ ID NO: 192092 - DNA, 414 bp, Glycine max
  unsure (1)..(414): unsure at all n locations
tgtcgactgctgcataagactaagatagggagtattgcacnttagatttctgatacaaacacacnggaagaccacaacaatgctataggcggtaaaagacaaccataattcaaatgaacctgctgtgcgtgaacaaacatctattaactcaaatgacccatggaagtgatagcataattcttatactaactaccttcgacgtaccttgaacaaatgattaccaaacacgtgaccgacacatatcatgtggcgcacagaagaagctggtggtggttgacttctacaaggaaaaaatgccatgctatgtagtcgggacaatgacacatggattacgctataccgtgacgcgatgacatatctcatcaccgtgtatccatacacttgtcccgccttcctgaataagcaaacatacac

SEQ ID NO: 192093 - DNA, 397 bp, Glycine max
  unsure (1)..(397): unsure at all n locations
tgctagcagggcaacagagagcngagactgttagtgtccttctctctcgcnagnangcaagccatatttgttcttgtatggaacagcattactttatatgtgctttgagctatagataataccacatgtgttacacgattgctcagtatagatgatcttcttgtgcagaaagcaagaaacaaaattacatttgccctactacaaaccaacataagcctgacccttcggagcacactgctattaacagccatatacatatctgatgaccattgatgggaaggaacattaaagaacttttcccgccccctcatccaggaccaaatgagaaaatttctgatatccaccaacttagagatgtgaaaaggctgattatgaaagatgatatcgttgcggagct

SEQ ID NO: 192094 - DNA, 447 bp, Glycine max
  unsure (1)..(447): unsure at all n locations
agctntgtccataaaatcattattaatcgtttttaagtccaacaccttaaatggtcttctttgcttttatcggctaacatggaccgttcaaaggcataaaatcaacacgtaactttaccgcttttgtaaaaactacgtaggtctgatttcctcatcgcaattaaggatacataggagcaaaagtcccgcctttgtcgaccaccccaagagatcgttaatggtccaacgccttaacgtttcactcctttcaaaaaccaagatatcgttaatggtccaatgccttaacgtttctctcctttcaaaaccaagagatcattaatggtccaacgccttaacgtttctctactttcaaaaaccaagagttcgttaatggtccaacgccctaancgttctctccttttataaacaaaggatcgttaatggttcaacgccctaacgtttctctct

SEQ ID NO: 192095 - DNA, 336 bp, Glycine max
ctgtatataagaaacacatacaccttctttttgctagtcgatcacttagttaattttccatattctttccctctgggtttgagtgtaagcttcacttgaaaataagttatttaattatatgagttcttgatttaatccatattttctctccccctttggcatcaacaaaaagccaaagtgcggtagaaatatatgacatacataaatgattataaagcattataccaaatgtaagtacatatcactagacatatatcatcaaaataattaagtctaaaactcataacaattaagagtatgttaatacaatcatgttcagttatacttatcaaatat

SEQ ID NO: 192096 - DNA, 438 bp, Glycine max
  unsure (1)..(438): unsure at all n locations
cagctngagttataatcatagacctgnnggttgttgaaactaaagataaatcagaaaaagctgaaatgattgtcatggatgaaaatgttgtcttatttaactttcttatngttgtaattgatattgtatggtgttataataatttatcttttcggattattacctttggactatgatttttgttctcccaagctgacaagattcatgtccttataagaaaagaggagttaaagacatggaaagtgactctaaaggagaacaacacatatatgatgcacaactttaaaattgttaacaacgagggccatataagctatgtttgcatccatataagttgatttttattggtgtcagtattgtcatagaacagaacctgcctaatatccctttaaaggcatatgagattgttaatttgtcgatatccttactggaacctac

SEQ ID NO: 192097 - DNA, 424 bp, Glycine max
  unsure (1)..(424): unsure at all n locations
tgtggggacagtanagaaagaccattctctggaattacaatgccaggcaaaaataagagcagaacaaggagaataattgcacctattaggattacgcgagcaatagccatggtgtaagagaaggaatataagaagaggaggtagaggcctgtgacaagggcaaggatgttgaggcagagaataaccgatgtatcgcgctgaatggtgtcaacagaatgtggttgaggctgtggttgattgagaattgggatgagtactagtccagaaattagcacaggaacaatggcattgagtaatagatagacagtgtcatcatttgtgtttattgcattggcaatgagagtgtnacaagctgcactcacaccattgaaactaatgctcaaggataatgcaanggaacggttttgccggaaaatgtctgatg

SEQ ID NO: 192098 - DNA, 371 bp, Glycine max
  unsure (1)..(371): unsure at all n locations
agttccaacaagtcanaagatgcatcttcancttctaatgaagaagtttatcanatctcacanagtccattaagaaaaaaggaaaataaacaaagtgtcataagtccaaagctataactatccaagaagtcaaaagatgcatcttcatcatcaaaaggaaaaggaagttcattaaagaaaaatgtgaaaaaacaatttgtcataagtaaaagctcaaagctacaagcatccaataagtcaaagcatcttcatcatcaaattaagtttattcaatctcagaaagtccattaaggcgaataaacaaactattctgacgtcctcttatgaagagtcaatcttactccaatgttcaaaaaggagcacaccacaaa

SEQ ID NO: 192099 - DNA, 453 bp, Glycine max
  unsure (1)..(453): unsure at all n locations
tagcggcatggaatggtgcatagctcaatcaaaatgaagtttgtccgcaagaagttcagcttagccaccatgattggcgctcagctctatgaacttcagttctagccataaagaattgtgcttggcgacactgagtcgcgcttagccaaggataaggtatcacttagcggtttggctgtcgcttagccgaattcagatcgaattgaagttggcttagctcagccttggccagcttagcggaccaaatcagcctcagatgcaagggttgggtgctaagtgcttgagacttgcggcttagcgcatgaacaaagatgcccttagcacgaggcttgtgcttaacgaaaggactgtttttcagaaaatattttctaagttattttttagtcctttttccaagaaattgaaacccttatngttaacattcaaggctaagctgatatactccaatgtaca

SEQ ID NO: 192100 - DNA, 467 bp, Glycine max
  unsure (1)..(467): unsure at all n locations
agctnntgcggattggtcttcgctggcgaattatctatttgtgtctgaaaagagacaaatctgatcatcatgctntgataaatgcaaaaactggggcaaatgaagagggtgagaatgagggagaaacccatgttgtgactgccattcctatacggccaagtttctcaccaacccaacaatgtcattactcagccaataacaacccttctcctaacccaccacccagttatccacaaaggccatccctaaatcaaccacaaaacccacctacgacacaactaatgctaaacaccacctttagcacaaaccanaacaccaaccaagaaatgaattntgcagcgaanaagcctgtagaattcaccccaattctggtgtcctatgctaacttgctcccttatctacttgataatgcaatggtagccataacccctgctanggttccttaacctncatttttttcgaggata

SEQ ID NO: 192101 - DNA, 484 bp, Glycine max
  unsure (1)..(484): unsure at all n locations
ctggggacagtaaatggaatggtagccctccagaccatggaatattattcaacgttcccatactatgantaaaagacactgaaactggttctcgaaatgtgatcccatttgatcgttgcatcgagattctgaatgttctttccaattctatttcttttctcacttcatcttccagttctcgttgttgtgcaaatgtcatctcgcgagcaatgatttctctcctgattccttccttctctagctctcgccatattttctctttctccaactctcgttggaacacttcattgacattgatcggcatggccattagaaaaactctaggcactgaaacatttctgggaaagccacctgatacanagtcacaccctataaattggattgttaatagaatgaattggtggcacaagttttgtattttatacacaaaataaataaatgggtctatcgatgaaaggaacatannacgatataaagtattacc

SEQ ID NO: 192102 - DNA, 379 bp, Glycine max
gagacaacggatgcacatgttatctatatacaattgtttgttgcttgcttgaatcttgatttcaggtattgtattgtcatcatcaaaaagggggagattgtagatgcaattggctctgatgttttgatgatgatcatgatgatgtgttgcaatcgatgcaaatgggcttctcaagattaaaattcaagacaatacttcaagattacgcgtcacaacatcgggatgatcactagaatattaggaagggaattcctaattgaattagcaaaggttgggccaagtgatttaaaataaaaagtgttgttcaagcttttactctctggtgatcgattaccagaggatgttatcgactaccagtggccacatactctctataaca

SEQ ID NO: 192103 - DNA, 434 bp, Glycine max
  unsure (1)..(434): unsure at all n locations
gctngagatgaggaagtgttgaagggtgaaacttcctcgctttattgtttaccactgattggtacctggagatatgtcgcgggggtcaggagaccttggggacgtcaggtggggtgctattgcccaaaaccaagcttgaccaatcccgacccaacccgggcatagtcggtcagtgagaacctgtgatgtacctaaacaggcgagctcctggcagtcaacagataaaaggaacaaagaccacaaagcaaggaggcttgtggtggctggccagttgtgaattttgtgtgatatgtaaagtaatggcctctggtaatcgattaccaagggtgggtaatcgattacaaggcttagaaatgaagacaggaggctaagatggtctctggtaatcgattaccaaggggtgtaatcgattaccaggcttgaaaacgaagtca

SEQ ID NO: 192104 - DNA, 424 bp, Glycine max
  unsure (1)..(424): unsure at all n locations
agcttgtccttggtttagacatgatgatacatgatttgngacttgtangatttattttgnggcaaaatggatgagggaaagtgtgatttcgaaaatctgcactttatgcagaattttgctgtcaaataggtgcagcagaattttggctttgtgtaaaaaatgttgtgtatttgctggttgtggaaagagtagtacagattgggttctggacgttttctagcagatcccaacggtcataatgtagatttatgtgctagagaattccagtaaaattttcgagtcgatccaacagttaacgaattggaacaagagaatattactgcggtatttgagtgtgaaaagctgtgatgttggtttgtgttttgggcaaaagtttctgcctctgccctgttttcttggctgtgttaattcatgatgcttggat

SEQ ID NO: 192105 - DNA, 432 bp, Glycine max
  unsure (1)..(432): unsure at all n locations
agctntattannattaatcactacgctttatatataagactttatttcaaactttatgtaaagaaatctagcttaattaaataaatatgatgtatgagttattataaatctcatgacattatcttttattctacggatatatnttcttttcaaattttgttttttataattttatgagatttatcttttaatttttttcccgcattttgtccacgattgatacatgacactaacatgaactgcttgcatgacaaacgaattaaatcatactttatgtcctctattttcaaattttcgtgcattttgctataaagtcactaagtcatgaataattntatataatttaataaaggctaggttataccgaggcttctatctcattgtttggatttaatatagttctttatcggtaaaaaaaagataatttgatct

SEQ ID NO: 192106 - DNA, 409 bp, Glycine max
  unsure (1)..(409): unsure at all n locations
cgttacttaggaccattccccatcatcgaacgcattggtaaggtatcatatcgattacaacttccaaaagcgtctaagatccattcggttttccattgtttcatgttacgaccccaccatggccccttggaactaccagtctccgcccttccaccagacacaattcaaaaccagcccatattgaagcccttgaccatccttaattcacgtatggatccttctactgacccctcaactcagttagttttagtacaatggattggcttagcacctgaggaatctacctgngaaaagtgggatgacatttgcagatcccaccaccttgaggacaaggtgatttttccaaggtgggggggggatgatgatagagccactantgcaactaacaccgtgaatgaatgagcacgtg

SEQ ID NO: 192107 - DNA, 346 bp, Glycine max
gcatgcaagcttggctgctcttgatgaaggagactgtgttgtttctgaggcaaaagaatttttatctatcaacccatctgcacttttgtctctacagaattccattgctgaacgtagacaaaagttagctgatcaacttgctgaagctgcttgtcagccctccacacgtggtgtggaactccgtgcctccgtgtctgccctctaaaaacttggagatggtccccatgctcacagcttgctacttaatgcccatcagcaacgatatcagtataacatgcaaagtcttcggccatcaagcacctcatatggtggagcatatactgcagctcttgcccactggtatctt

SEQ ID NO: 192108 - DNA, 409 bp, Glycine max
  unsure (1)..(409): unsure at all n locations
atttattgcattgcattgntctcattcttgtgcttaattttgcagtttcagcctttaatgtgaagtatacaagcttaaactccccttcaaagctgagtggctggaaatcaagtggaggcgttccctgtggcgactcctgngaaggaatcaaatgctcaggctcttctgtcacagaaatgtaatatgtgtattatagacagagtatgtgtcttttcatcaactcctgagtcctgagtcattctaactatttatttttactttcaacagaaatttatctgacatgggactttccggatcaatggtgctaccagttgtccaacttaaaatcagttaccgacttgtgaggcccacatcttcaaagaccacactttctttctttttaataataataaaagaacatcacttgaat

SEQ ID NO: 192109 - DNA, 361 bp, Glycine max
  unsure (1)..(361): unsure at all n locations
atcacaaaaaagaagcttaggacaaaaacgaaaaaaaaaatcattgcaatttgaaagttttggccttggaccaactttatgaatgatgatgaccactgcttacgtattcataaacctaaggagataagttctgatggttgataaatagttaaacttgacatgtttatgtatcactactagaaataatatttactaagtcagttaaatagggcatttcatgatggttttgaactgttgtaaaaggtgatgtcgaaaaatggcaaaaaaaataatgacggtctcgataaccgtcttagtatactcaactttctaagacgggtattncaataaccgtcttagtatgtctttggaatctaagtat

SEQ ID NO: 192110 - DNA, 435 bp, Glycine max
  unsure (1)..(435): unsure at all n locations
ngcttctacaaggcaattcttcaattcaacttccaacacatgtctcaactnttgaatttcatctcatgacatacaatcacaaacacataaattgaatctgaagggctttcttggcttgtaatgagactgggctccaaacaagtcatggtttttctaggatgcaaaacttatgttctaggagagcattcatccttagatcaactctntttctttntattcccaacttctattaacttgccaatcaacatttaaggcacttaagtaacaacacacacatacttttattcttgaaatttctcctctttctttttttttagcagtctttgttgcttcctgacaaagtttttgtgtggctgtatacttgtcttaccataattatcatcatccaacaacctcccccanatttgggacaaaatttctttgaaccatgatgct

SEQ ID NO: 192111 - DNA, 435 bp, Glycine max
  unsure (1)..(435): unsure at all n locations
agctntgatggtgcaagaagaaatcacatgtttgtcatcatcaaaaagagggagaatgtaaatcatgcaagctttgatggtgtcaagaagaaatcacatgtttgtcatcatcaaaaagagggagaatgtgaatgtatgtatacatgattttgatgatgtaaaaagaagaatcaaacaatgctcatttgcttcaagattaatacaagattgtttcaacaaacaaagccttgattcaagatttcttcaagatctagccttgcctcaaaacgaaaggtttcaagtcatccaaggcatacataatcgattaccaatacatgtaattgattaccaaggcacatgcaattgattaccaatacatgtaatccgataccaatgggttgaaagtgtgtaattgattacacatcatatgtaatcgattaccagagactctgaaca

SEQ ID NO: 192112 - DNA, 348 bp, Glycine max
ctcaagcttggagaggatgcttcaatggaggacaagagatagagaatgcgttagcacacaattcacggaatactagatggagagaaatggacctcctgaatgcgtctcataatactttcattcatcacagttacaacaagtgttacacatgcttctatttatagattatgtacctccactgacagctgtcttgagacaacttccttgagaacctcttttgataaaactcctttgagaatgcagagcttacctacacacaccctctcataactaacctcacctccttgagaagcttccttgacataaatcctacagaccctatagcctacctacactaccatctctatc

SEQ ID NO: 192113 - DNA, 414 bp, Glycine max
  unsure (1)..(414): unsure at all n locations
agcttataagaacaaagtgcctcaatcattttctaatatgcatgtgaattangacgcatcaacaagaatcaagccaaggctaatgtgcaagcaatcaatggggcaaaccacaccaaatgattatgatgatggatggctcaaattctcacaaaggtaaactcatcactttcaaattgagctttcaaaactatcatgacatgtagagaagaatcaaggatttcaagtcacaaaatgtcaagaacttttattttcaaaacaattacccatttcttgaacatatcctataattcaaagaanaacatgcaaagtcgtacgtgcacacaaaattgacccaaaatattaaactaaaaatccgacgaaactaacaacattaacaaattaacacaactaacaaattaacaaaaccaagaaaac

SEQ ID NO: 192114 - DNA, 397 bp, Glycine max
tatgcatgtctagagagttcttgagagagaatggtccaagtttcaaagagtttgagagattttgttatgtgaagatctgcatagactatagcttgaagaggaagccgccctgagagcttgagatgagtttgtgagtgattgtgaggtcttacaggtggaggagacatccccactacttgtatttctgtaatggtttatctttctcttgtctttgttgtaaaggaagcttcccagttatggaaagctaaatcctctgttggattttccttgtaggtacttgatgtaaatatctttttatctatctaatgatgttttgtgtgttctctatgctatcagtatttcattatagtatgcttttaccttgatcacgtagatgcatgctttgttagggtcattc

SEQ ID NO: 192115 - DNA, 455 bp, Glycine max
  unsure (1)..(455): unsure at all n locations
agctngcaccaacattctgagtccatttcactctcaacaaatagtcaccatccatccacaattccaatcattcatgttcaatatgatgcatgcacctgacctcaactctcatatgcaatgtggtaccatccccaaggaaatagcctaagcgtgtccacacgacactctcacttangaaaactatgcagtaagtgtcgaggtcaccctatcttgcacaggcaactccccccatggtgatcaanctgagtctcaagggagttccaaaccgagtgacataccccctagtacaagtatttctcctcacaagaaactacaagtacttactaacaaagtttatactattttcatgtcatatgaagaatgaaacatgggcaccattaaatgaatgaccgcggataattaaagattctaagtcatccccctccagagatgcttaaaactctttaaccactcta

SEQ ID NO: 192116 - DNA, 344 bp, Glycine max
tattacaaaatgtgaattcactaacaggaaatatacttcaatttaaaggagattgaacctcgttgatagcaagcacttggtcgttgctcttctttaaaaaaggatattgtgaaaaaagacagaaactaaaaaagaagggtgtgcacaaaacatgagaagatatatacaaataaccttaccaagtgaagtgagcttcttcaaccaacacaagtgacaacctctgtacacccggagaatgaatcttagatgcatttttaaagtgtttctatgctattttccaatctaaattggaagtttaccagagtaatctatgttgatccaatgcaaagctttataatacatat

SEQ ID NO: 192117 - DNA, 442 bp, Glycine max
  unsure (1)..(442): unsure at all n locations
agcttaaccacagcaacacttattctgtgtgtccaaaacccctcaattcaatggcttttctaggtttgaaaggtggaatttagaatgaggtaaatntggagcaaactctcacctcacacaagtctataacatcaatctaaacttgctcaaactggatttacacctaaatttccaccgaatcaaaatttgactcctcaacacccaattttgccctagaaatggctcttggttcactttggtcatttgtttttctctctagctcagcctaacctttctcacatgtcctaaatgacatttcaagctagtattaactcactttaacctccatttaccacagaatttagacttagccttccaactctcaaagtctcactctntttccactcataacatcacattctcactttctaaccctatgttagttctaccctttgtctctaac

SEQ ID NO: 192118 - DNA, 347 bp, Glycine max
  unsure (1)..(347): unsure at all n locations
taaatgcatgtgaaggaganatatatgaagtggatatcatattattattatacgtactatgatttgagccttgatttcctgtgtagtcaacatcggggtattgttggcatctttgagtgagataaggatatcaaggaaatcctctccatgaattttggacccttcatcccattctttgattcgctgctcaatgatgggatcatgatacttgcccacagtttctatggccttcttcaccttgccctcatgaccatctaagtcaagtcccctcaagcaagggacatagtcagaaactctaaagtcataaatgtatttaagcattgtgaaaatggcatcaagatggttca

SEQ ID NO: 192119 - DNA, 422 bp, Glycine max
  unsure (1)..(422): unsure at all n locations
acttcaccaccatagcgtcttgccaataaggtgctcacaaacccatcanaaattgaatctacaatgtgcaccatcgatttcaacggattatcatcttcaaaaactatcattgtcaacttctgttgaatcaagtctatttnttttgccttggtggcacaatcaccttgttctccaacatgagatcttagaaagaagtctatttattttctcattcgtcattcggagcctctntgtcggaatccccattacccaaccctaatacagagaaaaacaaaaccttaaatcattgtatgcatgatagtttgtaattagattgtaaaatgaaaatgtaaagagtaaaatcaagttttcctaagactgttttaattttcagtaactttaatatcaagttaatagttaaattaatttattccttcctatta

SEQ ID NO: 192120 - DNA, 462 bp, Glycine max
  unsure (1)..(462): unsure at all n locations
tagcaagcaacanaaggctcattttatttgtatcccagncgtaacccagntgcagaaatctctgtaaaaggtcaacagaatgcttgatcaaaatcatggatatctagtcatttaaaggatacagcatagagtcatagacctcatgaaaaatgaagggcgaagaagcaaactaccttagattcattaattatgatctttaatgtttaatttgtaagtaaagctttagtttccaaactatgaatattaaaaattccctggccacttgctcctatagatcacaaaagcagtgctcccagtgattgtagtggcgctgtaaaatcacatgaaggaaaaaaaatacagatttggattaaaatatgtttctcacattactcacaaaaacagattatactagatttgaactaaaaatacagattatacanatgctactaccactgcttccccttcctcactttnttttct

SEQ ID NO: 192121 - DNA, 465 bp, Glycine max
  unsure (1)..(465): unsure at all n locations
agcttgtagagaaatgtctcgtatcaattaatcgattacaagtttatcgtaatcgattacatnagttgttttgagacgacgattgatttattcaggagtctttaatttaattgattaccatgtgatataatcgattacttctctttctataagtgtttcagaagtgatcaagaattctatatgcacagtgaaaatctaattcgagtttggattgcttgtaagaattctatatgcacagtgaaaatctaattcgagtttggattagataattggattagcttctctagagataaagagtgaactagtataaaaaagtgggggaattcttctcttgatcttatctttctttggcattttggtcttaattaatttactcaagggtatagaaaatatctttcaaagaggggcttattggtttgtgagttccatcatcttggtatcaaagctacatcttataagttagtc

SEQ ID NO: 192122 - DNA, 431 bp, Glycine max
  unsure (1)..(431): unsure at all n locations
ctcagcttanagggaagagagagaccaatcacaagcacatagcatggtttttaaagattatttattcgtttgctcaaggtccaaaagaaacttgtcttagcgtttatgcgagacaaagaccaacatgttagctatcatcaccaagtaccaagaagaactaagtctagccacggcccacgagcatagggtggcagacgagtatgcccaagtgtacgcggaaaaggtggctagaggaagggtgatcaactcgttacaccaagaggcaaccatgtggatggaccgatttgctcttaccttgaatgggagtcaagaacttcctcgattgctagccaaggccaaagcaatggcgaacacctactccgcctccgaggagatccacggacttctcgactattgtcagcatatgatagaattaatggcccatataatta

SEQ ID NO: 192123 - DNA, 374 bp, Glycine max
  unsure (1)..(374): unsure at all n locations
gtattatgtgccaacatgtttggtttcaagcccattacaagacacactagatcttgtccttattacatgccttgacctataacttgcactcaatggtccattacttgcaatgttaccaatttgattctgatataataatgaagacttgaatagtgatgatgattcttgtaccaccccagcttttactaggaaatcctccaaagtcatttcctcaagtgtttgctgccttttgagcagtggctcattcctggcaaggctatngttagcttcattgtagtgtggttggcttttgtggatctgagaccaaaggtgggtagtggctgngaaatggtggtgggttcaattgctactacacttttaccctttgcaacttc

SEQ ID NO: 192124 - DNA, 493 bp, Glycine max
  unsure (1)..(493): unsure at all n locations
actcaagcttgtganagataattatgtcctcctaatctgagtcagacatgtttacaatattattttttatgaacttcgnagaggacgaagtccaatagaaaggaaaccttggaaccctctatcaagtaaagtaaatgggcataaattcggggccaaggcatacttgaaagaaatgacccttaaaatttttatacgaggtagtataaggttcgatgactaccttatcaggaatgctagtaagggaaatctaataacccttcttattttccttaatagtataatgatgaaggaatttgggggcaattgagataataacaaacacatcgcataacaccctaaaggcacacgtggctgcccagccatttggatgcaattgggtaggagcgacgtttaattctcttaacacatcaacctcaaacttgtcaaagggaacaataagatgaagtaaggagaaaaanaagatgagtacatatacataaaatgagtgtcacac

SEQ ID NO: 192125 - DNA, 445 bp, Glycine max
  unsure (1)..(445): unsure at all n locations
agcttgtatcatgttagtggattataagcatgttatttatttnaacagaagtgtttgccgtttttattttctttagaatggaattntttttaatattagaagtagattagttattactatatggcttatttaataatctataacattatcttatttcaggtctcattcttcactttttcttcttaatatctagctaatttccaacttctatttgtttccatatacctcaggtatttaaggagtcaaagattgtggaatatagtatcaaagaaaatatggtttcaccaggaaaaggagaggttagtaaatctggtatcacttaatgtaaaatttagcgctctcaatttttgttctgctcaaaaggttcaagtgcttgcttgatctcttactggaagatccaaaatgatgaatgttgcatacagatattaattgacaataagcaata

SEQ ID NO: 192126 - DNA, 461 bp, Glycine max
  unsure (1)..(461): unsure at all n locations
cgctgattactnttctaatggaactggagtatataaacttgatgcttattctaagaacacttcaaatgctaatgctgtgcgtggagtttttgtagccagtgcgttatataaagggtggacggagatagtgctcaaaaacaatttagacatcattgatacttggcatttggatggatacagcttctttgttgtcgggtaagtgtaacatacaaatactgcattaagtctattttaatgcaagtggttgttaagtaaattgcttttcttaacatgtgtcactatacaacctgatcatgtaaaacttatacaagtaaggcaacacatcaagtattacaaaattttctatagatatattgacatattattatgatcttgaattctttgtcagctcagcatcattatattttgttgtatatgaaaatttctggttgtaaataaatgtttatgaactaatgtttgtg

SEQ ID NO: 192127 - DNA, 395 bp, Glycine max
  unsure (1)..(395): unsure at all n locations
agcttataagaacannaatgccttatcatttccaaataggcatgtgaattangacgcatcaacaagaatcaagccaaggctattgtgcaagcaatcaatggggcaaaacacaccaaatgattataatgatggatggctcaaattctcacaaaggtaaaatcatcactttcaaattgagctttcaaaactatcatgacatgtagagaagaatcaaggatttcaagtcacaaaatgtcaagaacttttattttcaaaacaattacccatttcttgaacatatcctataattcaaagaaaaacatgcaaagtcgtacgtgcacacgaaattgacccaaaatattaaactgaaaatccgacgaaactaacaacattaacaaattaacaccactaacaaa

SEQ ID NO: 192128 - DNA, 476 bp, Glycine max
  unsure (1)..(476): unsure at all n locations
atactcagctgctcatgtagattgtggggataagtcatgtatgcctggatggtgcaatttgtgttttatacggatgttaattcaaggtggtggattgttgggctgtgactaaaatccatatgaaaggttattctgctatttttttctgttttggcctctgcttataaaaggcaaggatgccttatattttggataggcttctacttgtatattacatcagtaataaaagctttctgttttccctcccgtggatgtagccttactcaagggtgaaccacgtaaaatctgngtgtggtttttctctctttttctccctttcattttgctgcaacgntggtgtatgacatttctattctgctgcatctcctgttgctggtcttggttgttcttcatcacttccataacaaaccttgacaatcgattcaaacaccttaattatataagtagcctacttcaaattctcttctataacaata

SEQ ID NO: 192129 - DNA, 340 bp, Glycine max
  unsure (1)..(340): unsure at all n locations
agctggaatcngacatccgtgtganaagcgattgttctgtgtatttctcngtacttccgcngcgcaacntcgagcctctcgacatattatgcacccgaatcggacatccgtgtgaaaagtgatgactcatttgtaattctcgagagttatccatgtttaatttcgagcgcatcaatattttattaccgcgaatcggacctcagtgtgaaaagttatgaccatttgaatttgacgagagcttccgttgtcaatttcgactatcccatatgtgatgcgcctaaattggacattccggttaaatgttatgatcattttgatttctcaagagattccgttgtcc

SEQ ID NO: 192130 - DNA, 345 bp, Glycine max
  unsure (1)..(345): unsure at all n locations
gtggtaactgtgatgaatgagagtcttgtgagacacaactcanagttcaacttctctccctttctcttccttcaatttcgtgctcccccctctctctttctctccctctttcttttcctccattgaaacatccttccaagcttcttatgcaaggcccatcttggtggtgaagcatctttttccatggcttattccttaatggatggcgcctcctctcacctcttctcctttgtcttacgctgcatctccatggtgaaaaatcaccatttgacgacctcattgaagctcatagatccagcctccatagaagcttcacacgcaagctgtcattaataactcttcaca

SEQ ID NO: 192131 - DNA, 378 bp, Glycine max
cttatactctcatttatcgcatgtatcttagaggatgaaacatgtgcagctaataatggaggttatatggcgtaattaatttctctataatgtgaaccgcacaagcagtggaaaccatggatcatggattctagggttaattcaacgaaagaaatgacttttgaaatagaagattttattgtgacatgctgatgaaaatacgtcaccactagtgggtaaagtggaaagctaataaaatcatggtggatggtcacacctacagttccttctatagtgttcacagctacgacttgatttctccacaatccacacaaccaagaatatagcaattttctacaacaatccattaaaataatcattcctcttataaaatgcact

SEQ ID NO: 192132 - DNA, 415 bp, Glycine max
  unsure (1)..(415): unsure at all n locations
cccgnangcaacgagncatatttcacatcccaaaaccaactttagcttccttatacaaaccctatttcttttctaaggaaaaaaaatgattctgattccttttaatttttgtagcttttagatcttggaaacgatcataaatgtgattttttacatcaaatgagcactattaattntagcattcggttttacattggattcttcaaaattatgttgaaatgttcggtaacataattttagattataaaaattttccatgtgtttggaaatgcaatcacaacgtgacaaaatcctgngtgtcttgaaatgatttataacaactttcacactatttaactattggatgtggagagagaacattgattcattgtccgaattttcggttaaacacttatntcatatgntttgtcttatg

SEQ ID NO: 192133 - DNA, 351 bp, Glycine max
acgtagcttgtgtcttcttcataaacagggcatgcacgatggcccttaacacttgatccactcaaattcctgtatgctggaaagtcattaatggtacaaaataacattgcacataacttgaatgtctcatttcgagacccatcaaacacaacatccctttcatcccacaacgagacccatcaaacacaacatccctttcatcccacaacattgtcaagtcttcaatgaagggactgagataaacatcaatgtcatttcttggttgtcttgggcctaatatcatcatagacaacatcttgtattttcgcttcatgcataacccagaaccaagttgtaaattactatgcaaat

SEQ ID NO: 192134 - DNA, 456 bp, Glycine max
  unsure (1)..(456): unsure at all n locations
ttacggacacataaaactcagctngttaagaactgaggaaaaatcaagagcattcttgttctcatatcgttcgcgngnatgaaatccactccacaaaagtgggcagtaaacttgaatggtcgtcattgtcaatgcggaaggtattctgcgcttcactatccatgttcacacattattgcagcttgtggttacgtgaacatgaactactaccaatatatagatgttgtttatacaaacgagcacatcttataagcttactccgcacaatggtggcctcttgggaatgaagtggctattcctccttctgatgacgcatggacacttatccctgacccaactacaattcgtgcgaaaggtcggccaaaatcaacaaggataagatatgagatggatngggtcgaaccatctgagcactgaccaaaatgtagtagatgtggagcagtccaatgctatctg

SEQ ID NO: 192135 - DNA, 427 bp, Glycine max
  unsure (1)..(427): unsure at all n locations
agctngcataaagctngtctattatttccttcttagtctcctatagacatagcatatctagtatctacctgttctttcctcaccagcgttctgatttaagcccattttaaccccctccccagcccccttatattgtaggaaacaatcttcatcaaacacctacattgtttcccttcctctgaattatacccttgtccccctttcctccaggttcaccaatttagatataattgttccctcctacttgataaagtttactcccatagtttttgccatttcacaattgtttcctgcctcttttaccatctcacaacttctgggtgttgaaactgagtttgcttgatgttgtgccctgcattaccttggaatttccttcccacatgacaacctccttgagcccactgtctccattctgtttaagggatgc

SEQ ID NO: 192136 - DNA, 471 bp, Glycine max
  unsure (1)..(471): unsure at all n locations
tatcatgaacttttatctaattcatcgattctctcattttcttatagaaacctatcaagagatttcaaaattctatccaaagatcatttaaaacttgagaaaacccttcaagattaagtagatggttcactggacgagtccgctcaagcatttaaagcttgtgaaactcttaaagaaaatgagtccatgttaagcattgagatatagacaaatgccaatgaaaaatatacccttcttaaaaatttgcagtagatggagcatgtttgcctttattagtagcatcatttgaagttgtagactgcttggaccaggttctaaagcattatggtcaacttcatcagctatggctgcattagatgcctcagaagttntatccatgacaccagtgttggtaagatcaatgatgatcccacatacaatggtgtcatctatagctttagcagatgcttcagcttggatggaggcagcatc

SEQ ID NO: 192137 - DNA, 441 bp, Glycine max
  unsure (1)..(441): unsure at all n locations
agcttggggaggcactgagtgagcctattcttgttgacaggctcaggctgaccgccaaacacaaagtgtggaataggtgtgcacggccctgattcactgcaatatcatacgcgagtctcccttgtctgtttgtcacgtctttgatggcaccaccctgttgcagcatgagcttcaccatgctctcatctcctattgatgatgccacgagcggaggcgtgtcacctgttataagataataataactggaaataacgtcttattattagttactatatataccatatacaagagatgttattatggcttggcgttatctaatgctatccaatattatgcgtgagatgttcactttttcttttagaaaaaaattatttcattcttaaacgactgatatttaagatgttttccacacaggccaanaagttagtattttaagaaaat

SEQ ID NO: 192138 - DNA, 468 bp, Glycine max
  unsure (1)..(468): unsure at all n locations
taatactcacagncgntgtttctctcataagcacaagtgtttatagaaatccttcacatcaacaaccaaaaaagtctcaacttttgcaattcatcttatgtcaacaatcacaaacacacaaattgaatctgaaaaactttcttggcttgtaatgaggctgatgcaatcctaccccccaagggcattggacagaagactccaagaagatttgggacaaagatgcaagagaacgccctagggttcttcatgagccttacggtagatttcgggcctatgggctaagtatgagcccacttatctttgcacatattagattaaggtttaactaattctgttccttgtatttatggctccataatgtaggtagggtaccctagaaatatacgattnttcagcccttgtatatttacgccacctacactagtctttgtttaggggtagtttgtaattcacatgcctaagaaatat

SEQ ID NO: 192139 - DNA, 440 bp, Glycine max
  unsure (1)..(440): unsure at all n locations
agctatccttatggcttgcctctggacttcactccccgngccaccccggaagatataagccaagcccctacttgtgaggggcaacttccgccttatgacgactatccccggcgagacgatgaggaaggagatacccatcttggccccctgctccacctcatagatccgtccccacatgaactaccccaaccgaacatagtccgccatatcccggcctcacccacacccgtaaaagaatctgttcccttctcggaagataagggaaagattgacgcgcttgaagagaggttaagagcagtcgagggccttggcaattacccattctcggacttagcggatttatgtctcgtgcccaatatcgtcattcctcccaagttataagtaccggactttgataagtacaaagggacgacatgtccgacagggcatcttcggatgta

SEQ ID NO: 192140 - DNA, 426 bp, Glycine max
  unsure (1)..(426): unsure at all n locations
ngcttctacaataactccactagatactgtggaggaatttatgaaaaaggctgaaaaatacatcaactataaaaatgtcttggagctagaaagttaagtcatcaaaaaaacaaaatacacaatagacagaaacacaaacaaaaaactacaagctgccttagtcgaatgaaggaactacttataaagtcagaacaaaaattgacgactattatacacccttaaacgcttcacaggggagaatattgaatgaaatcatgaacatggagtcaaaagatatagatcttgatgtacctaaaccattaagaaccgggaatggcaatagagatccgccaaattattgtcgctaacaccgtataatggggcatggcactaatgactggtttaattgaaaaatgccattgaaatccttatacaatagggcaaact

SEQ ID NO: 192141 - DNA, 391 bp, Glycine max
  unsure (1)..(391): unsure at all n locations
agttctccttccatggcttattctctactggttggcgtctcctctcacgtcttctcctttatcttcgtggctgaaaataaacattgaaggaccttattgaagctcaaagatccagcctccatagaaatttctcaagcaagcttccatcacatgcatccaaaatcttcatgattcacatacatagggactcattaggtaggtttattgttatttttggtttcaatacaaacctaggtgctcatatgggacaccttaggtttgtcgtactttttggttggaataatcagcatgaaaatacagaaaaaggtacgttttattgcattactttccttaatttttaaatagnggcaaagggtcccatggccctagagaataaagtcattctgagtac

SEQ ID NO: 192142 - DNA, 234 bp, Glycine max
  unsure (1)..(234): unsure at all n locations
atnttaactactagacaacggctttttacgacggttaatatatgctcttaacgactgtttcaaaccgttgatgtatatagtgtccctaaaaccaaattatcttttacgatggttattctaataaccgtctttaaatgttgcgtctattttgatattcaaagacggttattagctaataaccgtttgtgaatggtgcgtgtgatttacatttaacgaccgccataagctacatac

SEQ ID NO: 192143 - DNA, 418 bp, Glycine max
gcagcttcttatccaagacactctctcgaggtgaagcttcttcttccatggcttattccctagtggatggtgcctcctctctccttttctcctttatctttcgctgcaactccatggttgaaaatcaccattgaaggaccttattgaatctcaaagatccagccttcgtaaaagcttctcaagaaagcttctatcaagtggtatcagagcacaagagcttcaagtaggtgctccttaaacctccattaattttcagctttaccttctcctcaattattgtttcttcattttttttctccatgtatttcctcacatgtcttgtgttgaatggtgttaacatgactctctataatttccacccatttaacttgctatgagcgctatatttgaatttctatgggttgaatttcttgttctt

SEQ ID NO: 192144 - DNA, 416 bp, Glycine max
  unsure (1)..(416): unsure at all n locations
ntaggagaaaccataaaaactaaggtagttcctaaacaaatatatattgaagaaacttcgccaagaattcccattgaaaaacctttattcaaacctttcaaagttagtgagaaggctaaaagaaaaattatggaacttaaaaaaactaaatccttaattgaaggtgtaggtgacaaccatagtgaattactaaacaagattggtagtttacttaaagtcattccagataccccccaagcctcggaaaatacttccaaaatggtaacaagaagtacctccaaattaatcaatgttattaataaagatagtgaccaanactcagataacacaactgagataggatcagtgtcagaaaagaatataaatccaattaattccaaacactggaagacactctccannatatattatcaacg

SEQ ID NO: 192145 - DNA, 447 bp, Glycine max
  unsure (1)..(447): unsure at all n locations
agataaacctaagaaggagtgagatattttaatttcctgagnggaaaccctttcgtgaggagaaatttgtatatgtactgtcgaaacacaaagaccttntattgttgaaagtccaacaagtggttggcaatggttgtaactggtattgtagctaatctagttgtggctaggtgtgaagtccagtggggttattggtaggttgttgaaatcttgtggtttgcttgtccaatagtggctggttgttttagtgagatctcatcttgaagggtaaggactggacgtancccaaggttggggaaaacaatataaaaatcactatgcatcaacttattcttgtctctctgcactattttngaactatgagttgctaactatttttataagcctttaagtcaagctaacacttttataaaggaacttagaactaaatcttttcattaaagtatt

SEQ ID NO: 192146 - DNA, 439 bp, Glycine max
  unsure (1)..(439): unsure at all n locations
ttccttcatctgtctttcatcattctttcctaagntntcttttccattgtttaatacaaagcatttgcaaccaaaaacatgaaggtgtgaaatgttaggttttctaccattaaacagttcatatggagttttctttaaaatgggtcttattaaagccctattcatgatataacatgtagtattaacagcttcagcccaaaaatattttggaagaggagtgtcatttaataaggttctagcaatttcttccaaagatctatttttcctttcaacaactccattttgttgaggggttctaggtgcaaaaaagttatgttcaatgtcatgcttatcacaaaatagttcaaattctttattttcaaattcaccccatgatcactcttaatagatataattttgagattttcttgtttgaatcatttttcaagattctaaatgc

SEQ ID NO: 192147 - DNA, 392 bp, Glycine max
agctgaataagattgagaaaagctctcgacgtctgtgagtatatatattattctgccaaattttaatttcagagcttaagcttttattttatttttatttatttctaaggtactgacaaagaatcacactctcatcccttggcaaaccaacctcttgcagattagtttttccatattcgaagctgcaggctatgaagcttatggtactgaaactcctagctttcgtgttcctttggttgtggtggagtacttgtattcatgttaaagcagaaaatgatcgtttaaagcctggtgattcactgaatttttcacaatcactaatttctaaaagcggcaaatattcaacaattatttttcgtattcttgatgaggatgaatatcacttatgaata

SEQ ID NO: 192148 - DNA, 478 bp, Glycine max
gctgtttggttctaacatcccatttttcatccttctatccatttcttgttttcttcattgtgaaccaatgatacatgcacaacctgtacctattgatggctcgttgttgcgcttacaagacaaccatatttcgaatcatatgtgggaaggccaacaaagaatcattcgtctgaggtataattttgtcggtgcttttacacatttggattggatagataatcgtatcaaaaacctaatcactttagttttttttttgtcatgttataaatgtcaaaaaaattgatattaaccatcatttggttaatgcgttggttgaacgttggagaactaaaactcacacatttcattttccacatggagaggcaaccataactttacaagatgtgacctgtgtctgaagattgatggattgccggtaactggtatcatcacctgtgatgtatttgttgcttgtcaggcattactaggtgacactcca

SEQ ID NO: 192149 - DNA, 342 bp, Glycine max
  unsure (1)..(342): unsure at all n locations
agctatgagccaattcaaacaacataacgttgtactcggatgtctgattgagtcccgtaacatatcgagacgctcgaaattgaatgttgaagctctgagccaattcaaacgacaataacttttttctccgatttctgattgagtcccgtaatatatcgagacgcaagaaattaaatgttgaacttctgaggtaattcaaacgacaataactcttttctcggatgtctgattgagtcccgtaacatatcgagacgctcgaaattgaatgttgaacctcttagctaattcaaacgacaacaactttnttctcggatgtctgattgagtcccgtaatatatcgag

SEQ ID NO: 192150 - DNA, 424 bp, Glycine max
  unsure (1)..(424): unsure at all n locations
ntaacattcaattacgagcgtctcgatatgttacgggactctatcatacatccgagtaaaaacttattgtcgattgaattggctcagagattccacattcaatttcgagcatctcgatatgttacgggactcaatcagagatccgagtaaaaagttattgtctttgaattggctcatagcttcaacattcaatttcgagcgtctcgatatatgacgggactcaatcagacatccgagtaaaaagttattgtcttttgaatttgctcagagcttcaacattcaatttcgagcgtctcgatatatgacgggactcaatcagacatccgagtaaaaagttattgtcttttgaatttgctcagagcttcaacattcaatatcgagcgtctcattatattacgggtctcaatcagacatccgagtaaaa

SEQ ID NO: 192151 - DNA, 433 bp, Glycine max
  unsure (1)..(433): unsure at all n locations
agctntacaacagaatttagtaatgacccctatcctagaattaanataacttaatgccattaaccttgggaattaaaaaaaacttaatggctgagtgtaactgaaattgtggcaaccaaaagtcacccccaacagccaacaagtcagccaccatttggtctcccaaaaggctgatgcctaggttgccaattgggcccttattacaacttgaactaaacctactaaagcccttgtagttgattaacccaaaacatatttttggtcagccaaatttacaaggattgggccattatttagacaaactaaacactttaaaattgaaacaaagtggtgccatttagtcctnctccatttgggccatgatacaactcacaaccttggacttttctccttgaaacttgngtttgtattcaaatagtatggacaacacttg

SEQ ID NO: 192152 - DNA, 447 bp, Glycine max
  unsure (1)..(447): unsure at all n locations
tgacattggattntatccatcaattgccccaattcttgcaaactggcaacctctaggcttttatatttgacgtgatagaaccttttcttaaacaagggagcttgattcgatcccttgtttgctagaatgaaaatttttgtttgatcaataattcaacaccctatcatggaggaaatatgatgaatgcatgaaggaatgcttattatatgcatgacacaaatgcattttacagacatgagagcctggaagatcacctcttcttacccacaaggcattgagcatcatggttcatttacagtcattagcatggtgccccatgcatgcatttaagaaggtgatgcggacctttcgacttcctgtgacanaatgatgagacaaatgaaatacatgagtgacgatgcaatacagatatacatgcatgagagcacgtggttgatagcacaaaac

SEQ ID NO: 192153 - DNA, 397 bp, Glycine max
  unsure (1)..(397): unsure at all n locations
gtactacctcatgcactcctctaatgactatggcatcatttctggcgctaaactgctggagagtggaggccatcttcttnattaaatttctggcttcagcaggagtcatgtctccagggctccatcactggcagcatctatcatacttctctccatattactgagtccttcataaaaatattggaaaagaagctgttctgaaatctgatggtgggggcaactggcacatagtttcttaaatctctcccagtactcatacaggctctctccactgagttgtctaatacctgagatatccttcctgatggctgtggtcctggaagcagggaanattttttctaagaatactctcttaaggtcatcccaactcgtgatggaccttggagcaaggtaatac

SEQ ID NO: 192154 - DNA, 533 bp, Glycine max
  unsure (1)..(533): unsure at all n locations
tgggtataaatgttgtcaacataaggggccctttgtttgatntatgttgaacttgtttgcaaagttggtcactttaaagccgacannaagttggtggatgaaatttctcctggannaagcaccttcttcttcttcacaaagttgaaccagtcaatctcttatttgtgtttagtcccgttaatggggaagagcnngaatttgaagcaattggtgaatatngcatattgggattgtcacaaaatattagtttaagtatttcttggagtggtctccaacattttaagctggttggagaaaagtttccttaagcnncatgtaatctcacattccanngctgctgccatagcnnacggtaatcagctttcagcacttagaatctaacaactgttttttgcttcttgctcctacaagggatcaagtttcctccaatgagaacacaatatcctaaagtggacttcctatntgatggtgatcctgcccaatcagcactagaatagcaaacgatgacagcatcacaatntgtatgacaacat

SEQ ID NO: 192155 - DNA, 403 bp, Glycine max
  unsure (1)..(403): unsure at all n locations
ctcttttttttttagaagaaaccatttttacctcataaaatatattgaaatagctccttagtttattttttctgaagacttgcccaactattatatttttgaaatatatcttttaacttcaaaataatttcctttcaaaatcaaataaacataaccttaaacaaaaatattaaattntatttagcagtttacaaagacatgggtgagttcgtttgtagtttctagctctaaccttcttagagcaaattaaaaaatctctaagaaatgatgactgtctcgagttcgtttacttaagcatgataatcaataaaagttatgtgaanaattttcaaattaaattcattctctctttgatttganggcaagtaagttacagaaagaataatanaaataattaataatt

SEQ ID NO: 192156 - DNA, 464 bp, Glycine max
  unsure (1)..(464): unsure at all n locations
tgtagagttagcatcggggaaaaaaggaggtgttagaaagattttatgtcactcactgggaagngcaatgagcgagggcaaaatcctacacgtggcacctcttcccgctgacacctcttcgccctatgtgtggctctattccaacctcaacctccctcaccggcccggtaataatagcatactttattctaagagagccacgtgacttagccttcgcccagaacacagaatccaacttggaatggaaaccaggcccaaccaggtaagcccaagcctgttccaacattctagtgccctcgcaaccttntattaagcaattactaaactaaattaaactgttttgaatcataaaaaataattaatctttaaaaaatatatttntaaaatatataattataattaatacannatattattttaaaataaattacttatgcatgataatgtaaaataattatattttc

SEQ ID NO: 192157 - DNA, 420 bp, Glycine max
agcttggacatggtcaagaactgatgacgagttccctctcgtttgatcgaacagttcggactgctgaatctccaacctatggtgcttggcatgctgttgtggtgggacgggatgactgtgtttgcacgtggggatgagggcgatatggttgcttggggcatgggagtgatgaatgtgactcagtacctaaggcggtggaagcattgagcaatgtcaaagctattcatgttgtagcaggagattacacaacctttgtagtgtttgatgatggtgatgtgtattcatttggttgtggacaatctgctagtcttgggcataatgctgttggaaatgatgagtaggtctggtttgcttcctgcctttcttccatagtttgatttgagttggtatttgacttcggtcaagtgatgtggttacata

SEQ ID NO: 192158 - DNA, 462 bp, Glycine max
  unsure (1)..(462): unsure at all n locations
tcattgttntcggtctcgatgaagttatgtctgtttattgatanttgcactacttccacttggaccatggaatacgtaccgtataccaaccagaaaagtgtcttttctgtgaaagattaaggagtaaatcaatatgcttataggactttaaggagttctttgtcccatctttctttagcctttcccagttgttccttcaattcttctaaatcaccatgttagctgctttaggctgaccatttgtttgaggctactccataaatgttaccctatgcttgataccaagacctatcataaaattattcaacctctagtccacaaaatgtaaaccattattggttacattgacgcatgttatgctaaagtgagtaatgatgcaaagaaatntttggacattcttagtagtgattggtgccaatggttcggcctctatcctcttggaaagtagttgactactactaa

SEQ ID NO: 192159 - DNA, 403 bp, Glycine max
gatccttaagcacctgcggctgcagcttggagtttcagtgccaattcgtcctcttctttagtccagtcttcttctggcttcaattcatcagtgggctttccttctgtgtccagcatcttgggatgttcccagcctttgatgacagctttccaggttctgctatccagtgatttgaggaaggccaccattcttgctttccagtattcatagttgcttccatcaagaattggtggtctgttcactggtcctccttctttctccatgttcatcagaatttatctccccaaatctcactctgtgatttcgagtgttggctctgataccaattgaaattctgataccaggggacaaatgtctacaggatgtcacgacatcacgctttagaacatgcagattgtatgtg

SEQ ID NO: 192160 - DNA, 472 bp, Glycine max
  unsure (1)..(472): unsure at all n locations
tctcagatccggtcatggaaagactnggcatactgtcttcattatgcagtaccaatacaacacggatatggctcctgatcggaaccaacttcagagcatgaccaagcgggaacatgagtccattaaagaatatgctcaaaggtggagagacctagcagcccaagtcgtcccgcctatgactaaaagggaaatgatcacgattatggtagatacgttgcccacgttctattacgagaagctgatatgatatatgccggctaactttgcagacttcgtctacatcggagaaagaatccagtctggactgagaaaaggcaagtttgaatatgcctccaatgttgcccccaacaacaatagaagagccccagtggtgggcacacgaaaaaaggaaggagatacccacgcggtcaccaccgccccaacatggatgataacgccccaaaatgcccaaaactcataccaacacaaccac

SEQ ID NO: 192161 - DNA, 349 bp, Glycine max
  unsure (1)..(349): unsure at all n locations
agcttcattaanaacccgaaccttgccattttctctcattttcatgtcagcttctaggggagtttagagcaacaaaacttcttgttcttgagggttggtctaaaaaccttgaagccttgaaatgtttgtaagcaagttcaccctttactctaaccttttcattcttcttcatcacttgaatcttctctcatgttcttgagttttgttgaagcttgtttctcactcaagagaacttcattcttggatgtacccttcttattcgcttggaaactacaagaggtaaggggggtctctacaatctttggatcctaaccatgcgatgtatgaaaacttatcttaaaaaatgtag

SEQ ID NO: 192162 - DNA, 377 bp, Glycine max
  unsure (1)..(377): unsure at all n locations
ntaacattgataggtggggtgtttggaattaagggtatgttgttatcatggtatctaggnggcggtagtccatgtgggggttggaatataaaagagtagttgtgaatgatattttgaatttctaagggtagagtgtgtataggtgaatctagctcaagtaagggttgggaagtttatgttgtgagagagggtgtaggttacaaggtgagtagatggaaggaagcaatggagttagtttgtaccaattggaaaattaaaggataagtatatggggtggggttagagtgtgggttgccaagcaaggtaaatggggcattctgacaggttaataanatgcaaggaatatcaaaatcagttgtaatgggtcttatggtatg

SEQ ID NO: 192163 - DNA, 445 bp, Glycine max
  unsure (1)..(445): unsure at all n locations
agctgtgtgaatcanatcactcctacatcttatctctagcatgcattcatttttctttacctactcctcacgtttggtttttttaggaaaaacaccataactaaacgcgctacaaggcatccctatcgcaccagatccaaatctagaacgatgggtgatcaagaggagacacaggaacagatgaaagccgacatgtcggctctgaaagaacaaatggcttccatgatggaggccatgttaggaatgaggcagctcatggagaaaaacatggccgctgctgtcagttcggctgccgaagcagacccaactctcttggctaccgcgcgccatcctgcctcatacacagtaggacggngaaggaacacgctggggcacgacgacnaccctcatctgggatacaaccgaacagcttacccttatggattgccgcctaactactcacccc

SEQ ID NO: 192164 - DNA, 439 bp, Glycine max
  unsure (1)..(439): unsure at all n locations
tataagaacannaatgcctcaatcatttccaaatatgcatgttaattangacgcatcaacaagaatcaagccaaggctattgtgcaagcaatcaatggggcaaaacacaccaaatgattatgatgatggatggctcaaattctcacaaaggtaaactcatcactttcaaattgagctttcaaaactatcatgacatgtagagaagaatcaaggatttcaagtcacaaaatgtcaagaacttttattttcaaaacaattacccatttcttgaacatatcctataattcaaagaaaaacatgcaaagtcgtacgtgcacaaaaaattgacccaaaatattaaactaaaaatccgacgaaactgacaacattaacaaattaacaaattaacataactagcaaaaccaaagaacacttccgcccccccatacttaaacaacac

SEQ ID NO: 192165 - DNA, 239 bp, Glycine max
  unsure (1)..(239): unsure at all n locations
tgcacgcctaccgagcagatgcactatacatgagctcangctctatcagccaggcagaacagagcatgggcagagagactctgctcaaaacctccactcaagatgcacgttgtgtcacgtgaagaccactgtaacattcccgacgatccagagggttatccgtaggagcgtctcctgaagtttgctgtgagtcgatagtgcatacgcctacgttctgagagttggtatctactagctca

SEQ ID NO: 192166 - DNA, 452 bp, Glycine max
  unsure (1)..(452): unsure at all n locations
gcttgaggcctaggatcttcttcacaatggattcctttgcttcttggaaaatgaatggcagcggaatggagaaggaagagagagagagagaggagacgccacttcaaggagaagatgagtctagaagaagctcaccaccataagaggccatggataaaagcttgggggaagaaggagatgaatgaagggagagggagagaagagcacgaaantttgtgctccaaatgagctttgaaatctgaattttaatattcaaatgatcaaagttgaaaaaaatgcacacacatgacctctatttatagcctaagtgtcacacaaaagtggagggaaattcaaatttcacttgaatttgtggagccaaactttggagccaaaatttcactaattatgaattagtgaatttagttatgggtcagcccactaatccaagatcaattccaagattctccact

SEQ ID NO: 192167 - DNA, 501 bp, Glycine max
  unsure (1)..(501): unsure at all n locations
actatatcatactcaagcctatgcgcatatttccttacatacgttctcttgtacaagacatttaaccgaattatttctcccatatacaatcaaggcagcttcgttacctagattatttacacgtactgccaaggtgtatntgttacttacatcacacacatctccttggctgaatttacatacatgcatactcaaagcattttggggtaccaaaaattgcacatgtgcacatcttggtatttctaatacctatatatacacaaacttcatgatgaatcttgactatcttcacaaaaaggtgctacacttcatcccttttttcaagtttttgctacctaaagccgcatgcaaattcaagcatattttcctttgcggactaaaattgtattcaaattaaaagggtatatttttgtaatatgttttcttcacataacatgcaacatatttatatatatnatttttttgcgagggcatttgactaccacaaaaatatatatacat

SEQ ID NO: 192168 - DNA, 304 bp, Glycine max
  unsure (1)..(304): unsure at all n locations
agctngngcactcaagaagtattctaactccttcttcggttattgagaattgaagacagacaatgtttcttctgatgattcaaaatcaatgaccatgaatgatggatcatgccataaagcttgccattggaaaaagactaaggattgtcctgaacaaacttgttcaatgtccttggtaactgaagaggttgaagttggtgtagatagggtagaaggagctgatgaacataaccatcctacttcttcaaacactacaaactcatccaatggctctggctcaatgatgcatggaagctcatcatgc

SEQ ID NO: 192169 - DNA, 490 bp, Glycine max
  unsure (1)..(490): unsure at all n locations
ctcaagctngatatttcggggtcttgcaacttctgattgtgctccatattcttttattattctattctgggcctagcgttttgttccctcatcaagtctataattntagccaatagaatacagttgattagggtaatgctgaacctgtattttttttcatgcttgttaacaatgctttgattatatgtcgataatgaaaagttgaagagatggcggaaattacacttttgaagtgtgataaagataaaagtagcattttaaaggactaaaaaagtccaacttaaaaagatgcaactacttttaaagttgctttacttagcatgacacctctgcaagttccaaaaccctctgnggtcttgacattctaattggcatatttgagttntcatgttcagaggaattctgttatagttgctatgattgcatttgctgggaaacaaaatgctgtnataactcagagcaacaacacatgtaaatntatattataccc

SEQ ID NO: 192170 - DNA, 389 bp, Glycine max
  unsure (1)..(389): unsure at all n locations
acctgangcatgcagcttaggttgctcttgacancagcgcactgctagaatgtattgatctatatggcgacccgcacgagaacatagaccatanactcttgcgacaagtgtgtatttctgattcatggcaggctgagttactatgttgaccaaggcatcaagttttccctcaagctttctatattcagtatatgaagaagaatccatggccacctcatggactcctctaaagacaatagcatcatttcttgcactgagttgttgggaagaggaaaccatcttctcaatcaaatttctagcctcaacaagggtcatattaacaagaagctcaccactggcagcattaatcatactcctctccatgatgcttaagccctcatagaaatatt

SEQ ID NO: 192171 - DNA, 406 bp, Glycine max
  unsure (1)..(406): unsure at all n locations
tcagctattattgtaggggttcttctgtaatggctggctaaacactctatttggttattttaatgaacaactgatgtaaatacctaatatctaatngatcatttttttgtgttcaacgcttccttcaatgcttaatgtatgtatgcttttggtttgatcatccatttgtgtgcatagttaggtgactttatcattgggagatgtactgttgccttagaacttgattgaagcatgatcgaaacttagtcttataagagggatctgcggatgaagttattggtttaactatgttgttacaagaatgttgttatactaagcctagtcttacaggagggatctgcggacgaagcttaggctaaattatgctaaacttttgtaagctgcttgagctaagcctattcttaca

SEQ ID NO: 192172 - DNA, 412 bp, Glycine max
  unsure (1)..(412): unsure at all n locations
agcttagaacaataactcggccttctcttaattgtctttgggcttggcgaccacgatcaacatagtactttcggcacctactatatgttgacttgaccaacgctgttattggaatgctgcgacaatctttcaacaccttattgacacattctgataggttggttgtcatgtgaccatatcgtcgtccagatgtatcgtaagccatgctccatntttcctttgaaatgcgatcaatccatcttgctatggctggactcagttgacgaaatttttctaagttttgatcaaacacatgcttgcaaggagtgtacgctgcatcaaanttgttatcatcaaaagttgtacgtagacatcaaactcaaattaaattaatgtataaaatcaaccttacccaatttcttgaacatctctt

SEQ ID NO: 192173 - DNA, 463 bp, Glycine max
  unsure (1)..(463): unsure at all n locations
tggtggtactatagctgcactaaanaggggttgtggtaatctaatgttgatgcaangcagnagaagggggtaaagacaatatattactacaattatatgaaatttagtaggtaatactaagaacagaaaaccattgcacgcaatcaccattataggaattgtgattcattatgaatcacagtagcatgaccgaaaataaaatagccgctgtgtaaaatagcataacaattgtctcaaatacaggaaaaaaaatactcctacgccatcattagccatttttagttatcgctctctttaaaaaaaaatgttgcccatttctttcgaattgtggtgatgatgtcgatgtccaacggtgtgtcattagcaaaccactgcaagtattcataattgtaagttagtactgcacatataaaaattcagttccaattgcactgaagtttatgcataccatggaccagtcact

SEQ ID NO: 192174 - DNA, 437 bp, Glycine max
  unsure (1)..(437): unsure at all n locations
agctnacacanacatcactagttctacacactctttgtacaaattgtcatacatcaggtctatagataccaatcaactcatgcctcagtatgaatgtatgcacctagaccctcaactctcataatgcaaatgtggtaccattctccaagtgaaatagtcctaagcattgtccaccacgacacctctcacttatcaaaattatgctagtatagtgtcgaagtcatccttgacgtgcacaggcaactccccctccccctcacgatgatcagcctgagtctcataggaattccaaaccgagtgacatgcactcaagtacaagtattccttctcatgagaaactacaagtacttactgacaaagtttatactatttccatgtcatatgaagtatgacacattggcaacatacatgcactgatcgcggataattaaaaatct

SEQ ID NO: 192175 - DNA, 390 bp, Glycine max
acattttcccttttgtgcacgagagcgggcgatgcaaaactagggcttctgtttctctttccgaactgagtagcagctctgaccatggcagaggaccttactcatatcgcttaagtgctcgaccaaaccctccaccccgatgccattatcattcgcaccgccaccgccaccatcgtacttaatcgtatctccctcactctgcacttccctttctacctccttttcatttccactagtaatctaatttaattcacctattcaactcctcctttcgaaaatcttacaatcacaataattctcatttcgtgttcgcacacagtgcaggaaatcaaggttagaaaatcgttgctgctacctatctaaagaacctcactcgtcgcactgtcgata

SEQ ID NO: 192176 - DNA, 336 bp, Glycine max
  unsure (1)..(336): unsure at all n locations
agcttcatcttctaccaagaagatagtgatatggaaaactcaattgaaatagacgaagatgatgatctgagtctatttgtaaagagatcaacaaattcttgagagtaagaggaaatcaaagaaaatcaaactttaaaccaaagaaaaaggcagaagattcatcctctactctaaaatgttatgaatggctaaaagaagtctgaaaagacaaattttagtgaaaagaaggcgaagaaggcctacatcacacgggatgacaatgatctggaatcatctgagaattcaaaanatgaagtgattaacctgagtctaatggctaaaagttatgaaagcgat

SEQ ID NO: 192177 - DNA, 472 bp, Glycine max
  unsure (1)..(472): unsure at all n locations
tgcctaagcaaccgattatgactacaatttgttctctaaagttatggtagtcaaattcgntatgggaatgttgtccaaatgctattgagggtaaagagtttcaacttagttgaaaaaggtataattgatttggcagttacaatttctagtatggtatagtgtttgacttacgatttcctacattaaagggtagacttgagcaatgaaaacaaaagactgcaccaactaaataagacaaggtggagtgttctagatcagctgaaggtagggggcatataactgtgttattttaagaatatgagtctactttctgcaaaccagtagaggtgaagctgggggcatatagcattggtcgcaaaatattgtaagtttactttcagcaaacccattagttgcaaaagattcgagttntcacagtcgaaccatattagcttgtgatcaatgtgacatgcagaanatgttcccacaagta

SEQ ID NO: 192178 - DNA, 279 bp, Glycine max
  unsure (1)..(279): unsure at all n locations
aagcntgaaatcgacactggtttggaggttatttaacaccttgcatggcttaggcttacaagcaccactctttatactccatgatcggatgacctctacggagcaaatcggatgatgactataccgctagtaagtcctgttagcaccccattaacatcaccaggttaccctctcgtttttcaagcgtatatgatgtgcatttcgctgccacaaagctaattgatagagcatttaattggcaacctgattttttaccccctgtgtataacgattgttgaa

SEQ ID NO: 192179 - DNA, 391 bp, Glycine max
tggactcgagtcatcatgagattataatatgtgaccattttttattttatacatcagaaccatgccgcttcgtctttgttgacatcatctctttaacatttctcaatagctatctacaggacatttctgagttatgattgttcatctataatacaagttttgatctgcactatatcctccaacacaagctgcttgatcataaactagtgctattcatattattcattctcttatgacctgggcccaggagccgaaggactaaccgcctggattcttttgtgtcactgttctcccctacaaaagaaccagacgactagccgctggacaattctcttgattcttgccttctcctcaagcgaaagattaccacggactaaccgcctgaaatatc

SEQ ID NO: 192180 - DNA, 371 bp, Glycine max
  unsure (1)..(371): unsure at all n locations
agctngtcaaaactcaggagaacacatccttgttccaaggctcattaaacccaaggttcacccttggtgaacccttcttttgctaagttctatctccacaggaactcaaggtatgcaaggtctacccttgacaatattttatattcatagctcttatctatgtagggaaactagtctacaggtgcatcagaaacccaaggttcacccttggtacaaaaacccaaggtccacccttggcacatagtcctaaagagcccaagaggcaaaggtccaggttccacaagatgaactaccaccacaatggtcgataataccttcagtcaactgaaagtcatacttactcctcataaccatcaggggagaagctcaat

SEQ ID NO: 192181 - DNA, 360 bp, Glycine max
  unsure (1)..(360): unsure at all n locations
tctcaaggaggtgagcttagctattagagaggtatgtgtatcttatctctagcttctttaggaatcttcttaaggaatcttctcaaggaggtgagcttagttatgagaggggtgtgtgtagctaagctctagcttctcaaggaagttttctcaaagaagcttctcaaggaagttttctcaaggaagctacctagtctataaatagaagcatgtgtaacactagttgtaactntgatgaatgaaagtcttatgagatacacttcaaagttccacttctttccctcttttattccttcaatttcgtgctcccccattctctctttcttttcctccattaaagcatcctcttcaagcttctta

SEQ ID NO: 192182 - DNA, 438 bp, Glycine max
  unsure (1)..(438): unsure at all n locations
agctggagaggatgcttcaatggatganaatatatagggagagaaagagagaggngngagcacgaaattgaaggaataaaagaggtagagaagtggaactttgaagtatgtctcacaagagtctcattcatcaatgttaccacaagtgttacacatgcttctatttatagactaggtagcttccttgagaagctttcttgagaaaacttccttgagaagcttctttgagaaaacttcctggagaagctagagcttagctacatacacccctctaataactaagctcacctccttgagaagattcctaaagaagctagagcttagctacacacacctctctaatagctaagctcacctccttgagatgagaagctagagcttaactacacaccccctataatagctaagctcacccccattccaaaaatacatgaaaat

SEQ ID NO: 192183 - DNA, 457 bp, Glycine max
  unsure (1)..(457): unsure at all n locations
tgttggattatggggtacccgtcatatgtggtactatgtgttgttcgggcgatggngcaaatcaactctcccacttccacaaatcaaacatgaacccaccatccccagttgcccaccttcaactgagctcacgtactcctacgtagcccttatcctcgttcctctcaacaccgggtccccatcaacccctccaagcttccataatatccaagaaattcaatttccaaatatcatgaactaccctaaaccaagaaaacagggcagaggcagaaaactctgcccaaaacacattccaataccatagctttccctactcaaataccccagtaacattctattcgttcagattcgtcaaccggttgaatcgactcgaagcttttactagaggttcctagtacataagtctacatnttgaaccgtgggatctgctatgaaatgtccagaacccaatatgtac

SEQ ID NO: 192184 - DNA, 324 bp, Glycine max
  unsure (1)..(324): unsure at all n locations
agctagctatgattttatacatgcacccaattagcgaaatgggcctataatcatttanggactgcggntgggttatcttggggataagagccacaaaaaatgcattactccctctatgaaaagtgccatggacatggaattcatccacaaatcttctaaaatcaggttgcaacagcccccaaaattccttgataaaattaaaattaaaaccatccgggcccgggcatttatctccagcgcagctccaaacagcatccttgagctctatgtcagaaaagggagcagtcaacccctctctttgatgttgatctatggagggaaaac

SEQ ID NO: 192185 - DNA, 466 bp, Glycine max
  unsure (1)..(466): unsure at all n locations
ntcattgcatctgtnccccacacaaagttgtctttcttagtcaaatctgtcagaggttttgccactttaccatagtcttttatgaactttctataataacctgtaaggcctaaaaatccacgaactcctttcacattctttggctcaggccactcgagaatgcacttgactttctctggatctactgccaccccatctccagagataacatggcctagatagtcaatttgcttgcagccaaatttgcacttagacgggtttgcaacaaagcaatttgctaacagcaccgacaaaacttgtgttaaatgatcttgatgttcttgagtatctctgctatatactagaatatcatcaaaaaagaccaatacaaatntcctcanaaatggtctaaaaatatcattcatggtggcctgaaaagtggctggagcattcatcaacccaaacggcataacaagatactcataat

SEQ ID NO: 192186 - DNA, 397 bp, Glycine max
  unsure (1)..(397): unsure at all n locations
caagggaacctgagaagagggtcatgatcccccagtaacagacacagattgctgataaaataattaatgatcagaaagctaaatttggtggcatcatccaaaaatacaccagcaaaaacacacaacgacaaccccaacttacagatttaaactttgtatgctcacttgagccaaacattgaccgatcatgttcagtggtaatagacaaagattgctgcataaaatattgattgatgagtcaactaaaattctggtgccactcgttgcgacattcaccaagagaaacagagaaagacaatgttagctcacagattcaagcattgtagggatcggccactcaagtactgaattctcgatcttgcnacatggctaaatgatattgaatcgacacttaaaa

SEQ ID NO: 192187 - DNA, 384 bp, Glycine max
  unsure (1)..(384): unsure at all n locations
aacttttgagctttaatgtatccctccggagcgggagtcggagctgtattgttacaaagtgggcaccctattgcttattttagctgaaaacttcatagtgccaccctcaactaccccacctatgataaagagctttatgccttaataagagccctccacacttgggaacattaccttgtttccaggaatttgtcattcatagtgatcatcaatcacttaagtacattagagggcacagcaagttaaacaagaggcatgcaaaatgggtagagtacctacagcaatctccatatgttatcaaatacacaaagggaaaaacaaatgtggtagctgatgccctctctatgaaacacacattgttntgctccctaggagctcacattt

SEQ ID NO: 192188 - DNA, 304 bp, Glycine max
gcaagtcaataacatgtgtgaagcattcaacaatgtaataatgggacagactaaccattattcactattgagggaatgcgattttacataaagttctaaaaatcgtgaaattgaggactatcctcatgaggtatgaaggttcaatctgtcctaaaattcagaaaatcatggaaaataaataaaaaagcatgtgaagcatggcgagcacattaatctggtgatgctgatttggctttgtttgaggagtcacagggcatggaataatatgtcgtcaatcttaaacaacaggcatgttcttgtagaa

SEQ ID NO: 192189 - DNA, 403 bp, Glycine max
  unsure (1)..(403): unsure at all n locations
agaaaannataaattaattgtttctttttattgtctggtgtttccttccacaagttgttttcaattgtgtggtacttagcattgtatacagaagttacattatttaaaaagttaacctcaccatatatttaaaataaattgtttttatataaataccaaagatcttagataaatttaaaaacattgaattaaaactatcaaatgcagatattaattagtcagagtaattcatcttgaccagtaatttccaattggacgtaattcaataaatgtaagggaacttcaaaacctatggatcaaacttcaaagatgcacggagcttgaattgcaagacanattttntttttcttttgataaaaaataatccgatggctggtattatgtgagcaggaaatacatactt

SEQ ID NO: 192190 - DNA, 374 bp, Glycine max
  unsure (1)..(374): unsure at all n locations
gcttataagaacaaanttgcctcatcattgttcaatatgcatgtgaantattatgcatcaacaagaatcaagccaaggctattgtgcaagcaatcaatggggcaaaacacaccaaatgattatgatgatggatggctcaaattcttacaaaggtaaactcatcactttcaaaatgagctttcaaaactatcatgacatgtagaggaaattcaaggatttcaagtcacaaattttcaagaactnttattttcaaaacaattacccgtttcttgaacatatcctataattcaaagaaaaacatgcatagtcgtacatgcacaccgaattgacccacaatattatactagaaattcgacgaaactcacaacatttac

SEQ ID NO: 192191 - DNA, 480 bp, Glycine max
ggagcttctatggaggctggatctttgagcttcaatgatgtccttcaatggtgattatccatcatggagatgcagcggaagacaaaggagaagaggtgagaggaggcgccatccattaaggaataagccatggaaaaaagagcttcaccaccaagatgagccttggataagaagcttggaaggatgcttcaatggaggaaaagaaagagggagagaaagagagaggggggagcacgaaattgaaggaagaaaaagggagagaagtttgaactttgagttgtgtctcacaagactctcattcatcaaagctaccacaagtgttacacatgcttctatttatagactaggtagcttccttgagaagttctcttgagaaaacttccttgagaagcttctttgagaaaactctctcgagaagctagagcttagctacacaaacccctctcataactaagctcaccttcttaagaagcttcctta

SEQ ID NO: 192192 - DNA, 376 bp, Glycine max
  unsure (1)..(376): unsure at all n locations
agcacctgagctgcagctgccaatttgggctttgcggggagaatttaggttttntgggtaaacaaattttgatggaaaaaccagcacacaagcaccaaattagtctttcgacatttatctattctatttattatacactagttctggcaagagcaccacattagtcttttgaaatttattcactatttattatacatttatctattatactattgattataaattaatgtattctctaacnaatttttttaatatacattcttatatgacctttataactttccgactagttataattacaaattnntcaaatttgttggtttaaaagaaatctgtgtacaaaactggaggatataattatattgcaggtaaaagc

SEQ ID NO: 192193 - DNA, 464 bp, Glycine max
  unsure (1)..(464): unsure at all n locations
aagctagaaaattcctttagcaactctccaccacttccctgctctttgtgatgtattcatccacagtttcgctgcaaacattgaacgaggaaaacattaatgaataagcaataaacctattttttgctaatggtttggtactggttatcatgtatggtaaactctgggcaggcacaaagtagaataatgatgcaatatttgataaaataacaacattattgggtcatattaattacactaattaaattatattatagaacttactttcagattttggaggcatgcccttactttctttctcagtttgttttaactgatttatcatatcgatgttactcacctgacagtntagttggtttgctttgcccgttattaattttcttataaaataaagtaaaattatagaacttactaaaaacctgcagatctattcttcatatacactcatatatngnttctatttt

SEQ ID NO: 192194 - DNA, 350 bp, Glycine max
  unsure (1)..(350): unsure at all n locations
agcttgngccgctcttctcaccatctccgttcttctatgagactggttnggcctgagggcaaatgactaatttatgacatgatgctatgatagattcctaacatatcagaagggtgccacacgaataaatatgtgttcctttgcaggacttagctatgtgtctatactcgtggctggtgaggtccttgctaagttgagtgcacttgcccagtttggttctaagttgtaacttaacaagttcttcgatttgtttgggcctttctcgtaatgtcatcacgtggaaatacattgaatacgtcatcctgatcttccctagttgcttcatagacagacagagtctggaatgggga

SEQ ID NO: 192195 - DNA, 444 bp, Glycine max
  unsure (1)..(444): unsure at all n locations
ctcaagctntcaaccttaaattgtttcaacatctgtgagggaatttcacattacatatctttataaaacctcttgggtctccagccactagaaagtcttatcagaaggtttataacatttttcttgatcttttcagacctgatccttttgaatgatctcaggaatatgtcactgaaatgaacctgcaaatgtgtgcattggcagcaatgtttatagcagatctcacatatattcacatatattatgatatcaataacaaatcagtcatggcttaaactgccttcaacttataccaaaataacgggttaatatcaagtatactatgttttaatgagttataaaatatcaaaccgtgattacataagggtgaagctttactaccgtctgacaagagatgcagattaaatatttttatgagaatgacatctaggagtactaacaact

SEQ ID NO: 192196 - DNA, 244 bp, Glycine max
ccatcatgggggaccacctgtgccggcgatcatccccttttggcgtgacttttaaagaccgcccccttttgcgattgtctgaggcgaatcctatccggaccatttcaaattgactgaactgctatcaaagaaccataggtcttccagaatggaccggaaatctcagttgtgaccaggtacagctcccctgtagactttcttggagggatgattacatatctcatttttgcgtattcccctctct

SEQ ID NO: 192197 - DNA, 175 bp, Glycine max
acttgaaatgaaagctccacacactaaccctacgcaacaagggggttgaggagtatttcaaggaaatggatgtgctcatgattcacagcaatatagaagaagatgaggacgtaactatggctcgattactattggtttgactaaagatatacgtgatatgatgagctgcacaagc

SEQ ID NO: 192198 - DNA, 361 bp, Glycine max
  unsure (1)..(361): unsure at all n locations
aactgagcggaccatttagtcattggaggaccttttgagggcgtgtgtcttaaagcagaaaggaagctgggagagttttcttccattgatagagttcacttataataacagaattcactctaccattggcatggctccctatgaagctntgtatggtagaaggtgtangacacccctatgttggttagagcccggagaaggccttaccttatgatcgaaagtggtacaacaaaccaccgagaaagttaagttaatccaggataggatgaggactgctcatagtangcagaatagttatcatgataagagaaggaaagatctggaattcgaggttagtgatcatgtattcttgaaagtcact

SEQ ID NO: 192199 - DNA, 404 bp, Glycine max
tagaacaataaactcggccttctcttaattgtctatgggcttttcgaccacgaacaacaaagaacttttgacacctactatatgttgacttgaccaacgctgttattagaatgctgcgacaatctttcaacaccttattcacacattctgataggttggttgtcatgtgaccatatcgtcgtccaaatgtatcgtaagccatgttccatttttcctttgaaatgcgatcaatccatcttgctatggttggactcaattgacgaaatttttattagttttgatcaaacacatgcttgcaaggagtgtacgctgcatcaaatttgttatcatcaaaagttgtacgtagacatcaaactcaaattaaataatgtataaaataaacccttaccaatttcttgaacatc

SEQ ID NO: 192200 - DNA, 411 bp, Glycine max
  unsure (1)..(411): unsure at all n locations
caagctggaggccttgatcttctttatcaatgttttcctttgctcctngaagtttaatggaagcggaatggagaaggaagaaagatgattggagacaccacttcaaggagaaaatgagtcaagaacaagctcaccaccataggaagccatggataagatcttgaaggtatgagaagatgagtggagggagaaggagaaaaggagcacgaaattttgtacctcanatgtggtatgaactttgaagtgtaattctcacatgattaaagttgaaaaaaatgcacacacatgacctttatttatagcctaagtgtcacacaaaattctattcaaatttcacttgaatttgaaattgaatttgtggaaccacaatttggaagccaaatttcactaattatgaatagtgaatttagc

SEQ ID NO: 192201 - DNA, 213 bp, Glycine max
tatcaaactcagcttctacggaagtctcatacaactgattatttttatctctaccttactcctaagatctggaaaccggcacaaattttctttcaaaaggctgtgactgcttcttagtgaaacttagcaagaaggatctctgtaccacctaaatcgacaaagtctaccttaaattgaaatattcactacctactttaagagacatggcccatg

SEQ ID NO: 192202 - DNA, 446 bp, Glycine max
  unsure (1)..(446): unsure at all n locations
agctngnnttgnggatatataatttttatattctcagaggcacaaccatataccagcaataagaatttatttccttgtctgtcttctaagtttggaaggattgcttctaaataatcatttcactgataaatttatatacaaaaaataattttaaaatacataaatatttgaatatcactcacgtactccgtattatgaataaatttaagcaagtcctattcaatacagactacagagtaagcctattttatttagtgagacatcaaattgatctaacaattattagtgcgattaagggaaataattgaattttcactttacctgtccattntgcttaaaaactaaaatgatactgaactagacaatgaaaaataaacgacaaggccatcaatgatgaactgagtttttaacacaaaaatcttgaaagattattaaaaagaaaaaaa

SEQ ID NO: 192203 - DNA, 429 bp, Glycine max
  unsure (1)..(429): unsure at all n locations
tgaagtgaganagcgcggaagagncaaactttctacttntattttgtttaccacaaagnnggacctaaagatatgtcgcggaggtcaggagaccttggggacgtcacgtggggtgctattgcccaaaaccaagcttgatcaatcctgacccaactcgggcatagtcagtcagtgagaacctgtgacgtacctaaacaggcaagctcctgacagtcaaccaataaaagaacaaagaccacaaagcaaggaggcttgtgtggtggctggccagctatggatcttgagtggtatctggaatatggcctctggtaatcgattaccaagggtgtgtaatcgattacaaggcttaaaaatgaagacaggaagttaagatggcctctggtaatcgattaccaagggtgtgtaatccgatacaaggcttataaatga

SEQ ID NO: 192204 - DNA, 335 bp, Glycine max
  unsure (1)..(335): unsure at all n locations
agctngcagtagtctaacggttattatgttgttctacagccttggctgaggacaatgtgatcacgccacaagcctatctaaccatcaagttgcattctccttgcttcatgtcctctacctgaacccctgataaagattgatatagcttcttatgatatagacaaacctctatctgcatcttccaaaagctgaaatctcttccatcggaacttatcgaacttcaccttcccctcttctaatgccattgctgccactgcctcctctaaactgagaagactcccactaattcctcttaactcaggaatatccatggagttacctagagctcttgatac

SEQ ID NO: 192205 - DNA, 323 bp, Glycine max
accttagaaactcaagctggctctacttccgtaaaggcgctgactatttctccagtctcttatatgacacccctaccttgcgaggattctgtctaataatgagattgaactttattgtacattagattacatgctgtaggcgatgaatatttcgttctttcctatcaggctggcgacagctaacttgaataaatcaaaagcttatgtcggaccagttgatagctaactggaatataacaaaagctatattgcacggaataattctcatatcacattatttcatcattaccccctttatagccatttcatgcaagatattttgc

SEQ ID NO: 192206 - DNA, 407 bp, Glycine max
  unsure (1)..(407): unsure at all n locations
agctgctatntatagagaaattatttataattgcctataatagattaaatctataagggaatcgattatttcaatgaagtaattgattatattatttaaggaatcgattacagtgttcatccaacatctaaaaaacacctcaagaataatgtaattgattagatgacctatgtaatcaattaaagtgttcttgttcacctctgaacaacttaaatgagagagaagtaatcaattaatccacttggtaattgattaaagcagagactccaaaaaaaaaatcaatcattgtgtcaaacaatagtgtcgcaatctacccttcggcgggcgtgcgaaaaggccaaaatagatgggccgaagcatttgtctccaagggagaaaatgagcggagtcgccaccaacgtttattc

SEQ ID NO: 192207 - DNA, 465 bp, Glycine max
  unsure (1)..(465): unsure at all n locations
tatgctgcaaacatctacaatagacctcctcaacctcagctgtaaaatcagccacaacataacaattatgacttctccagcaacaggtacaatctcgggtggaggaatcatcccaaccttagatggtcgagtccttcacaatagcagcaacaacaacaaccttattttcataatgctgttggcccaagcagatcatatgttcctccaccaatccagcaacaacaacaacaacagccccagaaatagcaaacagttgaggctcctctgcaagcttcccttgaagaacttgtgaggcaaatgactatgcaaaacatgcagtttcaacaagagactagagcctncattcagagcttaactaatcagatgggacaattggctacacagttaaatcaacaacagtcccaaaattctgatagattaccttctcaatctgtctagaatcccaaaaatgtgagtgtcattaca

SEQ ID NO: 192208 - DNA, 414 bp, Glycine max
  unsure (1)..(414): unsure at all n locations
agctgacccttatgagtcagtttagtcaaatgtaaagctaactnggagaaaccttctatgaatctccgaaaatatcatgctaagcccagaaaaatcctaatctcaaaaatagatttagggctctcccactcaaggatggcttcaatcttagagggatctacagctatacccctttgagatatcacatgccctaggaaactaactttctctaaccaaaactcacacttggacagcttagcataaagttgtcagtccctaagggtatgcagcacaatcctcaagtgttcttcatgttcctctctagtcttggagtataccaaaatatcatctatgagtacaaccacaaaactatcaagggtagggtgaaagactctattcatgtagtccataaacacacctggagcattaatcaca

SEQ ID NO: 192209 - DNA, 409 bp, Glycine max
  unsure (1)..(409): unsure at all n locations
tctccccaatttcctataaatagggggagaagtgttgtgattaagggttcagccccttaggcacttctctctctttcgaatttgcatggaaaaattatttccgtgatgaaaatctaagccgaggcgcttccgaaacgtttccgtaatgtttccgtgaggaatttcgcaaaggtttcgaccgttcttcgacgttcttcattcgttcttcatcgttcttcgatcttcaacgggtaagtacctcgaaccaagcttttcgattcattctatgtacccgtggtggtccacattgtgtttcgtgtatttttattctcgttttatttactttttatacccccttttgacgtgcttaagtcattntatttaagtcatttctcgcttaaactaaaaataaaataaatttccaccgatc

SEQ ID NO: 192210 - DNA, 353 bp, Glycine max
  unsure (1)..(353): unsure at all n locations
ctgctttaacttaattacaaaattttcaccctggttttaatatatnttctatttttaaatatttgtatagggaaaataacttcttttctttttagttgatagcctatcaaacttgttgtactttaacacttttagtcttttaagctaaataataataattaaaaaaaatgtggcatgtttagctctataacctgcctagttttttcagaagagaaatgttcaaattacacggtagttgtttttttttttttttttgaagaaattacacgggagntattagtgttgatgctttntatttctataacttaactcttgaatcgggaatttttggtacttagcttatcctgacttaa

SEQ ID NO: 192211 - DNA, 457 bp, Glycine max
  unsure (1)..(457): unsure at all n locations
tctagccaaatggacttaccttgacttaattccttngatagctcctttgagccttgtttccctttccttggtttgaagctcactacaagccttaagtgaaaaaccatgatatcaccatatccttaagggaatttggagctttggaattgttttaggaataagtgtgggggtttttgtttcattggataacatgttttgttggccatgcttcatgatatattttgagccatacttgatatacattgcatattggttaaatgttggacatgctgaatatgatgctgtttctcaaaaggctacagagcaaaaaaaaaaatcgaaaaagaaaaagaaagacagtaaagttgagtgaataagaaaagaatgatgagactctnggntctactctntatgtttaaattttatctttacttcttttttattttcttaatgtttcttaaattgcacttattcccca

SEQ ID NO: 192212 - DNA, 327 bp, Glycine max
  unsure (1)..(327): unsure at all n locations
aactacaggtagaaagtccagccaaattaaaacacaaaaaccatggcataaattaatccattggagtgcataaatataaatagtcataatcaatattaaatattgaccaaaaaaaaagtaatgaaattccacanaggaatgaaatcaactgccaatgacacttacaccagcccattntccaagggtctttgcacccagaattgtcagtangctaacattgtgctctacacaaagggccttagccaatttaacatagtcaggttggtcacagtcttctgctagaacatagntgcacaacatgcttctcgatcccttttgcaccttcat

SEQ ID NO: 192213 - DNA, 463 bp, Glycine max
tgcatatgacagaagaggggtgatattattgatcttccatattttcccgatctatatgttagacattgtattgatgttatgcatgtggagaaaaatgtatgtaatagtgtcattgacatgtttcttaacattgaaggaaagacaaaggatgatttgaatgctcattaagatctagctgagatgggcatacatgaccatttacatctaaggtctgatggtaagaaaatatacttgcctccagcatgtcataatttgtcaagaaataagaatataagtttttgtcaatgtctgcggagtgtgaaagttccacatggataatcttcaaatattaagagccttgtgcaggtgaaagatatgaaattagttggcttaaagtcttatgatttccatttcttgatgcaacaactcttggctgtggtgaaacgagacatcttgcctcacaaagtcaggcatgtcataactc

SEQ ID NO: 192214 - DNA, 437 bp, Glycine max
  unsure (1)..(437): unsure at all n locations
agctngtccaacctcatagagatggcgggacttaacatgtactaccaanaacacaaggagacacatgatataagggttcatttggagagataatggaaaaaagaatcttattatcaagtgtcgaagagggaattctatttatgacaaagctagcaatgagaaccgcaaaacaccaataatgaacaggatgatttgcattgagcaataaggtgcgagcagtctcaaccaaatgtctacttttcctttctattagtccattttgttgtggtgtatggagacaagtagattgatgcaaaatgccctgtgaggataaaaaagaagaaagaagaaatggcngaagagaaatattctttggcattatcacttcaaagaactttaataacttttccaaattggttcttgatttcattgaagaagatgcaaaaatagaccaaatt

SEQ ID NO: 192215 - DNA, 460 bp, Glycine max
  unsure (1)..(460): unsure at all n locations
ctacattctgaattctgattcaacctggcggggaggttacgactgctcttttgattaacttaccgagtagggttggctcgggtcagcccaactcctaccgcggaaaaaaaacaaaaaaaaaatgttatttctgccatgccgccattaccgccatgaccgccatggctatggccgccgccatggcaccgtcattcgcaacccgtcacaccaccgctatttggtggcgttttttcaaaaaaccgccatgcctttccgctatggcaccgctatgaccgccatttgacaacactgatataaaggtgcacttttggagtctaaatatcctttgaattccagatgaatacttctttgtaggatatgaatgaaatttaatgaggattcaactcacactaacatacatatcacgagtatcctgcaattctacgttatattatataccactgtacactnttatgagtct

SEQ ID NO: 192216 - DNA, 386 bp, Glycine max
  unsure (1)..(386): unsure at all n locations
attagcctaagtttttctaacaatacttaggcttccctgatgcaagatttgcattaatggagtgggataagttccattttggcacttgttggtgtagtggtaatgcttatattacatctatcttcagatatgttataagttgtctagcaaatcttattataggttttcagaggtgactttcccaggttgggtcatggtgatcatagtgacttgctcattgatcatcccgttaaagctttaacatactaatgatacaacaaattggctgtggggacaatcattagctggcacttaccatggataggctagtggngagggttgngttatctatctttntgtctatttcgtcctttttttcatgcactaatagcctaatagctattact

SEQ ID NO: 192217 - DNA, 348 bp, Glycine max
  unsure (1)..(348): unsure at all n locations
agcttcatgagagagtcaaagatcaaatttgatgattttattttgctatgctaaacaagccaacaaagggagaaagaaggttgtcttcgaacccggagattgggtttgggtgcacatgagaaaagaaaggtttccggaacaaaggaaatcaaagcttcaaccaaggggagatnggaccatttaagtgcttgaaagaatcaatgacaatgcttacaaagttgagctgcccggtgagtataatgttagttccaccttcaatgtctctgatttatctctttntgatgcagatggagaatccgatttgaggacaaatccttctcaagagggagagaatgatgaggacatgac

SEQ ID NO: 192218 - DNA, 424 bp, Glycine max
  unsure (1)..(424): unsure at all n locations
ctcaagcttggattaattcggcccgacgagggatcgaggggttagcaatttttgtctctttatataacacaagagcatgatcgattaaagaaatatatttctatgcatcagcttgttagttagaaagacccaacatatctacctattggtgtcattttatttaccttgcatttcgtagtttttagcataatagtttagtttaaattttgttggaaattatcacttatacatgttctctcaacaatgcttcgattctgaactttattcaggctaacattagttccctatgttcaatactcagattcatccgttntaattctaaatactcgacactccggtgtgctttccggtaaacccccattgatatttcctagacataaatgcacaacaaataactgcagtggggacccatcaaagtatttat

SEQ ID NO: 192219 - DNA, 406 bp, Glycine max
  unsure (1)..(406): unsure at all n locations
agncttgcaaacattgctacgtttgtgtcacctgctttgccttgaggaataaccatgtacaccttttcattcaagtcaccatgtaagaaagcattgttcacattcaatggcttaagataccattgattgatagtagctaaggccaacataagtctcactgtggttaacttcgtcactagagaaaataatgtctagatagtcctatccttccacctgagtgtagcccttggctattagccttgccttatatctttctattgaaccattggatttgtgcttgatcttatacacccacttacaaccaatagcattcttatgttcaggaagatcagaaagaacccaagtatcattaagttctaatgcttcaatatctgcattcatgtcctcaatccaaataggatcctta

SEQ ID NO: 192220 - DNA, 473 bp, Glycine max
  unsure (1)..(473): unsure at all n locations
aaactcagcttggatgatgggactaaattataactgcatgantttttgtctctatatgannaangagctatgatgtagaaattatgaaaaactgttatgttttgaggtttaagaccaagtgagtgtgtgatcacttggcaatgaatgttgcatgattatgattttgagctntacattanggattaggtctaggggtatttgcccttcaacaaagtatatatattgtagagtatgattgatgttgaataggtgtagtgtgctctatcgtgatagaaatgtgaagtacgatatcgagagtggtgtatgctagtgaaccacatgtggcatttacgtaggttatgcataaggcttaatgtttgtgtttgtggcttatgaagggatggagtattcactcctttnttaccatcttaggaatcttatgccatgtgtgaggctgactctctatgctttgattgaggagataactcgtaatg

SEQ ID NO: 192221 - DNA, 416 bp, Glycine max
agcttctcaagcaacttcatcatagaatttgttgtattcatgttctgcattctttatttcaccatgggtgaatttttattgtcatatcattaattttcatgattctgccacaataattgtcataattctatctttattttatgctatttaatttttctaaatctacacatttattttggcaatcatgcatttattgtcattatatatcacttcaatttgaaagttaattaataatttgtattttgctgggaatattaatactttgttacaagtgaaaaacaaataggggtaggaaaataaaaaaggagaaatatgtttcaaaaaatagaaataaaaataaaagaaatcctggaaaaaagaaagatttccccttgcacttaaagaagttaaagtgtattttcctttgaagaattcat

SEQ ID NO: 192222 - DNA, 474 bp, Glycine max
  unsure (1)..(474): unsure at all n locations
ntgagccaaaatcctgactcaccatanaccttgtacccaggtttgaattccaatccttaccctcggaagcaaaaaagaatagaggggaaatttccaatcaaagaaaaagagaaggaaaatttccaatgaaagcaaaaaagaaatgaaggaaaattccccaatcaaagagtgggagaaagcaaaaaaaggaaaagaaggaaaattccccaatcaaagagtgggagaaagcaaaaagaaaagaaagaaaattcccaaccaaagaatgggagaaagtaaaaaaggaagagaagaaagcttctggtcaaagaaaccagaagaaatgtgcagagaggtctttagaccggacaatatctgaacaatacagaattgtcactaaatgaacaaaaagaaggaaaggaaaccgtgacctaaaatggtcttctccctttaattgccaaccaaaatcagtgcgctagcgactttttcgccccacac

SEQ ID NO: 192223 - DNA, 439 bp, Glycine max
  unsure (1)..(439): unsure at all n locations
agcttgcttctacaactaaaaataccataattatacataaacatccattggtccaacatacactcaacaaccagttatcagtcatctataattccaatcaatcatgctcagtgtgatgcatgcacctgacctcaactctcaaacgcaatattgttccatttgtcaggaaatagtctaagtgtgtccatgcaacactcacttaggaaaactaggcagcaagtgtccaggtcaccctgcccgtggtgatcaacccgagtctcaagggagttccaaactgagtgacatgcccccaagtacttactgacaaagtntatactatttcaatgcaatatgaagtatgaaacataggcaccatcaatgcactaaccgtggataaataaagattctaagtcatccccctctagagatgtttaaaactctttaaccactctatttcctc

SEQ ID NO: 192224 - DNA, 400 bp, Glycine max
  unsure (1)..(400): unsure at all n locations
tacggacctatgaaactcagcttgaaagtgggtgtttcaccttctcgctttctctattattggtttagcgagcgtctgctaagcgcaacactcatgggcaaagcgtgaggaagactctagaagaagatgagttgtacaggttcgctaagcgcaccgcttcatctcactaagcgcaccgcttctgttcatccgctaagcgagaaaggcacgcgctaagccaaaattcactaatgtgcgctaagcggtccataagtgcgctaagcgcacgagcacgaacaaggctacctatttaagcctgaaatcagattttagagagagagtttaaactgggattcagagctttgcatgtctagggtttctagagagagaaaggtccaatttccagagagttntgagagat

SEQ ID NO: 192225 - DNA, 360 bp, Glycine max
  unsure (1)..(360): unsure at all n locations
agctttgaggttnctgtgccgctatncttatttttaanaattttccagaattggagatacactctatgtttcattttcgtgttggacttgactttgtttgcaaatgatacaccttctgctctctgtttagttaccctattttcgtttttgatgtttttccggatttggagatatactcatcattgtttgtttgatttttgttttggatgtgactttgcttgcaaatgatacaccttcttctctctgtttgattntcattttggatctcactttccttataggtaatgtttctaggttntatgttcccctacttttcttttcgaaaatatttcggatttggagatacactcatgggttttt

SEQ ID NO: 192226 - DNA, 372 bp, Glycine max
  unsure (1)..(372): unsure at all n locations
tcatatgtaatttgagatgtttatttgatactttagtatactttaggccttgttttgaatcaaattcattgtgtttttagtatttaatatattttagataggaattacgattttagaagtttttaatatgattttgtaagtttttatagagaaatagggcaattttacaagtagcctcgcttaagtgaggtataggccactcaagctagctcaaatagagaagaggatgaagttntatagaagacatcttgcttaagtgagattgatttcgcttaagcgaggaacacgctagacaatgtgtccagaaactaaattaattcaaaacaaagataattatggagatatagcttgaagataaatgaagaanatcac

SEQ ID NO: 192227 - DNA, 434 bp, Glycine max
agctctgtttcaattacgagcgtctcgatattctactggacacaatcagacatccgagtaaatagttattgtcatttgaatttgctacgagcatctgttttcaattacgagcgtctcgatatactacaagacacaatcggacatccgagtaaaaagttattgtcgtttgtatttgctacgagtttctgttttcaaatacgagcgtctctatatactacgggacacaatcagacatccgagtaaaaagttattgcggtttgaatttgctacaagcttccattttcaataacaagcgtctcggtatatcacgggactcaatcggacatccgagtaaaaagttattgtcgtttgattaattcagagcttttgtttccatttcgagtgtctcgattattacgagactcaatcgacattcgagtaaaatttattggcga

SEQ ID NO: 192228 - DNA, 298 bp, Glycine max
  unsure (1)..(298): unsure at all n locations
taagatgatgttccgagtacattagatttggtacgaccatgccctcctgatttccagctgggaaattggcaagtggagaaacgccccggaatttacgcaacgagcataatggtaacctttacggttttaaaagctctatagttgggcctaggctttagagtttttccttttgttaaagctttgtgtcctttgttgttgattntataatacaaggatctttcttcatctgttcctacgtctctacccattctcattcatttgcatgtttacttctttttctgaaacgacagatccgatg

SEQ ID NO: 192229 - DNA, 429 bp, Glycine max
  unsure (1)..(429): unsure at all n locations
agcttgagccaaaatcctgactcaccataattcttgacctanggtgagaatgtcaatccttaccctcggaagcaaaaaaaaaaaggagagaatgaaaatttccaatcaaagaaaaaaaaaagaggaaaggaaattcctaaccaaagagtgggagaaagcaaaaagaaaagaaagaaaattcccaatcaaagaatgggagaaagtaaagaaagaaaagaagaaagctcctggtcaaaggaaccagaagaaatgtgcagagaggtctttagaccggacagtatctgaacaatacagaatcgtcaccaaatgaacaaaaagaaggaaaggaaaccatgacctaaaatggtcttctccctttaattgccaaccagaatcagtgtgctagcgacttgttcgcctcgcgcaaaaccaaaacagaaaaggaaaaag

SEQ ID NO: 192230 - DNA, 456 bp, Glycine max
  unsure (1)..(456): unsure at all n locations
tctaaactntatacaagaatgaagctcttataccacttgttttaatttagcctcagatatcttaagaaggggggggggttgaattaagatatcacaatctttntgttaattcaaacttttattntgattntaacccaaatcccaagatttctttcaaaaatgaactcctaaataattatgcaaattaatcttactgaatagaaataataagcaataagcaataaacaataaaagagtttaagggaagaaagattgcaaactcagatttatactgattcggccacacccttgtgcgtccagtccccaagcaacccgcttgagagttccactatcttgcanaagcccattacaagttctgaaccacacaaggacaacccttcctttgtgttcagatttctttacaacaagagaccctcggtttcttaatcccttttcagaaataagatgaagagaaga

SEQ ID NO: 192231 - DNA, 411 bp, Glycine max
  unsure (1)..(411): unsure at all n locations
agcctgttgagaaaaattccttgataagcttctttgagaaaacttcattggaaagctagagcttatctacacacacccctctcataactaagctcacctccttgaaaagcttccttgagaagattcctaaagaagctagagcttagctacacacacctttctaatagctaagctcacctccttgagatgagaagctagagcttagctacacaccctctataatagctaagctcacccccatgacaaaatacatgaaaatacaaaaaattccctactacaaagactactcaaaatgcctcgaaatacaagggctaaaccctatactactagaatggcaaaaatacaaggcccanacaaaggaanaacatattctaatatttacaaagattagcgggctcatacttagtcgat

SEQ ID NO: 192232 - DNA, 430 bp, Glycine max
tccacaacatccaagcaaaacaacattcaaacaacttaagtatcacagccaagcaaaacagagcaaaggcagaaaactctgccaaaacaccaaccaaatcacagcttttctcacttaaagaccccagtaacaattccttcgatccaattcgttaaccgttggatcgactccaaaattttactggaagtctatagtacataagcctacattgtgaccgttgggatctactagcaaacatccagaactcattctgcactagactttccacagccaaccacacacaagcatttttctgcacaaagccaaaatcctgctgcacctattttgacagcaaaattctgcataagtgcagatttcgaaaatcacacttcctctcatccaatcttgcccaaatcaattcctacaagtgccaaatcatgtatcaatcatg

SEQ ID NO: 192233 - DNA, 429 bp, Glycine max
  unsure (1)..(429): unsure at all n locations
acttggtatgagcctacatcaaacaattggattattgatgtttctatcacaatcaagtgatagttgatatctccatatgtgcgtacactatgattatgtttttgtttctaaaattcatttggaatgtctattgttgattctaaatgagtgatctctcttgatttaaaagttaccatctcctaatcatttaagtgttcattttggtatgggttgctcatattccaatcatgtctagttaaactgcttgataatctatctttgttacttctactacaaataaagagagacttcacccatgacaatcacgttaagatgttntaagaggaaatacttgagtaggcatgatccttgttacctgtagatgaaagtcaaacttattaagacgtgtacctgtgctccttgaggatatgcttagttaccacctatgtg

SEQ ID NO: 192234 - DNA, 462 bp, Glycine max
  unsure (1)..(462): unsure at all n locations
ctctggccaagaaaaccatctcattcttaacttcctttgtcttggagcagatatctcgttcaagtgagngctnngcggcatcaaataatttaaatgtgaccttctgattatcaatacccatttccagattacctttccccatatccaccacagaattggcagttaacatgaagggacgacccacaatcagatggactttagcatcctcttcaatatccatgacaacaaaatctgcagggaaggtaaattgttgcaccttgaccaaaacatcttcgatcatgccataaggccttgtgatggaacgatctgccagctgcaatgtcatttctattggcataatctccaactctctaatcctnctacacatgtagagaggcatcaaatttatgctaactcccaagtcaatgagggctttaccaactgacactagaccaatagagtaggggatcgtaacactcccca

SEQ ID NO: 192235 - DNA, 219 bp, Glycine max
cagcaataacatcgccgtctttatcttgatagccactgcacctaaagtgcagatctaagcggggcgaatatttaattcaagcgggattcgggacgctattctttgtctttctttaacactaagaccatattaaaggcctaatataatactatgacatccgttatatactaatggactacttaagattaacctagcatctaatgtgtctctaatatttca

SEQ ID NO: 192236 - DNA, 316 bp, Glycine max
ctcactctaaaggatcaggcagcttacaattggaacttttgtaatgagcttgggcagctaataaagctgctgagaatgaagccattttggatgggtgtagatcaaagaatttatgcctgaaaaatgaatcaacactcctaattattgtgactacatgaaaataaatacaaaaggtgacaagtcgctctcatatgttattagatcatgatctgtctctgtgtgcttatatctacaaatgatgcatctcttagacgattgataactgctaaatctgagatatcttgtgacaaacatttattgaaatatcgtttaaata

SEQ ID NO: 192237 - DNA, 389 bp, Glycine max
  unsure (1)..(389): unsure at all n locations
acaattttatctgatctttaaaataagatttgagacgtgtcaagttcaattacacacaagaaaaataataatattctagtccatcctaaaatggttacttctatttaaataaataaattaaaaactttaaaaatatgtattttatcccttaagaataagaaggaaataacttttcatatattntatttatctactatttcttattgagactcgttattatttttgaaataaataaaaatttacaacctaatcctatattaaaaagagcaatacaaaaaaagagtgtgggtacaaaattaaaagcatagaatgaagactaaggcatggtaattttcacttttgaaatgatatntttaactcacaatttgtgtggataatttgagtntata

SEQ ID NO: 192238 - DNA, 398 bp, Glycine max
  unsure (1)..(398): unsure at all n locations
agctntcaccagatcatataagataattcattcatccaatctgcagatatatcctccaaaatgtcaaattctctgcctatatattcaacctttccatcactggcacaggagtgaatcttcctccatggtgcaatattaaagttatattgtcatccattcctcacaatcagaaaccacaaacattgccatatattaggaaataaaaaacctaactcaaactcaaacataggcacatcacacaacaacatgcaatgtcatctataaaaatagagcatcatcaatgaaaataataaaggaccataaacctccctacgaagcgcgtagacaatgcaaatgaaaacccttgaacatataanaccccaaatgaatccaccaaaacaatgaaaatgaaaatgaat

SEQ ID NO: 192239 - DNA, 383 bp, Glycine max
  unsure (1)..(383): unsure at all n locations
atgatgaatacaaagatgatgacaaanagcccaagagaatgagttcaagattgagtcaagaacacttcaagaatcaagagaaatttgatttcaagtttgaagaatcaagaatcaagaataatcaagttgaagattcaagaatcaagaaaagactcaataaagataactactaaaaagtttttcaaaacattgagtagcacatgattttttcacaaaatcttttaccaaagactttntactctctggtaatcgattaccagnttattggaatcgattaccagtagcaaagattggtttcaaaaagctttcaactgaattttcaacgttccaattgatttcaaaatggtgtgatcgattacaagatatttgttattgttaacagt

SEQ ID NO: 192240 - DNA, 444 bp, Glycine max
  unsure (1)..(444): unsure at all n locations
naagcttcgatacttgataccctttctacattttcagcaaacagaggttcgacaacagaatgacctccaaggccaagatagaccaaattggagagattcccaatctgagatggaatcttccccatgaatccattaccagagaggtcgaggtgagtcaaggaggtcattgcacaaaggaaagaaggaattgacataccttctccaaggaattcattgccgctcaagtcaagatatcgaagcttatagagattcccgatctgagagggtactgttccgttggcaacaacaaaactcaggtcaagatacaccaaatttgagagattcccaatctgaggaggaatcttcccgtggattccagtatcagagaggtctaggtgagtcaaggagctcattgcacaaaggaaagaagaaatgccataccttctccaagaaatcattgaagct

SEQ ID NO: 192241 - DNA, 396 bp, Glycine max
ctattacgtgacctatgaaactcagcttgttatgacgctgacaccgaaacaactcaatcattggatctccaagagaacacaggcagtgcaaaaccatcaacaatctcttcagcaacctctgcaatagctgataaagccatatcagccaaaaacaccgtctcttccaagctcggatacggtgtcaacaacaccgaaacaactcaagcaagccatcaagagaacacaaccatcaacaatctctttagcaacagcttgcaatagctgataaagccgtgtcagcaaaaaacaccgtagcttccaagctcggatatggcaacaacactgaaacaaaaacaactcaaaccactcaatcagcaacctctgcaatagctgataaagctttctcagccaaaaaca

SEQ ID NO: 192242 - DNA, 390 bp, Glycine max
  unsure (1)..(390): unsure at all n locations
agcttctntgaganacttgcttgagaagcttctttgagaaaacttccttgagaagcttctttgagaaaacttccttgagaagcttctttgagaaaaattccttgagaagctagagcttagctactacacacccctctcataactaagctcacctccttgagaagcttccttaagaagattcctaaagaagctagagcttagctacacatacctctctaatagataagctcacctccgtgagatgagaagctagagcttacctacacaccccctataatagctaagttcacccgcatgacaaaatacatgaaaatacaaaagataatccctactacaaagactactcaaaatgcctcgaaatacaagggtaaaaccctatactactagaat

SEQ ID NO: 192243 - DNA, 458 bp, Glycine max
  unsure (1)..(458): unsure at all n locations
tctcaaggaagctacctagtctataaatagaatcatgtgtaacacttgtggtaactntgatgaatgagagtcttgtgagacacaactcanagttcaacttctctcccctttttctttcttcaatttcatgttcccccctctctctttctctccctctttcttttcctccattgaagcatcctctccaagcttcttattcaaggctcatcttgatggtgaagctccttcttccatggcttattccctactagatggcgcctcctttcacctcttctcctttttcttccgctgcatctccatgggggaaaatcaccattaaaggacctcattgatgctcaaatatccagcctccatagaatccccacaagcaattntccatcaaagtattgaaaagacttttcaaacaacaaacatagcacaattntggttttcaaagagatttctcaaactttctagta

SEQ ID NO: 192244 - DNA, 411 bp, Glycine max
agctataatatacgatacgctcgaaattaaacatcggaaactctcggaaaattcaaatagtcataacttttcacaaggatatccgattcgggtgcataatatgtcgagaagctcgaaattgaacaacggaagatcttgagaaattcaaatcgtcataacttttcacacggatgtccgattcaagcttataatatatcgatacgctcgaaattaaacatcggaaactatcgcgaaattcaaatggtcataacttttcacacggatatccgattcgggcacataatatgtcgagaggctcgaaattgaacaacggaagctcttgagaaattcaaatggtcataaattttcacacggagggccgattcaggcttataatatatcgatacgctccgaaataaatatcggaaactc

SEQ ID NO: 192245 - DNA, 464 bp, Glycine max
  unsure (1)..(464): unsure at all n locations
tgaatcggacatccgtgtgaaaagttatgaccatttcaatttctcaagagcttccgtagttcaatttcgagcttctcgacatattatgcgcccgaatcggacatccgtgtgaaaagttatgaccatatgaatttctcaggagcttccgttgttcaattttgagcgtcttgatatgtgatatgcctgaaaaggtcatccgtgtgaaaagttataccagttgaatttctcaagagcttccgttgttcaatttcgagcttctcgacatactatgtgcccgaataggatatccgtgtgaaaagttatgaccatttgaatttcgcgagagtttccgatgcttaatttcgagcgtatcgatatattattagcctgaatcggacatccgtgtgaaaagttatgaccatttgaatttctanagaactttcgttgttcaatattgagcttctcgactattatgtgcccgaatc

SEQ ID NO: 192246 - DNA, 410 bp, Glycine max
  unsure (1)..(410): unsure at all n locations
agctngaaacattcttcacaatttagaacgtaatttatataccgataacatgtgaaacatgctgggactacaaaatcaatataataatatgactacaaaatataacggactacttgaagtaccttccccgtgtcatgatcaatatgatcaaagcatctgcacagaagatgtgaagggcgacattgaaactcttccctcttagagtacattctcttcataatatattcaactatcaggactatctttggctgttagcacaggatacatcatatacaacaaacacagcgagcataatcccccttgcattccaggatcatctttgaaaaagatntttcatgatcattaactcactctggctcaacaataacgtaaccaagatgagtacagattcattttttttgggtattaca

SEQ ID NO: 192247 - DNA, 407 bp, Glycine max
  unsure (1)..(407): unsure at all n locations
tgtacaagatgtatatgacagacataatgtgtatggttgatgtgcattcattctcatggagaaattgcacgcgcgaaatcttccatgaaagttnggaaccatgaccacttttggaacattcacctaaacatatctcagatagaaaaagacatgaatgatcttgatatgaataacgactgtgtgaagatgtctgatgaagatacggaatgtaaagtgagcttgcgcgaagagttttggagaaatgtcgcgtttaaagtgtctcttttaaaacaaaaagctaagtccaattggcttagtgaaggagaatcaaagtcacaactcttccgcattatgggaaatnggaggaggaagaatatgattacatgagtgtatatatatggtcttcggaaggaggagcccaatgatgt

SEQ ID NO: 192248 - DNA, 334 bp, Glycine max
  unsure (1)..(334): unsure at all n locations
agcttctaaactntatcaagaatgaagctcttataccacttgttggacaagtggccttagatatcttaagaaggggggggggttgaattaaaatattacaaactatttccccaattaaaaattctatttaactttctattcaagttataaattcccttaataatgaatttcttaaataatgattcaaatagaacaatctgaatgtgaatataaaacaataataaataaaggagttcaagggaagagaaagtgcaaactcagatttatactggttcggccacacccttgtgcctacgtccagtccccaatcagcccgcttgagagttccactatc

SEQ ID NO: 192249 - DNA, 425 bp, Glycine max
  unsure (1)..(425): unsure at all n locations
tatgccatcaaatntaagatattcttatgtggatgatagcaaaagttttccagtaattatatctgcctcccttgttgatgagcaagaggaggagctgttatctgttctcaagaagcattagaaggctataggctggaccctgatagacatttctggtattagctcatccacatgtatgcatcaaataaatttagaggatggggctaaaccagtaagatagccacagagaagactcaacccaaagattcttgatgtagtgaagaaggaggtaaccaagcttttgcaagctggaatcatttatcttatctccgacagccaatgggtgagtcccgtccaggtagtcccgaagaaaaccggcctcaccgtgataaaaaatgagaagggaggagtgattcctactccggtgcagaacaattggagagtct

SEQ ID NO: 192250 - DNA, 322 bp, Glycine max
  unsure (1)..(322): unsure at all n locations
agctngcgatgaagaagagtttataggtgaatcttcctgcttttatacgaagaccacagagtggtagctggagatatatcgcggnggtcaggagaccttggggacgtcaggtggggtgctattgtccaaaaccaagcttgaccaatcccgacccaacccaggcatagtcggtcaatgagaacctgtgatgtacctaaacaggcgagctcctggcagtcaacagataaaaggaacaaagaccacaaagcaagggggcttgtggtggctggccagctgcgaatattgtgtgatatatgggttgagggctctggtaatcgattac

SEQ ID NO: 192251 - DNA, 370 bp, Glycine max
  unsure (1)..(370): unsure at all n locations
ctattacgtgacactataaaactcagcttattacttgtgtgcanaaaattttgttcctatatttgtaattctgcatatctctatgagaagctggtggttgaaagccttgcttgccacttgtgttcatgtgattaaaatctttggaacaaacacaattttgaataaccattgtgagcttgtcacttgaggacaagagaactgttctttctttgcttgaggacaagcanaactgtaaatttgggggagatgtattatctanacatcaatatgttcgcttagttagcattggcttgcctctttttccacaaaaacaccttaatatcaaacctctcttcaccctctgataatttgggacagcatatcaatcaac

SEQ ID NO: 192252 - DNA, 340 bp, Glycine max
  unsure (1)..(340): unsure at all n locations
agttgtgcaaatcaaatcactcctacattttatctctagcatgcattgnatgtnggtctcgtcctttgtcacgggaagccggaaggtccgtatcaccttcttaattgtacacatggggcactgcgcccccaaatgcgcgagtaagaagagataattttccgggctctcgtgtccgtaaaatgcattcatatcatgcatcgcataagcatctcttcataacatcataatggacatatcctgcatttgtccgttatcatattccagcctcacattttgcatgagtcatggcatcatcatgcatatgcgttcaacaaactttttgatctgcgaaattgcatac

SEQ ID NO: 192253 - DNA, 443 bp, Glycine max
  unsure (1)..(443): unsure at all n locations
tatgcgcatatttccttacaaacgttctcttgcacaagacattctattaaccgaaaaaaatgcacccatatacaatcaaggcagcttcggttacctagattatttacacgtacttccaaggtgtattggttacttacatcacacacctccttggctaaattcacacacatgcatactcaaagcantttggggtaccanaaattgcacatgtgcacatcttggtatttctaatacctatacatacacaaacttcatgatgaatcttgactatctacacaataaggtgctacattntatgctcttttcaagtttttgctacctanagccgcatgcaaattcaagtatattttcctttgctgactaaaattgtattcaaaatataagggatacattntttggtaatgtatcttctttacataacanntgcacatattatgtatatt

SEQ ID NO: 192254 - DNA, 252 bp, Glycine max
agctctgacattaatatcgagcgtttcgatttattacgggactgaatcagacatccgagtaaaaagttattgtcgtttgaatatgctcagagcttcggcatccaaatccgagcgtctcgatgtattacgacactcaatcagtcatccgagtaaataagttattgtcgtttgaattagctcaaggtttcggttttcaatttcaagcgctcgaatatatatcgggacttagccagacttccgagtaaaaggtta

SEQ ID NO: 192255 - DNA, 468 bp, Glycine max
  unsure (1)..(468): unsure at all n locations
ntgagcaacttcaaacaacaacaactttntactcggatgtctgtttgagacccgcaatatatccagacgctcgaaattgaataccgaagctctgagcaaattcaaacgacaataagttnttactcgtatgttcgattgactcccgtaatatatcgaaacgctcgaaattgaagaccgaagctctgagcaaattcaaacgacaataactttttactcggatgtctgattgagtcccgtaatatatcgagacgctcggacttgaatgccgaagctctgagcaaattcaaacgacaataacttttttcctcggatgtcggattgagccccgtaatatatcgagacgctcgaaattgatgaccgaagctctgagcaaattcaaacgacaataactttttactcggatgtctgagtgaggcccgtatatatcgagacgctcgaaattgattatcgaagctctgagcaaattca

SEQ ID NO: 192256 - DNA, 465 bp, Glycine max
agcttgtaggctacatatacaaccatacatttgctttgaacatcatgaggaaattcacacaaaaaactgaattggtgagacacggagttacaagatttgctaccactttcttaactctgcaaagattgcataagcaaaaggccaatcttagaaagatgtttactttggatgaatggttgaagtctaaggcagctaaagagcccaaggggaagaaagcaacatatgttgttcttatgccatcattttggaatgatgttgtctacactttaaaggctatggggcctcttgtaagtgtgttgaggttggtagataatgaaaaaaaacctgcaatgggtttcatttatgaagcaatagatagggccaaagaggcaaaacaatgaagggaagtataaggacatccttgcaatcattgataaaagatgagaatgccaacttcaccaccctttgcatgcagtcggttattat

SEQ ID NO: 192257 - DNA, 433 bp, Glycine max
gatggtggagagaagaaatcacagttgttgtcatctttataaacggtggagaacgtgaatgtctgtatacatgattttgatgatgtcaaaagaagaatctaacaaggctcattctgcttcaagattaatacaagattgtttcaacaaacaaagccttgattcaagatttcttcaagatcaagccttgcctcacaatgaaaggtttcaagtcattcaaggcacatgtaatcgattaccaatacatgtaatcgattaccaatggtttgaaagtgtgtaatcgattacacatcatatgtaattgattaccagagactctgaacgttgggaattcaaattttaaatgaagggtcacaactgttcaagacaaacaactgtgtaatcgattaccagagaggtatttaaggaatatcgccaacagtcacatcttttcatt

SEQ ID NO: 192258 - DNA, 261 bp, Glycine max
agcttaccaactaagctacgcaagttgattattttcaaattcattcaacttagaccttaccctactccaacatgccaaacaccactaatatatatgttattattttcttttacaggtgttgagggaagaagcccacagtttcaagagcctttggatttgagatcaaatctttttcaagggggagggaatgatgcaatcctaccttccaaggacattggatagaaaacttttacaaatcctttatgtattaagggtatcctc

SEQ ID NO: 192259 - DNA, 461 bp, Glycine max
  unsure (1)..(461): unsure at all n locations
agctntgagacaattcgaacgacaataactttttactcggatgtttgatatagtcccgtgatataacgagacgctcgaaattgaatgttgaagctctgagctaattcaaacgacaataactttttaatcggatgtctgattgagtcctgtcatatatcgagacgctcgaaattgaatgttgaagctctgagccaattcaaacgacaataactttttacacggatgtctgattgagtcccgtcatatatcgagacgcttgaaattgaatgttgaatatctgagccaatccaaacgacaataactttttactcggatgtctgattgagtcccgtaatataacgagacgctccaaattgaatgttgaagctctgaggaaattcaaacgacaataactttntactcggatgtctgatagagtcctgtcatatatcgagacgctcgaaattgaatgttgaagctct

SEQ ID NO: 192260 - DNA, 446 bp, Glycine max
  unsure (1)..(446): unsure at all n locations
tcaacattcaattctgagcgtctcgtaatagtacgggactcaatcttattnttcgagtcaaaatctattgtcgtttggattggctcagagattcaacattcaatttcgagcgtctcaatatattacgggactcattcagacatcctagtaaaaagttattgtcgtttgaattagcttagagcttcaacaatcaatttcgagcgtctcgttatattacgagactcaatcagacatccgagtaaaaagctattgccgtttgaattggctcagagcttcaacattcaatttcgagcgtctcgatatatgacaggactcaatcaaacatccgacgaaaaagttattgtcgtttgaatatgctcagaggttcaacattcaatttccagcgctgtcgtatattacaagactctatcacacatccgagtaanaagatattgtcacctgaattg

SEQ ID NO: 192261 - DNA, 453 bp, Glycine max
agcttatacggcctaagatagtggtttgtgactaaattcatttttacacaagtcttgcacttgccacattgctacaactccctccatcattgatcatcatgcaaactttgccattgatcaaacatctagtgtggaaaatgttttctctttgactttcctccatagacttcaattgatggccaagtaatcatcaacaattctccctctggtgttttctccacttcctcctcctcatcctcactctcttctcccttttcaactttggactcactaatgtactctccgtctctaagaatcatggatttcttgatagggcactcatatgcataatgtcccaagccgtggcaccgaaagcacttgacatcccgacattcttttaggattgttcttggaattctggaggagtcttcgatggtataggtgttgcattagaggtggcaacccctttaccct

SEQ ID NO: 192262 - DNA, 452 bp, Glycine max
  unsure (1)..(452): unsure at all n locations
tcaagcttatcctcataacagtgcacaacagttggcgagcctgcattgattatttgagtctgaaccacgnaaccagaaaagatcattttcccctgccattcattgatcaaatgcttgagcgcttggcaggtaagtctcattactgttctcttgatgacttttctggttatttacaaattcatattgctcctgaggatcaagaaaagaccacattcacttgtccctttggcacttttgcctataagaggatgccctttggcctatgcaacgaccctggtaccttccagccgtatatgcttagcattttcagtgactttttaaagagtttcatagaggtgttcatggatgattttactatttatggatcctctcttgatgcatgattggatagtctacataaagctcttaatagatgcattcgaactaatcttgtgctgaatttgaaaaatgtc

SEQ ID NO: 192263 - DNA, 382 bp, Glycine max
agctagagactctacatgtttggaatattaatgtaccatatagatacaaagacccttaggtgctttgctgatggcttcttcccgttccaagcttcaattggagtcttgtcttttacagacttagttggacatctgtcgagtatgtaagcagcagtgtagactgcttcagcccagaatgtgttaagtagtcccttctccttgagcatcgatctagctatttccataactgagcgattctttctctcggacactccattttgttgaggagaatatgagactgtaagttgtcgctaaatgccttcatcctcacaaaatctttcatactcgcgagaggtgtactctttgtcgtgatcacttcttaagtactttatcccgtttccac

SEQ ID NO: 192264 - DNA, 443 bp, Glycine max
  unsure (1)..(443): unsure at all n locations
tgaagaggacgctctaatggaggaaaagagtgagagaattgggagcaccacactgaaggaataaaagagggagagaagtggaactttgaagtgtgtctcataagactttcattcatcaaagttacaacaagtgttacacatgcttctatttatagacaaggtagcttccttgagaagctctcttgataaaacttccttgagaagcttctttgagaaaacttccttgagaacctagagcttagctacacacacccctctaataactaagcccacctccttgagaagattcctaaagaagctagaacttagctacacacacccgctataatagctaagctcacccccacaccaaaatacatgaaaatataaaanaaaagtccctattacacagactactcaaaatgcccctgaatacaaggctaanaccatatactactagaatg

SEQ ID NO: 192265 - DNA, 388 bp, Glycine max
atgtatggtataccttgatttgtcatatggctcgaccaaaagagaactggcatcaggagtgctaatttgagcgatgctcttcaagctaactgggcttccatagtattccacctagaaacacgttatgaaacagctcatctacaggacataactctttacaaaataaactaaatacatttgatcacttccattctagcacttagttaactggtgattacaatcatatctgagattttatcattaactagatgtgattgtgtgagctatagtagttgaaccaaatcaatagcatagccaggatatcaatttgatgggtcagttcctatggaagctggaggctgcttattattatcagtattactaaagaacaacgcgggaatcagacatg

SEQ ID NO: 192266 - DNA, 469 bp, Glycine max
  unsure (1)..(469): unsure at all n locations
gacctatgaaactcagctaaatattttccatttgagaattaaggttattcnttttnttattcccgctaaaaaaaattattttaatccttacaaaatatgtttccttttttttagatcttgctttagatattgtaaaaaaacactatacatatcattttgaggaaaaaaacaaaacaaacattttgcatgaattaataccaaaaaaaaaataacaataaaatgaaaaaaatactaaattattataacgaaaaaaatattatttaaatcttttatttataatcatttaaccgagtagatcaattcgattcaagtctttaaaaaataagagactcattgaattgaccgaatttgcagttttccaatgtgaatcaatccgaatatttccttttgaatcggctcagatcgatcatgttctcgggtgattcagacccatgatcacacctgccattatatactccagctatgacag

SEQ ID NO: 192267 - DNA, 448 bp, Glycine max
  unsure (1)..(448): unsure at all n locations
agctagtagaaattgatgtggtgattggttcctangaagggaaggtacccaagaagtggcaagcctagtggaactggaggcaaaggagatgaaaaggtggcttcattgcttgaattcttgaaccatcttagcaagcatagcacactgatcagtgtgactagaatggttagaattggatgcaagttggtggaatcccaacaccacaaatatggccatgtgacacaaaatgaactcaacagcattttggattatgcagggtgaactaccttgtgtttcctagttatttttgcttagttaacctgtgattgagtgattgtagatctcatcatctcaagctagaacattactagaccaaaagtcaacacagtacaactccagaacagaagatccaaggagcaggttttggatagtttcttgcagcccgtaaattgaatggcccattattaat

SEQ ID NO: 192268 - DNA, 425 bp, Glycine max
tcttcctttctgatgtgggtttgggttccaatgcaattttgtttgatttctgcgggggctaaggttaggttttggtggtggtggtttttggtgtgaatggggttgcattctggagtgcccattttgtaaccaaattttttttatggaataacctttatgttagcaaattttttttctggaatggcctttccataagcaaaaaaacctttcggaatgagctttccataaacaaaaaaggcttttagaatagtctttttgtaagccaaaaaaacttccagaatgactcttctgggagaactttagcttaaggaatgattattccagaatcagatttgtaaatccaaaacattctttccgaaagtgtattatatatatatcggaaagggcggttccaaatataatattggacttacgaaaagctcatt

SEQ ID NO: 192269 - DNA, 436 bp, Glycine max
  unsure (1)..(436): unsure at all n locations
agctagatattgggaggtggaaggctgaatttgttgntgtttgaatggttgctgttgttgtggaccaagaccatacctcaagttttgatgatctatccaaccaggattataagtgttgcagtaaggattatattgttattgttgagatctgaatggttgtccaggttgcatggtagaaacattactagcttgttctgtttcttggagtgtggacatgcatttgttggatgctcaggtgtacaatagatgccacacaacctttgttgatgggctgccatcacattctgccgttgaccaatggctagctgtctcacaagggatgtcaattctataagtttattcttctactctgattatcaataatcatagaaacaaaaactttacttgtagtagctctggatggtgcaacaacctaaaacaaanttttggtaattac

SEQ ID NO: 192270 - DNA, 413 bp, Glycine max
cggaacatatagcatgaatcttgggtcctcttaaggacttattcaaaatatccgctggctgatcattagaaccaatgaactcagtgacaatttccttggacagaagcttctctcgaatgaaatgacaatcaatctctatgtgcttagtcctttcatgaaaaactgggtttgaggcaatatgaagagcaccctgattatcacaatacaacttcattggcaactcttcacaaaacctcaattcctacaaaaactgtttaatccacatgagctcacaagcaaccatagacatagatcgatattcagcttctgcattggaccgagcgacaattgtctgtttcttgcttttccacgacataagattttctcccatgaagacacactaacctgatgtacgacttctatccatgggacaa

SEQ ID NO: 192271 - DNA, 449 bp, Glycine max
agcttcttgcaataaaagaaattaacagagtatatattagctacttggtctttttttttaattgttattagtgtaaaatatctattagtgttatcgataattaacctttatttaaaaatttagctaattatctttagtgaaatgtacttctttctaataatattttttttccattcataaaattgagttcaaatccacttcaaattattgattggtatttggtgtaaaaatccaagaaaaacttgtgcaaattatataatcaaaagatagattcaaagggacaaaaaaggaatacacggggggattggagtgtaggcatgattccaaaaatattgagtggcaccatgaccagtggggtttgtgcgtaatttcccaaaagctcagcaaaaccatattccaatgcatgttggtattttcggtgaagacgaaactcaatataaagcatattc

SEQ ID NO: 192272 - DNA, 470 bp, Glycine max
ctatgaaactcagcttgctaattagcctgaaatgagagagaatattattattttacaaaatgaacatactaagtatttattacctatacttaacagaaaatacttataacactacaaaataaccataaattgggagattttgatacaatttgtacaagttttatacacaaaagttagtcgttttcaccgactaacaactctcccaaatttacagttttgcttgtcctcaagcaaaaagagaacaactcacttgtcctcaagtgacaatgacatgcagtgactatatacaaaggtgtatgctacaaaagttactgattgcatgataagagaatggagtaaaatgccctcatcatttgtctttcacaagatatgcagttatccaaatagaagaataaaatgtaacttgaacaattagatggagctaatcataagacagatatcaagaaaagtagcttataccacagtctcac

SEQ ID NO: 192273 - DNA, 391 bp, Glycine max
  unsure (1)..(391): unsure at all n locations
agcttatcacaagtttagtggaaagtgcttttcattntgaggcttgccttttttcagatttgttatttagtttcattgaattcgtatgttgaatattgcaatttgcaccctacaaattttaggacctatcttgcacagttcagaaggcaaactaaacacatccttaaactattgctttggatcaatttacatttgaatgtcttacaatatcatgttggaggttatgatagtaatgctcaaggcacatctatgataacaaccactctgcagttaaatctgtattctaattatctagttccgtttatattatttcactcaactttcactctatatgctcaattntgagaaaattnggtggcagggaaagtctattaaagaaaaactcttttat

SEQ ID NO: 192274 - DNA, 458 bp, Glycine max
  unsure (1)..(458): unsure at all n locations
ggaactatagaatctccgcttcatgagtagacaataaaaattatttttctcttcttgacgacncnntttgtacattctgtctttctttgacagttcttttgtatattctttctttttttgacagattttttgtatgttcttataatttagaattatgccgttcctcgaatcagcttaattggttaattttcacaatataattgtcggtgtgggaatttgagttcatgatgcgttacttttcttttctgactttaattcttaatttgctagatgagaaagaatttcaaatgaaattttcttcgcttttgacaaagaataacagaaggatttttttaataaactatttataaccgtgtgtctacttcggcagctatacattcgcaagtcgcaacagattatctatgctcaagctaagacttaataatagaatgaaagcatgattatctatggatcagagt

SEQ ID NO: 192275 - DNA, 445 bp, Glycine max
  unsure (1)..(445): unsure at all n locations
agctagtcttccacaaacaagtcgaaatttattntctagtcttcaaaacctaactctagctttctcttccccatgtcaactatgcaacttgcagtcaacatgaatggccttcccaagattacaaggatgtcaatatcttcagagatatccatgaccacaaagtctgctgggaagataaaatgctttaccctgaccaacacgtcttcaatcactccatagggcctggtgatggagcgatcaactaattgcaaagtcattcgagtggacataatctctaactctcccagtcttctgcacatggaagtggcatcaaattaatgttggctcccagatcaatcagagcctttccctctcctattgaacaaggaatggttacactcccaggatatttgtgcttangtggaaggatcttttggattacaacactacaatnttcttccactat

SEQ ID NO: 192276 - DNA, 450 bp, Glycine max
  unsure (1)..(450): unsure at all n locations
ntacgggtacaacatgaaaataatttaattntctatcacaaatatttactttatgataaaattgacaaattatacatacctcatgatccctgtggataaatcatgaaaaataatatgtcattttatccaaataattatacaaatataacaaaaattaccgtgggataaaattcattatataagtacaattaatcacaatatgatgtctaatttcttatatgatctttaaacaacttaatatataattttaatcaaattatatatgttgtggctaatccataattaatcaaaattataaagatcacttagacctaaaacttaatcagatgagaataaatcatattatgcatttcaagatcaagatataatacaatgataaataaaattcatatataatttcataattgaaacataatattatgcatttgaattcatatatatatatatata

SEQ ID NO: 192277 - DNA, 476 bp, Glycine max
  unsure (1)..(476): unsure at all n locations
acctgcngcatgcaagcttcagagtccaattcgactgcccttggtgcgttaccttttggttgatattatatatctatctgtgtctttgtgtgcgacacgtcatgaaaagctttaggatttatgctgtaacatcgaggaagatatggtagttcttttttcttgttccagttaaagaaaatgcagtaagtactatattatcttttatgaaaaatctttttctctatgcttgttgagctgttaattaatgttcatgtccttaatattattgccagtgttctgacttcaattcccttattgatctcctttccttattagatgtttttaagtatctttttgtcacggaacaagagttctcatgaagtggaagcttaattgtgaaatattgattattgaatattccgtaactcttgcatgggatgggacgtgtcacgtgtttcgatctaacttggaacgctcgagacaggaggaaaaaagag

SEQ ID NO: 192278 - DNA, 467 bp, Glycine max
  unsure (1)..(467): unsure at all n locations
tctcctcacaacaaggcatccncttctcccagtttcagtttttactcgtcggagacactcgccgagatcgccgccagggtaatcgaggagctccgccacgaacctagttcactctccgacgacgacgatgacgcgcttttcccgccatgggaaaacctaaatgacaacgagaacttcctccccaaaaacgacgagccgccagaacaaaacgacgacgacgatttcgaattcgcgttcgtttcgcgagacttggcttctcccgtctccgccgacgacattttctacaacggccagatcaagcccatgtacccaatcttcggcgttgttccgtcaaacgacgccgttttaagcttttttccgaatgataacaatattgcgcccactccgcggcgccgtcttcctttacggaagctaatgttcgaggagggcgaaacggcgtcgtgctcgtcgtcaacggacgagagcgg

SEQ ID NO: 192279 - DNA, 467 bp, Glycine max
  unsure (1)..(467): unsure at all n locations
agcttgagccaaaatcctgactcaccagtaactcttgacctatggtgagaatgtcaatccttaccctcggaagaaaaaaagaaaagaaggaaaatttccaatcaaagagaaagcaaaaaagaaaagaaaggaaattcccaatcaaagagtgggagaaagcaaaaagaaaagaaagaaaattcccaatcaaagaatgggagaaagaaaaaaaagagaaaagaaggaaagaaagctcctgatcaaggatcgaaagaaaacagaagaaatgtgcatagaggtctttggaccggacaatatccgaacaatacagaattgtcaccaaatgaacgaaaaaagaagaaaagagaaccacaacctanaatagtcttctccctttgattaccgaccaaaatcccgtgcgctagcgactntttttctcgccccgcactaaacaaaaacagaaaaagaaaaaagccagagtaatcaaa

SEQ ID NO: 192280 - DNA, 449 bp, Glycine max
  unsure (1)..(449): unsure at all n locations
tgcaatcttgagtcacccttagagcagatgtgatacactacgtatgcaaccgacatgtctanctaacgaacatgctaccagataatatataccggcactggatgggacataaaccataactttccaagtatcaaggagcaaaaacaaataaaaatatttatcacggatcaaatatgaaatttgggtatatattacggagcactaacatatttaagttgcctatcaattatattattgcattcgctgtcattgttatttcggactgatcaatctcatactcaaatcaattaatcgttataaacaaaactcgctagtcgactgactcatgcaataataggatacaactagcaattgctaattagcctctatatgcttaatctcctttctaattcaagacctactgaccaataaaggaatgaattatatagaagaatactttcaaacataac

SEQ ID NO: 192281 - DNA, 450 bp, Glycine max
  unsure (1)..(450): unsure at all n locations
agctttgtaaatgtgacattatnntttttctttgcataaacttttactttntttaataagctgcactaaccggtactgtttaacaggttaaggtcaatcataagcttctagagttggtttagtttaactaattagagcttagatagtgaatctagccaaacttattttctaatgttttttggaagcatgatggtttatggcgtttgagtatgtttctcactcggagatnttgtctcattatttattgctaaatgtttaatcagaataagtatataattccatttccattgcatattgtgacttgcttctaattgaacaactgaagaaacttttaacttgaactttctttgttgtaaattgtaattgtaccctcgatctcctaggtgctggggactttcatcactgaatggaatgagggaaaggctgcctgtgataaactactttcaacaa

SEQ ID NO: 192282 - DNA, 467 bp, Glycine max
  unsure (1)..(467): unsure at all n locations
ctatgatactaagcttagccgatcattaattaataggctctaaaagaaatttgaatctaacattttcattgaataggtcagatcagaccagactttatgtaggccactataggccggtctgacctattcccatccctaaatagtttttttttatgagaaaaaaaatcttatttagaagattattatgcataataaaatctttctaatataattacatattgaagaatctaatatgaaataactaattaatccgaaacaacactattaatcgacacgttagatgttaggtggtgtctctgttattcattgtgctttattgaaattgaatcattcctttntagttatcagataaaaaagacaagagagaaactatgtcgattgggggaaggagcatctctctgtgctgtgttcaataagtgaaggagaaacataacagccaaagacgatgtctgggagtggtactaacc

SEQ ID NO: 192283 - DNA, 453 bp, Glycine max
  unsure (1)..(453): unsure at all n locations
agcttgttgggagtgactgaaactccatattttnggcaaaggcccgtgatcaaagcaagaaaccccagggccctattggacttctctgggtccactgggtgtctaggaggtgtgatccctgcaaattgatatatagcgtttgagatcagctgggccatatggatactcacctgagttaggatggcatagaccacctgacactttggcaggtcgaggtctgaattatggtcgctagagagaatgttgttgagcagcaacgtcatcccaatctgcgtaagggtagttatattagtgcacatgatccacacctgtctccctgccacgctccgagaaaagtcctgccccaaaatgcacaacagctggctgatggcctccttatcgaaccccgaagcctgactcctcctctggctaaactcatagtgttggccttcctccaagactaatggatgcccc

SEQ ID NO: 192284 - DNA, 447 bp, Glycine max
  unsure (1)..(447): unsure at all n locations
gcccaaatcttagccctntcagacaagagactgttagtgatggctttctggtcacccactttttttgcatagagggctctgtggatttgagagttataagccttctcccatccttcatagtaggtgcttccttcatgaaggcacccattagccttggcaatggtgtcccttgacaacattacaacaactcgtaggaccttggacacaatgatcttgttgtccaaaaattcaatgttcctccagaacatccatatgagctatggatagaagggttatggttcgttgaagtagcatcttgcaccacataagaacatggtcttgtggaatttaaggccaactctctccaactcatcaatgtcaaagaagtgcttagtatgaaccgttggttcaccatcagtgtgaaaagtggcagtatcagaggagacgaccaccatttcagtgatgtct

SEQ ID NO: 192285 - DNA, 374 bp, Glycine max
  unsure (1)..(374): unsure at all n locations
tcgcactaaccagacggttaataaaaatatatgtgcgtccaacaattaatcattaagctcaaaattaattgtcacaaaacttattatgtaaactcacatgtgcattaaatatacattagagattttagtgttatatatagcgacattaattatgttataatataattgacctatcaactcagtttgttagagcattgtgccacaggttcgagtcttgcatgggttattaattgtaaatttattcataaaacatacttttaaggaaatccataatccatattggcatatggattgacaatnccgatgcacacggattgtgaatcagaccatacagattgtgatctgttacttgatgcaaccggactggaattcta

SEQ ID NO: 192286 - DNA, 437 bp, Glycine max
agctgtagccaaggccgttagttactgatttacggcattattggcaggaaccctatgggaatttagtccaaggaattttccatattgagaaagtaagctcctggaaaaggaccaaagaatatcatgatacacatctacataataaattctccttaaaataaaaatataccatcagggttcatgtaaaaaatttcaacatagataaattagagatgacagcacaatatgtgaaatttactgcagcacttacttatgaagtccagtcataagacaaccaatcaaagcaaatgaagtggaaatagtgttcatctctatttgtaaaagtgatttagtcttctcatcaatcatataatctgaacgaactattcccatgcgtatgctctattaaaattaaagccagagaaaaatcaacaccacgtaaagtctctttgactcac

SEQ ID NO: 192287 - DNA, 397 bp, Glycine max
  unsure (1)..(397): unsure at all n locations
ctatgaaactcagcttaaaaaaaagaagcgcatgcacttgctgggcttgtttcatccaccactaaccatcgcttgctgtgcccttttctgctcttcaatggtgaaacaaatcttgttccagccttgaggagagaaagattacatagtntgatgcactgatctctttcagaacacttcctacatttactaccccatactgttttgcacagttttctgctctttatgggaagctaataatcttgttgccctctacgagagaaagttcaacccatcttttgtggagaactcttctgtaaactcaaactgttttgaggtctgggggaaaaaaataacatatgagggtttacttgactgacttgaactgtgaaggggactatcacctttgtggtccatgtct

SEQ ID NO: 192288 - DNA, 436 bp, Glycine max
  unsure (1)..(436): unsure at all n locations
agcttgaatccattattataaggataatgtgttatctttcaaaaaaaaggtgtgcaaaggcaactacaactcattttgagatgactcctatgaccaggattgttttagacaagacaaccaaacatagaagatcatgtattgttacatatgcaagccaacaacaattccaagttaaggatgtttacaataactttgttgttaagctgagagaaaaaatgtgttgtaattattagtatatcactgttttccatgcaaacatgcatgttcttgtattacttatttaagagacaatgtggagaattattctgacaagtcgtttacaactagaatatggatggtctcttactctgaaattattcatccaatgcctgatatagatgttaacaccagagatgattacccactaattgaccttcctcctntgaaaaggatgcct

SEQ ID NO: 192289 - DNA, 444 bp, Glycine max
  unsure (1)..(444): unsure at all n locations
tgtctcagcgnntatgcgagacagagaccaatatgttatccatcatcagcatgtaccaagaaaaattaaatctagccacgggccacgagcacaaagtggcggacgaatttgcccaagtgtacgcagaaaaagaagctagagggagggtgatcgactcattacatcaagaggcgacaatgtggatggaccgatctactcttactttgaacgggagtcaagaacttccccgattgctagccagggccaaagcgatggcggacacctactccgcccccgaggagatccacagactcctcagctattgtcagcacatgatagacttaatggcccatataattaggaaccgctacgaagtttgtattgtcgctcacatcttgactagttataactttctgataaaatgagtcatcccacgtcttttctccaaattagtgtgaatcagtc

SEQ ID NO: 192290 - DNA, 446 bp, Glycine max
  unsure (1)..(446): unsure at all n locations
agcttatggtaactgcggatatcgagcatttgctgccttattatgtatgggtgaagattcatggtctttggtttgcaaccatttgcttaaagaacttgcaaaatggtctgatgagtatatcaacctgcttggtggcatgacagatttgagaaattaaagcggtccctacttgttgatggattatccatggtatataagttttttgttacgttttgatggattaattttgctttaaataaatgtaattataactattacatgcaggttaccatggataagtggatgagtataactgacatgggatatgtgattgcatcaaggtataatgtcattcttgtgtctctttctcttcaacaaagcatgacattnttcccacttatgaagtaaccaccaagagaatgttctgttcatcgcattatatgtatcgggcatgtgtatgacaatca

SEQ ID NO: 192291 - DNA, 453 bp, Glycine max
agctttctcaagagacttatttgagaagctatatccttatctatccacacccctctattaactaaattaacttccttaaaaataattacggatgaaaataacgcaacaaataatcaaacatcaaaacataattactaataatatatagatatatatatatatatatatatatatatatatatatatatatatatcagggtgttacaactctcccacccttttagaaatttcgtcctcgaaatttaccttactcacacaaggatgggtgagcttctcgcatctgactttctaattcccacgtggcatcttctcctaatgcacctccccagatcaccttgaccaacgaaatctctttccctcttaagtgttttgttcgcctatcctcgatcctcagaggcaatgtttcatatgtcaaattctccttcacttgtacatcatccaattcaatcacat

SEQ ID NO: 192292 - DNA, 443 bp, Glycine max
  unsure (1)..(443): unsure at all n locations
tgggatctanggcccacacaagatagaggtcgtttntgatcatgattctcctccaaacgtatctatttgtctatttattttgctctcgtttcattttcgcatatcttatttattttcattctaatttcttgcatttaggacaatttaatttcactagtctaaattcaatcatttaatagtttcaatttactttgaggaatgatagagaaataagtacttattgattggctgcaccatattctgagtgaatctattgcatgagtgaaactaactacatactaagggatatttttgtgaattattgattctcgtgcaagcaagcatcagtgtaagtgatgaagtgtgaactaacagtacaagagtgaaaatgctagtatttctgacagacaagcatggaatgagaacctctatatttcaatgaataccggctagttgtgtgaact

SEQ ID NO: 192293 - DNA, 394 bp, Glycine max
  unsure (1)..(394): unsure at all n locations
agcttgacagattcttgatgtctctgatttggcttgacaganggccagcaactacccaaatcactcttcctagtaatttttcggaccactgtccagtcatgcttaagttctcatctatagattgtggcccgaaaccattcagaattctagattgttgtttgtcagatgcctcgttgaattcagtcatgctgctatctgtggatggtctttggccacacccgaatctctcattcgtgtccctgattgagttgaaatctcccaagatacaccacagcccccccaggtgctgcttcttttagctgcctcacagaatcccatagaattcttttattatggatatcgcaaggtgaatagatggtgactatattgacttgctgctcttctctggtccact

SEQ ID NO: 192294 - DNA, 451 bp, Glycine max
  unsure (1)..(451): unsure at all n locations
tcagactaaagcaacacanaatctaggtatccttaacccctcaatttaatggattttctaggtttgagaagtgaaattgagaatgaggtaaatttggagcaaactctcacctcacacaagtctataacatcaatttaaacttgctcaaactggatttacacctaaaattccaccgaatcaaaatttgactcctcaacacccaattttaccctagaaatagctctttgttcactttggtcatttgtttttctctctagcacagcccaaactttctcataagtcctaaatgacatttcaagctaggattaactcactttaacctctaaatgccactaaatccagatttggccttccaactctcaaaacctcactctntttccactcataacaccatattctcactttctaaccctaggttaactctacccttcatctctaacagttttccata

SEQ ID NO: 192295 - DNA, 410 bp, Glycine max
agcttaaggatggaacacttacttgttgtttatgaataaaagcgcaaaacggaatcaaagaatgcgaaaagtagagaccctaggggtgcaaactcgtaaattccgtggctatggcttttgaaaggggggaaaagaagtttttgaatgcaaaaacgtcccccctttcgtcacttttatattttggtgcaggggttgctcgcccaggcgagctcagcttgcccaggtgagctaacctgcacttttttttttttgagaggaacattaactatgtcccctccttccttatgggttagcgttttgcctaacttgaacttacttaagttagaattaggcattgatcacttatttttaaaacaaacaaatagtaaaagaaaactgcaaatacaaaggatacggggctgccttgcagc

SEQ ID NO: 192296 - DNA, 445 bp, Glycine max
tgccacccagctcgcccaagcgagctcagctcacccatgttatctatgttgcttcctccagaaggtggtgccttccggagaacttcctggaaggcccaagtgggcctgattgctatttgcaccccccctatttactaaatacacccctatttcctttttttgttgattctttttccgtaacgttacggaaacttacgaattacgtaacgatacttgttttctttccgtaatgttacgaaaccttacggatcacgtaatcatcccctttttaccttccggaatgttacggaactttacggattgtgcactaacacttccttttaacttccggcatgtcacggaacttcacggattgtgctacaatgctttcttttgacttccggcatgtctcagaacttcacgaattgcctaaggatgggtgccaagtaccctcaagtggtcaaat

SEQ ID NO: 192297 - DNA, 467 bp, Glycine max
  unsure (1)..(467): unsure at all n locations
tgcaagcttgaacctgtaggaaagtcaccttgactgtggtcacccctaggtactttttgacaaagagggtgatatgaacctatcaagtcccaattatcctttgcaatggaaggaagacccattgactaaaacaatgcatatgacattcattattcttgaagatattcaagatatcattagatttagcatttattttaggatttagagttaatatgattaggatatgttttgtcttatctttggatttatttcctttattaggatgtggatcatatcttattaagctttgtttcctctattaagattttatcttatctttagtcatatgagattaggatttgttttctattacttgctttttctattttcctataattaagaaatcatctaatggagaagaagttgaagtcgaatattaatgaaatgagtgttttctccattgtgagagcttcactnttgttcttggg

SEQ ID NO: 192298 - DNA, 438 bp, Glycine max
agtaagatcaactcattcaaaattcaacaatatcacatatctttatcgatatcttcacaaaatgattaacatatcgcctaaagtaaagatttagtttttgcaatacaaatatttaacaatgattaattatgaacgcacaacattcaagtacatataaacataatactcttaatcaaaaatgaatactaccatttaaatagctataaatatatttaaatattaatatataattactacacatctaaaatggggcttttcatgatcagttggtgaatatgcttatctagattataggtggtttctccaatggaaagaaaaggtacttgaaattctcattttgtcctctcaaataaaaatttaagaatgaaacatggtagaaacaatgtactccaactaaaggtaactaaaaatcataaatcattatagatatatcacttt

SEQ ID NO: 192299 - DNA, 459 bp, Glycine max
  unsure (1)..(459): unsure at all n locations
cccttcttttggaccttgaacaggcaacttattcctctntctttaaccatgctatgngctcgcgactggtccctttcctcccttcgcaacttgagttcattattgctaccccatagggctccgcgaaatttgttccggccatactcttccttgcgagccctcttggtctctcgttcaagggctcttgcggtaattgcattctcttcccataacccggcacactccttccgaacgtgtgtagcagccaacttgaacttctccttggcgagttttgcctttcctaactcgcttttgagagcttggacttcctcgtcctcttccggtgcttcaaaattctctttgctgacgacttttaacttggcgagccaatctaaacctcgtatgcgaactttcagccattcgtggtacccaccaatgatgccattacgaatgcctctaagctcttgatctttccttaac

SEQ ID NO: 192300 - DNA, 408 bp, Glycine max
ttttgaacaagatctgctttgatctcatcccgcacaacattcattccttatagagggagctatttacaggtagaaacaggaacatcctacccaaactagagaggggagctttatctattcctttaacaagtgatttgaatgcttccatgaaagcagatggaacacagtcaagtatcccttggttccacttatcatccaacataatagtctcccttgataacccaacacaaaatctgcttgaattataaaaggaaagttggatatcatctctgtaggaagaaatgcatataccccaggtaaggtctttctcctttgaagccgctcctgatttggaaaggctaaggtgataaccaactcatgcacatccattctcctttctactctatcttcaagctctgacaggaaact

SEQ ID NO: 192301 - DNA, 454 bp, Glycine max
  unsure (1)..(454): unsure at all n locations
agctntattacaatcagagttgttaagatatataaacataatttgatccattaattatgtaaacattgcataaaagataaatacaaaaaaaggaagataacaatatatttaaaagtaataccttaataaattttaatagttttaacactaacactggaagtttcaacgttaataatatttaaaatcaaaacaaataattctaaaaattttgattagatttataattctaaacacattattcaacccatacatgaatgattttactgcaaatacctagagcatgtgggtctaatgatatgattatactcatggataataaatcttaagattctgagttaaaatatgatgtcacaactctcgcatacaatcaatttaatactatatgttgtttttatttaagatgaactgtaaatacgtaacgaatttctaaccaactataattcttaaatattac

SEQ ID NO: 192302 - DNA, 426 bp, Glycine max
  unsure (1)..(426): unsure at all n locations
cgatcctatntncgctgcctctgtgaccagaccgttctgatatactacattattgggctcgagtatctgtaaaaatcatgccgtgtgaatcatataccagcgagaacctttcagcataaatcgttgaatatcgtccaagataattaatgtgcaaataaacatatatgactgaatgaataatcaaagctctgagttttactttctaacctggacaagttgtgaataaaatctcttgtatcgacaaaaacagctattcctatgcctccacacacaccagaaccagataatcgatgcccagctacatggatataaatcaaaatgcataacattaacactgtttacatttaaccaagaataccactgttttttcttccaatatcaccactacatcacatgaaacagaatggtgaacagttcttctttgct

SEQ ID NO: 192303 - DNA, 425 bp, Glycine max
agcttacacattccattactacttcaaatttatacgcttagttatgaaattattaagtgatgaactactaaaaaatatatgcatctttattgatataaatagtactaattaaattgttttacgtcatcctcaattttagagtctcatacctccaccctttgaatttctgatatgatttgtgagggtgttacagtgcatgcatgtatgctatttaatttaataatatgcaaacacaaacaattataaaattataaaaataacaccccgatttccacttcgaatcagttcacgctgtcaaactctacaacaacatcaaggagcgctcgagtgcccaggggaattcacctttgccgatttcgtcacgccggatcctcatcgaaccaacgctcttctcaattttggtgcctataagttagtcttttaac

SEQ ID NO: 192304 - DNA, 466 bp, Glycine max
tcatggtgaatcacgagtgattcagagatgttttgatgataacaaaagatgatgaccaaggtgatgacaaaaaggtcaaatgtcaatccaagaacaattcaagagttcaagataagaatcaagaagaattcaagactcaagaagaaagttaagagtcaagaatcaagattcaaggttcaagatctcaaaaatcaagatcaagattcaagactcaagattcaagaatcaagagaaggcttaatcaagataatataaaaagtttttctcaaaaattgagtagcacatgatttttctcaaaaacatgtttaccacagagtttttactctctggtaatcgattaccagattgttgtaatcgattaccaatagcaaaattgttttgaaaaaggtttcaaattcaatctacaacgttccaattaatgtcataaagttggaatcgattacaatggtttggtaatcgattacca

SEQ ID NO: 192305 - DNA, 401 bp, Glycine max
agcttctacatttcctctttcaaataattatcagaaccccaccatcaccatccaaaggctcaaactcactaacacactcacacaactttgaaatttctccaatgcaaactccgaacctcccgcagagtccgaacctaacaaacgggttcaggcttggaccaaaacatgttacatgagcctacttggttgttccacgtgtccttggcctcgacgttggtggtagcaccgactcctttgccgccgtgatgaggctccgcaacgtgaccgtggtgaccacaaccatgaacgtggcggtgtcgaacagcgagaccatcccactgtagggctcgtgctgttgtagcagcaactgttgctgttcgacgacgtcatggatctagtgcgatgcaagcgcgccatgaact

SEQ ID NO: 192306 - DNA, 458 bp, Glycine max
cctcgatagcctacctggtgccaccataagctacattccttttttactaatgggtccaagtcttcgatgccacagggttgaattattgacagtctcactaactactaccatatcctcatctgcaatcatgtaaggagctcatcacttcttttcacgagccacaacgaaattaccttttcttaccttccaagcttcatcgtccaaagttgtgtaatgcccctcatcatctaactttcctatagatattaaatttctctttaaggcaagaatatgtctaacattgtgcaatgtccatggggatccactggaggtcttgatgttgatatcacctcttccgacaatgtcaagagaatttccatctgcaaggtacactctcccaattctttctgagatatatttagataataaatctttagagggaagagtgtggaacgacacacttgagtccataatccatg

SEQ ID NO: 192307 - DNA, 443 bp, Glycine max
agcttattaagacattgtaaatttatagtttttataatttgtgaaacatgctcacattttccatttgataacataatctgagttcaaataagtagtaggcatactttcaaatcaaagaagagaaacctttttccaagatgaccaattagatgtctccatttaataatataacagtatcaagagtatggaataatgtccctttgtcaagtacatatcaggaatatgctcactgtggtatgattgaggattgacaaaaggtcacaaacagggaagaagaaagaaaccaacctgccttaatggggacagaactccaacagccatgaccatgtttaaggatgtggtttctgagcttggtgtcttcttcaggtgaccataaccccttcttatgtgttgctttcccttttcattggctggaccccatttacttagcctacagaattcac

SEQ ID NO: 192308 - DNA, 455 bp, Glycine max
agcttaagctattatataatagtctcatgattggttttaaatctctagcaatccctctaaagcaatgctcaggcctccttaccttgtgctgtaatttaatttaattttactgttaacaaggctgactagtattaaactattgaccattgtgatacatgttaaaattgttgaacaaaaaggaagaagaaaaaccctgaataatttatatgaaataatgggttgtgtgttgaaattatgggagtttagatatagagggaagaaattgagagaaaagagactttgaataataatgtattacaatgagatacattttcttaaaacctagagcataccctcatctatattaataataatgctatctaaataagaaacgaatcatgatataaagaaatatggctactaattaaaatgaagaaatatggaaactaatctacaggatagtctaatatatgata

SEQ ID NO: 192309 - DNA, 406 bp, Glycine max
agctgagctaccgagagtatatagacaatctcttttgtctgtaaacacctgaatattgtagatccgctgcgtgctaacaataacctgcgacgtagcattagtcgaggtataacttaatttgattctttttcctgaagatgatgatgtttctattgcactacaaataaggcgtagctagaatgggggaaaagcacgtttatttgttcccttgatacagaaggtgcatgattcttgcgtctacaatatattcttttccttttaaatgtagtattttggctgataatacatcttctccataaatgtaacttttgttaaaaaacttcgtaccccattgcccataggcttttcgcaatgcgaaggtatgagggagggatgttgactcatccttacccttgcatatgcaaag

SEQ ID NO: 192310 - DNA, 369 bp, Glycine max
cagagcgctcccgccagaagactctggagtgcaagtacactaacttatatttgaaaaccgtcagtatgccagtctaacaaacacaaagcttggttctacaatttctgtcaataacattctgagagaatacgacttaacaatcacttagtttcaaactcccatgtcacagacgccgacagatacattacaatatcggaatttcttttatgtccacacccgcctattgagatctgtaagggagatcgcccggtcctctagcaacaccctgtgaattagcttctatcgccctatgcacatatgacctacgtacccattatagcgacatcacccacgggtaccgcgcacacagtgacatccgaatatgcagat

SEQ ID NO: 192311 - DNA, 327 bp, Glycine max
  unsure (1)..(327): unsure at all n locations
ctcattttgttccncatttcnacacggactaaattaatcggtattttcctgtcccacggaccctcggttcaaacggtctggtccccgggcctagttttaaataacttcaatctaataaattgttcacactctaattatatttaattcatatgttaataatatctcaacattcaatttataacttcaataaactaatcattgtcttaacaataaaaatatccaaccatcaaatctgaaatattaaacttaaacatctgcaacaacctatgatttttatttgaagaggtcgagtctctccatttcacattttatctcttttcctagact

SEQ ID NO: 192312 - DNA, 387 bp, Glycine max
agctttgatgcaacatatgtataggttatttaaacaacgagatgatgcgctccatgagaggttggatcaaatggagaatagagatcataatgaagaagaaaggaggagaagagggaatgatggtgttcctagacaaaaccgaattgatggtattaaactcaacattcctccatttaaaggaaagaatgatccggaggcctacttggagtgggagatgaaaatagagcatgttttctcatgccacaactatgaggaggaccagaaggtgaagcttgccgccacggagttttccgactatgctcttgtgtggtggaacaagctacaaaaggagagagcaagaaatgaagagccaatggttgatacatggacggagatgaaaaagatcat

SEQ ID NO: 192313 - DNA, 433 bp, Glycine max
  unsure (1)..(433): unsure at all n locations
tgaatcggacatccgtgtganaagttatgaccatttgtttttctcaagagcttccgtagttcaatttcgagcttctcgacatattatgcgcccgaatcggacatccgtgtgaaaagttatgaccatttgaatatctcgagagcttccgatgtttaatttcgagcgtatcgatatattatacgcctgaatcggacatccgtgtgaaaagttatgaccatttgaatttctcaagagcttccattgttcaatttctagactctcgacatattatgcgcccgaatcggacatccgtgtaaaaagttatgaccatttgaatttcacgagagcttccgttgtgcattatgagcgtctctatatgtgatacgcccgaatcggacatcccagtgaaaagttatgaacatttgaatttctcgagagctttcgttgttcaatt

SEQ ID NO: 192314 - DNA, 360 bp, Glycine max
  unsure (1)..(360): unsure at all n locations
agcttctgaagaaagtgatgaggtacaagtcctaaaggcatagcttgaaagagtccgggtagtcgaagagaagttcaagtccatagccatcaaagtctgaaaagagtatgatgaactaagggacgtcaatatggccaccgctgaagtcttggaacgagaaaccaagaaggcccgaaaggaagaatacgaccaaaacaagttttgaggggatttatagggcagcaatagtgagctcaagctccgaagaggtgaaaggaatcatcacgggtcaaaggcatgatcttgaaggacgagctaaaggcttgccttangtcgaaaagaaatttgtcccaacagttaagcgagactgaagggaatatg

SEQ ID NO: 192315 - DNA, 453 bp, Glycine max
  unsure (1)..(453): unsure at all n locations
ctattacgtgacactatgaaactaagcttcaaggtgtctctatatataacactaatgagacacatgttnttacaaaccaagcgatgtgggactaagaccacacaagttttacagaccaagcgatgtgggacaaaggaactaagaccacaaactctaacaacacaccccctataatagctaagctcacccctataccaaaatacatgaaaatacaaaaaaaatccctacttgctagaaactatagcttcaggtcatcatcgatctccagcttcttctgacaaccagtggtgggattcgcaatgttgaactgcaaaacaagttgtgtgtgtacataattaatcccaatagcaagaaatcaaagcagagagcaaaacaagttaaataagacacactaaacaacatacttgatgaaatcctggaaccaattatnttgtagacgaaacacaaagttga

SEQ ID NO: 192316 - DNA, 467 bp, Glycine max
  unsure (1)..(467): unsure at all n locations
tgccgcatgcaagcttggtaggtattttgcaatcacaaatatttcctagtgtctttctccattttagccatcccacttgtatcttgtattagatcctcgttaatttcctcatcattttgtaaatattgatctgagatatgtaaacttatccttcaaaaagttattgagtggtcaaattaaattttctgcaatttgctcacgcagtatttgatgctttataaatgtgatactaaaagatgtagggatctttttctcattgaaaatcacaatgtcatttgcttcatggaattaatcgtggaagatttctctatcttgttatttttatgagaatcaaaaacatggtgcaaagtgcaaacattctttgctttactttagtcagaatggtaaaaacattnggattaccttttcatctgaatgttggtgcagtttattcctctggcagatgaccttcatatcagtgttaattc

SEQ ID NO: 192317 - DNA, 441 bp, Glycine max
  unsure (1)..(441): unsure at all n locations
tatatagcgactcgaatgttgaaaacacatatttatatatggtttttaatcnctcatgtttcatacgatgttgcatgttggttttcatcagagtccactattcttagaaattttgaaccgaactttagaattttacattcatgagcatgttcttacgagttttttagattctctcagacgaagtgccacctaagagtgatatgtattatcaacatgtcatcaccaaagcagaattggattatgacagtcgacagaacttaagattttattaagaagcatttattcttttcttttttctctacatcacatttgaaaacattctaaatatgggaaagtattcaaatattgttatatattgaatagcaattcacgtgaagcatttgtatcttaaaatccatgtagatcttgctgtcttattaattacctaattntaacttcatt

SEQ ID NO: 192318 - DNA, 464 bp, Glycine max
  unsure (1)..(464): unsure at all n locations
agcttgcacttcaagacgtgcaatgctagttaagaattgctgtactgagctgcttgaataatcctcaagggtgatcctcaggtgttgctcgtctgccatgatagtggtttcaggcaattgagtagcggattcccttgatgatggtgaatcaggtgataatgaatcagaaaaatgagtttcttcctcaagaatggatgcaactgttctgtcttgcagaagtttccttctcctctcgaccctgatccttctcaatgtagcttcaatttctaagtccaaaggaactaaattgcatgtgagagatctatgcatataaaatactaacagaaacatcggttatccaattcaataagagaagataaatgtgaattgagaataaatattcatagataatcaaagaataacgaataaagaataggcacctaaaaatgaactaactttccaaataanaagaagttccccggcac

SEQ ID NO: 192319 - DNA, 461 bp, Glycine max
  unsure (1)..(461): unsure at all n locations
tntatgtcctaatggatnngctttacagctaaaacttgtatctcctatagttattngacatatataattctattatacaggtgcttttatgtccttatggattttctttatgtgtattataaaatctacctttctatcccttcatgtgtaatggcttggggtacctatccgaatttttcaacacctcattcatttttctttgatgcaaagaaaaataattaccccataaacatgtcacctttagtgagcttacactttgaaaaaatgaacattattctataaacaaaaaagtagtaacatatagaatccgaaaaaataaaattaaaaaaacaaaaaaaggaagagaacaatatattatgaactacttgaaaaatctgaacaaaaacagaaataccctgaagaggaagaagaagatacatctccagtaaagaatgaatggaatgaatgcagaaacatttcta

SEQ ID NO: 192320 - DNA, 452 bp, Glycine max
  unsure (1)..(452): unsure at all n locations
agcttccactctagttccgattcgagtacttatcgggtgtgattttcaaactttaaaaaccagaatacacaatacccttaagctaaccgacaagcaatttttggatgaaatntactaccgacagcctttcacgtatgcaggtaatcaatttcggtttcaatgtatgcaactgaaagatgatgctgatgctaacacaatgttaatgtgtaatcatgaattttcgtttgttggtccggttaagttattatgtagcattgctagaaccccagatgatattttaaacttacttgaaactactatgacccctactcatgatgccctgctatattacaatgggaggtggaacatgccacgccacaatgagtttgttggttacttcgtcacaggaaaaaatcccataaactttgacattcccaccacatgtaccatggatgaactgaaaggattgatca

SEQ ID NO: 192321 - DNA, 403 bp, Glycine max
cactcaagcttagagaggaagctccaatggcgtctgagcaatagagagagagacattttaagtggtgtgggaacgaacgaaagatagggagagaagctgaactctgaagtgcgcctcacaacactcttattcatcaaagctaccacaagcgttacacatgcttctatttatatcctacgcagcttccttgacaagatagtgttacactcctccaatggctaagctcacccccatgccaaaatacatgaaagaagaaagcctccttgacgagcttcctcgaggagcaagaccccccccccacctcgccaaatacatgaaatccaacataaaatccttattacaaaaactacccaaaatgccctactatacaaggctaaaacccttatctactacaataccctta

SEQ ID NO: 192322 - DNA, 468 bp, Glycine max
  unsure (1)..(468): unsure at all n locations
agcttaaacaatgccaacatggcattcaatttgtttattgaaggatggtgactaatttaaacaaataataacaacaaaacaatgaaatcagtgagtgaagaactgagttgatactagaggagctggtctggtaaacttaatggtaatttcaccctgttcaaaaagatttctcaccatacaattttcaaaggagatcaaagtaaaacagaatttgtcaaaagtcaaaaccacttcttatgtgtttttgtgcagtcttctggtttactattgctgaagggcaattctacctagaacagaggagaaaaacactcaccaccttgcctttntaatgtgacctatgccacgcaccatggacaccacagctatgggagcgcaactgtgccatgttcaatagtatgcaaaagaaagtttagagaaagtgaccctcaacacacccagtatggaagcacataattntaacaacattgg

SEQ ID NO: 192323 - DNA, 458 bp, Glycine max
  unsure (1)..(458): unsure at all n locations
tgcagatgctctagggagaattgctgataaattgtagagcaaggtgtatccgaatagaatagtgtacataacaatttggagtcaacaatagtgattcccataatttatctcaggatagtttttagaagatgaacatcatactagttacccttttttttttaatcttctgtctgcattttgccacttttttgtggtttactactgcactaaggcattttatacacaaatttggaggttactgcattttatttattttcttctttcagtgaggttatatgaatctttcctcggtcaataatagcggttgtacagataaagttactattactaattaaggtacatttttattagaggtatctctttgcgggctcatgcaatattntgcttctcttgtataagtcatctttccacaaatntataatttttcttgttgagttaaccttactattaggaaaaag

SEQ ID NO: 192324 - DNA, 441 bp, Glycine max
  unsure (1)..(441): unsure at all n locations
agcttataattattaattacaaactgatatttttttttagataaaatatgtatgtganttatgatatacctcatttttgctcttaatttcttataattttttttcgtacttgttttctaatatttgaaattttttattttaaaaatgatgaccatatttgttaaatgttcatgacttattcttgaagattttcgagccaccacaagtcacaaataatatttttaaaaagttatgtcctcaacatgtgaaatctaatagtaggcataaaaaataaaatctttcaaaaaatatcagggaataaattntttttatcataaattaaaaacaaaattaaatatatatcaaggattacaaatatatcttaatatttttttaactatttctaaagtgataattacttgtccttgactagatttatatacaaattgatacgttaataca

SEQ ID NO: 192325 - DNA, 379 bp, Glycine max
atagctaaatataagagtatcggcgagataaagttttattcttcattatctgagactcatggaattattactattcgttacgctagtgttttattatacacgttaggtctttcttaacactgatgagaatacacacacggaagatacaaagttgggaggtggagcgaatgaatagattaatggccaaaggcccagttgccgcgcaggagagtttctttctttttttttcgtagtataatgatataaaattaaacttccgcccattcacattcatgggtcgtaacgatgggttcctcacattcttgttctacactgtcgaattacggtggagtggtcctttgccaaacctttggtttacacccagcccacaaatatcatc

SEQ ID NO: 192326 - DNA, 442 bp, Glycine max
  unsure (1)..(442): unsure at all n locations
agcttatgttgacaaaattgaagatccttttcttagctttccatggactattcatacgctccatttggagttctgtagtgccctctaggccttgcacaagacagataggtcaagtaagcacaaaatctgaaaattagatacaattcttaattaagctcaatcatttgcctaagatcaaatttgagttaaggtgagaaaataagggtcaaagagatgtcaattgagctaagaaaaatataaaaaatattaaactacaaatgctcaatcaaggttccccacactttatcttttgcactcctgngcaaaactaaaagaaagactaagataaagaaatcaaactaaaaataaccacaactaanagaaagatatgaacaaggcacacacaattttttatggatcctaataatgcacaaagatgaaagagatggaaaacggaagaatg

SEQ ID NO: 192327 - DNA, 422 bp, Glycine max
tcattgacaacatgattgagcccttggcagtcgaagcttaatgtgccaagctatgccttgtggggttatagttgcttttgaaattttaaccaaaaatgactaaagtaggtttaaaccaaaaatggctataatggctaaagtaggtttaaaccaaaaatggctaaagtatgtttaaaccaaaaatggataatgttggttttgatcaaaatgggaaaacctatcttaagtccaaacagggatgcgctatcattacctcgatgatggatgtgatcgactctcgcgcatgtgccatcctaatgaagcttactcacatagcactttcatgcacataacggatctatgcactatatgacaactgcttagataagattgatatgaatatatcttacacaatccatacatctatgtatctatcactgtat

SEQ ID NO: 192328 - DNA, 453 bp, Glycine max
agcttccttttagtgtgtcacgtttaaaaccgagctcgatggtggtgcgagcctttgatggtactcggtgggaagtgatgggggaaatcgacattcccattcagataggccccccacacttgaaatgtggtgtttcaagtaatggatataaatcccgcctatagctgcctcttaagaagaccttggattcatgccctgggagtggtcccttcaacgcttcaccagaaattgaagttcgcagtgggtggacttttagtgatagtgtcgggtgaagaggatatgttagtgagctgcccctcctccgcaccatacatagaagcggcggaagaatcattggaaatggctttccaatccttcgaggtggtgagctgcgcctctgtggaaccaagtccgttgctaccttctctcttcaatgcgaccataatggtggcacgtgttatgctcaagaacggg

SEQ ID NO: 192329 - DNA, 455 bp, Glycine max
tccttggggccatttcctgcgagaacaaacatttagaagttagttttacaagacaatgcttatcttaacgcaaaaaatgtcatgctaatccctctgattttagaacgaactcatataatctatttatgcacacacgtatgtgtggaatatcctactatttatatcaacatagagggacatccaacacattctaattgtcatacacatatatgcatttgaaaagaacatacattctcacgcccaaggcattgcgtcaaagttcacacttaattatatcctaaacatttactattacaaactacctacacacatttcaaatatatatcatacaaaatttattgtttctctcatatttatttatatgcatattggaaagctaattacatcctgcacacacttgcattcaaaagagaattccatgctatcatacattcatttaggaagcgacctcaata

SEQ ID NO: 192330 - DNA, 442 bp, Glycine max
  unsure (1)..(442): unsure at all n locations
agctaggcaagtttatttttatctntaatatcattacttttaaaagatatgaataaagtcaaggtatatctagagtaatcctctacaataacctaagcatagtaattccctccaatgctcatggttctagaaagaccaaaaaaatctaaatgtaaaagttcaaaactctggaggtggaaactacattttttgatttgaaagcatctagtagttgatcatagttatcatcatcttccaaatcagaaacggttacctcactttcagcttcattgtttaccatcaagcacanaatttgttcatcatcttcactattgtcgttggaagttgttgattcatcgtcatccaaagagatatatgtctttttattctttnggaatgaacccttattcttcttatctccttgttgcttcttttggtagatgggacaatctaccttaatatg

SEQ ID NO: 192331 - DNA, 454 bp, Glycine max
tagagaggaagcttcaatggaggaagacaatgagagagttgtggggcatgggaattgaaggagattaaggagagaagttgaactttgaagtgtgtctcaagagtttctcattcatcaaaattatgacaagtgttacacatgtttctatttatagcctagcacatgggaagcttccttgagaagtaaggaaggaagcttccttggaaagctagaggaagaaagcttccttgagaagctagaggggggctactcacatccctccaattactaagctcaccccgatgctaaaatacatgaaaatacaatgggaagcttccttgagaagcaaggaaggagcttccttgggaagcaaggaaggagctctcttgggaagcaaggaaggagcttccttgggaagcaaggaagaaagctctcttgagaagctagagggggctactcacacctctctgatagc

SEQ ID NO: 192332 - DNA, 410 bp, Glycine max
  unsure (1)..(410): unsure at all n locations
agctntatgaaacccacttatgtgtgaatgtatgaatacaggtttttgatgatgctaaagtataatcaaacaagattgcttcaagaaacattcaaggttaagcaaacagagattgcttcaagattaaatctagatgaagaaaacaaagatcaagaagaaagctacgtcttagtctatctttgttgaaagagtctcttagtgattgtaaaggtttgaccttataacatagtttttaaattgattataaaaaggttttaaaatacttttaacattttctgaaaaaggcatttttccattggtaatcgattaccaggcaatgtaatcgattaccagaagcaaaattattttaaaaagctttttcagaaagttagaaatttgaaatctgaaagttgaaatctgaaaattgaaaa

SEQ ID NO: 192333 - DNA, 463 bp, Glycine max
tctttatactttcgcgcgacatcttgacttgctttccaatctgacattcaccacagattctgccttcttctattttcagattgggaatgcctctaacagcacctttgtcaatgattttcttcatgcctcttaagtgcagatgtccaaatctttgatgccatattttgacttcatcttctttggagaatagacatgtggaggagtaactggtttcttgaggtgtccataggtaacagttgtcctttgatctgctgcccttcattagaacttcactcttctcatttgtcaccaagcattctgactttgtgaagtttacattgaatccttcatcacacaactgactgatgctgatcaagttcgcagtcagtcccttcaccagcagtactttgttcagactaggaagtccatcatggactagctttcccattccagtgatctttcctttagagccatctccaaatgt

SEQ ID NO: 192334 - DNA, 456 bp, Glycine max
  unsure (1)..(456): unsure at all n locations
agctagtatgtaagtcatggctttctctgatctcanatccccaattttgcatttctcaaggtggtgaatatccttgagggtagcccagtcctcccaagaggcttcatcagggtggagtccctcccactggacgaggaccatgtgttggggccagattcagatggaatagtcttatgggccagaatggctaatggggagaccactgggtggttgtcaactgctgaaggagggagttcagcatgtgtgggtgggtctgaagattcaacatagggcttcagaagagatacgtggaacaccggatggatacgggagtgggctggaagttgcagcttatatgctactgggcccaatctttcgatgatcttaaatgggccgtagtagcgtttagagagcttggaatacgaggtcccggaagcaatgatctgacgatggggacgaagtttcaccatgacccca

SEQ ID NO: 192335 - DNA, 457 bp, Glycine max
  unsure (1)..(457): unsure at all n locations
cgctttacctttcattntaacccttagaacttcccggccaatattgttatagataaagcaatgttgatgttcaaaggacactttaaatccctttttaatcaactgacctacacttagcaagttttggtcaatgttaggtacataaagaacatctgatattaatttgatacctgaacacgttgaaattgcaacagttccttttccttttacaggaatatagccaccattcccaattctgacctttgagacattagttggcttcaaatctttgaataaggtcttatcatatgtcatgtggttcgtacaaccactatcaatcaaccaacttttccttgattcactactcaagaagcatgtggccacaaacagttggtcatcttcttcttgattagcaatctgagctccctcttcatggtgatntttgttgtggcagatcaccgcttcatgtcctatctgg

SEQ ID NO: 192336 - DNA, 423 bp, Glycine max
  unsure (1)..(423): unsure at all n locations
agcttcgatagcattttatttgatgtntttattttcgactagggaagatcaagtgtattattccttcttctttcttgcacatgttattgttaagttaattgataaagaatcctcctgttgcaggtatgcccgaactttcgcattcttttataccattggattgcatatcttggtcttcacctgtctctaccgaatgtctgctctcagttatcttaagtaaaatatctgacgactaatttcactgttataactactgtacatggatttcagccactctttacccttctctttcctgcagcaatggcccagaggaattccttgtcggagagaaaaacgttgatcttccgcgtggaccatagtggatatgcaactcagttctcagcgattgatctctcaaattgaacagtacatgtggtcgaaatg

SEQ ID NO: 192337 - DNA, 439 bp, Glycine max
  unsure (1)..(439): unsure at all n locations
ggaactatgaaactaagctaatgggaaaaaaacagtaatattggccgaagtattatttaagatacaccttcggaattatagcatggaagattaactatttctaattattatcctgaaagaaaataaaaaataaataaatatcggtggattctgttaaccagaaaaggccataaattataaaggcaaaaaaggccgcccataagttatcgccatcacgggaatgtgcgatatggaaaaaaagtccaagaggcgcgagtgcgtgacataattttatacattttttaatgaacaaccctagttatacgtacttttattatatatactatttctatcaataagtaaagtttatataaattatattgccaaagaattgactntatactaaattacgaacaaagtaccatattattaaattttttatattacaaataaattactg

SEQ ID NO: 192338 - DNA, 445 bp, Glycine max
  unsure (1)..(445): unsure at all n locations
agcttttcagctntattgccctgtctatgctctagctagacttttctctatgatcagtgctttgtctacttcaaaaatatttgtactcttttgaggttgctcaaactggtatgtgttatgaagtgccaagcaatactctttcgaggctgcattagtatcctgaaatgatgacactacctgtataacactcccagagagtctctcactaatatttgatagagcacccttacaaatcatagataagcaaatatgtatatcaaggtcgaaagaagagtacaaaatcatgacattttgagttcaatattggttttaaaattcaaagtcttgttttcgaaagaaaaaaacaaaatagtatctcaatgcatgaggcaaccactacaagttntcttaggcaccaaactatatttgctaattgtgacctgtgatgtngtatcagtgacaacat

SEQ ID NO: 192339 - DNA, 379 bp, Glycine max
  unsure (1)..(379): unsure at all n locations
agattgattgagatttgattcaagatcgantcaagggggtgggangataacaaagaagatgacaaaaaggccaagagaatgatctcaagattgagtcaagaacaactcacgaatcaagagtttcaagttttaagattcaagaatcaagcttcaagtttcaagtttcccaaatcaagaatcaagaatactccagatcaagatccaagactcacgattcaaaaatcaagaacagactcactccagatacgtactaaaaagtttttcaacacattgagtagcacatgaagttttcacacaagcttttcccacagagttctactctctggaatcgattaccatttactgtaatcattaccagtggcagttttgtttcaaaagc

SEQ ID NO: 192340 - DNA, 470 bp, Glycine max
tgcccgcatgcaagctagtatctttaggtcatactagtagtgtatcttctactgtgagggttcattacaccacgaatattccaggagagcacactcagaattgtactatccatacaaaactaataaagggaggagcagatgagagccctactgaggtccaggatcaaagtatttggaccatttccatgtcttaaacatggttcttctccatcatggaggggagacgcaccatgttcctacccaggatggaaaacccgagtttagcattgggttgggaatgcttgatcacgctcttaggggggtaggcctaagagtagcactacactccttgtccaaattcttctttctttccccacgagttggaagtttgttggctacctggacagaagatgtagcatgtgtccctggagtggcacgttgtgggcatcgattaacggtctactggatcaatattgagataatccaattga

SEQ ID NO: 192341 - DNA, 457 bp, Glycine max
  unsure (1)..(457): unsure at all n locations
tatgctaggtagccgctcatggaagcttcatgcatggccttaggttntcaattcgtactccctcagtcgtgtggggatgttaatttgccttttgggctttgttgattgcaactctctcctgctatcttcactattgggtgtatcattcccgctgccttcgaagagcaccttgtcctcaaggtgatgaaggctcttaaagaccttccattcttcccatgaagcttcatcggggtgtaggtccttccattgcaccaacaccagctcctttgggcctgcttctgtcacgactgtcttgtggcccaaaatggctagtggaacgaggactggttggttatccaccgtcgaaggtggccagggtgtatcttgcgttgaaactggagattctatgaagggttctaaaatggaacaatganagatcgtgtgtatgcgtgaatctttccgctacgcgagtttgtac

SEQ ID NO: 192342 - DNA, 318 bp, Glycine max
  unsure (1)..(318): unsure at all n locations
tgcacccctaccttaaaatagaacaatcctatattataattgaatttgttctancgagacctacttatacaactagcctagactagccttcttttacaatagaaggggaactacgttaacgtctggatgtttatccttgcctcctactctctgttctagaatcagaaggaggtgccactctttgaggcctgggaaaaaccgatgccatagaatggcttaaccgatcatcgagttatctctcctgtgttttaaccaaagaaagattttccaatctgttaggaatcgatctagctgcttatccggtcctttagtaaggat

SEQ ID NO: 192343 - DNA, 407 bp, Glycine max
  unsure (1)..(407): unsure at all n locations
tactaacctngctactacgtcggaatcatgcaaacgagaccaggatgtgtcgtcttcactgccacatatactgtgtcaagaagatactcactgaagtatgatgtgttccaatgccctttcttggctgctccacagacaaaagtgtcttgacagtagtaattttcaccactggactgaatgtctcagtgtaatcaactccctccgtctatgtatacccctttcgccctaacctaactttgtatctttctatacatccaacagctttatgcttgatcttaaacacccactttcactcccatatgcgtcttctcatgaggtaactctcgtcactgccacgatgtgttctttaattcagtatctataacttccgacaagcctctttactgatcatgatatcgggtggttat

SEQ ID NO: 192344 - DNA, 465 bp, Glycine max
  unsure (1)..(465): unsure at all n locations
cttacaccacctgcatcatgcagcttcaataacttgtaggactgtttttgttcggaaatatatcactacttggttttactccatttttattcccatgatgaagggtgggtaattcatattaccatgagaatatgggaaggtatttctaacccaatactaacttccatttctactctattattttgttattaattattttgaatcttaaataatatttctgggattgttaaaattcatccaaacggatttttgaatgtgctcaacaataacattcctggttatagtattcctagcaatacaatgttataccttgatacaaatgcccacaaagtaattataggaatatttaatagcatgttattgatggtgaactgtctcacttatgattgtgaagcagntgaaatactcacatgtctgactgtcgaataataataacttatatacaactttcggtcgtcttcttga

SEQ ID NO: 192345 - DNA, 437 bp, Glycine max
  unsure (1)..(437): unsure at all n locations
tcagagtcgtgtccgacactggtagctcgaatatgtgggtacctttttccaaatgcgacttgnccgtaagtcatatactttatgatctgttttcatttatttttttttgtcgccatgacattagtatacagtatcccgcaattttattgatgattaatctctgctacaaacatgacttgttacctttaccgggatcttccttcctaactatgttgtcgtcatttacaaaacctcaacttgagacctcacttaaaggagattaagttcacctccacttaaaccaacatgttggtttatgatctacttctaatgcaactgaatacaccttcaagtttgctttctttgactatgcctactttaaaacaagatatatatgactacctgcagatcgcttgctcatttcattccaagtatagatccgaactatctaacaccta

SEQ ID NO: 192346 - DNA, 463 bp, Glycine max
  unsure (1)..(463): unsure at all n locations
agcttattgacgcaacgaagatgacacgatttgctctntgtaattaccttcggancgaatggagctccaatctctgtgaacatacttcttcacgtggttcatgcacctcatcttcttctgcttccgatggccctttccttatgtactcttcttgctcctttttcccgtgcatttcttccactactcatgcaatgaaagacaagaccaataacgcaacacaacacaacacaacacaatgttttttctctcacactattgcttaatcaattaccttttgttgtacccgttaaaatattgcttctcacacactaatatagtactattactatgttgttctaatgcgaactttctttggtgattttacggttatgcatggcagctattacctcgttcccactaacttgcccatgttctccctctctgtattatgtttactatattgataaacaattataactattac

SEQ ID NO: 192347 - DNA, 421 bp, Glycine max
  unsure (1)..(421): unsure at all n locations
actaagctaacgaatccacaaggaaaaaccattgtgctttacctctcatggattatatgtnggagaggctcgcgagacaggcctattacggcttcctagatggatactccggatataatcagattgttgtggaccccaaggatcacgagaagatggctattacatgcccttttggtgtctctgcctatagacgaatgccatttgggttatgtaatgcacttgccatattccaaaggtgcatgttggccatttttgcagatatggtggagaaaagcatcgaagtattcatggataacttttcaatgttcgggacctcatttgaaagctgcttatagaacttggatatggtactacaaagatgcatagaaacaaacttggtgcttatatgtgagaagtgccacttcatggctcgaaaaggcat

SEQ ID NO: 192348 - DNA, 388 bp, Glycine max
cataagtgaaaattatcttatgtacaaaataatttgcataaattctctcatctttatagaaactatatgacagttttctaccatcttagggggatgccctatcatatttaaaaaaaagttggaaagttatattatctcacaatgataataacatacatttcctttcatgttaatagctgtcagtcaatttctcaatgcaccatgtgatagccattggtatgttcttgttcagatcctgacatgcatcataggattacctgccaaaaggcttattgatatgaacaaggctaacattatcgtacatacaaatgcaaattggcaaagagatgctagtgatagaatatccacgatacgctattgtgttcttattggtggggacttgatattg

SEQ ID NO: 192349 - DNA, 446 bp, Glycine max
  unsure (1)..(446): unsure at all n locations
agcttttgcccaatgaactattcttgacatagcaagtgttgaacaaaaactcttagaaagatgttgagaattagtgttaatcagtatttttaaattcgtgtcatggtcacatatttatattcatttgatggcacttgaagaaccatgttaaaagttatgactcttggtaaaaactaatcactttaaaagttttgactctttggcaatttatttttcaaaaccagtcactagtaaaagttatgactcttggtaattttttaaaaccagtcactggtaaaagttgtgactcttgttaatttttcaaaaccagtcactggtaatcgattatcataatggtgtaatcgattaaatagtttattttatcaaaatttgtgactcttcatgttgagggttgaaatccaacgttcaanaaccactggtaatccgatacaaatattgtgtaatcg

SEQ ID NO: 192350 - DNA, 361 bp, Glycine max
aacttaggaaagatcacgaacatgattgttcgcacattgttcgagtgcacgaaaatcactcgacaaggtttgaagaacaggaaaccttccatcctatcacgccacgtggcggacaaaaatgggccgcgggcttgaatggccattattggcaatgcggaacgcattctgcgccttactatccatgttcacacattattgcatcttgtggttacgtgagcatgaactactaccaatatatagatgttgtttacaccaatgaacacattttaacaacctacctcgcacaatggcgcgctctttggaatgaagcgaccattcctccttctgatgatgggtggacactaatccctgtaccaactac

SEQ ID NO: 192351 - DNA, 440 bp, Glycine max
agcgagtgcaacttatatctgtatgttaatgtgtgttgaatgagaagaattcgtcaatttatccactattacccatactacatcttggcgagaattggtcctaggcaagccaaagacaaaattcatcaagatacaatcccatttccactcaagaattgtcaaaggttgcaattcatcaagaaatttttgaagttccacattcgctttttgacacctcatacactttgccatgtactctgccacatttttcttcaagctataacaccaaaagttcttcttcacatcttggtacattcttgtgaaacctgtatgaaaactcaatctactcttatgcattcttccaagaattcttccttcaacatgctctagtgaagtatgcacactcattccttgaattggatgagtccattcgcatcctactgaatctaatctttgccttc

SEQ ID NO: 192352 - DNA, 443 bp, Glycine max
tcctcgaggccatttactgcgagaacaaacatttagaatttatgtttacaagataatgcttatcttaacgcacaaaaaaatgtcatgctaatccctccggtttagaacgaactcatgcgcacgtttaaagtaacacatttatccacatgcgtatgtgtagaatatcctactatttatatcaacatagaggccatccaacacattctagttgtcatacatatatatgcatttgaaaagaacacacattctcacgctcaaggcatcgcgtcaaaatttacacttaactatgtcctaaacatttgctatcacaaactacctacacacactcgaaatatatataccatacaaactttcattgtttcactcacacttacgcatattggcaagctatttacattatgcacatacttgcattcaaagggaatcctgtgctatcatacatt

SEQ ID NO: 192353 - DNA, 428 bp, Glycine max
  unsure (1)..(428): unsure at all n locations
agcgtagagggattagtcttgaccagtgatttgatcnatgtgggtccgaaaagaagcaaatntgatcatcctactacgacgactgagaaaactggggcaaataaaaagggtgagaaagagggagaaacccatgctgtgactgccattcctatacagcctaagttcccaccaacccaacaatgtcattactcagccaataaccaaccctctccttacccaccacctacttatccacaatggccatccctaaatcaaccacaaggtctgtctaccgcacttccaatgacgaacaccacctttagcacaaaccaaaaaaacaccaacaaaaaggaattttgcagccaatagcctgtacggttcaccccaaattccgatgttatatgctaaacttgatcccatatccactcaataattcaatggtagccata

SEQ ID NO: 192354 - DNA, 372 bp, Glycine max
tatcgctctagcacccagggtgtagagaggatatctcttcctcgtgcattaatggacactcaagatgctagcccgtggacccctcctgatattggtcaagttgatgtcacttgtgatgcttcacgcccttaattggggagtctcacaacttatggtgaggcgcttcatgattatacatgaaatcttctgtgcggactctaatccaatattggacattcatctgagctgaatgtagaattgtcgactattctaatgaatcctgcctatgaaattctatttccttttaggaatggatcatggaataccgggaaaagaactattacattacttctattgcaggggctaataatgggagctctatcatggtgatgt

SEQ ID NO: 192355 - DNA, 458 bp, Glycine max
  unsure (1)..(458): unsure at all n locations
agctttaggtggaattttaagacacacattttggcacactctctgatttcaagagcaacaaagtctaggtatttactcttgctaaacacagccaagagtgagagacaagacaaggaacacaaactaagtgctaaaacaagaaaagatgagcccataataagcaggtacaccacctaaaaaaggaggaggaaaaatgaaggaaactctaaagagcatgtgtaacaaaaattgcaaaatcttgcaatgtattcataaattagactaacaaaccctaccccttgtaatgactctaatgaccttagcctgatcagtgattgccaagctaggctcccaattgactatgaatatccgataaccaagcaaaanagctcaaccgtaacaatactaacatccagtcacctcagtttggttactacaactntcccacttctagcactgccaanatctactaaacactt

SEQ ID NO: 192356 - DNA, 418 bp, Glycine max
tcacacagttcttattcaatgcaattccagcctttgcatcaaaaatacttgatctggaacaatgattaaaaaaatggttaacaaacctttcgggaaacagaagaatgaataatgtcaagttatcaactgaaaaaaggcaacaattatgttaacataatttatacctgctatcgcccacaaagtcggtggagaccacatcatcttcagtgtaaccaagaattcccttcaacttgccctctgattcctccctgagaaagacaacattatgtaagacaaattgagaaggaccaatcccaaaatggaggcatttttgaataacaagtagtgaaaatttgcataagacccaatgatacacaatatcattagagaagaatcaaagaatactgccattacttgatagcatttttaatttcatcgt

SEQ ID NO: 192357 - DNA, 384 bp, Glycine max
agcttgaatcggacatccgtgtgaaaagttatgaccatttgaatttcacgagagcttccgttgttcaatttcgagtgtcactatatgtgatgcgccataattggacattcgagttaaatgttatgactatttgaatttctcaagagcttccgttgttcaattatgagcgtctcgctatgtggtttgtctaaatcggacatccgtgttaaaagttatgaccatttgaatttctcaagagcttccgttgttcaattttgagcctctcgacatattatgcgctcgaatcggacatccgtgtgaaaagttatggccatttgaatatctcgacagcttccgatgttctatttcgagccgtataatatattataagcctgaatcggacct

SEQ ID NO: 192358 - DNA, 320 bp, Glycine max
  unsure (1)..(320): unsure at all n locations
tagaatatattgatacgctcgaaattaaacatcggaagctctcgaganattcaaatggtcataacttttcacacggatgtccgattccggcgcataatatgtcgagaggcacgaaatcgatcaacggaagctcttgagaaattccaatggtcataacttttcacacagatgtccgattcaggcttataatatatcgatacgctcgacattaaacatcggaaactctagagattcatatgggcattacgtttcacacagatgtgcgataccagcgcatattatgtctagaggctcgtgaatgaacaaccgaagctcttgag

SEQ ID NO: 192359 - DNA, 435 bp, Glycine max
  unsure (1)..(435): unsure at all n locations
agcttctagtttcaattactagcgcctttattattacgagactcaatcggacatccgagttaaaagttattttcgtttgacttttcttagagcttccgttttcaatttcgagcgtctcgatatattatacggctcaatcggatatccgagttaaaagttattgtcgtttgacttttcttagagttaccgttttcaatttcgagcgtctcgatatattacagggctcgatcagacatccgagttaaaagttattgtcgtttgattnttctcagagcttctgttttgaattacgagcgtctcgatatcctacgggacacaatcggacatccgagtcaaaagttatagtcgcttgaatttgcttagagcttcagttctcattttcgagcgtcttgatatatcatagggctcaatcggacatccgagttaaaagttatt

SEQ ID NO: 192360 - DNA, 452 bp, Glycine max
  unsure (1)..(452): unsure at all n locations
tctatataagctgaaccattgtatctataaacacaagttgagttttattcagaagattagagtttatctcttttatcttagtgagagtgattctcctaaattcttgagtgattcaagaacaccctggctgtatcaaaggactttcacaacctttgtgtgttgccctcgctggaaagagtgattctttccttcctatcatctccacccttgttctttcaaaccacaattccagaaaatccacctctgcccaaaattatctcgtgaccataactcccatttcacacactcaaattaagtgattcttgatcctaaattgaatttcaaaacgagatctttcacctcgttttggaatcacctcatttggagccctgtagcttccgttattgccatttctatatttctgtccagccaccacttaacctacngtttaccatcccattcatccattttat

SEQ ID NO: 192361 - DNA, 219 bp, Glycine max
agcttgtggactataccttggaccaaacattgtcgtgtttctgtctcggcccggatttaaagcgggtgcagcaccggtgatcgaggccgtactctaatcaaataaacatgaaaatgcagtaactaggaagtgatcctaggtcgtttcccaacgagcagtgacaagccaaatgttcataatatacttgcagtaacagtaacgatgggggggggggggggg

SEQ ID NO: 192362 - DNA, 429 bp, Glycine max
  unsure (1)..(429): unsure at all n locations
taggacaccatccncattcaaatcaaaatgtgggatcatatatttgcactcatcaatcggagaaatatagtaaagcaacaattggatataatcaaaacaaattatcagcagagacatacgtaaaaaatgttcaatacaaacacaacatcacagctgaagatgcgtctttgagagcatgtacaaaggttcagcttccaattaaagacgtgcctgacgctaacaacccattcaaactcataactgcagatatctccactaaagtagaattcactgatgaatgtgcagcttgccactatcgcagaggagggtagtgtcaacttgacagcagagagaaattntgttgtaccaacgctacactacaacaaaatcccggtaaacacccaagaatgcaatgcactaacactntgttcttctatctggttttcacat

SEQ ID NO: 192363 - DNA, 460 bp, Glycine max
  unsure (1)..(460): unsure at all n locations
agctntagtcaaggaaagtaacccaaaaatgatctataatttagtgttgaaagagcataacaagactctcctaaattggtttaaagatacaatctntggtgacgataatgcttttgaaatattaaggaagttagcagataggcctaaaaaaatgttataacttcgcaaggatacaacatcaaaaaatatttgttttacacgaaatacaagacaacactagaacaatgcaaaatgatggggatagtataaggactgaatctcaatactttcctactgtacatgatgacaatcctcgtctagctttcgtgccttactttgaagtcattgaagaaatctgggagcttaattatctaaaatgcattgtctgtgttttcaagtgtaagtaggttgatagacatatcagtgtgtgaaccaatgatgttcattttactttggtagacttgaagaagctcacttatca

SEQ ID NO: 192364 - DNA, 459 bp, Glycine max
  unsure (1)..(459): unsure at all n locations
tctntactaganaattccttcctggattggcgctagtgctgngatttgtatttgcgacggggtgagattgtgtgggaggcctttgcgttgagtgggcactctttgctggacgggcaccggattggaagggtttttgacatgggcggaaaatcttggttggtgtggggaatattggtaagtgttgtgaggggtttgttgggatttatgccaagtatgagctgaagtcatagcgtgggtatctccttccttcttcttggccccacttgctctgaatctcctattgctcgtgctgccaagagtggcattatcgaactttctccttctcaagcctacctcgatcctctcgcccgcaaataccaaatctgtgaagctagagggcatgttacccaccatcttctcatagtagaacactgacagtgtgtccactatcatagttatcatatctctctccatcatggg

SEQ ID NO: 192365 - DNA, 459 bp, Glycine max
gcttgtattgcatgttgggtgttgacctttccatataactctgccagtccatcactccatccttcccttcaagaagatgaagaaaatgttccaaatcagcctgtgtaacagtgtcctgctccctctcctcagccctatcactggacctaatgcatgtgcaataacaaagttgccaaatgaataaaacaattaattcttcctctagcgacacagcacaatttatcataaaatctgatatctagaactagaagtaagcacttacaaagacaataattaagcatcaataatgcaacaaagaagctgatgaaaattcatggaaacagtaaaaagaagcagatggtcatattgaaatagattagagacacagaagaaatcacatacaggtgagctgttctggtttaactgcaacgcccgagggtaatcattaaatatccctatccagaatcaaactaaattgga

SEQ ID NO: 192366 - DNA, 454 bp, Glycine max
  unsure (1)..(454): unsure at all n locations
ngagtgacattgngtagccatttgctctggttcccaactttctagaaaataatatttagntntatgttttagcttaaaaggatggtaaaaggtcatatgactgttttcttgctctctctctctctcattctcataatgtatatctgagcttccatgtgtttattttgttagtgagaataaagggagtataatgtaagtatttactttcctgtcttaagttccatggaactcagatagcagagatgccattcattggaactcgccatatatataggcgccaggggatgtgccgccggcttttttccgccattgaatcggtaaacattgaagctattgttttgtgatttccttgcacctaagaataagatctatttaaaattttgattggggcctttctgcatgcatcttttaatgacattgnacttgtcttaaacttaatttttcctcctccatc

SEQ ID NO: 192367 - DNA, 444 bp, Glycine max
agcttaacacaatagtaaggttgctactttgttgtgacttggagttcacaggttcaaatctaggaaacagctcctctttttgctgtggtaagtctgcatacatctaccctccccagaccccacttggtgtgagcctcatgcacttggtcggcctttttaatcctggtgttagatcatttagagattaactatcatgagtttccaaacaatcatttgtcatttgtgcttcaatcttagttaatctcgttgattctgggcttatcttgacagagaatcatcttagcttgagcttctcttattctgcatgcctagtgcctacctccttgagtctactttcattcacatgaatttgaaaccttcatcaatttctctgattcaacagatcttctaggtgatttttggtgaatcagatgatcttagatatgccatagttatgacttaaca

SEQ ID NO: 192368 - DNA, 442 bp, Glycine max
  unsure (1)..(442): unsure at all n locations
agctagggcaaatcagatcactcctacattttatctctagcttgcattgtatgtaggnctcgtcctttgtcacgggaagccggaaggtccatatcaccttcttaattgtacacatggggcactgcgcccccaaatgcgcaagtaagaagagataattttccgggctctcgtgtccgtaaaatgcattcatatcatgcatcgcataagcatctcgtcataacatcataatggacatatcctgcatttgtccgttatcatattccggcctcacattttgcatgagtcatggcatcatcatgcatatgcgttcaacaaactttttgatctgcaaaattgcataccatttgttttcatgttagctcatccttgtgtgttcctctacaaaacanaaacacaaaaaggggaagcgtgaaacttcacactacattcttagttncatgtg

SEQ ID NO: 192369 - DNA, 374 bp, Glycine max
  unsure (1)..(374): unsure at all n locations
tgccgccacggagttnnccgactatgctcttgtgaggtgtttcattctacaaaaggagagagcaagaaatgaagagccaatggttgatacatggacttagactaaacatatcatgaggaagcgatatgtgcccgctacttactcaagggacttgaaattcaagctcctaaaactatacccacggcaacaagggtgttgacgagcttttcaaggaaatggatgtgctcatgattcacgctaacattgaagaatatgatgaggtaactatggctcgatttcttaatggtctgactaatgatatccgagatgatgtcgagctgcatgagattgttgaaatggattatttgtttcacatagcactcctcgttcagcta

SEQ ID NO: 192370 - DNA, 453 bp, Glycine max
agcttgctaagacattttttccagtctggtcgttgggaatttgagaataataactcttggtctcttgctaagcaagaatggagcgctaagtgcaattccaaccaaagagggaatcgcgttgagcgcccagaggtgcgctaagccagactccaacagagagggaattgcgcttagcgactagaggtgcgctaagcgagccctagtgcagagggggctgcactaagcctaaattcttatgctaagcgcaagaagtggacttcggcttagcgcgacaggctcgctaagcgaaatctgcaacttataaatgcgttctcagtgtgaaaaacatgatatttcactctcttcttctccaaaacaccacccaaaccctaaaacctcatttttccaccacccaagaccataggtggccgctgtaagccaccgttgcttgccattgaacccccacaccaagag

SEQ ID NO: 192371 - DNA, 424 bp, Glycine max
  unsure (1)..(424): unsure at all n locations
tggatagtcagcctgacgagggatcaaaggtttattaatttatgatacaacatagaacacaagagcacgattgattagagaaatatatttctatgcatcacgttgtttgttagaaagacccaacatttctacctactgctgtcattntatttaccttgcattttatagtttttagcataaaagtttagtttaaattttgtctgaaattatcacttatacatgttatctcaacaatgcttcaattctgcacttaattcaggctaacattagttccctgtgttcgatactcggattcatccgttttaattntaaatacttgacgatccggtgcgctttccggtaaacccccattgaaatttccttgagacataaatgcgcaaaaagtaactacaatggcgggcgatcaagaaccatacaatgtatt

SEQ ID NO: 192372 - DNA, 447 bp, Glycine max
  unsure (1)..(447): unsure at all n locations
agcttagtagttgggctaagcgcatatccaccatgaaatgtcgctgctacagcgtgcttagcactaaggagaatctggcagagcatcaacatcaaagccgcgcactaagcgtgagataagtgcgctaagcgcagcaggtgccttcagccaggctaagctcgagactggcgctaagcccaatttcacttgctcgcgctaagcacgagggtggcgctaagtgcagcgtcgcgatttcagagcctatttaaagcctgtcttgtgtagaattatggtacaacattcaccacctttatgacacttttatgacagcttctacagacggccggggcacagaattccagatcagccacaggcctatatagggaaaagagccctagaagcaaaaaagaggagcaacttgtgcattgaagcctaggttntgtcatttgagagaatattaagtagaga

SEQ ID NO: 192373 - DNA, 456 bp, Glycine max
  unsure (1)..(456): unsure at all n locations
tcatgatgatgaatcaagttgattcaagtagttntgatgatgacaaaaagctcanagaataatttcaagattgagtcaacaagttcaagatcaagaataatttcaagtttcatgagaagaaatcaagaagattcaaaaatcaagagaagtttgatttgaagattcaagaaaagatgaattcaagattcaagagaagaaatcaagaagaattcacaaggaaagtattgaaaagatttttcaaaaacaaacatagcacaatttttgtttttcaaaagagtttttctcaaaattttctaagttaccagagtttttactctctggtaatgattaccagtttcctgtaatcgattaccagtgacaaagtttgatttcaaaagctcttaactgaatntgcaatgttccaatggatttttaaatggtgtaaccggttacaatatattggtaattaattaccag

SEQ ID NO: 192374 - DNA, 431 bp, Glycine max
  unsure (1)..(431): unsure at all n locations
agctagtccacaaaaattgtgttttgaaatttttcatttcaatttctcactaagtaaaatggatcatttttaaggtccaacgccttaaaatgatcaccttttaagtaaaaaagaatcacttgataagaaagaactacgtaggtctgatttcctcatcgcaattggggaatacgtaggagcaaagggacacacccttgtcgaccacacaaaaagaaaaatataaaaagggcataaaggatataaagacataaaaaagggaacataaaaatcaaagtcatgtttgcacattcgattaaaggctgtcgtcccttgggacgaacgtgtggggtgctaatcccttccccgtgcgtaaatacaactcccgaacctttcacttaanagttcgtagatcgcgtcttttccggtttttccgatgtcttcctcaaataaac

SEQ ID NO: 192375 - DNA, 406 bp, Glycine max
  unsure (1)..(406): unsure at all n locations
tatgatactgggtaatgttgtcttactaattatggttattgntattttgcattaatttctttaataataaactcactcctcacaatttttgtaccgtgtggttggtacctgtgatgatcacgaacctttgttcgtgggagcagaatgacagcaatagtggacgagaagtgagattcttttgtggagccgccgagctgacgtgatgacgttgggattattttgggagagagttgtgttttgttaattgactcctccatagctggttccctaattctttttgttgatttgaagatgtaaatcacaaatttaattatatgtatgaacaaatttattttccattatgtgaatgatgtgtactaggttattatacctatatatatatatatatatatatactcacttaact

SEQ ID NO: 192376 - DNA, 445 bp, Glycine max
agctgtaagagatcatgtcgttcgacaacattattggtgatatctcaaaaggggtaacaactagacattctcttaaagatttatgcaacaatatggcttttgtatctatgagtgaacctaaaaatataaaagaagccatagtaaatgataactggatcattgccatgcaagaagaactaaaccaatttgaaagaaacaatgtgtggaaattagtagaaaaacctgataattatcctgttatagggacaaaatgggtttttagaaataaattagatgaacatggtataattattagaaataaagccaggttagcagccaaagggtataatcaagaagaaggaatagactatgaagaaacatatgctcctggtgcaagattagaagccattagaatgctcttggcatatgcatccataatggatgttaaactttatcaaatggatgt

SEQ ID NO: 192377 - DNA, 411 bp, Glycine max
  unsure (1)..(411): unsure at all n locations
tgcccaatgcngattgatggagataaaatcatgcgacttttcagtttgcacaccgcgttttatatggatgttacttcaacgtggagaattattgactcgtgactaaaatccatatggaagtcgactctgtcattctactgtcctgtcctctgcctatatatggcaaggatgccctccattttctatatcagagaagctcccacttgcatatctcattatcaataaaaggctgtctgtattcccctctcatggatttagcgtggatccaaggtgaaccacgtacaagctgtttgtgtgttctctctcatctttctctctttcaccatgctgtaatactctgtgcgtatgacatcagccttctgctataacatctgctactgttcttgcttgttctttatcacatccataaca

SEQ ID NO: 192378 - DNA, 407 bp, Glycine max
agcttctggtgggacatcttgacttgctttccaatctgacattcaccacaaattctgccttcttctattttcagattgggaatgcctctaacagcacctttgtcaatgattttcttcatgcctcttaagtgcagatgtccaaatctttgatgccatattctgacttcatcttctctggagaatagacatgtggaggagtaactggtttcttgaggtgtccataggtaacagttgtcctttgatctgctgcccttcattaggacttcactcttctcatttgtcaccaagcattctgactttgtgaagtttacattgaatccttcatcacacagctgactgatgctgatcaagtttgcagtcagtcccttcaccagcagtactttgtccagactaggacgtccatcatg

SEQ ID NO: 192379 - DNA, 319 bp, Glycine max
  unsure (1)..(319): unsure at all n locations
cgaatcggacctccgagtgaaaaggatgacttcttgtatttcttgagagggtncgccggctaatttcgagcgtctggatatctgatgtgcctgaatcggacatccgagtgaaaatttatgaccatttaaatttgtcgtgagctttctgtgatcactttcgaccatctcaacatatgatgcgcccgaatcggacatacgagtgaacagtgttgaccatttgatgatctgcagatcttccgtgggtcagcttctggactcctgctcattgtagtgaatggattggatctcattgtgaaaagagtttctgtagatgatggct

SEQ ID NO: 192380 - DNA, 219 bp, Glycine max
  unsure (1)..(219): unsure at all n locations
agcttcaatgaggtcctttaatggntantttctatcatggaaatgcaacggaagacaaaggataagaggagagaggaggcgccttccactatggaataagccatggaagaaggagcttgatgcaatcctatcctgcaagggcattgggtacatnatccatctacattggtctatagattcacagtgaataccctacggtctccttaatctaaggtataa

SEQ ID NO: 192381 - DNA, 425 bp, Glycine max
tgctcaatcgccaccatggctatacacaactccgcatgttctgcagatttaataccaataaaaaatgagaagcaaccacggaatactccaaagctatccctaaaaataccaccgctggctgcatgacctggagaccctctagatgcccccatcagtgttacatttgatatagccacttggaaggctgtgccaatctacctgtttaatctggacaacttttggaggtttcaaattcaccatgaaattctacaaaagagaaaaatcataaattgaatttgaagctactccctttgatagatatcccgtcaaagatgaggcagttacaatcatagagttagcttgttgcgtggaagacttaacatttctaaacctcaaactatttctacaatgccatataacccaaattgtatgcaccacgaccgata

SEQ ID NO: 192382 - DNA, 433 bp, Glycine max
agctatgagaagtttttttttcctgcatattgttggccaacttacaattaatctcagttgtgtttctacaggaaggagactttggaaaaatctttggtctttgttttcaatggtcaagtcaataatatcaagaaaggagactttatctcttcaagaatttaaatcccatttttatgtacaatggttttgctaaaggtatgatagaaaaggactgcatcaacaaagtggacttagcacctccaacaagaattaggattccatacatacaaaaattaccaccatatgcatcttgagtatatgtggccatgcgaatttgaggtttaatcttaaaatgttatatttttgtccaaatattgtagatgtatatggtgataattgcattgcgcatctaggacataagggaaaacatagtcatttcaaattgaacatcaaa

SEQ ID NO: 192383 - DNA, 453 bp, Glycine max
tgagatgaggaagtgtagaagggtgaaacttcctgcttttattcgttgaccacagagtggtacctggagatatgtcgcgggggtcaggagaccttggggacgtcaagtggggtactattgcccaaaaccaagcttgaccaatcccgacccaacccgggcatagtcagtcagtgagaacctgtgatgtacctaaacaggcgagctcctggcagtcaacagataaaaggaacaaagaccacaaagcaaggaggcttgtggtggctggccagctgtgaatcttgtgtgatatatgggttacggcctctggtaatcgattaccaagggtgggtaatcgattacatggcttaaaaatgaagacaggaggctaagatggtctctggtaatcgattaccacggcgtgtaatcgatttccagacttgaaaacgaggtcaggaagctatgagggcttctggg

SEQ ID NO: 192384 - DNA, 456 bp, Glycine max
  unsure (1)..(456): unsure at all n locations
gcttntttaggaccttgagcagacaactttctcctctgtttaaccacgctatgtgctcgcgactggtccctttcttcctttctcaacgtgagttcactattgctaccccatagagctccgcgaaatatgttccggccatactcttccttgcgagccctcttggtctcttgttcaaaggctcttgcggtaattgcattctcttcccgtaacccggcacactccttccgaacgtgtgtagcggccaacttgaacttctccttggcaagttttgcctttcctaactcgcttttgagagcttggacttcttcgtcctcttccggtgcttcaaaactctctctgctgacgactcttaacttggcgagccaatctaaacctctgtatatgaactttcagccattcctggtacccaccaatgatgccattacgaatgcctctaagctcttgatctttctttaa

SEQ ID NO: 192385 - DNA, 406 bp, Glycine max
ccatcatatctcccaaaaccccatacccacgaaatttaagagagaaagaagtccacccaaacctgaaatttcgaagtcccactcgtagccacgcacttcacgactccaaaaatgccctcctttcgcgatttggagcagaaatgagcaccaaaggttgaagctttgtttggagcttcaatggagaatgagggagaaagaaaggcaacgtgaggaagagagagagctatctgaaaaaagtgtgggggctgagtgaagagagagaaaagctttttggtctaaaataaagggttctctccttttctattattttattcaagctctgccatgtgtgcctatttgagtggagcacaagggcccacttttctttttactgtgacccacactcagccacaatagtgagataaat

SEQ ID NO: 192386 - DNA, 444 bp, Glycine max
agctttcgttggtgaatggcgagcatctgagttatataagtttctgaatcggacatccgactgaaaagttatgaccatttgaattcttggagagctctcgctgttcaatttcgagcgtctcaatatgtgatgcgcctgaattggacatccgagtgaaaagttattagcatttgaattttctcagagcttctgttgttcaatttcgagcgtctcgatatgtgatgcgcctgaattggacctccgtgtgaaaagttgtgaccatttgaatttctcgagagctcctattgttcaatttctagcgtgtcgatatgtgatgcacctgaattgtacatcctaatgaaaagttatgaccatttcacattcacgagaatcttcgtgttcaatttcgagcatctctatatatcaagtgcctgaatcggatctccgtgtgaaaagttatgacca

SEQ ID NO: 192387 - DNA, 461 bp, Glycine max
attattgtagacctcgatcggtcatctctccatgccgacgtcagctatcattattttcgatcaatttccgtgaataatgtttttttttcgttttggtcgagatgggccaacgttttcttggcctcctaaatgagaagaacaacatgccattgtcacgtggaacgaaccctcggctgagctcgcacggaaaaacctagccgacctaagttgtaaattttttaggcaacaccaaaacaaaaaacttcctctatcgtaaaaaaagaacattatcggccagcatttgttaaagaaattgcccaatgtcggctgaaagatatcagtcggtgccatataaggaccgacacccgccattgtttattctattcaatccctgaataacaattggatgatgtcgattacgaaatgttcgatcggcatcatccggtaaagcttcttttagacctcgatcggcatctttcctg

SEQ ID NO: 192388 - DNA, 442 bp, Glycine max
cgaatcaagatgacatctgtttgttatcattattgccctacttaagaccttattatagggccatcataagcttacccgaaagcatgaagtatctgccaagactcaaacttcttgatgttggtgaatgcaaaatgcttctacgaatacctgcacttccacgatccacttagtgcttgcatgtttggaactgccaatctcttcggacagtgttaagttcaacgattgaaccatccaaaagacctaagtgtacttttctgctccctaactgtataaaattggatgaagattcatatgaagcaattctgaaagatgccattgtaacgattgaaattggagcaaaacctccatcataggcagtattaataaatgaagatgcattcacggataatgatgacaatcaacggtatacttcttatgtgtatccatctccttattcgtatgc

SEQ ID NO: 192389 - DNA, 201 bp, Glycine max
gtaccttcgcctattgtactggaatatatatatatatatatcaatttccacacaactctaaaagcagcctttaattgaattcgtgtatgctacatatatgaattaaatctatttggaacaaaatcttctcatgtgacactcctctcctgtgaaatctcagccttaattcataacagataaatcttaaatattagaaaaaga

SEQ ID NO: 192390 - DNA, 344 bp, Glycine max
  unsure (1)..(344): unsure at all n locations
ccgcttgaactagcttgaggcttcaaaagtatatttttcaaatattanattcggggtgatcgggatgtcagatatttgggaggcgtctactgctagttatctaaattgtgagcttgtggacataccttttctctatctgggtatcccgattggttcatacccaaagggctcagagctgtgggatcctattgtcaaaaaatgtgagaggaaattggtgaaatgaaaacaaaaattatcttttgggggaagggtaacactcataaatgctgttctaaatactattcctatatacttcttttccttgttcagggttccaaaaagcattctggataaactggtctggt

SEQ ID NO: 192391 - DNA, 461 bp, Glycine max
tgtacataaacgcaagacaaagaggaaatctgggacctatttgtttcttttagagatctcttgtagattttgatatttctacaacacaatgagttggagaaacttcactcacttgataattgtcacacatatatgaaaaaattgaactatcctcaacaataaaagtgaaaaagaacaagaaaactatggagagtatgtaacagtaaaatgaataaattacttgggctaataggaatgatctaaaaaactggtcattatctgttccaattaagttaactgtgaaaatgttgctaattttgaaagaaaaatgagcaagctaacggaactagagaagagaaatatgcttaactgcacctctgacaagcttttcacgcttggtcatggtgaataatgccaccacaaagaaagggttcacagaaatgtccacctcataaatagacattgagagagatgataacata

SEQ ID NO: 192392 - DNA, 429 bp, Glycine max
  unsure (1)..(429): unsure at all n locations
agcttctanactttgtacaagaatgaagctctgataccacttgttaaacaagtggcctcacatatcttaagaagggggggggttgaattaagatattctaaactttttcttctaattaaaaatctatcttactttttacttaagttatgaattcccttaatgacaatcttcttaaatattaattcaaatgaagcaacttgaatatgaatataaagcaataataaataaaggagattaagggaagagaaaatgccaactcagttttatactggttcggccacacccttgtgcctacgttcagtccccaagcaacccgcttgagagttccactaacttgtaaattccttttacaagttctaaacacacaaagacaaccctccctttgtgtttagagattctttacaacaagagactcacagtctcttaatc

SEQ ID NO: 192393 - DNA, 462 bp, Glycine max
  unsure (1)..(462): unsure at all n locations
ggtgaattcttaacgctcataagacaaagtgagtatgctttgatatacaagctaaatcgcacctcggctaaaatatctcatttgtcacttatgctgaatttagagcctcctaggaagttactattcaaaatattgaataaggtcatgtcattcatgacatcctagaagagaaatttgaaggggttattggcaacattactgctaataatcaccttacttttactaacgatgaaatgtcaatttagggagtagggcataataaagccttgcacatattagtgaagtgcatggatcatatattgtcaagagtttctgtagatgatggttcctcaatgaatgtgatgctaaggatgacacttgacangttaccctccgatgaatcgcacatgaaaccaagtgctatggtggttagagcttttgatgggtcgcgtagaaagataatgggggaaataagtctaccta

SEQ ID NO: 192394 - DNA, 442 bp, Glycine max
agctggaccaaacggttcttgagacagtatgcacatattccaacagaagaagaagaagggtgtttcttacatgggagtccagaggtggagtagtagtagcaatccatgtcattggtgtaagcctgatcttccacacctttgtttctctccctcatggcttcttcaagacggaggtgcctcaagtgtaaagtgaaaaatatggcaaggggtttggtttagtttagtttagctctatgaaagaaagagaaaggaaaaagaaaagaaagaaagaaaagggacaccaaataatacttggcttgtagaagcagcttcctctacgaagctatgagtaaaaagtagagaattctgaatgtgagtgaatgaatgaatgaataaagagagagagagagaggaagctcaaggcgtttcctttacgttttctttgcaagaaaaaacagtgata

SEQ ID NO: 192395 - DNA, 454 bp, Glycine max
  unsure (1)..(454): unsure at all n locations
ntcacagatttttnttgtttgttgaagagaatgagtgcttttggtttaaagccgtatctaaaaggaaaaacatgttggcccatcatattgagaatgttggttctcacccttagtgtaagttgttttcatgagtctctgttagtctccttttttaagcattttttatcttcggttatgtacatgtgttgtcaaagtacagggtaaagttgtgtgattatttatcggcgaacaagaagagtccgtcaaaaaaaattaaaaacatacagattgcttatctttatgactcatatggatcatcaatctgtatggtttctttttaatattgaaatctgcatggccattcagtgactaataattaaattctaaatcttaaactttgagtttcatattttgtataactatcacatttaatatattcttaaatttgatgccatcattatcttaaactaataat

SEQ ID NO: 192396 - DNA, 444 bp, Glycine max
  unsure (1)..(444): unsure at all n locations
agcttcatgctaagagggtgtttctgtgaattgacttactattcacgttagaactgagctgatgatgaattcacaatcttctaaaagcctgattgatctgaaaaataatatcataacttttaaattttatgaaagtgcaaagttaattgggcgagtgtcaaagtttgatctcattaagaaatggatttctagaagacacgccacatcacatttgtatcgtattaaacaattaggtccgaaagaataatggttcaatttaaatactctcaagtgtccccgaacaatatcaaaacgttgatcctaatctatgttgaaaagacacccaaaaaagaacaaattacacatctacaaaagaagaaaatgttaaacacaagaaatcacatatgatccaatgtttcgccctttagttnnnttaaaatttcgttaagtgcgcacacatgctta

SEQ ID NO: 192397 - DNA, 443 bp, Glycine max
  unsure (1)..(443): unsure at all n locations
tcataccagttatatggcttgaaacaaggaccgagactgtggttctttaagctnaatgagtgtatgagcaactcgggattcaacagatgtgacatggaccattgctgctacgttaagaaatatactaatagctatgttatacttgccatgtatgttgatgacatgttgattgcaggatctagtatggcaaaaatcaatatgttgaaacaacagttggtagaaaactttgaaatgaaggatcttggtccagctaaacaaattcttggtatgagaattcttacaaatagatcagaaggaattttgaagctatctcgggagacatatatacacaagctacttgacagggtttacctcgaagaatctaagaccatggagttgatatatgatggagacttatctctgctgaaatcttacgatcagatgatccaaccgatatgctgact

SEQ ID NO: 192398 - DNA, 454 bp, Glycine max
agctgtgatccatagatagatctcaactattcgttgtctaataggttaagtgctttacacgaggcatgttattatgcacagagagagtgtgggaccacaaacatcttctgcagtgtatcttcatagaagtacaacttgtcagtgtcgccttgtgctcaaagttgacttttagcatacaattcaaatacaacgttaatagcataggacaaaaggaataaagaatgcaagacaagacaatttgaaacttccctcttatgcactatggcacaaattgcttactgaaccatggaccttactttctgatgattatttcagaacttgagtattaagtaactattccatttcctttggactatgagccaagtgctaaagcacttgtcttcttagaactgggcactaaggcaatatcatccaatggctaatactttatctatcgtccaaaggctttctactc

SEQ ID NO: 192399 - DNA, 436 bp, Glycine max
ctcaagcttaagatggatagttgcaatctccatttgatctattatcgtacacaatcaatgtcagaagaagaggatgaggagtattcagatgcaagaaggcgaagaggcgaaccaagaagagataatcatttggggagcattaagatgacaatccctacgtttcaaggtaaaaatgatcctgaattgtatttggagtgggagagaaaggttgaacatgtgtttgattgccataattattctaaggagaaaaagggtaaattagttgttgaattcaccaattatgctagtatttggtgggaccaacttgtgactagtaggcacaggaatggtgaaaggcctattactagatgggacgagatgaacactgtcgtgagaacgagatctgtacctatccactatcataggaatctgcatagaaagttgcaaactctaactc

SEQ ID NO: 192400 - DNA, 445 bp, Glycine max
  unsure (1)..(445): unsure at all n locations
agcgttataaanacacatgtttgttttcttattatgatgtctaaattatttttaccaaaggtaaactatgcaagaattctcttcaaatcatttatttctttctcaaacttgttgcaagatgagcatgatttaatagcattctcatacattaagcatttagtacacaatgagtttgcatcaattaatccaaaggtttcattgtcaagtttaagttcctctaattctttgttcaattttgaaatttatctttctaaaagattaagatgactgtcttattggatgaaacaagttttgcaagtttaatggattctctatgcaaatcattaaatgcatcttgaagcacattgacattaattttcgaagtcacttgatgagtccatgtcattcttcgtccatggtatgtatgctcatctttctgtgagagaattctccttaagattttcca

SEQ ID NO: 192401 - DNA, 444 bp, Glycine max
  unsure (1)..(444): unsure at all n locations
ctgaagacatggatacgaacctacgtgctgtcattcattttctttttatgacaagctttatgtaaattgtttcattgtttgaaaaagctctcataacaccttgagagaaaagactaagtgttgagtttgtatatctatttgtaagacaattaagagttggtcattgtgcaaacaaacaacaaatcttttgattngtgtagagccaacagtggctcggtaagacaaagaatattggttgtaactcgtttggtataaagcttgagttgtaagaaccagaagtgacaatgattaatacttgtaacttcgtgaagttagtggaacttggtggttaaccaagaactagacgtagtcttagtgatggagatgaaattccatgtcttatatgcnttcatttctcttctgggttcaaatgacctacgtttgaattggattttgtttgaaact

SEQ ID NO: 192402 - DNA, 438 bp, Glycine max
  unsure (1)..(438): unsure at all n locations
agcttatagttnttggagggagaataaatcaatccaaaatcaattgtaccttttaagtaacgaagaattctttttgcggcttttagatgaggagaggtaggagcctccataaagcgacacacaactcccaccgcatatagaatatcgggccttgtattggttagataccttaaactccccacaagactcttgaagatcgtggagtctaccttctctccttcatcaaactttgataacttcaagccaccttccataggtgtgttcacgggattgcaatcaagcatattaaatttcttcaacacttcttttgtgtacctttcttgtgagacaaagatatcattctccgtttgcttcacttccattcccaagtaatatgacatgagtcccatatctggtcatatcaaatcacgagacatggactccttgaagtcttaaaaa

SEQ ID NO: 192403 - DNA, 453 bp, Glycine max
  unsure (1)..(453): unsure at all n locations
tccctctnaattaaaatatgcaatttacattgccatgtatgtacaagttgatgattcatgactatggcatcgaagatttggccacttcaacacacatgccttgaagttgttacatgagaagaacataatgagagatcttccaagcataaaggagaacaatgaagtgtgtgaaggatgtctccttggtaagcaacactgatttcctttctcaacaagcggagcatggagagcgaaagatctattggagctgatacatacggacgtctatggaccaatgaggatgccatcgcatgagaacaacaggtacttcatactcttcattgatgagttctctagaatgacatgggtatattttctaaaagaaaaattagaagtctttggagtattcaaaaagttcaaggcccttgcggaaaatcaaagtggaaaacggataaaagtactaagaagtgatca

SEQ ID NO: 192404 - DNA, 445 bp, Glycine max
  unsure (1)..(445): unsure at all n locations
agcttataaagcttagacaatccttatnttatgtagttaattttagggttgagttaagctcatgccaattcaagatagtatcagtgcttatcatagatacaatgttttggccactctcaactggccaaaaatctaccaggcaccacaattttcctagtgcaatatacttggccctgtggctttcggaatgcaatattttttaaaaaatcaatcctacatggcccgcagtgcaattaaaagaaaaatcagacctacaatccccacgttacaaatgattaatcctgngcatggggggttgaattaggtctaagaaaaattcaagagttcttattcgaaacccacttcccccattacatatattcagctacaattaggacatgacttgctataattaataacaaaaaaattgacatgcctggctattatattaaacataggagtcctg

SEQ ID NO: 192405 - DNA, 404 bp, Glycine max
  unsure (1)..(404): unsure at all n locations
ggatgaaacgtatagattctatggtttgtaatgttatttttatatnnggatccattagacttgtacgtgtcctctggacaaatggaattagtattatatagcatgggtgcatgagttgacagttttgatatataaaaaataaaacctaaagggttcatcatataaaactaaaaagaccctcaaagtggataattgtcaaataaaaaaatgtttcatagttattaattaaaattatagatagatgataatctgaattctgaaactatctaataacctctccttaaagttcagaagacaggtggaaaagaaaagataaaactaagatttcatttttactgcctgcgaataagtaacagaaaacaatcgtatattataagttaacaattgtgtttttctctttataa

SEQ ID NO: 192406 - DNA, 444 bp, Glycine max
  unsure (1)..(444): unsure at all n locations
agcttgaacttaaagattgagtctctcttttttaatngatcacacccaaggctgggctacataacaaaccttgatttaacagtgttcctagtctccaatatgagactccatggtgatgttctcattgttgttcaataagactttctgatcctcttctgagcttatgtctagtaccatgaacaatttatttataacagaaagaagacaatattacaactttcactatgcttgacaattgctttgtgaattgctcgagagtatctctcagtcttttgatttatatttacatcactgcataattgaatcccaaccattcaaggattagatgaaccatttacagcaagtgtccagaatttcctaacctanatatatagaagcaattagatcggaataacaatgagataacgtatctaggacatagggaagtctaaaagaactaataaa

SEQ ID NO: 192407 - DNA, 447 bp, Glycine max
tccatcaagtggtaatcagagctcatgagcttcaagtttgtgctccttaaacctccattaattttcagctttaccttctcctccattgttgtttcttcatttttctccatgtatctactcacatgtcttgttctaaatgttcttaacatgattttttagaatttctatcgattaaacttgctacaaaagctagatttgattttctatggttcaaatttcttgttcttgttcttgaaccatggattgtgttgagattgagttccttttagttttgtttttctattttttatggttgaaacctaaaccatgaaattcttacaaaaacattaaagtagaataaaacctcaaaaatctagagtgtcttgttcacctattgtagttttgtcatagaagtcatgtctagtcatgaaacttgtcacataagaatccttatgttgtgctgaaatt

SEQ ID NO: 192408 - DNA, 459 bp, Glycine max
  unsure (1)..(459): unsure at all n locations
agctntatagagctttaataacttatctaatatgccaactaatttagttactttatgttataaggatataacagaaacttcactaagctaacaccctaagacataaagtcctaagccgactattaaaaatttcttcaccttggattgactttaattatcttccacaacctccagaattttcaaataatgtttgaacttacgcattggtagtgctttggttatgtcagttggattgtctttagtgctaatcttcaaatttatctccctttntgtcataatttccctcacgaaattgagcttatatcatctatatgtttttttcttttatggcacacttgatttctggctaagtgtataccactctgattgttagaaaacaccttagggtatatgctttcctctcaaactcatggtcattcctttcatccatatagcctccttaattgcttcgataacaac

SEQ ID NO: 192409 - DNA, 450 bp, Glycine max
  unsure (1)..(450): unsure at all n locations
cgaggatagagacttcccaagctatttatcttctctctcttagaggctctctatctntttggctntctcactttaaaaagtggattcactcttgtcttggatggctaggaatgaaagctcctacccttatttatactacttcacctcaatgaatggtagagattacttgtatcctacggtgaagattaattctctagaattctccacacattctaggagtctctatattcttctactcccttccatatccttccatactcttccataaggttccacacatctccagaatatttcataggtttctacattcttccactagcttctagagagttctacactgctctagagttctccaggacgttctagaaaattctacacttttctagaaagttctagaattttctagaacctcttcaattaaagagggatcctaacaatatggagggtgga

SEQ ID NO: 192410 - DNA, 453 bp, Glycine max
  unsure (1)..(453): unsure at all n locations
agctngtcaaatgtaaagggaaagatctactaatgaagggaatgtgttttcctagaaaatttatcccaggacttagtgtccatcaccaggcttagtgccactgccaggcttagtgccgctccaagtttttgggttattccacaacttagtgccaagggcaccatataaatactatttgggtacccctagcatgacatcatatatgaaagagttgtaaatactaacttaggaacatgcataacattcatataagattgctaactttgcgagttttatgattgactgatatatgtgaattgcggtgagtttctatgctaactagtgtaagtataattatctatgtttgagagatatgaatctacttgactatagttattaatatatttgcttgtgatatacttgaatggttttttcagtcttatagtttagatgtacaacttgatatgcaagttg

SEQ ID NO: 192411 - DNA, 459 bp, Glycine max
tcaattgtgttgctatgtgatggtttcctcatgttcctattgtaactattacctggagtctactaatcatcttttgctccaatgtcctttcgcaatttttatctagagatggttgaatgacattttgaatcgtaaccttgtttgtctatcacctcttgatgtgaatcttacggggcggatcgtttgatacaggctacgaaggtttggatgacgccacttccggtgaaggaagataagtcatggtagacgccacttccaatgaaggaagataagtctgggtagacgccacttccggtgaacgaagataagtctgggtagacgccacttccaatgaatgaagataagtctgggtagacgccacttccggtgaaggaagataagtctgggtagacgccacaaggattaccttgataagtctgataattgcgttcaacaagaacccagagagaaactctcacc

SEQ ID NO: 192412 - DNA, 423 bp, Glycine max
agctatctgggtaacaacgttttatggttattatatctattgctcgcatgatattcttgattaattttatgttcacaaacacaaaaatggattgtgctcttagaatgagtttatggattaatcaatctcaaaaaaactggcttctaggattggtttagttttataagagatatattaacttgtattttagttgagatcttaatatactacctactatcttatgtataagattatttttactcaatcgtttgctttttttataagattcttttctaaaagtctcatgcattaattatttttatcttataatatccttaattaattaatcttagtattctctctccacatataatgacttggtgagaaacaattaactggagagagaaatgaaaaataattttagcataatataaatatttgata

SEQ ID NO: 192413 - DNA, 467 bp, Glycine max
  unsure (1)..(467): unsure at all n locations
tcatatatcatcaaataaattaatttcgtaattgttctgtcatcaatccacatcgacaaaaagaaaaaaaaaatgattntgaaaaggagccgtataaaacaagactaggtgtatggcatcatgttggcagtcatgtcatttgaatcataagcaggggcattttagtattttaaaaagagaacatggataaggagaggtactaacctggagtgctgcaaattggagataagactacaaaagcagccacaagaggaggagccaagctcttgaaaaacttcacttcattcttccttgtaggaattgtcttctcttccctcatcacattgtccttttaatcaacaattcaatacccagaattctacttgtcagtctctcttttgtcttttctttttctggcttaacacataacacaaaattcaaaatcacacagganaagtgagatagagagaggagctctaccttaatag

SEQ ID NO: 192414 - DNA, 431 bp, Glycine max
  unsure (1)..(431): unsure at all n locations
agctnntaaaattgaattaaaacgttcagaaactgctggtaatcgattactatatatgtgtaatcgattacacagtgcaaattttgaatttaaattttaatagctgttgtaaatcagttttggccaccggtaatcgattacatcctctggtaatcgattaccagagagtaatattgttgaaaaagacttttttaacttaaaattcttggccaaaccttttgcaatttcaattggaattcccttcctatttaatatcctttctaagactctatagactgtcttgatcatccatcttgaatatctttaatttctttgtcttgaataaagctttgagacgcatgtgaaactttggcatcatcaaaacattcagctttatcctttgtctancaaattgtggagccaaattttggagccaaaatttcactaattat

SEQ ID NO: 192415 - DNA, 462 bp, Glycine max
ttagaagaaatcccacaagacctcgaaagggagaatgagctgaaaaatgcagatgcaggtgaccaagtgcctaaagaagtggtacttgaagttgtcaaggatgcatctgaagcaaagcaacaccaggttaaaatagctgaaagagttgaaacaactttggagaccagttgtgaaatcttctataccacttttgctaaaagagaagctgagcttgaaccagctatgatgtatgagcagatagttgaggaagaaaaaagttcttgaagaagctatggtgcaatttgttattgaagcatctcttcatgaggaagaagagaacatagcagaaatagatcttgttgcaactcccatcagacaaagatctatacagacacaagaaatgttgatgatgtcttatttgaagtaatggacaaagataagttcagacgctttggagctatctattgacctctagatctagat

SEQ ID NO: 192416 - DNA, 400 bp, Glycine max
  unsure (1)..(400): unsure at all n locations
nctctcaatgatagttgngcctagcttcttaagcatactacttattatacgcctcagnncacaaagaacatatcagaattgacaaccnacaaaacggtacattaattatattgaattaagggaacgtgctntggattttagttttctgtgtaataacgatagttccgagctatataagtgcgcgtacattacgatgacgtcactttagtattaaatttatatggtgaatatgaacgaacctctatacatcaacttggctacgttgaactcaacttggtgtgtaaaaaacgtcaagtcgggttctttgcctcctctctaattaacaatctctctatttttttctgcgttatattatagttactatgattatcattataccactgcgagctgtatggcggaa

SEQ ID NO: 192417 - DNA, 141 bp, Glycine max
taactttttacttgctacacaaaaaagcatcatatctttcttatacaagatattctccaaatataatgccaacaaggtgttatttcttcaagataagtcgaagctcatattatgctttcacttttgaaaactatgctgtcc

SEQ ID NO: 192418 - DNA, 370 bp, Glycine max
ccccttaaaaacaaacataatgactggcttcacttgatatatgtcatcattcatgttcgcttccaagatgtggacattcaaattaaactatcttccctcacgtattgctatcttacactgactgagagatatgcctactaaatgttattttctccgatcacatcatcacactacgatagttcttctcttggacgtctagaaatattatgtgccacaatcaacatatattctcttctttaacgcgtacgccgaaatttcataggtaacatggaaaatcatccaccgtttattgattactcacgaccatataagcggtaaggaactaaaatacacggtaataacttgagaaatgctccttatttacatattc

SEQ ID NO: 192419 - DNA, 451 bp, Glycine max
agcttagcgtggcatctagcttcaacttacttagagtagttaaggcttagcgcaacaggcgcgctaagtgcacttccaagagttcaaaaacagtaagagattggcgcttagcgcttcctgccccactaagcccagcttgaaaggtcaaattctcataatggatcaggggcttagcgcaggacaacacgcttagcgctgctaccattaaatttttccagggaagaagtggcgcttagcacatcatccacgctaagcccactacttaaggtttaattatagtgaagatgttgggcttagcgtagtgatgtgcgcttagctgaactattcaaccaacaaatcaggggtcgatgcgcttagcgcaagcaagctctgcttaacgcgtgaagactgagcgcttagcgcaaggtctgcgcttaacggatagacaattgcaaaaaaaaaattaagtctt

SEQ ID NO: 192420 - DNA, 446 bp, Glycine max
cttctttggaccggaccttgaacaggcaactaactcctctttcaaaaccatgctatgtgctcgcgactggtccctttcttcctttcgcaacttgagttcactattgctaccccatagagctccgcgaaatttgttccggccatactcttccttgcgagccctcttggtctcttgttcaagggctcttgcggtaattgcattctcttcccgtaacccggcacactccttccgaacgtgtatagcggccaacttgaacttctctttggcaagttttgcctttcctaactcgcttttgagagcttggacttcttcgtcctcttccggtgcttcaaagctgtctttgctgacgacttttaacttggcgagccaatctaaacctcgtatgcgaactttcagccattcgtggtacccaacaatgatgccattacgaatgcctctaagctctg

SEQ ID NO: 192421 - DNA, 430 bp, Glycine max
  unsure (1)..(430): unsure at all n locations
agctgtatgtaagccatatcgtaggcccttgtaaacctgcctggcctattcccacccctagctctgattaccatttgatggaagcttgcttgtgaagcttctatggaggctggatctttgagcttcaatgaggtccttcaatggtgattttccaccatggagatgcagcggaagataaaggagaaaaggtgagaggaggcgccatgcactaaggaataagccatggaagaaggagctttaccaccaagagagtgccttggataagaagcttatagaggaagcttctaaggaggaaaagaacgagagagagatggggggaacatgaaattgaaagaggaaaagagggagagaagttgaactgtgaagtgtgtctcacaagactctcattcatcanagttacaacaactgttacacatgcttctatttatag

SEQ ID NO: 192422 - DNA, 443 bp, Glycine max
  unsure (1)..(443): unsure at all n locations
tatgctgcaaacatctacaatagacctcctcttcctcaacagcaaaatcaaccacaacagaacaattatgacctctccagcaacaggtacaatcccgggtggaggaatcatcccaaccttagatggtggaatccttcacaacaacaacaataacaacaacaacagccttattttcaaaatgctgctggcccaagcataccatacgttcctccaccaatccaacaacaacaacaacaacagccccaaaaacaacaaacagttgaggctcctctgcaaccttcccttgaaaaacttgtgaggcaaatgattatgcaaaacatgcagtttcaacaagaaaccagagcctccattcagagcttaactaatcagatgggacaatnggctacacagttaaatcaacagcaggcccagaaatatgacagattaccttctcaatctgtgaa

SEQ ID NO: 192423 - DNA, 413 bp, Glycine max
agctaatgctcctagatatagcttctttatattatctatccaagtgaatatcatcgttgcattggttgagttatgtagcactgtgcataagtcatgctatgcatgtatgcacaaagttccttaaattattgcttatgtattaatgaatgttcggattaatggcttcacaggttttaagcatgataaaatatgttatcatattgagatttctatattattggttacaagctctatttggtttaaaggatattctcgatattattatatctattgaacgggaaaatcacattcatggttgctattgcacttacgcctactcattgtacgtggctcaatatgtggtaaatttgataaaatcttgtggatccgctaataacaatagctttgtcatgtaaatacatatttaagtcatc

SEQ ID NO: 192424 - DNA, 449 bp, Glycine max
  unsure (1)..(449): unsure at all n locations
ntcaagcatgaagtatgataatatcaaaggtgtgcatgatcacattatggaaatgagggataccatcgctaaactaaaattccttgaaattaatataaaaaagttagcgggagtggaaatacttaacatgtggaatttgaagaaatatcaaaatcacctatgatagaaatagagtctgactaatattcaaaataataaacatgatattattgaacatcaacctactcataaagaaccacatgtggaggacatgccacataagtaactcattaacatacaacctattgataaaacaatatgaataaggagatctaccagatatagaacgacattgatttctagcgactatattgtgtacctctaagaatctgccttngatgccaattgtatcgttccaaaataatgactggtttaatagtaatgatttaattaacatcaaccatggtaat

SEQ ID NO: 192425 - DNA, 443 bp, Glycine max
agcttgttactataagaatttggttcggttaccaaaaacaagaaaggtaatattgtttgtaatatatctcttgctgttgtaagaatttgctatggttatatggacctggtaggctgtagagaagaggttagccttcccccaaaaatgaggttccttttaattttcccaggctatcaatgaaaaagcatccaacgggaaagttttttccttttttactgttatgcatgtttgtttcgttgatatttgcttctatttggaaggtgttaattttatttgttgttatgcatgttttcttcttaataatagttattttttcttattgatttcttcaatttgattgtggcttccttttattttgcgcagctatcgacgaagaagaatccaacaagccccgttttttctcttttgctttatgcatggttggtcattactatttattttat

SEQ ID NO: 192426 - DNA, 385 bp, Glycine max
  unsure (1)..(385): unsure at all n locations
cggactcatgagtggtaagttgaggtctaagtggattgtttcttttgccgtactaatgtgtctccttatggtacagttgagatctaaagcgactccacacacaagagcttcaaggtcaatggacaccgacttatgccattcctcacaaacccttctttagcggacgtactggtggaagagacttccttactccaccctactcttcctctaccatgacttanggaggtcctctttcctatctccttctttacttttattacatttgaccgattctatttgatggcttaattgctgttaatcttttaattgtgtcacattgaggacaatgtgttgcttaagtatgacggggagcgtgttcttcggttctggttctgcagctgcgcta

SEQ ID NO: 192427 - DNA, 440 bp, Glycine max
  unsure (1)..(440): unsure at all n locations
agcttcttcttccatagtttattctctagtggatggctccttctctcacttcttctcctttatcttccgccacaattccatggctgaaaatcatcattgaaggacctaattgaagctaaaaaatccagcttccataaaagcttctcaagcaagcttccattagtaagtggctcaagttgggtcgaatttagtctaaattaagacttaaccaaatgaaacatagttgggttgggtgtgttgttttttgttaagcaacctaacccaacaaaaattntgagagtagaagtttaggtatttagtatgttagaggaaaattaaatctttttaagagtgttaaataaaccaaggacataaattcttgaatagagaagggagacgttgactcgaggtgaacagagaaaaaatcagacaatctaatttagagagacaaatcatcaatg

SEQ ID NO: 192428 - DNA, 417 bp, Glycine max
  unsure (1)..(417): unsure at all n locations
tagatgactntggagggatgttttatcaagctctttggtatattgttggtcgggatgtttataaatctgtcttgcaattctttgatcaaggatggttcttgcctaatttgaattccaacatggtggttcttattcctaaggtagttggagttgacaatattagacattttcgtcctatagctttggcgaattttcaatttaaaataataaccatggttttagctgacaggttatcttccataactcctaatctgatctctccccaacagtttggttttgtaaaaggtagaaatatagcagagtgcattggtactacctttgaggccattaatttacttggcaagaaggtttttggtggtaattggctttgaaaatgatatttggaaaatgtttgatgctctggactaatagttttta

SEQ ID NO: 192429 - DNA, 435 bp, Glycine max
  unsure (1)..(435): unsure at all n locations
agcttctagtccttgtggatcttcttccctctactgcttgaactgcacttgtaagtttagcttgaacttcacctgtaacatcatcaggttctggttcacttaatatttctgcattgatatgcatcattggcttcttgcttggatcatgcttgtccttcatccatgtgttcagcttatcaaatgggacatccttactaaaaactatttgattcgttcttggatttaagagtttgtatgaccctatgggattgtagccaacaaagatcatgtgttcactcttgtcatccaatttcgcccttgtttgatcaggaatatgtctgtaacatgttgaaccaaaaactctcatatgcttcacagatggtgttttccctgaccatacagcttctggtacttttgattttaagtngtgtgtggagaacctattcagtacatatg

SEQ ID NO: 192430 - DNA, 452 bp, Glycine max
  unsure (1)..(452): unsure at all n locations
tctcaactaattcccaaactattgattcaactcttcttgcatagctatgatccaatgttcatcaattatggcttctttcaaatttttaggttcaatcaaagaaacaaaaaccatattattgcaaatatctttgagagagtgtctagttgttacccctttagatatatcaccgataatcttgtcaacaggatggtatctagaagttttccactctcttggaagatcagcatttgtttttgtttcatgaatgtgaaaatcttcatcatttccctctcctttgcctttgtgatcttcaccatgaatatgcatttcttctaaagattctaaaatatcatctagtatattctttcttggcaaaattgcattagtttcatcaaaagcaacatgaatggattcctcaataatcatagttcttttattataaattctaaatgctntactgtgcaatgaat

SEQ ID NO: 192431 - DNA, 466 bp, Glycine max
  unsure (1)..(466): unsure at all n locations
atgcaagctttctcgtggcttctatgagaagttntctcaatatgcttcttagagaagctagatccttatctacccacacccctctattaactaaattaaccttcttgaaaataattacagataaaataacacaacaaatataatcaaacatcaaacataattattaatatatagatatatatatcagggtgttacaactctcccaccctttatgaaatttcgtccttgaaatttaccttactcaaacaaggatgagtgagtttctcgcatccgactttctaattcccacgtggcatcttctcctgatgcacctccccatatcaccttgaccaatagaatctctttccctcttaggtgttttggttgcctatcctcgatcctcaaaggcaatggttcatatgtcaaattcttcttcacttgtacatcatccaattcaatcacatgggatggatcacggatatactta

SEQ ID NO: 192432 - DNA, 371 bp, Glycine max
cgctctatatctacattgatgtttgtattagtgggacgatgtttcatgccatctttgctttaagagtaatgtcccactaaaactaactttccaaatgtttgccttcgcaggaatggcaccgatgaagcttgcctcaaagaggtccaggaaagacaaggcggccgaaggaactatttccgccccggagtacgacagtcaccgctttacgagcgttgtacaccatcagcgtttcgaagccatcaagggatggtcgtttctccgagagcgacgcgttcagctcatggaggacgagtatactgatttccaggatgaaatatggcgccggcggtgggcaccactggttacacccatggtcaatgttgatccaaaaa

SEQ ID NO: 192433 - DNA, 93 bp, Glycine max
gaagaatgaaactaattctgaagaactgtcttcccaaagctttggaacacctttccggaatgttcggaaatgtattcttccgaacaattataa

SEQ ID NO: 192434 - DNA, 342 bp, Glycine max
  unsure (1)..(342): unsure at all n locations
ccccccctgaccccttatttgaggtacaatcttattaaacactggcactgcttcccttcctttgaattataccccttgccctttcctccaggttgactaagttaggtataattggttcctcctgcttgctgaaatttactcccaaatattttgccatttcccaattgcttgctgcctctttcaccatctcacagcttttgggtgttgaaacagaaccctgcattaccttgtattntccttcccacgtgacaaccttcttcaacccactggctncatnnttgttaagagatgctcgctgagtgaattctttgggactctacttattatctttttttctttact

SEQ ID NO: 192435 - DNA, 445 bp, Glycine max
  unsure (1)..(445): unsure at all n locations
agcttggagaggatgctntaatggaggaaaagaatgagggagagaaagagagaggggggagcacaaaattgaagaaagaaaaagggagagaagttgaactttgagttgtgtctcacaagactctcattcatcaaagttccaataagtgttacacatgcttctatttatagactaggttgcttcctttagaagttttcttgagaaaacttcattgagaaacttctttgagaaaacttccttggcaagctagagcttagctacacacacccctctcataactaagctcacctccttgagaagctttcttgagaagattcctaaagaagctagagcttagctacacacacctttctaatagctaagctcaccttcttgagatgagaagctagagcttagctacacacnctctataatagctaagctcacccccatgataaaatacatg

SEQ ID NO: 192436 - DNA, 355 bp, Glycine max
  unsure (1)..(355): unsure at all n locations
attgggtgttgagaggtcaaattttgaatcgctggagttttcgccttaaaaccagtttgagcaagtctaaatcaatggtatagacttgattgagatgagagattaccccaaaattaaccaattctcattttcacctttcaaacctagagaattcactaaattggtgggttttggataactatattttgatttgccttggtctgaagtttgcttttggtttaaatatgatttatacatgatttaggacttgtaggatccaatttgagcaaaattggatgtgggcaagttggatttcgaaatctgccatattatgcagaaaaatgctgtcaaaattgtgcagcanngttttttacat

SEQ ID NO: 192437 - DNA, 460 bp, Glycine max
  unsure (1)..(460): unsure at all n locations
gcttcattcttagaatgaagtaagtagagattcatatatcgtgaataatcatctataaagggtatgaagtgtttcgaactatttgcatccatgtctagacaacatatgtctgtatgtatgatttctaataaattagaactcctctttgcaccctttttagacttgttagtttgcttacccttaatgcaatctacacaagtctcaaaatcagcgaaatccaaagtactaagtattccttcatttactaatcgcttgattctttcaatagagatatgtcctaatctccggtgccacaacatagaggattcttcattcacaatacatcattttaatccaacagaaacgtgcatagaagtagcgccgttnttcaattcaatcgaataaagaccatcaaccaattgaccacaaccaataatttcagaattatttagtaaattaacaccaaagtctgtaaaataaa

SEQ ID NO: 192438 - DNA, 451 bp, Glycine max
  unsure (1)..(451): unsure at all n locations
tcgcattctaattcacaanaacatggnttcatgcattgtacctatattactgagattaatcacaaaatttaagaattatcatatctgtaaaacacaattcggcaaaattcatcattggtgaaaaggggaaattggtacgaacatcataacaaaaaatttgtcccttcaaaataaaattaaacttatttggaatttttcaacccgttcaaatcaaggaaaaattatacaatagaaggaagagagagagctcactccccttcactcgaaaatatgattcccaaaggcaagacactgttgaagttgctacaaatttctagaatattcttaaatataatatgtatgaatatggtagaacaatctacaactatagtgtatatgaatatggtagaacaatctagaactantatgtgtatgaatatggtagaacaatctagaatcataagtgtatgta

SEQ ID NO: 192439 - DNA, 419 bp, Glycine max
agcttatcaagggaagttggagttaattattcctttgtctattatcaaataatttattggtcgagttctaagtcgtcagagtctcgcagtatttgtctgtaaaaatacagatccagagcaaggaaaaaatgatgtctatttactattacaatttacaattttacatgaacattaaagaccggaaaacgttcataaatttcattaaaataagacaacaaaaagttttcactttctaattcaaagcatattttagaaacacatttataaaaaagattaaaataattatataaaatatcttatattggttaccgattaattatgatttccagtctccacagatacagagcaatttttttttttttgcatcttcaaggtacagatgtacacgttctgctactgatatttaattcgaatcacaa

SEQ ID NO: 192440 - DNA, 438 bp, Glycine max
gtggcttacttggagaacgagggttctttaaccacgtccgtgaagactcggagtaagagattggtaaaggtggccaacctgtgaagaagatggcggttgaagagtcggagaaatcatagcccacagcaaagaagagtacagctgaagctgctgggaagagcttttgtttctgttaacgctgttagaacttcgcccagattgcccaagcgtgtgtccaaacacctatagatcagatgaggataaagatgctttagaaatccatgttataagagaattgtgaatatgatgttaaagaaaatagtgctttttactagaatggttatgtattacaacattattcactttcattacttagaaactctagatgtctgtttaatttaccttcttttttttatttctacttgattaaagtccagagattcttacatgatttcagat

SEQ ID NO: 192441 - DNA, 363 bp, Glycine max
agcttgtcaaaaaaggaagcatgttaatttctcctttcaaagaaaaaacgttgtttccacttcaaaactccttgaactacttcacatatttatttggtccctcaagaactatgagtttaggtggaaattactatggcttagtaatagtagatgattactcaaggttcacttggactttgtttttgaaaaccaaaaatgaagcttttgatgcttttcacaaacttgtcaaggtgattcaaaataaaaaaaggttttaacattgtttcaattaaaagtgatcatggagatgaatttcaaaataagtctttgaaaaacttttgtgaagaagatggaattcatcacattttttcttgcccaagaaca

SEQ ID NO: 192442 - DNA, 331 bp, Glycine max
tgagaagctagagcttatctacacacccctattatatctatgctcacccccatgacaaaaaaacatgaaaataccaataaaattctactacaaagactactcataatgccctgaaatacaaggctaaaaccctatactactagaatggccaaaatacaaggcccaaaataagaaaacaacctattctactatttacaaagaagagtggacccaaccttggcccatgggctcaaaaatctaccctaaggttcatgagaatcctaaggccttctttatcaactctagcccaatcctcttggagcctcttgctcatggctctggtaactggtcc

SEQ ID NO: 192443 - DNA, 351 bp, Glycine max
atgcaagcttgacttacttaaatgattcttattttttggccaaccaacactgctgatctggagatgaaactctctggtgtaaaaaatgcttcaagcatttatgatctgtgtgcacaataaattctctgtccaataaataatgtcttcagtgctgaatacaaagcacaagggccatcaattccttctcatagacagatattgccagattcccatcagataaagctttactgaagaaagcaataggtcgtctctgctgcattagaacagcacctatacctctaccagccgcatcacacttaactttcaaagggtaatcacaatttggaagaattatcacagggggagaagtca

SEQ ID NO: 192444 - DNA, 355 bp, Glycine max
  unsure (1)..(355): unsure at all n locations
aatcagctttaagtttggttctaaactgaaacaaattgttttatcttntcatcctttccttggcaaagaattgccagacaaccgctgaatcttttggctctctttcatttccaaagaacaaagactacacctgatctttggctcctttccttgcaagaattcaaacgaccagctgaaatctttgatctcccttcctaacaagattcaagacaaccgctgaaatctttgttccaattcataaagtcaagacaacgctgaacttgcttaccatggaggacatcttgagacagatagaaattactggtgtggacgaacaagaggcatttgggcagttagggagactcatagtgtaaaa

SEQ ID NO: 192445 - DNA, 453 bp, Glycine max
  unsure (1)..(453): unsure at all n locations
agcttatattttctataattaattttctctctctccctagatgtctaataataacattgtgaatgttcattaaatatttttttttatcaaatgatatcacatataatatttattcatatcaaatgttttgaattactgagaagagactaacattgaataaaattttaaaagtcactttttaaattagaaaaatatttaagttaatgataaaataaattctattttgttttcaaattttaatttaataaaaaaatttagcttattaaaaataagtggaaaaaatataaatgataataaaaagaaaaagagaatgtcgcaaacgagcaaaagaagattaaaaatatagcaacgagttgaattgaactaaaatatntaaattngaataaatacaacacanatttaaaaatacaaagaatatgacatacattcattcgtgtgggctaagtctacaca

SEQ ID NO: 192446 - DNA, 417 bp, Glycine max
gtcttgagataacttccttgagaagcttgtttgagaaaactttcttgagaagctagagcttagcgaaacacacccctctaaaaactaagctcacctccttgagaagcttccttgagaagattcctaaagaagctagagcttaggtacacacacctctctaatagctaagctcacctccttgagatgagaagctagagcttagctacacacccctataatagctaagctcaccccatgacagaatacatgaaaatacaaaaaattccctactacaaagactactcaaaatgcctcgaaatacaaggctaaaaccctatactactagaatggccaaaatacaagccccaaacgaaggacaaacctattctaatatttacaaagatacgcgggctcaaacttagcccatgggcttcaaat

SEQ ID NO: 192447 - DNA, 475 bp, Glycine max
  unsure (1)..(475): unsure at all n locations
cttagtcacctgcggatgcagcttcatataagctgaaccatgtgtattatttatctttctgtngagcnacattcagaaaattagagattatctcttttatcttagtgagagtgattctcctaaattcttgagtgactcaagaacaccctggctgtatcaaaggactccacaacctttgtgtgttgccctcgctggaaagagagaatctttccttcctttcatactcaccattgttctttcataccacaatgccagaagatccacctctgcccaaaattatctcgtggcaataactcccattttatgcactcaaattaagggattcttgagcctaaatagaatttcaaaatgagacctttctcctcggtttggactcacctcatttggagccgtgtagcttcaattattgacatttctataattctgccaaccaccacttgacctacggtttaccattccattcatccattttatg

SEQ ID NO: 192448 - DNA, 451 bp, Glycine max
  unsure (1)..(451): unsure at all n locations
tgttcagaaacgtgcattngtgtgcaatacacaattcccggtactccacaacaaaatggtgtatcagaaaggcgttatagaactttaatggatatggttaggagtatgttaatcaattagactttacccgtatctttgtgaatgtatgccttgaaaactttcatgtatttgttgaacagggttcctagtaaggcagttccaaagacatcttttgaactgtgtacaaataggatacctagtataaggcacctgcatgtttggggttgccaggcagaaataaggatttataatccgcaagatagaaaattggatgcaagaacaatcagtggatatttcattggttatccaaaacacgttaaaagggtatatcgtttattggtctaatcataatatgagaattgcaaaactggaatgcaagctcattggaatgatgaatcagtggagtatagtc

SEQ ID NO: 192449 - DNA, 458 bp, Glycine max
  unsure (1)..(458): unsure at all n locations
agcttgactaggcgagtttattttagccttattttcactttagttattagtcaattcgattaagaatgagaaatcccaaagagaaaacgtccgattgattttccgctttattttactaaaaaaaagatgttttttgattattatattatttttcatctctttttgttttccaacgtggttacggcacgaccgaacggtcggaattcattttaaccgaagtttacggatcatacaattcaaacgttcggtggaaatttattttatttttaagttaagcgagaaatgacttaagtaaaatggcttaagcacgtcaacagggggtatgaaaagtaaatgaaacgagaatagaaatacacaaaacacaatttggaccaccacgggtacatagaatgaatcgaanagcttggttcgaggtacttacccgttgaagatcgaagaacgaatgaagaacgtcgaag

SEQ ID NO: 192450 - DNA, 488 bp, Glycine max
  unsure (1)..(488): unsure at all n locations
tacgcgacctataaaactcaagctgaggattatggggtacccatcacatgtggtactaagtggcggtcgggcgatggtgcacaacaaggtttccacatccacaaagcgcgcataaacccaccatccccttgtggccacctncaactgagctcacgtactcccacgtagcccatatcctcttttctctcaacaccgggtccccatcaatcctcccaagctttcacaacatccaagcaaaacaaaattcaaacagcacaagctattacagccaagcaaaacagagcaaaggcagaaaactctgccaaaacaccaaccaaatcacagcttttctcacttaaagaccccagtaacaattccttcgttccggttcattaaccgttggatcgactcgaaaattntactggaagtctctaatacttaagcctacattgtgaccgttgggatctactagcaaacatccagaactcattctgtactactctttccac

SEQ ID NO: 192451 - DNA, 401 bp, Glycine max
  unsure (1)..(401): unsure at all n locations
agctntggtttcaattatgtgcatctcgatatattacaggtctcaatcagacatccgagtaaaaagttattgttgttagaagttgcacagagcttcagttttgcattttgagggtctcgatatattacgggactcaatcggacatctaagttaaaagttattgctggttgcatttgcttcgagctttcattttcaattacgagcgtctcgatatattacaggactcaatcggacatccgagtaaaaagttattgtcgntagaatttgctcatagcctctatntttcaatttgagtgtgtcgatatattacgggactccgtcgtacattcgagtaaaaaagaattgtcgttagaattttctcaaagcttctggtttcaatatcgagcgtctcgatatattac

SEQ ID NO: 192452 - DNA, 297 bp, Glycine max
  unsure (1)..(297): unsure at all n locations
actccatcattatgattattacctgacatctcaaacaaacaaatcaaacgttacaagacaattatagttgttgtttgaatacctcacccactcaagtgtatcacacaattatggcttttctctaatgaaacactcttgccttttaccactctaattccccttgagttcttaggcaattcaagagattatggccacaacaaagaacaattcaccaatatgtgtcaggtaaggctagagagacaaggaanaggttaaccaagaaaaaggctaacaatgtattgaaataatattggatga

SEQ ID NO: 192453 - DNA, 431 bp, Glycine max
  unsure (1)..(431): unsure at all n locations
agctngntgtattggggtgtgctacgcctngttttgttcatgactatttcgntgatgaggatcttcctgaaaaggaggttggagatttccatgtggattaagaagatgaaggagagaggcaggattagtgttgaggtgatttgggtgaagattttcctccatgaaagtatgatcttagaggcttctttgtatatgtcaaagaacccaagaaattgcatctcttcttgttctctgtccatgatggcctctgaaaaatttgtttctctctattgaggttttggtttggaaaattgttgaggtggttggttcggtgaagatgagcaacgaggaggttgtgttggaaagaggatcaatgaatgtgtcacaggtttatagcanataaaatatgacttctgacttgaatgcaacacatttgccttagttttcaaatg

SEQ ID NO: 192454 - DNA, 428 bp, Glycine max
  unsure (1)..(428): unsure at all n locations
tgtacgcacatcgntcgcgtgtatgatatccactccacattgtttgaagtagaggagagcttcaaccctataacgcaacgtggcagacaaaagtgggcagtaaacttgaatggtcgtcattgtcaatgcggaaaggattctgcgcttcactatccatgttcacacattattgcagcttgtggttacgtgagcatgaactactaccaatatatagatgttgtttatacaaacgagcacatcttaaaagcttactccgcacaatggtggcctcttgggaatgaagcggctattcctccttctgatgacgcatggacacttatccctgacccaactacaattcgtgcgaaaggtcggtcaatatcaacaaggattataaatgagatggattgggtccaaccatctgagcaccgaacaaatgtagtagatgt

SEQ ID NO: 192455 - DNA, 310 bp, Glycine max
  unsure (1)..(310): unsure at all n locations
gcttgtcaaggaagntttctcaagaaagcttcttattgaagctacctagtctataaatagaagcatgtgtaatacttgttgtaactntgatgaatgagagtcttatgagacacaactcanagttcaacttctatcccttttttccttccttcaatttcgtgctcccccctctctctttctctccctctttcttttcctccattgaagcatcctttccaagcttcttatccaaggctcatcttggtggtgaagctccttcttccatggcttattccctagtggatggcgcctcctctcacctcttctcctt

SEQ ID NO: 192456 - DNA, 434 bp, Glycine max
  unsure (1)..(434): unsure at all n locations
tatggtcctgaattgcttatcacatatctcaatatcccattttcatccttctttgacaattggcagccattcatacttttttatactatattttcctttcatcattttctagatgacataaactttgatttaaaaaggccataactcaaagttttatttagcttaaaaatatgctggtcaaatctatgattagcagtaggttgactatattagagtcaatgtgaccaacactaactataaacatagaaaatagagtcaattaaccaatgttaggccaacactactaattnttccctactaaattaacaacttcttgggaatgtgaaatggtaaaactcacttttagatacatataacactctatttaagcaagacattttgtcaccatcttccattcatgcacgatattacgatccttatacttagagataaca

SEQ ID NO: 192457 - DNA, 347 bp, Glycine max
actttgatgaatgagagtcttaatgagacacaacttacagttcaacttctatcccttttttccttccttcaatttcgagctcccccctctctctttctctccctctatcttttcctccattgaagcatcctttccaagcttcttatccaaggctcatcttggtggtgaagctccttctttcatggcttattccctagtggatggcgcctcctctcacctcttcttctttgtcttccgctgcatctgcatggtggaaaatcaccattaaaggatctcattgaagctcaaagatccatcctccatagattccgcacaagcgagtttctatcaagtggtaattagagcat

SEQ ID NO: 192458 - DNA, 427 bp, Glycine max
  unsure (1)..(427): unsure at all n locations
agcttctttcttacaaatccaagagacaagagagctggctattatatggcatgnctcgcttgtgcttttcctatctagcttgcatcctgcaaagttagaatctgaaaagtcacatagatttaaggaggtacctttttggatatcacaaaccaacattggttgtgcccttaaggtatttaatgatccttttaacgaatattaagtgagattacttagggttagcttgataccttgcacacaagcaaacactaagcataatatctagttggcttgcagttaagtaaaaaagtgagccattcctacctcgatactttgattcatccatggatttacctttttcatctaagtcaagataagtggatgttgacattggtgttgatgtttctttgcactcttccatgctaaacttcttaattagttctgcaca

SEQ ID NO: 192459 - DNA, 275 bp, Glycine max
  unsure (1)..(275): unsure at all n locations
ccattccagtttactaacgatttctaaatatgagggccattaaggctattatatgctgacaattaaccgagaagtccatgaatctctgcggggcggagaaagtgtctggcatcgccttggccttggctaacaatcggggaagttcttgactcccgtcaagggaagagcanaccgatccatccacatgggtgcctcttggagtaagagtcgatcacccttgctctagcctctttttccgcgtatacttgggcatattcgaccgcaatcctatgctc

SEQ ID NO: 192460 - DNA, 439 bp, Glycine max
  unsure (1)..(439): unsure at all n locations
catgcaagcnttgacgactattccttcttgtctggttttcctgcttttctcattctctgcaaatcaagctctaaaaagggccttctgtcccggaaggcactcttaacgccattctcccgcttagngccaagtagtgagaattggcttagtggccatctccggcctagcgcataagaaaaaactggctcgcttaacgagccgcaaacccgctgggcgcatgttggcatggaagaaccctcttcangcttatcctcaattgctaagccattggttgcttgcttagcggtntggtctcgctaaacacatggntcatgcctagcgagacaacaacctttgcttcttcataatcttctccttttcacctcgaaattgaggtgaaatctacattatattcataacgatcgcttctattgagcacatatgaaaattaaactagaaa

SEQ ID NO: 192461 - DNA, 387 bp, Glycine max
ttttagccttggttccctcttcttggtttgaagctcactacaagccttaagtgaaaaaccatgatatcaccatatccctaaggaattttggagctttggaattggtttgggaataagtgtggggggtttttggttcattggataatatgttttggtggctatgcttcatgatgtattttgggtcatacttgatgtacattgtatattggttaaatgttggacatgctgaatgagatgctgtttctcacatgctacagagtaaaataataataataataataataataataataataataatcgaaaaagaaaaagaaaagcaataaagctgagtgaataagatcttaaatggaaaaagaatgatgagactatttgttctactcttta

SEQ ID NO: 192462 - DNA, 461 bp, Glycine max
  unsure (1)..(461): unsure at all n locations
gcttggaaggatgcttcaatggaggaaaagaaagagggatttaaacagagagggggggagcacgaaattgaaggaataaaagagggagagaagtggaactttgaagtatgtctcacaagactctcattcatcaaagntacaacaagtgttacacatgcttctatttatagactaggtagcttccttaagaagctttcttaagaaaacttccttgagacgcttctttgagaaaacttccttgagaagctagagcttatctacatgtagacaaaggatcaagctgaatggtttgatgatgccaaaggttcacatgcgtgatgatgccaaaggttcacatgcatctcaaagctttatttaagacaaagcaattaaagatattcaagatggatgatcaaggcagtctatatagtcttagagagggtatattaaataggaagggaattcaattgaagtacaaaagg

SEQ ID NO: 192463 - DNA, 408 bp, Glycine max
  unsure (1)..(408): unsure at all n locations
gtctttttacatgcccaaattattgtttgacattcgtattgattgttgcatcttagtcttaatatatccatatgtacatcatgcatcatcatgtagatatatgaagattgtttctaaagttaaaaactccttccgcgcataaactctttgttttaacctgttaccaactatccgtaatcgattacgcaagtcttttgagaaacttgctgagagatttttcattatagtttaatcgattaccaattcttcgtaattgattacacaattcagttgagaccatgtctgattntcatgattctctattctaatcgattacaggtgatcgtaatcaattacatcgttcttgaaagtgttcccataagtgatcaagaacactctaattgattaaattaagaatctaatcaatta

SEQ ID NO: 192464 - DNA, 396 bp, Glycine max
  unsure (1)..(396): unsure at all n locations
agctnntgggctaacgatgttaagttctgtttatttataactagaaactnggntctctccgacatgtcaagaagaggccggtgttttcttgaaaatcatctggtgtatggatacctacataagggtttcaattgtatgcttaatgccaactgttgagataaggaacattggcagcaatcaatgagtgcatgtctcccatttggaccaaaaatgattattttttgctggtacttaatcttagtaccacccgttcgcattnttgaatctgggatgatgtttaacttaacattaataaatagaacaaacttggagccatangaaatgtgataattggtctttgcaaaattatcataatgcatctttcaatgcgattggagaggtcatgaaagggtgatc

SEQ ID NO: 192465 - DNA, 443 bp, Glycine max
  unsure (1)..(443): unsure at all n locations
tcgagttacttgacttcagtgtgcaacattttataatgggttgtactaaaactgaaaggtacactcaaaggagtattccttatgatatatatatatatatatatatatatatatataaaggccatcaaactataaggcattaacatttctacgaacaaggaatcgtaaacatccatacaacaaacatacatagacttataggctcctaccacaagcatataacgtacatacaagaaataagaattgagctgtcattaatagtgcattactaaatcgcaagcttaacaattacattcatgactacacancaaataaagggagttaagtagtcatgcgtttacacatcaagaaagacacactcatccaggcatatatatacggttcaaaagatttcacaacactaatcccacattaatagagaaataagctattaacacatacat

SEQ ID NO: 192466 - DNA, 391 bp, Glycine max
agcttgtgaaatcaatggaatccaagattcttgttgacacaagtcgttcaattctgttattagaaatgtgacctaagcgcttatgccataatgctcctgagtttgtattatcaattctatgcttagtaccacacaattctgcattaaaggattcaccatagcaagctacaatatcaagtaaacatagattatcattagccaagagtgaaccagttccaacaatatctgaattgaaagacaacctaaacacattgtttccaaatgaacacaaataacccaatttgtccaaataagaaactgaaaccaaatttcatctaaatgacggtacaacaaaagtgtggttcaaatcccaataaaaaccagtacataataataatctaaaatgccctat

SEQ ID NO: 192467 - DNA, 406 bp, Glycine max
  unsure (1)..(406): unsure at all n locations
tcttactaattcatgttctttataagtgaacaggataactattattgatgtgttagctagaaaattttccctaacaaattttaattctttctttaaaagaaatatgcagacttaatatgcagaanaagaagtaatgaacaatttacttgatgtttctttaaatatgcaaagtaaaattaaactgcaataaagtaaaagagtttagggaagagagaattgcaaactcagttttatactggttcggccactccttgtgcctacgtctagtcctcaagcaatccacttgagatttccactatacttgtaaattcctttacaacttctgaaccacccatggatacctttcccttgtattcagaanatttacaaatcaagagacccactacctcttgatacaacaacaatt

SEQ ID NO: 192468 - DNA, 454 bp, Glycine max
  unsure (1)..(454): unsure at all n locations
agcttagcacanacttttaaacaaaanaatatttatcatagaataacaacaaatggccaaaccttttaccaattgtccaacttttacaagatcttctatgtcatgcaccacattgcatcctcctttctgaagggaaggatgacctttgactttatgagcatttctgcatagattgtaagtttgtcatttcagttacttcaggaagagtgatatgaaaaatagataggaagcatgagcaaataagcatacactcacttgaattatggacaccctgttgcctgatctttcaataatagtttactgagaacattttatgaaaattattagtatgaagattgtaagatgagaacattttatcaaatgaaaaaaagaaagattatcataaagtttaaaatgtcaaggtaaaagcaaccattcatcatagatgttctctttgccaattatatnntttagt

SEQ ID NO: 192469 - DNA, 463 bp, Glycine max
  unsure (1)..(463): unsure at all n locations
tgttggtgtcattgatccacgtattagagcattgatctcttctttaatcttgattttctttatttacgcagcaaaacaagaatttcttctcgagatcgaccaaccattgcatataactcaatctatcctttggaattaaactctggaaagatgaaaaacatattctccttttcattgtgatatttgaactccatatagtcatactcaatgtaaccgtcacctacatatatatgtttacggtaaaaaaaaccacaaataagtttctttcacctttgatgacatctgtaaccgttttttctcaaagcaacaaatggcatttttctcactaattntaatgaatttaggatcactatgacattcaaacaataccccctatgaagttgataccacatcaccgtcatagtacacaacaacatcgactcccttcatcttcaacccaataaagtaaaatatcaccacaatg

SEQ ID NO: 192470 - DNA, 459 bp, Glycine max
  unsure (1)..(459): unsure at all n locations
agactttgactntgctatgagtaagtgcttcacgcagttcataactttgactttcatctcaagttaatcaacacatccaatgcatgtaaaggaaggactctcttgctttgtaatggggcttgcctaacaaggaaaattggtttttctagatattcaaaagtaactcaaaggaaggaaagcatttagtctattctntgtttacatgatagctcataggtacccttactttgttcccttgagtagtaatttttgccactccaaacttaagcactttctcaattcctagacctttgctctcctacctctatgttaagggtagtagcagatataacatatattttcaagggtaagggaatagaanataataaatcagtataggctgaaagtaggtacaagggattaacaatatagggttggctttttagctctaggctaaacatgcanacatgttcttgatca

SEQ ID NO: 192471 - DNA, 383 bp, Glycine max
  unsure (1)..(383): unsure at all n locations
ngcatgagaagcttctatggaggttggatctttgagcttttatgatgtcctccaatggtgattttcaaccatggatatgtagcggaagataaaggataagaggtgagaggaggcgccatccactatggaataagccatggaaggaggagcttcaccaccaaaagagtgccttggacaagaagcttagagaggaagcttcaatggaggaaaagaatgagagagatagggggggggggggcacgaaattggaggagaaaaaagagggacaaaagtgaaactttgaagtgtgtctcacaagactctcattcatcaaagttgatgaccgcttttgtcttagttttgcctaacccaagagaaccctttgaggtgtattgtgatgcatc

SEQ ID NO: 192472 - DNA, 415 bp, Glycine max
agcttgattactcctcacgcaaccctatctgaataatcaattgcataaaagaaaagagatgacttatattgaataatattatcagcaggtctatcctataattgctacacggaataaggcccatataaacgacaattttcaagttaggtaagttgaaatgagaactgaacctggccaatacaaacacagctaagaacagaaagccaaaattataggtagctagctagcttgacagaatctgtaacaatcaatattactattagtccaagacagatccaaatgaatgaatccccaagaaattttatacaaacacactaccattgtttttctggtagccaacaaactatgataagcaaagcactaactgaagaaaacataagaaaaattaattctaaaataaataaagcatcatttt

SEQ ID NO: 192473 - DNA, 469 bp, Glycine max
  unsure (1)..(469): unsure at all n locations
ntagatntcttcactagagagctctaagactcggggtgttttttcctttagctttgtactcctttcataggcctaaggtagcttacttttcacgttgactgtgcactgagcacgcactcttgggcttagcgagaatggcagtttaatcacgcgcttagcacggtgttcgcgctaagcacgaccttgggccttctttgcgctaagcgcgagctggttgctaagcgagcatgcactgggccgatatcatgcgctaaacgagctgtccaattgtcccaacttttcttcaagactttntctttcaattntttgcatcaattttccacttaagtacttgaaatcttcttcttttgacttctgctaataaaaaaatgcaatcattatttcattaaaaacaatagtaaagtgaagaaattgaatcattattagcccaaaatgactatcaaantaactcagattntgtagtatcatg

SEQ ID NO: 192474 - DNA, 355 bp, Glycine max
agcttgcagcctagatgtagctttcacgcttttttctctaatcagtcaaatgctacacaattcatatactaaaagctaccaaatactcctacgtggcattgctagaaatcgatagccgtcaaccttctacgtgagatgtgcttaccttaccacattaaagctagtactttacagtttctaccatttgttggctgacttttctctatatcctttatatttacttttaatatgggtaatttagtaattttagttaagataacagatgataatatagagaaaaattaattaataaatatttcagatggaataaattttaaaaacataaatatgataaaccaatatttttaagcatatt

SEQ ID NO: 192475 - DNA, 179 bp, Glycine max
atgtattatgaaattagatgaactattaactctatggattactactcattggtgctggactacatatttgatcatttgattattgtttaacagtacattctcttgtcaattagttcatatatttatccttagacataaatgatctttgaggctgcatatatatgtaccagggagggata

SEQ ID NO: 192476 - DNA, 456 bp, Glycine max
  unsure (1)..(456): unsure at all n locations
agcttgtcacctacaacgagatgaattaatgttcatatattctttgacagatctccatatttagtatccgattatgtctggaggatggttaccttccaaagataagacttgtgggaaaccaaaaaaaaaatggctacacattaacattagattatacattttttacatttaatgtataattaactaaaattatatttctaaattatacatttgntaaatatatgactttttttttgtcaccataacattgatatagagtaactacaaactaaccacaaaattctaacaaccacgtcatgaatatttcattgtattgtacctcataattngaccacgctccaaattcataagccataacacaatattgaacatatattgttcatatatcaactacaaactaacaaacaatctcctccactctaacatagacnaaagtacctccacatgtgttcatct

SEQ ID NO: 192477 - DNA, 414 bp, Glycine max
  unsure (1)..(414): unsure at all n locations
cttggccaagaaaatcaattaaaaaggcctgtactatatatttactctctgngaatcgattaccagaggatgtaatccattaccagtggccaaaactgatttacaacagctattaaaatttgaattcaaaatttgtcctgtgtaatcgattacacatatatggtaatcgattaccagcagtttctgaacgctttaattcaaattttaaagattgtaatcgattacatatatactgtaatcgattaccagagcagatttttagaaaatattctcaacagtcacatctttttatgtggttcttgaatggctatcaaaggcctatatatatgtgacttgagacacgaatttgctaagagtttttcagaacaaaaagggtctatcctcttataagcaaaatccgtttattctctacaa

SEQ ID NO: 192478 - DNA, 406 bp, Glycine max
  unsure (1)..(406): unsure at all n locations
acgaacggtgaatcttggagaacggtcgagaatcttcgcgtaattactcacggaaacattacggaaacgttacggaagcgcctcgacttagattttcttcacggaactaattttcctcagcaaattcgaaagagagagaagtgcctaaggggctgaacccttttcttcttcacttctccccctatttatagcaaaataggggagaagtttgctgcccagctcgcccaggcgagcaaggttgcttcctccagaagcaacagccttctggaggaatcttctggagggcccaagtgggcctggttgctatatgcaccccccttttttttactaaatgcacccnnctttctattttttgtaattctttttccgtaacgttacgaaactttacgaatttcgtaacgatact

SEQ ID NO: 192479 - DNA, 450 bp, Glycine max
  unsure (1)..(450): unsure at all n locations
cccatgccttttcttttcgagagatgttgtcanaacaccaccaactagctagtagtttcctatatcttctggagtcggttggatccaaaacataacacaaaatctcctttgattngtcgttccacaaagcataaatccaggtttcatcgagtttgtgctttcggcgataacataaccactcttcactgcaaattaagtccctccatctcttagagacacacttgaggacagaatgatattntctaggaatccttgccaggcacataagagaaatatcatcttgaacgccacaaataattcgataatttgtggcttctacttcactgtcactatttgatgattcttctccttatctgcatgctccatttgatagtacagaggacctgaaaaggaacagaaaatgttgctacaccatcaaattgcactgctcttcactcattgtgtgacatc

SEQ ID NO: 192480 - DNA, 459 bp, Glycine max
  unsure (1)..(459): unsure at all n locations
ntctggtnatactcatttcataacggcacttaaaaatttttctgttttatggaaaggcttccttgtgtcttacttatttcatatggcttatactcatttcatatgaaattaacaaatatctagaaattttgttaatgagagtccgatgacattttaaatcccatgtacatcattccacaggagacatagctattgatataaagagtaagcactacacattgtgctatgaggagcacttcatggaacaagagagaattgcaataaaattccattcttagcatgtaagtcacttttctgatccattctatggtagtatcacatcacaacgtagtctataatacacatgaataggaaagcaggtaacttaatttcccatatgctagagagttgaaaatttaggctggctcacctctgctacgaagaaatggcttctacttctaagatgaagatgtatacata

SEQ ID NO: 192481 - DNA, 444 bp, Glycine max
  unsure (1)..(444): unsure at all n locations
agcttgttcttgactcattntctccttcaagtggtgtcttcaatcatcttccttccttctccattcaactgccattgatcttcaagaagcaaaggaatccattgatgaagaagatccaaagcctacaagctccacatggagctacatcataggttccctaaccctaactgatccaatcctaccccccaagggcattggatagaagactccaagaagattgggccagagctgctgaagaaggccctaaggttctcataagccttagggtagattttttgcgaatgtgctaaatatgagcccactgaactttgtacatattagattagggtttcattgtttttgggccttgtatttagggctccatagtgtaaggagtgagtgtaccctagtaatgtaggatttttcagcccttgtattntacggcacctagactagtttttgtat

SEQ ID NO: 192482 - DNA, 465 bp, Glycine max
  unsure (1)..(465): unsure at all n locations
tactaagctttcacaagagtcttcacaaataatcatcataccgcagaaacctatctagactacccatcatatcttcccaaaccccatacccacgaaaattaaaggagaaagaagtccaccccaacctgaaatttcaaagtcctactcgtagccacacacttcacgactccaaaaatgctctcctttcgcgatttggagcagaaatgatggccaaaggttgaagctttgcttggagcttcaatggagaatgaagaagaagaaaatggcaacgtgagagagagagagctgtctgaaaagtgtggggctgagtgaggagagagagagttgcttttttttaattntaaaaaggctttttcctcatttcttattattttattataactatgccacatgtctccatttgagtggagcaagaagggcccactttctcttttgatagcgacctatactcagccacaaaagtga

SEQ ID NO: 192483 - DNA, 428 bp, Glycine max
gagtacctgacgcatgcaagcttgaaggcaaactggatgcgttggtcaacttttgtatttcatctggccttgaaataaaaatctgtacttgtcgcaagggtttgtggtttgtgctcctctgctgaccaccatacagacctttgccctttcatgcagcaacctggagcaattgagcagcctgaagcttatgctgcaaatatttacaacagacctcctcaacctcagcggcaaaatcaaccacagcagaacaattatgacctttccagcaacagatacaaccctggatggaggaatcaccctaacctcagatggtccagccctcagcaacaacagcagcctgctcctttcttcaaaatgctgctggcccagcagaccatacattccttcaccaatccaacaacaacaacaaccccagaaacagccaacag

SEQ ID NO: 192484 - DNA, 422 bp, Glycine max
  unsure (1)..(422): unsure at all n locations
tctatggaggatggatctttcagcttcaatgaggtccttcaattgtgattntccaccatggagatgcagcagaagataaaggagaagaggttagaggaggcgccatccactatggaataagccacggaaggataaggttcaccaccaagagagtgccttggataagaaacttagagaggaagctttgatggaggaaaagaatgagagagagagggggtcgggggggcacaaaattgaaggagaaaaaaagggagagaagttgaactttgaagtgtgtgtcataacactctcactaatcaaagttacaacaagtgttacacatgcttctatttatagcctangaagcttccttgagaagtttccttgagaaaattctttgagaagctagagcttagctacacacgcccctctaataactaaac

SEQ ID NO: 192485 - DNA, 396 bp, Glycine max
ggatccttagtcacctgcggcatgcaagcttctagctgctcaattgctccaggttgctgcatggaagggcaaaggtctgtatggtggtcagcagaggagcacaaaccacaaacccttgtgacaggtacagatttctgattcaaggccagctgggttaccaagttgaccaatgcatccagtttgccttcaagcttcttagtttcagatgatgcagatgggtttgtagctacctcatgcactcctctaatgactatggcatcatttctggcactaaactgctgggagttggaggccatcttctcaattaaaattctggcttcagcaagagtcatgtctccaagggctccaccactggcaacatctatcatacttctcttcatattactgagtccttca

SEQ ID NO: 192486 - DNA, 426 bp, Glycine max
  unsure (1)..(426): unsure at all n locations
tggtgattattctttctctctggaatgcagaataatgttgtttattgagaaacaaagctctagtctccataggaggtacatgtgggtttctaattgttgaatttcaaacttaaatttgaaaacaaaaaatgtttgaataaaatgaggttgaaatgtgttttaaataaattttaaaaccaacttagctcacttttgaaaacaagatataaaagagttttgtactttaagtatttggaagttgtgtggttttgatactttccttcacttttctccaccttccatcatatctcttgttcttgattagtgtntgttagaggcgacaaaatacatgaggttaactaactcgacctgaacccatttgataaaatgtagggttaaactatagactatgatcatgaatttaatctaagtctttagttcagtctg

SEQ ID NO: 192487 - DNA, 463 bp, Glycine max
  unsure (1)..(463): unsure at all n locations
agtcacctgcggcatgcaagcttgccgattagtgttcgtggtgaattatctaattacgtctaagaagaggcaaatttgattatgctgcttcgatgaataggaagcttggggcaaaaggagggaataaggagggagaaacccgtattatgacttccattcttacatggccaaatttcccactggctcaacaatatcaatactcagccaatatcagtccttctcattacccaccaccctaccagccaaaaacacccaatcatccacaaaggtcgcccctagatcagccacaaaacttgcctactgcacatcagaggccaaacaccacccttaatatgaaccacaacaccaactagggaaggatctttctataaaagatgcctgtagaatncacccctaattcagtggtgaatgctaacttactcctatatctactcaataatggcatgggtaccataatcccaac

SEQ ID NO: 192488 - DNA, 446 bp, Glycine max
  unsure (1)..(446): unsure at all n locations
gcttattatactgtagcgactttatcttcttccagaacgtttttttgtgcttctggaattctcaagtctaatcctcaatagaatagtatactctataagtttacctcacacagtgcatgcaaaaatgctactgtttcatagttccagatagtcacgggttacgaaggaaaacgaaattcataggagagaaaatgacaaaagcaataatcacaagcttggtggtttaatagccttacctcaaaagtcaaaacctttcaagcgttattcttcctttcattaactctctcgcttggcacaattttgtggtttttccctcagatcttatgttatttctttattcctaacagcacgcatgcatcgttgatgttgattccagcgatggtgcagatcttatggctnttcggcgccgaagctaagaaaatgtaagaatctgagagagatagaga

SEQ ID NO: 192489 - DNA, 460 bp, Glycine max
  unsure (1)..(460): unsure at all n locations
agcttgcaaagggcaccagngggatccttgtattgttacagggcaaatcgtgtctgcaatgcttgaaagaatactggccaggatgagaactaactgttagacaagaggcctcatatatcttaagaaggggggttgaattaagatattccaaactacttccccaagtaataatctatttcactttttattcaagttataacttcccttaacaatgaacttcttaaatattgattcaaataaaacaatttgaatatgaatataaagcaataataaataaaggagtttaagggaagagaaaatgcaaactcagatttatactggttcggccacacccttgtgcctacgtccagtccccaagcaacccgcttgagagttccattatctttgaaattccttttacaagttctaaacacacaaggacaacccttcctttgtgttagaattctttacaacaagagac

SEQ ID NO: 192490 - DNA, 311 bp, Glycine max
  unsure (1)..(311): unsure at all n locations
cttacattntttcttcttttcgctttttgatgtctgatcttattcgacacgaagtacccctaaccaatttgccttggtgaaaagtctttaccaatttgccagttcaactataaaactagntatctttttatatctaagcacaatgtgagaaatgttggagagattcaccattgttcttggtttgttccttgtgttggacaaacttgtgagcttcatgggcacaacatgagtcggcatgctctatctttatgcattcaccatctttgccatcatcgtccccatcaaaactcctaatgagggtcttgtgaatg

SEQ ID NO: 192491 - DNA, 315 bp, Glycine max
cataacatttttctctttttcttcttaaaaactactccaaaactaaaggtaataatagtaccctgagatcaaagataaaaaattgctaaggcgaaggtaaaactattgggagaaattatgattcttctaacgttacattaactttcagcttgcaacgtatgcaacttgaaagattccttcaactcattagctctgtgggggacgatcatcgaggaataaggaaaaacaataatgcatgaattgcctaaggagagccattccaagacaacggatataagagccttgagagctaatgcatgcggccacatataatag

SEQ ID NO: 192492 - DNA, 348 bp, Glycine max
  unsure (1)..(348): unsure at all n locations
tggtgtagaagtaatagatctgttaatgcgctcttattttcttgtatagtctgcaagaacttttggctgaattctaccttctggtagagaggaagcacaaatgctgcacctggaattgaatggatcatttcattcaataaatttaatatagacagtgaagatatgtagaaacattatatttattttaatttccatgtaatatctgaagttatctgtgtttttgaggttttttatctttgtttacattgatggcattcaaaaaaaaaaaattgcttcttggctaccatattagatgattaactgtctcattataattatntttagtaaaatatgcttaacttaccctga

SEQ ID NO: 192493 - DNA, 439 bp, Glycine max
  unsure (1)..(439): unsure at all n locations
gccgcatgcaagcttgccggatcctatgcaagtccaattggttctatttcaanatctccagcaagactgaagagcatactgtttatgtcaaaaacttgaaaagagacagtagcaatagcagaacaagatgcccaagagaagtgtacagcctcacgttccatcaagatgaggtgggggatcaagtcctgggagccatgtatgtcgctgttgcgccccaacacaaggttgcctataacgtggagtggcagcagcaccatccccaagccacgataatcttccagctggtgaacctctatccaagctcttgttgttgaataaagagccgggctgaatggagaagcttcttcctattgctacgggcattgtttctgattatctgctctattcccgtgctcaatttgcttcttcacacaacccatgcatcatttattggttaaag

SEQ ID NO: 192494 - DNA, 312 bp, Glycine max
  unsure (1)..(312): unsure at all n locations
tagaaactcaagctntatacccgttagtagataagctggagcatgaaacattttcttttttactggcatgcctcnagagatggatcaacccgagggattacatctgattgagtcaccaaatgctcttaatgcaaaaagtggtgaagccatggatgtgttgagaaaagttacacatcaacaatcaaacaggccagccgaacaactggcttcactctctctgaatgataatgtcgagtcttagattctgtacgtcagtttacaggaatacacatgttctttaaacagtcacagttgtgtgtttcttgctctttt

SEQ ID NO: 192495 - DNA, 381 bp, Glycine max
  unsure (1)..(381): unsure at all n locations
agcttaattgtatatcccgtctttgagagatttttatattgtattcaatcaaactattttttggaaagtcaggagtgacttaatgataaaataatacttgagtgttcttaatcttagggagggattaagagtaagccaaaagtggcataaagaatacttattgtagccaagagtaccagagcaaaaactcgtttgtaatcaattgtgattagtgaaaccctttatagttttgtgaaggagaactagacgtaactaattagactaagtgaaccaatatatacattgtgcttttactctagcttttgttataacttgtttatcttcagttgcttcaatcttatctatttntaagtgtgaacactcttgttaagagcattcttt

SEQ ID NO: 192496 - DNA, 392 bp, Glycine max
tgtgcattcaatacccagatgaggatgtcccatatgttcttaaaactggactgatccacttgttgcccaagtttcatggtcttgcaggtgaagaccctcataaacatttgaaagaattctatattgtctgctccaccatgaaacctctagatgtccaagaagatcacatctttctgaaggcatttcctcattctttagagggagtggcaaaggactggctatattaccttgctccaaggtccatcacgagttgggatgacctcaagagagtattcttagaaaaaaaaatttccctgcttccaggaccatggccatcagaaaggatatttcaggcattaggcaactcagtggagagagcctatatgaatactgggagagattaaaaaactatg

SEQ ID NO: 192497 - DNA, 435 bp, Glycine max
  unsure (1)..(435): unsure at all n locations
anngcttggaaatgatttctaaacaaaagttattcttataaagcgactaacaactcccctaaatttacagttttgcttgtcctcaagcaaagaaagaacaattcacttgtccttaagtgataaagacagtggccaatcaaaacaaaatggtgtttgattcatcaaggacatcaaccatatgaactgaatatcatggaatgcttaaatcaatcacttctcacaagcatgcagttnttcaaagataggagcacaagtattagagtcacagctgaaataagctagtaagcatgacagaaatcaaggaaggatcatcaaccaaaacctcacagtcattatttcactcaaactcaagtgtttaggcttattccatcataaacaaccaacacaagttccagcctttgcatttcattctctatcatacaacaatgaacacat

SEQ ID NO: 192498 - DNA, 432 bp, Glycine max
  unsure (1)..(432): unsure at all n locations
tatcaataacatcaatctttgctttatccacctcaattcctcttctagaaatcttgggtcccagcatgatgccttcttgaaccatgaagtggcatttttcccagttgagcaccaaattcgattcttcacaccgttgtaacactttttctagatttgctaggcaattttcaaaagatgcaccaaagatagagaaatcatccataaagacttcaatacatttctctaccatgtcagcaaaaattgccatcatacatctctggaaagtagttggggcattacataaactgaacggcatgcggtgataagcaaatacaccaaaggggtatgtgaaagctgtattntcttggtcctgaggatccactgcaatttgattgtagcccgagtatccatctaagaaatagtataaagatttccctggcagtctctcaagca

SEQ ID NO: 192499 - DNA, 456 bp, Glycine max
  unsure (1)..(456): unsure at all n locations
gctgaaggcgtgtaacccaccatcttttcatagtataccggtaacgtgtctactatcattgtgatcatcttcctttccatcattgggggtgatacttgagctgccagatccctccacctttggccatattctttgaaagattcatgctccttcttacacatgttctgtagctgcattctatctagagccatatcagaattgtattgatactacccaatgaaggcaaccattangtccttccaagaatggacttggaaaggttccaaattagtataccaggtgatggctgccccagtaagactttcctggaagaaatacatcaataaagtttcatcttttgcatatgctcncattttcctgcagaacatcttcatgtgattcttggggcaagtagtccccttgtacttatcgaagttcggcaccttgaacttcagaaggatgacgacgtcaagcact

SEQ ID NO: 192500 - DNA, 443 bp, Glycine max
  unsure (1)..(443): unsure at all n locations
gcgacaaatgtttagaaagctgagctgaatacaatacatgccaagcataggtaaattttactttgggaagaagtggaatacaaggaacatcatctctctcccaagtatagacaaattggaacatcaaattctgaacaaacataaattgttcaaaatgtctactccagaatcattactttctattttcattcaccagaatatctacacttccgtgttctgactgcaactcagctcagcacagctaatagctaataatcattactttgttcctcttaaaaattgcatagattcaggttatgatctctctactttatacacaattagaaattaattatatttccagaaacatgaatatcaacattaaaatttcaaaagagtagtcaaccaagaaaagaatcatgtaatatcttccagcanaatcactcttcttctattctcatata

SEQ ID NO: 192501 - DNA, 390 bp, Glycine max
agcttcttggaggaccaaattgcaaggaagctattctcgtactaaatgcttcagatgaaaggtacatttttgtaatttctcaattcagttttcaattctggacgatttcctgttaatttatcctttcacttttggttatagatgacttgctccacggttgaactcactgttcaataggtggagaagttgatggaaatgagtcctctttatgaaattgtcaaggaaggtatcaacatcaaggacattcaatgggcacagcactgattattatcaagctctcagatcgcaatgcaagtgatgggaagcaattgtgatagaacttcagacgtagctgccactcttgctaatgcagattcttcgaacttgctgattatttagtaatatgtatct

SEQ ID NO: 192502 - DNA, 462 bp, Glycine max
  unsure (1)..(462): unsure at all n locations
gtagctgaagttcttgagaggggctgaaattggctatgcaatatcaaaagacatattcccctgctttcatttactggaaggtcaaaggtacttcatctctctcttattttgattaaacattgtaatctttatttttttttatgtgtttacaatgtacattacattttcatgatagtatttttatgttacgacctctattagttagctaacaagtgtaatttattataattttttgtaattcattttttttgttggttccattggtttttattctaaatacctattcttattttataacatatatggtagtagctgtaacataaaaattggtattgaatcttaggttatgcttctttccctaccaattattcttttagttagaataattattatagnttttcttcttaatttatattataatttatattattcttaacttatagctttttaatacaaattata

SEQ ID NO: 192503 - DNA, 237 bp, Glycine max
gcttgaatcggacctcagtgtaaaaagttatgactatttgaatttctcgggagcttccgttggtcaatttcgagcgtctgtatatgtgatacgcctgaatcgaacattcgtgtgaaaagttatgaccatttgaatttctcgaaagctttcttggttcaattccgagcatctcgacatattgtgtgcccgaatctgaccttcgtgtgaaaagttatgaccatttgaatttctcgagag

SEQ ID NO: 192504 - DNA, 382 bp, Glycine max
  unsure (1)..(382): unsure at all n locations
cctatcctcttctcctttgccttccgctgcatctccatggtgaaaaatcaccattgaaggacctcattgaagctcaaagatccagcctccgtagaagctccacaagcaagcttccatcaagtggtaatcagagcacaagagcttcaagtaggtgctccttaaacctccattaattttttttctttaccttctcttccattggtgtttcttcatttttctccatgtatctcctcacatgtcttgttctaaatgttgttaacatgattctttagagtttccaccgattaaacttgctatagaagttagatatgattttctatggttcanaattcttgttcttgttcttgaaccattgaatgtgttgagtttaggttcctttgag

SEQ ID NO: 192505 - DNA, 442 bp, Glycine max
  unsure (1)..(442): unsure at all n locations
agcttggttgatttaattatctaaaaaggcatatgagtgataattntttaccgattaaccttataaataattttatttgttattacgttatatgggtaaaatattgaaagattttattagtaactaatttttgttgaaaaatctgataaatcattttttatatgaattttatttttcaaccatattctctctgccaaccaaaaaaataaacctaaagttttggttaaaaattcgaaacccactttcataaactcttttacattgacactaagattacatgcaaattatatgacttggtctcatatgacaaataatacaagtctaataatatagggaagtacagttgcaacaataatagggtgatctggaagactacagaagcggcacccaacaagcaggcttacccgctctatgatatgaattccctaacaaacatcacacc

SEQ ID NO: 192506 - DNA, 443 bp, Glycine max
ctaagcttcaaccttggcggcatgggctgcagcgccggcgtcatcgccgttgatctcgcaaaagacatgcttcaggttcaccccaacacctacgccgtcgtcgtcagcaccgagaacataacccagaattggtacttcggaaacaacaaggccatgctcatacccaattgccttttccgcgttggtggggccgcgattcttctctccaacaaaagctccgacagagcaagagccaaatacaagctggtgcatgtggttaggactcacaagggggcagatgacaaggcgtttaggtgcgtgtaccaggaacaagacgaggtcggaaaaaccggtgtttctttgtccaaggatctcatggctattggtggtggggctcttatgacttacataaccacgttgggtcccttgtcttgctattagtgacaatttctgtctttctacac

SEQ ID NO: 192507 - DNA, 462 bp, Glycine max
agcttgtggattatcatatcaaaaggtatcttctcatcatcacaatgattcacaagccatggatgacctgtgcataaaatcaagctatgagcgtgagaattcatgggattataaaacgcgaaagttaatgccatgcaccacctatgggaaatggagcacatactgagagcctgagctgcagttagccttttacgataatccttattcaacagtctcttcacaaaatcttttgcgtcagctgataacgatggccaaggagcttcctcaaaacttggatctgccttcaggacagcccgaaatatgccagattctgtcctggcccaaaagggtcggcttccacataaaagaatataagcaattacaccaatgctccacatatcggcttctgtcccataagatctatgcaaaacttcaggagctacataatacgcacttccaacaatatcattcaacctttcatct

SEQ ID NO: 192508 - DNA, 300 bp, Glycine max
caccgacgtggcaaaataacgcacactttattcttattgtcaacagacgaagccgagaaaactcaaatacagtattctacaaagtcatgaagcaaagtacggattctgtaaagataacgattagagcgaccaacacttatacaatatatcatgtactaaaatgagtgtttactcctcaatcatcatatgatttctttgtttaaatctctattatcaacaggctacattcttatgctctctcctactcaacaaacaagtgaccaaagaaaacgtatgaatatctttctgcatcaaggcaca

SEQ ID NO: 192509 - DNA, 454 bp, Glycine max
  unsure (1)..(454): unsure at all n locations
agcttattcaaatgggttattcttgtcactctagactaaccctanttgttagtcaaaccgattcgaatcttataaatcaaaattcgacagaggttatgacaaaaaatgacatgatttataacaattgcgatgaaattaccaagcctggaagctgggaatttttgtcagggtgcatggtgaaaatgggttccgaatgtggaaaagaagtatttgacaaactaatgcatggcaaaattaatgtcactaagcattgctgtgagaagctagtgaaaatgggtgaatcttgccacatcaatatggcgaaggctttgattcgcactccggagatgagggatgtcgatgcaatgcaattgttgaacaagggcaagaaaatgtttgatcagtgtcgtcgtgtgaaataataagaaaatatttaacgagaataatactagctatagttggaaaatatacgaga

SEQ ID NO: 192510 - DNA, 469 bp, Glycine max
ttagatacacaactcaactcttaaaacacaaagaagagaactttccttctatcaatgttaatgtagttcatgtcatctctagacctatattatcctcataatgtccttattcttgatcacttaaattttttatttagggaaaatgaggcatcacttgttgtcctacctgatttgttgatggagcttgatagtatggatgaggtatgccttactattactataatcctctgaatttaacatggtgggaggagtcaatatttgttccttttcgtgtagtacatgagatgctatatgcaactattacattattcctttttcaagtcaatatatgtaaagtcagtagaagtgacaatgtatcagtgagtttcattttgatgccatgcagaagttaaactcaatatgtcagtagtcctttttgcattatggttcatagtgtccctatgccactctatgttctcataaaatcatg

SEQ ID NO: 192511 - DNA, 456 bp, Glycine max
agcttattggtttagagttggacaaattatttttggtttgtaagtcatatcttaaaaccaccgctactaatgtgagtctgtgtctaaaatttgttcaaccatttaggtggaattttatacgagggatattttttgtttttcagataattaagttgacaattttatttggaaaaataaatttggaaatgtttattttaaaaataaaattcttataataataacgttttccgaaaaaaatttagttacgtttctataaaattatttttattctctaaaaaaatatctttcatcgaagtaaccatattttaagaattatggacctaattgaaataacaaagggtaaaattgacttggtcttaacaattataagagaaaccttaaattaatagtgagaacaaatcgaatataataaataaattgtggggaaaattatataagaaaaataataaggattac

SEQ ID NO: 192512 - DNA, 394 bp, Glycine max
agctgcagctctcttggctaccctctttgtatgttgattctaacatatggctatgccaactctaactcactgcagaaacctcatttaccctcttatttgtcttatcttataacctgatagttgaaaagttatccacaatagaaatccctctgctaatgaatatcggctttatcggacataactgcttacactctggaaaacataatatggaacctgaaaataaaataatggcagagggtcttatttcttatattttcatcaactgagcttgccctaaggtcaagtgatgcgtcttgcataatcttctatgcccatcaacgggagaaccacatttctcctttcattatcacaaacattaaccttcgaatagcatctctgttataattccattatc

SEQ ID NO: 192513 - DNA, 459 bp, Glycine max
  unsure (1)..(459): unsure at all n locations
agcttgtaattgattacacaagtcttgttatctattaccagaggagattttcaaaaaataatttccaagagtcacatctattcaaatggtttatgaatggccatcaagggtctatttatatgtgactcggaaactcgaatttaaagagagtttttattgcccaaaaagttttatcctctccaaagattaagagtttttctgaactaaaatgtcttatcctctcaaaaagattccttggtcaaccacttgcatattcaataaggaatttttgattgatcttcattgtacaatctatctcttttaagagagatttcttcttctcttcttcttatttctgaaaagggattaagagaccatgggtctcttggtgagaggattcctgaacacaagggaagggttgtcctgtgtggttcagactttgtanaagggagtttacaaagagagtggcaaatctcaagt

SEQ ID NO: 192514 - DNA, 462 bp, Glycine max
  unsure (1)..(462): unsure at all n locations
ctattacgtgacctatgaaactcagctntaggaggaccaattggaattagaaatgttaagatcatattacatgaaaatcccatgctagctacgcatccatatcatgatccatgttattcatttgcctcaatgtatgtgaccattgatgagtcgagttacaaaagttgtaacaaaagctgctttggtcctatgttggtatgattgatggaccggattgattatagatacatatgataatgatagtaatggtgagctcataaggatattttttgcaatgcgtaattataaggttacacatatagactaagtgggagattgttggatccttagtccaatgttggtcttataagtaaataattatgaattgtagactgtcatttaagtttatgctcaattaaagtgatctaataaggcttaggtgaattgggctttaacgtatcanatagggtatgagtctttaat

SEQ ID NO: 192515 - DNA, 433 bp, Glycine max
ctgtagtcgaactgcacgcgtgcgagctcgcaacacagacagaggacctcatgctatgtttatattatgtatggtcactaactctgttgacgcgattaccaagcttcacagcaaatacatatcaggcccacattatgattacaggctgcaattctattggactagcaacttatctagacatatgatgacttctttcttatcacaagagtataatgacgctaatcacacagaattgaagaatattggcagaactagagtgtgtcaaataataactaattattgagaagacttgtgtgaaatgtaaagaacactgctttcttctgaaagaagagaatgtagacattgaattcatttcatatatgtaccacactagaccttctcacactacattgacctaacatttcactatgagagacaaaacagaaacttaact

SEQ ID NO: 192516 - DNA, 440 bp, Glycine max
  unsure (1)..(440): unsure at all n locations
tgatgtttactcgtagacgtgtttcgtattaattaattgtttgttttgttgttggaattttgcaggctggccattgaggcattttctttgaacagaatcgcatcttcttcagtggcacagtgagcatgtgaaagtgattaatgatcattttggtcttctgcataggcagcagcatagcggagagagttgtatagaatatagatatctttggttatatttgaatgctctgggagcatatttttacttggttattctgtgatgctttggattttgaaacttctgttgtaaaatgaaaactgatttgctagtgcttttggcattagcctgcatcccgttgaatcaatggtgccaagttgttggctgtggctcaatttggcttttcgctctatgctgagttgntgctaacttgcatatttgcaagttgtcattaagttaattat

SEQ ID NO: 192517 - DNA, 362 bp, Glycine max
  unsure (1)..(362): unsure at all n locations
agctnttatctagccaagatcatacaaaagtgttacaacagaacctaacggtttctaattatatgggccatcaaatctatcatgtgttgacagtaattgattatcccgtgaatttcctctggggctgaacacacttcggcgatggcctttgctttggctagtagtcgcgggaggtcttgacttccatttaagggcaaggcaaacctatccatccacatggtcgcttcttgatgcaatgcattaatcaccctccctcttgctttcttctcggcgtacgcttgtgcgaagtcctctactaattttttttcatgggtcaaagactgtgttaactctacattggactggcctattatagctagcat

SEQ ID NO: 192518 - DNA, 368 bp, Glycine max
cagctatttctcaaccctgtcttctgggaatcgaatacacttcctggtaatcgattaccaaagccttgcatgtcttgaaagcactttgttttaaggcaaggcttggtctttaatgaatcttgaaacaaggctttgtttggtgaacaatcttgaattattcttgaagcaaatgcttatcatttgaagcagccttgttagattcttctttgacatcatcaaaatcatgtatacatacattcacattctccccctttttgatgatgacaaacatgtgatttcttctcgacaccatcaaagcttgcatgatttacatcctcccctttctcaagaaaattcttctttatatcatcaaattcttcatgaattac

SEQ ID NO: 192519 - DNA, 442 bp, Glycine max
  unsure (1)..(442): unsure at all n locations
cccgtcaaatgtggtactcggtggcgatcgggtgatggtgcaagtcgactcttcacatctacaaatcacacataaatccaccatccccaggtgcccaccttcaactgagctcacgtactcccacgtagcccctatcctcgttcttctcaacactgggtccccattaatccctccaagcttccacaacatccaagcaattcaacatccaaacatcatgaactatcaaaaccaagaaaacagggcagaggcagaaaactctgcccaaaacacaaaccaataccacagctttccttactcaaataccccagtaacattttctttgttccaattcttttaccgttggatcgactcaaaaattttactggaggtccctagtacaaaattctaaattntgaccgttgggatctgctagaaaacgtctagaacccaatatgtacaaccc

SEQ ID NO: 192520 - DNA, 176 bp, Glycine max
  unsure (1)..(176): unsure at all n locations
agcttgtagtaatccaaacacttaaatagtttatgcatttgtatataacaacaaaggtagcataagacaactcattgtcttcatattcactattttcctaacaaaatggatagattctttgttgttgtgtattacaattgttggacatgtggcctcaataactntagagagggggg

SEQ ID NO: 192521 - DNA, 354 bp, Glycine max
ttttattaccaagttaacggatcatttttaaggtccaacgccttaaaatgatcatcttccaagtaaaaaaaaaatccttgattcacccttaaaaaagaactacgtaggtctgatttcctcttcgatggagggtacgtaggagcaagagccccgcttttgtcgacctcaaaaataaaaaacgaaataaaagttaaggtaatacaatttccacaattctaataaataaagatgttgtcctttgagacaaaagtgagaggtgttaataccttcctcaagcgtaaatacaactctcgaactaggaataatctttttgaccggttttcttccggtattctgtcgtgtccacaaataaac

SEQ ID NO: 192522 - DNA, 402 bp, Glycine max
  unsure (1)..(402): unsure at all n locations
ttaagtacctgccgctgaagcttgcaatagcatgagtgagtacgaaactactttacattntcgagtttcctcgtgctcatgtagtcatgttctgtacctgtgttacacattttaaggcaaataatggatgacaagcgatccttacacatttatctaaattaaataaatgcaggattggctgcaggaatttattcatgactcacatatgggctgaaggaagctcgtggagctaatgactgtgtaatgaaatgttatgggtgatgctaggtgcaccaccattattgcttgtgcacccagcaattttttacaattccctaaatgtccctggtgtcttcttccttctgaagcgggttgcagtgttatcttatctcttacgcctccattgttttttcttcgctttct

SEQ ID NO: 192523 - DNA, 364 bp, Glycine max
acaaccgttcagccacaaaaaaaatttttccgaaggaattctctcacagggggtagcctccgaatttaacccatagaacgcttctccggcagcgttatcaacttcctgttgcacacgaatgatgcttgaaactctctggaaactagaggcatgacttctaaatgaggaccctatgttccttcctaactctgctaactcacttctcagagactctatctcatacgcacctgccagctgtgccatctcaacacaacactaaggggattaaaactcagatatgtgtggaatgcatcatattatgatcctcatctgaacatatatagacacatccatgctgagtctgaagcttgatattggctctttg

SEQ ID NO: 192524 - DNA, 420 bp, Glycine max
ataacaaagttagggagaatgatattatcttttaataagaaaaaacaaaacgacgcctatatgattattgagcatctataaaaattacaatagatcggtcatgttgagttactgtataatctttaaaatttgagatttcaacttttctatgtcgaaataaagacattgagatttcttatttactaagcttatcaatgaaacgccctagttaaatttcaatttgacggaaaagtggatgttacatgaaaattatgtaaatcgctgacatgatgctcatataaaaaataattaaatgaaatgaacaataaaaaaaatatattaataagaactgaacttatgagtcttattcataggcaaacaaaaattaccaaaaacttggtttgttacctaaccatattaacactatttcacgtatcatta

SEQ ID NO: 192525 - DNA, 384 bp, Glycine max
  unsure (1)..(384): unsure at all n locations
ttttactctagcacacatattgctcacagaatttttggatgtgataacctgtgactcttcctttctttttcaactttaagaatgggtctttacatccactaatgtgttctcatcttgaaacgatgatgtatgactggtattatagagtcattatggatataataggatcccccttaaactatttgattgcaacaaaatttcaggacatcgcataattgtgacctacatagaaatctacttatgatgcaccttatttacatgcaatataattctttgtagctccatgatatatgagaaccacganagcaaacgtatcctctttctttaaatgtggtaaagtgaaaccttttaactatcctatgtgatgaactcaagtcaaatatt

SEQ ID NO: 192526 - DNA, 436 bp, Glycine max
  unsure (1)..(436): unsure at all n locations
gcttgaagatgttttgtcttttacatgtcctacttctttgagnggcatttatatttgttggtttattgaatgttgcatcttagtccatatcatatctcttgtgcatcatgcatccttatgagtgagaaaaaaatctctaaagttagaaaagtttcttcaaaaggcaaaactcattgttttgattgattacagccttatcataatcgattataaaagatgtctgaagcttgtaaagatatgtctcgtatcggcttaatcaattacagccttctcgtaatcaattacacaattatttttgagacaatgactaatttattcagtagtctctgctntaatcgattaccatgtgatataatttattacttctctttctataagtggttcagaagtgaacaagaacactntaatcgnatactttgagtatctaattgactac

SEQ ID NO: 192527 - DNA, 452 bp, Glycine max
  unsure (1)..(452): unsure at all n locations
tcttgagatgcctttcggtaatctcactagatgctttggttaaatccataatctcatgagagacatcaacgttgaagtagtcaatgaatcttgaggcaagtaaaacataaggaaattcataatccaccacacgatgactcttcaacacaatgtcttcaatcaatagtacctaatcttgatacctaatttcagaccagaaactatctgcagatcatcattcattacctgagtgtgattacttgacctcaaagtgagaatgtaggtaatgaggtaaactagcattctgtcctctacagttagtccaccaactcctaagtgattcctcaagttccttgttgggtcaagaaacattcccttataggtctacatcttgttgtgcccatcatccattncatcaaccttgtggactccacccatgttcagtctaactactttcttccacacaacaacgt

SEQ ID NO: 192528 - DNA, 455 bp, Glycine max
  unsure (1)..(455): unsure at all n locations
agcttcacaacaaattctactcttcaattcttatcatcgacaagttgtggtctctgctcccgcaagaagtgaaggcctccaaggagaacaaggcatcgttcacacagtttgggtactttaaggttctcaaaaaaggtgttttgctgtagaactagtccgttgttgtcaaggccaagcttattatccaagatcgctaagaagaagatcaaggaggctggcagcgtcgttgttctcaatgcttgaatttgatggtgtcgcttttttgaatgatttangtttttcttattttgttccaatatgtctcctttnggatgacattgttgttgttcaatctatgctatatttcatgatttaatttacggttttataaatttaatctatgccatttaaaatttcgcttagttatgttgaaattaatcacgtntaactatgatagcttgatgatgttaaatcta

SEQ ID NO: 192529 - DNA, 407 bp, Glycine max
  unsure (1)..(407): unsure at all n locations
agctnttcgattcattctatgtacccgtagtggtccacattgtgtttcgtgcatttttattctcgttttgtttactttttataccccctgttgacgtgcttaagccattttacttaagtcatttctcgcttaacttaaaaataaaataaatttccaccgaacgtttgaattgtattatccattaacttcggttaaaataaattccgaccgttcggtcgtgccgtaaccacgttggaaatcaaaaagaggtaaaaaataatataataatcaaaaagacatcttttagtaaaataaagcggaaaatcaatcggacgttttctctttgggatntctcattcttaatcgaatggattaataactaaagtgaaactaaggctaaatcaattcgctagtcagctcgtcataaa

SEQ ID NO: 192530 - DNA, 395 bp, Glycine max
tgaacaacggaagctcttgagaaattcaaatggtcattacttttcacacggatgtccgattctggcgaatcacatatcaggacactcgaaattgaacaatggaagctcttgagaatttcaaatggtcataacttttcacacggatgttagattaaggcgcatcacatatagagacgctcgaaaatgaacaacggaagctctggggaaattaaaatggtcataacttttcacactgagggcctattctggcttataatatatcgatatgctcgaaattaaacatcggaagctctcgagaaattcaaatggccataacttttcacacggatgtccgattcgggcgcataatatgtcgagaggctcgaaattgaacaacagaagctcttgagaaattc

SEQ ID NO: 192531 - DNA, 460 bp, Glycine max
  unsure (1)..(460): unsure at all n locations
agctttatgaaagcaatatatggcagaaactgtatagaaaagtgataaaataagtgcaggataaaataggtttgtgttttggattgattgtgtgcctaaaatttgaagtacaacgcccattttttctagtcatgctttgtaacctccaacaactccccactatgcattttgaatttcaaactgttgcacaacttgctttctattttaaaggaaccattatattttcttttgatgcttctaatgcactatccattgacttggtcttctgtcacaatcttaaccaacttatcaacaatttatccatcaacatatttttattttattttttctgttgccagtagtagtagtgttagtatatttgtgtgtgtgtgtgtgtgtgtggcatcggctataaattccatcgtttacactgttattgttctctttttcttacattggtntataacattaacgagcatat

SEQ ID NO: 192532 - DNA, 396 bp, Glycine max
tgtgtggattgcattgtacgtgtttgctacctgagatgatgttctgcattgggttcgatctgttgcttatgaaattggatctgttgtagtaattatgaggtcatacataaacactggtatgagaggaatgacttcatttgtcttaattggttgtgaaagaagtgatcagtgtatgtctaggaagaaagattttgtaagaagagatactggcagtagaaaatgtgtgtgtccctttaagctgtgtgggaaaccagcagttggaggccaaggatggatggtgaagttaatgtgtgggagtcacaatcatgaaatgacaaagtcattagttggacatccatacattggtcgattgagtcaagatgaaatgatatttatcgttgatataaaatagtcgat

SEQ ID NO: 192533 - DNA, 440 bp, Glycine max
  unsure (1)..(440): unsure at all n locations
agctncagatatattatgtaccatgagatcttttttgaaaacctcctccaatgatatcatctctcctcctctacataggactataggacatataatttactcttctcactgctgcctcctgtggtcttctttgaacatgtccacactacttcgaccgattgtctttcaacttttcctcaactagcgccacaacaaaaaataataacctcccgatccctcttcacactagcagacacaaaaatgcattgacgcatagcatctcatgctgcacaccgagaaaactatgatgaacctttttgttggaatcctaaaatgcaagtcataccacatcaacctctacattcttcagttgagaacaagacatagaaaatccaattctactgctatgctgctgattgaatggcctttacacaagtacaacctcttctactgtttatatt

SEQ ID NO: 192534 - DNA, 261 bp, Glycine max
  unsure (1)..(261): unsure at all n locations
accactttcagaagatataagagtggtgggctctttgattaagcatgcccaggaagagaccatatgagaagagacacaaaactggattcctttgcagtggtaccgccagaaatccaaacaaacatttccactattgaccacataagaatgaggaccattcntcttatatatattaaataatctctttgggttttgcatcattaacaaaaagtgacactataacatatgtcttccaatcttgggacaccttatagacactta

SEQ ID NO: 192535 - DNA, 420 bp, Glycine max
tctcgtattatatcgagagatgttgtgagctcatggccttttttttttaatctacttccggacagaacgaacatgtatatctataatattgccgtataaaatagttctagctagaaagagctactaaattcttcacactcgctatttctttggtgtctaaaataaagctcatagaaatattttttttacactcatttttagcactccttacatctcattctcatcatactattctgactaatgggccttacaaattagcacccttgcgtacgtacttgcatacataatgccaagagagcagctagattagatggatcatgccctatagcctggaaagcaggacatccagcatgcacgtcaattgatcgactcactaagtttagaatggctgatcatgtctaaattaccgatcatgcattc

SEQ ID NO: 192536 - DNA, 68 bp, Glycine max
caacacaacaggaaaaaaacctgctcaaacgcacccgcagccaagcgagactccccccaacgcaagaa

SEQ ID NO: 192537 - DNA, 436 bp, Glycine max
  unsure (1)..(436): unsure at all n locations
cgcttcttaaaatatcaagaaaacgagcaaaatattgctctttttccttcttggaaggcaccaaagggtattgttagtgtttaactctactgagctctaaaagaatggctaaaattttgttaaaacataagcacttatacaatgaagggaagctggagttgctgcacatgatgtccaacgttatgtcaaggaataagatcgggctgcacaatgcacaaggcaagatgaaatgtcaaatgaagaattgaagctgcagaattcacgatgtcggatacaatgtcctgacatcctgcccgagaatactggagttgctgtacaatgcaagataaaatgtcacatgaagaattgaagttgcangatccacgatgtcngatataatgtcctgacatcctgcccgagaatactggaattgctgtcaatgcaagaaaaagtcaag

SEQ ID NO: 192538 - DNA, 472 bp, Glycine max
  unsure (1)..(472): unsure at all n locations
atgcaagcttatgtaactcggataacaaacagatctcttttaggattctaagntagtagattagccttaagaatcatatttgaaataaaccagtcctaactcaactccaaagggtagctcaaaggggggaagattgctcgagccttaaaaggagtatcttggccacacacctagttaatgtgggacatcttaatacacacttgcacatctaggattggacatttagagcatgaagtttgcaagaccagacatccatgagtagttgaaataagaacttgatagactttgataccatattagaaattgaccgagtctaactcaacctcaagctagctcaagtgataggagtacacaagtcttataagaactacattggccatatttcgtggtgacgtgggacatctttacaacctcgtgcgcgatggcccaacatcaaaattagataggctctaatatcacagtagaaaagacg

SEQ ID NO: 192539 - DNA, 321 bp, Glycine max
aacacgttacatagaagaattttgttcaaaattccaaggtaaaaatatagccaacaaagttattcgactattgaaaagttattgcatgtgaaccaaaaaaaaatttgagcgtaggataaaacaactttatattgatgtgaaattttatccagatacacatacctatattccaaatataacacattacaacaatgataagccaagtaaactaataaaaaaaaaccttcttttccttcgcaacctttgagagctcttcaagtatgtaacttattgctcgagcatcttcacagagagaattgaagtccatggatatgccaattt

SEQ ID NO: 192540 - DNA, 331 bp, Glycine max
  unsure (1)..(331): unsure at all n locations
ggaatatgctcaaatatggggggccattttgtttggttttttcggatgggttaattggggttgatggatggcctatgcctattatgcttttgaagccatgtgacatgccacattggccccgttcttctgctattgatgcctacaccccccacaccaagtgttcggtgaaatgccttcatggcattagcgcgtgatntttgtaaagaaacaacccatggggcattttggtttgccatattttccattttgtttggacatgcattcatttccgaaagggctagagtaattgtcacacatatatcctacgcctatgaaccaaagtttttatgca

SEQ ID NO: 192541 - DNA, 396 bp, Glycine max
  unsure (1)..(396): unsure at all n locations
tttcatcttccactccaagtaggcctccagaacattctttcctttaaatggaggaatgttgagtttaataccatcaattcggttttgtctaagaacaccatcattccctcttctcctcctttcttcttcattatgagctctattctccatttgatccaacctctcatggagcgcatcatctcgttgtttcattaacatctccatatgttgcatcaaagcttgcattnggaattgcgaaagccccactccatcattaggattagtacctgacatctcanacaaacaaatcaaacgttacaagacaattataggtgctggttgaatacctcacccactcaagtgtatcacacaattatgggttttctctaatgaaacactcttgccttttaccactct

SEQ ID NO: 192542 - DNA, 452 bp, Glycine max
tgcagcttttaaaaggataaaaggctcacattctttttcttctatatcatatacaaatatggccaaataaattatatagtcatctcgactcaaataaaatcatataagtctcatacaattaatatagaacctatatcctaatgtcacatcctatcagagcgtggaggtcccgtgtcctctagcatgatgttcttcttagtatccacctagtaatctgctctcccgaacacaagttctagatcagtacaggatccaaacacaacaacacacagggagtgagttatcacattcctagctaggtgagaaacaagagtattaatatacatattatataatgataaccacttgctaaacatagctcacgtgacttcactttttattattccgaattcgctttcaatgatcatcacattacacaagaatccacacttcgtcaagaataatactcatta

SEQ ID NO: 192543 - DNA, 442 bp, Glycine max
  unsure (1)..(442): unsure at all n locations
gcttgtgagaattataattttagggttagggaataaagaaaagagagacgatggctcaggctgataaactggaattattattgatagataaaatgtgatacacaaaaccaaagtactaatccttttatattagtactagactcttaatgaaaatattttctagatattcaaaaactatgcacacagagataaagcttactgagctgaaaacgtctcaaatatgggagggaataggccacgtcatgccaagctntaaaagacctgagcctaacctacgaataaatttttaggcctgagcctggcctatggcctatcanaggtttttattttggctcgtactggcctttttaaaagcctagtctggcctgatagcccttttaanagtctttttcacattaaatctttaatattctagagtacgaacgtaatagaaagttaaagt

SEQ ID NO: 192544 - DNA, 406 bp, Glycine max
tgatgtgagaaagcgtggaagagtcagtcttcctactcttgtttgttgaccatagagtggtacctggagatatgtcgcgggggtcaagaaaccttggggacagtaagtggggtgctattgcccaaaaccaagcttgggcaatcccgacctaaccccggcatagtcagtcagtgagaacctgcgatgtacctaagcaggcgagctcctggcagtcaaccaataaaagaacaaagtccacgaagcaaggaggcttgtgtggcggctggccaactatgtatctaggtggtatatgaaaattagctacatgtaatcgtttactattcgtgggtaattagcttacttgtaatcgctaagtagcttctggtaatcgattaccaattgtgtgtaatcgattacatagtattat

SEQ ID NO: 192545 - DNA, 443 bp, Glycine max
  unsure (1)..(443): unsure at all n locations
agcttgttctgtatcanaaggttaattgctactaatgcaaggagctgttgattgaagaagatgacaatgctccaacaaccaaatatgccaaggctcgtcctggtcgacttttcaaacatcaacatgaagctatgaagcaaaagactaagctcactattttggattggtatgtcatgaagaggtattacagactcatggagtgttgctttgatttggaaccttatgagaagccacctgcagatatagtttaccatgaaataaggctatgctattagacctttaaccacacttgcttcactcaagagactcctttcaacatggcctacttatggaaaagggagttatatgttgtgtttgatcgcaccttttcttttatggggttcttgcctttcttcatattcttcttcactcatcatgtggatccctatcatgaacaagtagag

SEQ ID NO: 192546 - DNA, 459 bp, Glycine max
  unsure (1)..(459): unsure at all n locations
ctaagcttgtacgcatatcgttcgcgtgtatgatatccactccacattatttgttgtataggagagcttcaaccctataacgcaacgtggcggacaaaagtgggcagtaaacttgaatgatcgccattgtcaatgcggaaggtattatgcgcttcactatccatgttcacacattattgcagcttgtggctacgttagcatgaactactaccaatatatagatgttttttatacaaacgagcacatcttaaaagcttactccgcacaatggtggcctcttgggaatgaagcggctattcctccttctgatgacgcatggacacttatccctgacccaactacaattcgtgcgaaaggtcggncaaaatcaacaaggataagaaatgagatggattgggccgaaccatctgagcaccgaacaaaatgcagtatatgtggagccgaagggcataacaggcg

SEQ ID NO: 192547 - DNA, 470 bp, Glycine max
  unsure (1)..(470): unsure at all n locations
cgacccggatccttagtcacctgcggcatgcaagcttgctgcaaattacttcatacttcaacttattctttagtctagatgcatttgaaaagattaaaaacaaataatattccttatttattgtgccttgtgtcaggatcaaaaagtgaatagcatatgtttttttgacagcagtgaataccatattttagtgcacctaattattttagtgcaaaggacacatattcatacaggttttgagcgttgatttcattactttctttccaatcagaagctactgcggttaaaactaattcatatattggtaaaacttttgagagtttataagttattttgagtagtttataatctactttgatgtaaataagctatatattaaaataaatntatatactaaaataaacttttgattaaaataacttataaactataatcaaaatcctataaactcatcaaaatatgaaattagt

SEQ ID NO: 192548 - DNA, 430 bp, Glycine max
  unsure (1)..(430): unsure at all n locations
accctcctgtcaaagcaactgatagtaattgatgctgtttcactccatntcaactacaatgggtagggtagggtactatggcatttgtccccccatcctcacattttataaaaatacttgtccccaatcctgcgtggagagcaaatttagtgcctatctctgtatcctcttaatacttggcctcttttcttcaattgtaaaatgacaaaaaggcctgtggtgggaatccatgagatggattcaggcagtaggtcctcttccactttccccagcttgccattttactcaattctgtgaaggttttggtgcagctgtgaaccatagcagaaggtgtgggtggtggattgccctaactatgtctatatggcagcacaggaatctactganttttccagggaaatcttttgatcctctaaagcatggatgatgc

SEQ ID NO: 192549 - DNA, 448 bp, Glycine max
agcttggtgtgagaaagcatggaagagttagtctttctacttttatttgttgaccatagagttgtacctggagatatgtcgcgggggtcaggggaccttggggacgtcaggtggggtgctattgcccaaaaccaagcttgaccaatcctgacccaacccgggcatagtcagttagtgagaacctatgacgtacctaagcaggcgagctcttggcagtccaccaataaaagaacaaagtccacgaagcaaggaggcttgtgtggcggctgaccagctatgtatcttgggtggtttctgaaaattaccctctggtaatcgattaccattcgtgggtaatcgattacaaggtttaaaaatggagacaggatgttaagtagcttctggtaatcgaataccaattgtgtgtaatcgattacacagtatgatagagcactggtaatcgattacc

SEQ ID NO: 192550 - DNA, 467 bp, Glycine max
  unsure (1)..(467): unsure at all n locations
tcacaagcaagcttacaccattatatgtgggtgctntatacattgttcaaagaatggtgagtagcgcaagataaatgattctttgagagcaaggaaattacttaattataacctacgatagcattttcttagagaaactttaagtttattttaagaaaaacaatgaacaattataactaatagattttgagattgttaaaatttgtttccgtaattgctaaaaataatatgaagcatatataaatgattcaagaaattttagtatggtcaagcctaattggttctcttgttagatcactctctaaataaaagaaataggtgataagtgatattatgactcatgagagaaggaaaagtgcctgaaccggtagtggatattgtgagccttaccatattttggtataatttttggttntgggtcactggnntagatgtntttcaagtcactgtcatatgtgccactaata

SEQ ID NO: 192551 - DNA, 438 bp, Glycine max
agcttacggacaggaatcaatgtttcctttctcaccactcgccagagaatgattgggatcatccgaagcattcagaaaggtagagctttcatgttaataatggtccaatatgtataatcttttattaaacaagtatattaaaattgtttttaaaaatagtatatggtccataaaatgaatatagagattgaatttgataaaagaaatagcgtatgatccataaaatagcttgataaaaatgattatgatgagattacacgtttaaaatattttttttcttataaaaaaaaaagtgataacatcttaagcttgttagcttgttgtagctgactcactgtctagtaccaatatataaaataacaagactaaacatgtaatttatcacaaaaaacaccttgtttgcccgctggtcttgctcaatcttgaagcatgtaattc

SEQ ID NO: 192552 - DNA, 396 bp, Glycine max
  unsure (1)..(396): unsure at all n locations
ggtatttgactgcttaaggtttatgtgtaccccacttatcaagggttagtgttacttgaccaattatggtttatgggtatttgacaaaataaggttgcttgacgaattgagattaccggtatttgaccaattaagatttaatggtattggagaaattcacgtttattggtatttttctaattggggtttatgagtagttgagtgattaaggtttagtgttacttgaccaactacggttttgggttaattgattaattagggcttatgggtattttanaaattaaggtttagtgtcacctgaccaattatggtttagggttatttgataattttgagttacttgattaatcacggtntacgggtatttgaaaatttaggattcatgggttacttgac

SEQ ID NO: 192553 - DNA, 454 bp, Glycine max
tagtcacctgacgcatgtcagcttccttaagaagattcctaaagaagctagagcttatctacacacacatctctaatagctaagctcacctccttgagatgagaagctagagcttagctacaccccccctataatagctaagttcacccccatgacaaaatacatgaaaatacaacaaattccctactacaaagactactgaaaatacctcgaaatacaaggcaaaaaccctatactactagaatggttaaaatacaaggcctaaatgaaggaaaaacctattctaatatttacaaagataagcgggctcatacttagcccatcggctcaaaatctaccctaaggctcatgagaaccctagggccttcccttggatctctggctcaatctgcttggagtcttctatccaatgcccttgcggggtaggagtgcatcacacgcataatatatcaag

SEQ ID NO: 192554 - DNA, 457 bp, Glycine max
  unsure (1)..(457): unsure at all n locations
taagtctgcatgttttgactgttgagattgtctagatcacattnttggatagttcacttagcgagacaagcacgctaagtgaaattcccaacctgagagggaaattcctttatccagaaaggcgcgcttgccgcaaatcccaatcgagaggaaactcgctcaatgcgaggggttgcgctcagtgccaaaagtggatttctgcttagtgagacgagctcgctaagagagatctacagattataaatacatccaacaacgtaaaattacgcattttgaactccctctttctaaaacttctgctcagaaaccctaaacactccttctccaccacccatgaccaccggtggccaccatgagctgtcgttgcttatccgcaaaccaccacacggagaggaacactttaatcagagcaaatccttagaattcacctaaggattcggcaagacaagctcccatc

SEQ ID NO: 192555 - DNA, 461 bp, Glycine max
  unsure (1)..(461): unsure at all n locations
gcgatcttaatcacctgctgcatgcaagcttgtaaaccaaatgctcaccattgcttgatgataatccttcangttgtttcataaaaacctcattctctaaatcaccattaagaaaggttgttttcacatccatttgttgcaactaaaggtcaaaatgagcaactaataccaaaataatacaaataaaatctttcttagatacaaaaaaaaaagnttatgtaattgatttcttctttttgagtaaatcccttatcaatgagtcttaccttgtatctcttaatgttgcctaatgaattccttgtggtcctaaggacccatttatagccaatgacctttgtccattatgcactctacagggttcaaatccatactctgatggattcatccatccttatgaaacataccataattgactcttacaactatacttgataaagtttgggacattncacctcatatat

SEQ ID NO: 192556 - DNA, 339 bp, Glycine max
tcagcttgtacagtctgatgatatatctatgctgacctctctgtttgcatggaattggaagtttttagatactacaaatggttctaccggatttccagacatcagaaaaataaatggaaattctgtaattgaattagttagtatgcccacaaagataactggtgtacattatgtgcaggtgagttgttgaactatatgactagtttcagaagaaagtcagctttcacatttgatacaggttcttatttgttctcttatattttaaaataacaccagcttctaatgaagtagcttctaagttctctaccttttggtatttaaatactctttacttaccaa

SEQ ID NO: 192557 - DNA, 432 bp, Glycine max
  unsure (1)..(432): unsure at all n locations
agcttgatgattgtgctgaatgcattaattgttaacaaaccaaaagcaagaaattaggtgcatatagagctacaaacgtctaggaattgatacatacaaacatttgtgggccatttcatacaccttcatggaatggtcaacgatattttatatcattcatagacgattactctagatatccatacttgtttcttatatatgaaaagtcacaatctctggatgtgttcaagtgaacaacgtccggggccttttgccaagtacctagaggaatgtggaatcgttctacagtacaccatgccagggtcacctaacatgaatggtgtggctgaaagatgaaacagaactcttaaggatatnggaagaagtatgactngtcattntaacttactagagtcactcttgggagaagcactaaagactgcaactacattc

SEQ ID NO: 192558 - DNA, 243 bp, Glycine max
  unsure (1)..(243): unsure at all n locations
taagccgagcttgctcgcactaagcgcagatacccttgaatggatggctgaatagttcagctaagcgcacatcactgcgctaagccnnatatcttcaatataattgaaccttaatcaatgggcttagcgtggatgatgcgctaagtgctactcctcatttggaaaatcttttattggagcagagctaagcatgctatcctgagctaagccctagatccattctggaaattgagctttcaagct

SEQ ID NO: 192559 - DNA, 456 bp, Glycine max
  unsure (1)..(456): unsure at all n locations
aagcttaagaaaaggccaactcccttccattatctgatttcaggcttaaataggtgactttgttcgtgctcatgcgcttagcgcaattctgaaccgcttagcgcgcattagtgaattttggcttagcgcttagcaggatggcccttcgctcagcgaacatgcacagctcatccttcttccagattctttcttgcgctcagtcgaggagtgttgcgctcagcggatggctcgctaagttgacaggttggcttagcgagaaagtgaaaatcagcactatacaaactcgcctaattaacctgaaattgagagaaaatgattattaaacacacaaaatggaagtactaagtatttattacctatctttacccaaaagtaattacaacattacaaaataaccatanattggaggagtttgatacaatttacacagggtttntacacaaaaagtagtcgtat

SEQ ID NO: 192560 - DNA, 428 bp, Glycine max
ttaggagaaaccataaaaactaaggtagttcctaaacaatatacaattgaggaaacttcgccaagaatccccattgaaaaacctttattcaaacctttcaaagttagtgagaaggctaaaagaaaaattagggaacttagaaaaactaaatccttaattgaaggcgtaggtgacaaccatagtgaattactaaacaagattggtagtttacttaaagtcattccagataccccccaagcctcggaaaatacttccaaaatggtaacaagaagtacctccaaattaatcaatgttattaatgaagatagtggccaaaactcagataacacaactgagataggatcagtgtcagagaagaatataaatccaattaattccaaacactggaaaacaaccttcaaattatattatcaacgtccaactggccc

SEQ ID NO: 192561 - DNA, 456 bp, Glycine max
atctctaagtacctgcggcatgcaagcttgtaatcgattacacaaatcttgtaattcattaccatatgagattttctgaaaattatttccaagagtcacatctggttaaatggtttttgaatggccatcaaaggtttatttatatgtgacttggaacacgaatttgcttagagtttttcagaacaaaaaggtcttatcctctcaaaagcaaaatcatttcatccttttaaaaattccttggccaatacacttgtaattcaataaggaattattcgagtgctcaattgttcaatctatctctttcaagagagatttcttcttctcttcatcttatttctgaaaaaggattaagagaccgagggtctctttgtgtaaagcaatctgaacacaaaggaagggttgtccttgtgtggttcagaacttgaaagggcttttgcacatagtgaactttcagcg

SEQ ID NO: 192562 - DNA, 465 bp, Glycine max
  unsure (1)..(465): unsure at all n locations
tctttgagaaaacttccttgagaagctagagcttagctactcttttttctctcataactaagctcacctgcttgagaagcttccttaagaagattcctaaagaagctagagcttagctacacatacctctctaatagctaagctcacctccttgagatgagaagctagaacttagctacacaccccctataatagctaagctcacccccatgacaaaaaacatgaaaatacaaaaaaaggtccttactacaaagactactcaaaatgcccagaaatacaaggctaaaaccctatactactagaatggccaagatacaaggcccaaacaaaggagaaacctattctaatatttacaaagataagcgggctcatacttagcccatgggctcgaaatctaccctaaggctcataagaaccctanggcctacccttggatctctagcccaatctacttggagtcttcta

SEQ ID NO: 192563 - DNA, 464 bp, Glycine max
tcttgagtacctgcggcatgcaagcttgaatacttgcttctgtgttaaattgaggaatttgatgaatacattactaaacgtggatcatagacatagaaccaaacacttagatctactaattcactttgcataaaagttttgtttgaataaatttctctataagctcttatagaaaaaagaaactaagaaaaaatgaaaagtatttttctcataagcttaaattaatttgtatgagttaaggttttcagggaaacttattttattttttcttttattattttcgttttcaataaacgctcatggagaaccttattcaattagggcctaagtgttatattttcttaagttgctactagtatgacacaaaacattggaaggatgttatgataatatgcagttcttcagaaaagaacacttaagggagacagaaaccataagcaagatgttatagttatataccaatt

SEQ ID NO: 192564 - DNA, 414 bp, Glycine max
  unsure (1)..(414): unsure at all n locations
atcccatactttcaatgtgggagtcaagtcccataccttgcaacttgcaagtggatcctaacacaactgatgatatatcttcgcaattaacttccacccatggaaatggtgcagtattaatcaaatgaaaaattttagaattctcatgtttatgcgcattgtctttctaattttcaccatataatgtaatgatttcattgaccaacataccgtagttgatatctaatgaaatctcttattttgtttgtttcgagacatatgacaagcaatgttnttgtcatcgcaaaatagaataattgaagcatgaagatactatacaggagtaaagggtgaactatacctgaaataacatgtaaacatttggaatatcaacaccacgagcagcagcatcngtacatacaagaacaccacctt

SEQ ID NO: 192565 - DNA, 465 bp, Glycine max
  unsure (1)..(465): unsure at all n locations
agagtacctgccgcatgcangcttngaaataaataaatctgtgtgccagcatcttttatctacttaacaaccgtagggattctagtttacatacaatgaaagcttctagtctttaggtttctattgtgtatggcgaatctggtctttggaaaatactttcacattctgacgtcaatctttttctgagatatcctgtatcttcattaaatttaagtccattcattcggtgtgttggggtgtcctggtctggtttctgtccatttgtcctacccttatctggtacaatagatgcatgtaggtgtgtaggataattataatcatcttgcccctattgcctgttctgttctttatcttcatgacctctttctctttcctgttcaatcttgtgatatttgcagataatttgttttctctcttttcaaagggtattatgcactttctgcaaacatatttctatgctagcgt

SEQ ID NO: 192566 - DNA, 467 bp, Glycine max
tattgggttcttatcatgggaacttatcattgctgtcataactattaaatagggccgtgaaagatagctggtatttaatatgtacaactttacaaaaacaatatgtttcacatgtatgagtttctaatatataatgctaggcgaaaatcatacataccattttaaatattctaagagtttaattttgatatattattagaataatctgttatataaatttattaatagaaattcattctaaatgttatttcagaacattattataaacgtcgatcaataatttataacaaacagcttatgatattttatattacatatcgttgatgcattctaattatgtacatatgttaataataataaataacaatatcttaattatgaatacatgtgacttctttttttacagcatgcgactcttattgtaacaactatatataaattatacatattaatgttcgacttggtta

SEQ ID NO: 192567 - DNA, 469 bp, Glycine max
  unsure (1)..(469): unsure at all n locations
gcatgcaagctntgagcaaaatcaaacgacaataactttttttctgttgtccgattgtgtcccgtagtatatcgagacgctcaaaatttagaacacaagctctgcgcaaaatcaaacgacaataactttttactcagatgtccgattgtgtcccacagtatatcgaggcgctcgaaatttagaacaaaagctctgagcaaaatcaaacgacaataactttttactcgaatgtctgattgtgtcccatagtatatcgagatgctcgaaatttagaacagaagctctgagcaaaatcaaacgacaataactttttactctgatgtccgattgtgtcctgtagtatatcgagacgttggaaattcanaacagaagctctgagcaaaatcaaacgacaataactttntactcgaatgtccgattgtgtcccgtagtatatcgagacgctcgaaattcaaaacagaagctctga

SEQ ID NO: 192568 - DNA, 433 bp, Glycine max
  unsure (1)..(433): unsure at all n locations
ntacagcagattntagtaatgacccactaacctagaattaatatttcttaatgccattaacctatggaattaaaacaaacttaatggctgagtgtaactgaaattgttggcaaccaaaagtcacccccaacagccaacaagtcagccaccatttggtctcccaaaaggctgatgcctaagttgccaattgggcccttattacaacttgaactaaagcccttttagttgattaacccaaaacatatttttggtcagccaactttacaaggattgggccattatttagacaaactaaacactctaaaattgaaataaagtggtgtcatttagtcctccatttgggccatgatacaactcacaaccttggacttttcttcttgaaacttgngcttgtattcaaatagtatggacagcactttgtgaagaagcttct

SEQ ID NO: 192569 - DNA, 362 bp, Glycine max
  unsure (1)..(362): unsure at all n locations
atgcaaatttcgttcatggattgaattgaaatctcaatagtcgacatccggcgtgaaataaccccgactgatatttttcagctgacattgagcaattttttttaaaaaccctcgctgggcgataatatttttttttacagcaaaagaaaattcttgttttggggttgcataaaaaatttaccatgtagggcggctagggtttttttgttcaactccaccgaccttttgtntgtggcgaaactggcatgattccatttattcggccaggaaaacattagaccatcttggcaaaaaaaatattattcaccgatattgatccaanaaaatgacagttgacatcggccacgaaacatgactgatcg

SEQ ID NO: 192570 - DNA, 346 bp, Glycine max
ttttttttttatttttcaccaacgccgggcaataattgctttagtacgatcaagccaatttttcttggtgatttcgctcaatgatagggttaccatcgagggcgcctgcggtatttcgtgggaactcaaccgccgttgtggtttggtcgaaattggcctgcgctggtagaagaggcaaagaaaaatatagccgaccttggcagcaaaaaaaaatacctcgacaaacttggataaaaaacaattctagccgacatcggccaagaaagaataccggtcgctgtatcccaaaaagaatcaccggatgaagacaatcgaacattttcttatcgacatcattcgaaattat

SEQ ID NO: 192571 - DNA, 446 bp, Glycine max
  unsure (1)..(446): unsure at all n locations
agcttatttccaaatttgtctctggtaatcgattacactgcctggtaatcaattaccagtgcctttgatctcttggaaacaatttgttttgaggaaaaaaccaatcaaccagtgagattgtttgaggccttatctttttcttgatcttgtttgcttgaccttgaattaatcttgaagcaatgcttaacctttgaatgtttgttgaagcaaccttctttgattctactttggcatcatcaaaatcatgtattcatacattcacattctccccctttttgatgatgacaattattatcaagtgaattcttttcggcatcatcaaaacctgcatgattcacaatctctccctttntgatgatgataatcagtatcaagtgaattcttttcggcatcctcaaaatctgcatgattcacattctccctctttttgataatgacaatcatct

SEQ ID NO: 192572 - DNA, 352 bp, Glycine max
tatggaccatgccaacttcaagcccaacaaaatggtttttttttatctacaacaactgaacaaccaccaagttatgaagaatacccgtagataaaatttcctgcatgatcccaaatcactccaccaccagtagccttggtaccctttcatgtgacatctccatcacaacttagagccacttctcttggatgaggatgcaaccaactaatgctactcacgtaagatagaaattttgagtgagctaaaggttcatagagaggactattcattgtatactcctctactaaacgacatgcataatcgattgtatcaatagtagtccatgtctccccttggaaaattatattatttc

SEQ ID NO: 192573 - DNA, 459 bp, Glycine max
  unsure (1)..(459): unsure at all n locations
agcttgtggtgtattccacttaatagaatgtgttttatgtaaagatctcttgggtgtgtagataattctattgtgtgcagaaaattttcaccgacaaatgatttttcaaccccaacaacttcaatatgtggagtagatgtaaattgtaaattttataataaagataaactctttctctttctctttataaactccacaaaagctttaaaataatttatttttgaccacgtaaaaacaagtaaacatagattatgttatctaaagtgttgcatacttgaaggatgacaaacgataaaaaaaaaaaaacttgaaggatgataatgaataatgaattttatnggttattaataaaatacttcatgataaggtaattattcatctgatgagttggagtacaggtaattagttattcgtaaaattngattaaatgaatatgagtggngatacagatatcttaat

SEQ ID NO: 192574 - DNA, 409 bp, Glycine max
  unsure (1)..(409): unsure at all n locations
ntcttggtcaanatcattggtcaagaagtggttcaatatcttttatcttatctgacgattttcactcagatgaggttctcttccaaggtgattcttcaatttttcccatcactttgatgtaatctacattctagggctatctaatagggaataatcttaacttttgttttaaaaccgaaaagggcattttttctgcttctagttcaactaatttttgtgtgcactaaaataatttttttttcttgtctgtttccatgggtatgctacttgcagcacaggatctaccctttgttgtttccttgtccatggttctaattcaccctttgtgatacaaataatctgctttttttttggttgatttgacgatataaatgacgcaaagagcacacttgtaacttatggtttcttt

SEQ ID NO: 192575 - DNA, 427 bp, Glycine max
atgcaagcttgagaaacatcacgcagaggattcatcataagtagttgaccacgaacaacactataagattcattcaaccccatgagacattgcatcaacttgtgtcttttgttgtttgctccacatgtgcaaataacatcattgtaggatcctaactcatcccacaattttttttaactttgtatattatgcagcaattgtcacttgatcttgagtaaggcaagtaatctctctctcaatatggaaaatgcgtggtgcgttgctttgaaagaaacgattttgaagatcttcccaaacttcatgagcagtgttataaaaaataacactatttgcaatattatgggtcgatgaattaaaaaatcctgacagaaccatttcattgcattctttttctagctgcttagtcttccggcagatggtgctttga

SEQ ID NO: 192576 - DNA, 227 bp, Glycine max
ctcctctgctgaccaccatacagacctttgtccttccatgcagaacccggagcaatcaagcagcctgaaccttatgctgcagatatttaccatagacctcctcaacctcagcagcaaaaacaaccacagcagaacaattatgacctcttcagcaacagatacaaccctgcatggaggaatcaccctaacctcagatggtccagcccctaacaacaactaacagcagc

SEQ ID NO: 192577 - DNA, 428 bp, Glycine max
  unsure (1)..(428): unsure at all n locations
agcttagatcatgaagcatataggctacattttctatattgtaaagaaattccaagaacatggaatgctacctatctgaattcctatttcagttgacctactgcaagaccaggtgttgtactcttttttctactctagtcttttgtcccaaaagagaaaaatcagggttttgtactcaattgacttcattgaataaagtcctatctctcgttagtttctataatnttcttatgtccattttacaaaggcttgtcaaacccaaggtctgccattagtaagcctcgccaaaacccaggacggatgcattcctggtcgcttctctaaaggctcgtcaaacccaagatcccgccttggtgagtctcgcttctctaaaggctcttcatacccaaggtcccgccttggtgagtctgcttctcacaagctatcaa

SEQ ID NO: 192578 - DNA, 452 bp, Glycine max
  unsure (1)..(452): unsure at all n locations
nttgaggtgcatgagatttactggattgaggagattcctttctcgttaattagcattntaactgttgacaattttcctttgggctcagattctggttaataatatcatcaagttacgtaaaaaaaaaagactcgataacgaaaccgctaattctctttggtatatgcagatactggttgaaaatgataagcattttttttcataattttaatatactattcattgtcaattttttcatcctaatcaaaggaaaaattcactttttctccagtttttttatcctcttcttttattcataaaaaataaaagagaacaaagaagagtgcttgagaagtagtgcattctgtcaccctgtaaggacgaagatctttgtaaagtggatagatgagtagattatccaatatgccccaaaacataattcaattctcatggttatacacgccaagggataa

SEQ ID NO: 192579 - DNA, 330 bp, Glycine max
  unsure (1)..(330): unsure at all n locations
ttatcaacattttgttagttgaaataaaggcccaaacttatgttaaagtggctgtcaattctcttgggatttgcaccacctatggacttgttttaatttgaagaaattaagaattaataaggtggaaattctatgcttgtggttgcctcttggctgaccaaaagttgtgcatttttccacatgttttgtgtcttaattctagttttaattaagtataatgacaccatcaattggtggtattggtgatcatttcatcttctcacttttgaaccaacttgatgtcattcctatntatgggctacgcattntctaataaaaaaacagaccttg

SEQ ID NO: 192580 - DNA, 434 bp, Glycine max
  unsure (1)..(434): unsure at all n locations
tgctntaatttataacaaaagttagtagctgtaaatttttaaaaataatcattcttgtgcactaacctaaaataagtattaaaaaaatatcttttcttagatacactttcttgtgcagtaacctaaaatacatattaaaaaaataaacatggttattctaaaaaatgtcaatgacgattaatttgaaaactgattggtggttactctttaattttatcttcacatcataaatttttttataatccaagtatactttaaccaaatttaaaattgtataaacccttggccctcaaggatgaatactattttaaataaaaaaacgcaagaaaacaaaagcacaaatggacttaaaagtgcacctttgaatctgtcagttacaaattgccaagttacctttactaatactaacagagtaacaatgtctattattcaca

SEQ ID NO: 192581 - DNA, 453 bp, Glycine max
  unsure (1)..(453): unsure at all n locations
tgcaagctttctcgtcaatactagcatttcactctttcttacctactaaagaaactgaagtagcaactgatctcattattcaacaacaacaagaggcaaggaaaaggtagactactctcctgcacaagtaaaaatgtgagcatctcttatatgcatagcaaaaacagacccttttatagcacgaattagcctcactatatttttaaaatgtcataagaggattttgagcactcactcttattctttcaaccaacaagaccaccaaatattagagaatgctatgaacaaaaaaagatctccttttgaagttacatgaagtttgcgtgcacgaggaaggtaagactaaatgtcatacaaattgattagtttcataggacaagataaattcatacaacaactcttagatatattcangaatgatgcaaagagttgaaattacctaaacaatgcaac

SEQ ID NO: 192582 - DNA, 388 bp, Glycine max
taccgttccttgaaatagcatgtttttatgggatgatcatgatcggcagcaagactttggatttgggatgatatgctacgagtttaattgtatttctcttttgcttggtttggatatttacagtccttgtgtgtcaatgtgaatgcattcttgtataatgatgttcgcatgtctatttcctactgccagaagctgattgatgaatatggcttatgagtcttaatttcacttttcaaaatgtattgcttacttgcatcagtaaattaagtcgttcggtgtgtggctacctcattatgtggtactgcgcatatcaaaagtacatatgtgttcattgggcatcatacaatgaatactatattttattgtaaatcaaagtcgtagctctgat

SEQ ID NO: 192583 - DNA, 467 bp, Glycine max
  unsure (1)..(467): unsure at all n locations
cgacccgggatcttanagncacctgcggcatgcaagcttgaacttaaggattgagtctctctttttttattgatcacacccaaggctgggctacataacaaaccttgatttaacagtgttcctattcttcaatatgaaactccatggtgatgttctcattgttgttcaataagactttctgatcctcttctgagcttatgtctagtaccatgaacaatttaattataacagaaagaagacaatattacaactttcactatgcttgacaattgctttgtgaattgctcgagagtatctctcagtcttttgatttatatctacatcactgcataattgaatcccaaccattcaaggattagatgaaccatntacagcacgtgtccagaacctcctaacctatatatatagaagcaactagatcggaattactatgagattaggtatctangaaatagggaagtctaaaa

SEQ ID NO: 192584 - DNA, 454 bp, Glycine max
  unsure (1)..(454): unsure at all n locations
ttcatcaagtggtaatcagagctcaagagcttcatttntttctccttaaacctncattaagtttcagctttaccttctcctccattgttggttcttcattattctccatgtatctactcacatgtcttgttctaaatgttcttaacatgattttttagaatttctatcgattaaacttgctacaaaagctagatttgattttctatggttcaaatttcttgttcttgttcttgaaccatggattgtgttgagattgagttccttttagttttgtttttctattttttatggttgaaacctaaaccatgaaattcttacaaaaacattatagtagaataaaacctcacaaatctagagtgtcttgttcacctatttgagttttgcatagaagtcatgtctagtcatgatacttgtcacataagattccttatgttgtgctcgaatttaattttct

SEQ ID NO: 192585 - DNA, 456 bp, Glycine max
agcttatccctatatggatcacgaagagtctttattttttttgtctagtccatggaataactgcctaccacgatcctctttgtttctccaacaataatagagattcaaatagtatgttttgtattgaattccagttgggcacaattcgtttgcttttaagatcatccacctgaatgttgcaacttctagttctctaatctctataccagcctcaagccaaaatgtagcatctctaatggcttgcccaagggagtcccaagcaatcatcccttaccttgtaccttcattcctcctaacaaatgtattaaaattaaagttgtagttaccttcttggggaagtaaccacacctttgtagtttgggccactggggtggtgtctgcacaatcctagtatgctttgatttcctcagttggagaatatttacctataatttgtcacatccatggtaatccatt

SEQ ID NO: 192586 - DNA, 342 bp, Glycine max
  unsure (1)..(342): unsure at all n locations
acatgcacccagaagttaattgaaatcctgacatcaaacatatacgtatacatataacatatgtacctaaaaaatcaaaattttcaggttcacaataaatagcagaagaagaatcaccccccaatccattcacctttcaccctcaaaattgcttctcatggttatggttggtgaattggcccttgctgttgaaggtgaggaaatctgattgtacaaaccagacatcaattctacaagaattaagggatgcaaattttgcacagaaaggctatagaaaatncaaggcactaagagagaaataaagggttgattgagataggcgttggcctcaatgatcctatt

SEQ ID NO: 192587 - DNA, 362 bp, Glycine max
  unsure (1)..(362): unsure at all n locations
ttatagttttcctattctctacaaagataggcctttacttcttgatattcatctaacgatacacacagactggatcacctaacgttcacttttgtcttacacaagttataactgcatctttcaaaatgatcgtcacactatttagttatgtccctgatggtgaaatatcattatttgtaatttcacaaactcttgaaactgtaaagaggttatgtcccaagcaaaccctattgataggaatgaatcacaagttcgatcaccacaaggacaatgagtntctaatggaatggtccagaaggtacacttcccatatttcaaagaagtcaaatactttaacggctagaactagattctgtttccta

SEQ ID NO: 192588 - DNA, 349 bp, Glycine max
atcctactattggctagaagtagaagaatgattatgacaaacagaagctaaagaaaggataaactatcacttgcttgcattcaagacttggaaatcatattttcaccaaaatcaaagacttggaaacacctaaatagatgtgggacaagatccaaaatggatttgacagcaataaaaagggcaaatctgttaagcttctcatattgaagagagagtttgaatcaatgaaaagacgaaggacaacaaatctgccaaaaaattgtgatcatcaaggggtctttattggaaacacctgtgttaacacctacaagtgcaaactgcaagcaatggttgaagactacaacatttc

SEQ ID NO: 192589 - DNA, 315 bp, Glycine max
  unsure (1)..(315): unsure at all n locations
gcttcttgcgtacccgctattggtgctcattaaatccctaaaacaaatccctcttattactagctattttgaattctttagttcctgaatgtacaaccttcaaattgttgctcggtcccctatttgttttctgcaaaaaagaaaattaatctgaaacaattcaggctgaattggtattcgtattattacttcaaccataaggaataacagctaaacaagtaatttaaaatgtaacttttaaatttttgggtatttttttaattacaattttacttcaatatttaattntgttaatctacttatggccgtttttta

SEQ ID NO: 192590 - DNA, 477 bp, Glycine max
  unsure (1)..(477): unsure at all n locations
tattacgtgacctataaaactcagcttttcttgattctgatagccttttcttgaatcttgaatcttgagtcttgaaccttgatccttgattcttgaattcaactttcctcttgaatctctgaagttcttgattctatcttgaacatcttgaactcattctttgattgacctttgagctttttgtcatcacctttgtcatcatcttttgttatcatcaaaacatctttgaatcactcttgattcaccatgaagctttgcttctacaatctccccctttntgatgatgacaacttctgaaatcaagaaacacacacacacacactttttccttgtcgatcactcacataaattatccccctttggttttgaatttatgcttctcttaagattaagttgattattcgtgtcacttcttgattaatctctattttctcccctttggatcacaaaagccaagttgatcaatttgagtatcaa

SEQ ID NO: 192591 - DNA, 343 bp, Glycine max
agctattagaagactggcttattcatttagtgcttatttctcaaccttcacagtttagtcagattaagatctcttataattttcagaaggagaaatggtctcttaatgagctcatttcatactgtgtgcaagaagaggaaaggctgaagcaagaaaggactgaaagtgctcatgttgcaagtacctctaaagacaagggcaaaagaaaaagaactaaggagcccaagaataaagctgttaagggtccaacacaaaagaaataaaatcaaggtgacaacttgttcttttgtagtaagcttatacatgtaaagaagaaatgtaccaaatatcatggttggcatgc

SEQ ID NO: 192592 - DNA, 452 bp, Glycine max
tgcagaagatgcccaaaggcaattgtgatagtggggttcattcaacgtcagtcgctcacggaaagtccttaaggtttctctcgaatctgagggtagtcattgttacgtaactcctttcgggatcggcccatatcatcaatcttcaacgggatcgatggacccatggcattcctttatgatcttaaatcaagaaagtttcacttggtcatataccaaagtgtaacaattcattgtcatctttcaatggatcacgcagacagtcccgaagccttatatttccttgttgcgcagagtaatcaaagtttttacacaaaaagaaagggacaaaccctacaatcaatatttcaattgattgattacatgaataacacaaagacaagatgaggttgcatgaatcatcacatcttttatgaagagacagtcaatctgtgcttttcacaataaaataaaaa

SEQ ID NO: 192593 - DNA, 457 bp, Glycine max
  unsure (1)..(457): unsure at all n locations
agcttatgcgcatatttccttacgaacgttcacttgcacaagacatcctatcaactaagaanaatgcacccatatacaatcaaggtagcttcattacctaaattatttacatgtacttccaaagtgtatttgttatttacatcacacacgcctccttggctgaatttacatacatacatactcaaagcattttggggtaccaaaaattgcacatgcgctcatcttggtatttctaatacccatacatatacaaacttcacgatgaatcttgactacctacacaataaagtgctacatttcatgcttcttttntcaagtttttgctacctaaagccacatgcaaattcaagcatattttcctttgctgactaaaatngtattcaaattagaagggtatatattttntgtaatatgttttcttcacataacatgcaacatatttatatatatttttttt

SEQ ID NO: 192594 - DNA, 365 bp, Glycine max
  unsure (1)..(365): unsure at all n locations
ttgatgatatggtcttcaccaaagaaaggatctaagtgggtctaaagagaggcaaatctgatcatcatgctttgataaatgcaaaaaaaaaaaacaaaaactagggaaaatgaagagggtgagaatgagggagaagcccatgctgtgactgccattcctatatagccaagtttcccaccaacccaacaatgtcattactcaaccaataaacaaaccttctccttacccaccgcccagttatcgacaaaggccatccctaaatcaaccacaaagtatgtctaccgcacttccaatgacgaacatcacctttagcacaatccaaaaacacccgccaagaaatgagnntttgacgcgaaaaaaaaact

SEQ ID NO: 192595 - DNA, 450 bp, Glycine max
agcttcagccattaggtgaagacactttaattattattatattctctatcacactccttcatgcaagagtcctctgggttcgacatacatggacaatgcataggcctgcctaccttgttctgaaattcaactttttattagaagagtaagggaggcaaggatcaaattctagatctctttgtcacagactgtggtaccatgagatgaactaactctcccaatagcttaagttgttaaatggaggaacatgagtggctttattgtattgcatctctaacagaattttttattacttgatgatcgtaatgctttatataattgaagtgtctgctatacagtttttgtgcatctgatctgaatggtaaaattctgaagaatgaagtatgtattctctcctcccccaccaatatatctgcagattcttgattattatgactatgagaaccatat

SEQ ID NO: 192596 - DNA, 410 bp, Glycine max
  unsure (1)..(410): unsure at all n locations
tagaacaatatacttgggcttctcttaattgtctcttggccacgccgaccacgaaaacaaagtactttcggcacctactatatgttgacttgaccaacgctgttattggaatgctgcgacaatctttcaacaccttaatcacacattctgataggttgattgtcatgtgaccatatcttcgtccagaagtatcgtaagtcatgctccatttttcctttgaaatgcgatcaatccatcttgctatggctggactcaattgacgaaatttttctacgtnttgatccagcacatgcttgcaagaagtgtacgctgcatcaaatttgtcaccatcaaaagttgtacgtagatatgaaagcgaaatcaacttaatgtataaaatanaccttacgcaatctcttgaacatctcttt

SEQ ID NO: 192597 - DNA, 268 bp, Glycine max
aagtgtcagaagttctacacctagaccacttcatgaaacactccgttgttactctaactttgctctgaacactctcaatccaccaccacgattctatacccctagggccaaaacctctagattcacccaacgactctttagccactttaataatctcttgggacgtctcgtaccacatatcatttgcacttccttgtgaccgtacacaccatccctcccatatcttctggtggaagattccttgggtctcaccctacaagtgccacca

SEQ ID NO: 192598 - DNA, 259 bp, Glycine max
  unsure (1)..(259): unsure at all n locations
agctngactgaatagttgaataggatggaattattcatctgggcaatcattgaccagtataaagagaagctaaatctagctgctggccatgaacaaagactggatgacaagtatgtaaaagtttcggctctgcaacgaaaagggaaacaagggaaaagaatgatagattcattacacggagaagctatgatgcggatggataggttcactttcactttgaatggaagtcaagagcttccaagattattagccaaagcca

SEQ ID NO: 192599 - DNA, 459 bp, Glycine max
  unsure (1)..(459): unsure at all n locations
cttgcttcacctgagagagagagagagagagagagagattatatcttctncaatgggtcaacggacaaacatgaaattagaatgatgccatatgaaaagtgagggatgcacttttgaaaacaattatcaagggcaaagccgcataagatcggcagaaagggagaaggaaaatgataaaacttgaaatttattgaaattgaaagaagtgcttacaaagttgtcctaaatagagcacctctcttctcagactcctgaanatggctaaatgaaagggtgcctcacaacatggtcgaggactccttttatagccaaaaacattactgtttgctacagtaccggtaacttgaccgaaactattataataattactacaataccggtgaaataaccggaataatcatgaaacggttatgtaaccgctaaaacacattacgcacttaatcatcttctaatgatata

SEQ ID NO: 192600 - DNA, 327 bp, Glycine max
  unsure (1)..(327): unsure at all n locations
taagcttgagaatatgagaactcttatatgatactatgagagcgagagaatggacgttttgtatggtaatatgttatttgagaacgcggacttttttgcaattgactaatatgtcctttgcaaaagatttttatcttaatatntttcatttttgggggttgttgattattgcaagaatctttttaggagagaagaggtcagaggagtggggcacataaaaggaaccgagtcttcaacgcggttggcgtgtgaagtttgaaggaagatgaatagcgcgcggcttctcagatgccaccttctcagaaaacacgtgaatgataaatgaga

SEQ ID NO: 192601 - DNA, 387 bp, Glycine max
  unsure (1)..(387): unsure at all n locations
tgtacttgttntatttaaattcctaggatcatgagcaactaggtgtgtcctactatgacttgagaaacaaaagtgatcaaataacaagcagagatttaaaaggtactaggttgcctcctagtagcgcttctttaacgtcttgagctggacgcatgatggcttgtcggtcacggacctattactttccttacctttgactttggacttggttgcctattggtcggccatgggtcgtaagcaacgctctaacctctttgtggatgagctgaggtgaactctataagtgatggcggtgcgtctgttgcccgctgttggccatccccaggctgctgcggttgttcgccctacgcctgcctggggacgcagtacttcttgatgaaagctcga

SEQ ID NO: 192602 - DNA, 434 bp, Glycine max
  unsure (1)..(434): unsure at all n locations
agcttcatgaaggatgttagattcttctatctttttgctataggggattatgatttcttttgaattatattgaccatctcaaattttggaggcttaaatatccccgcaataaagttgcttgaattctaagagtgctaaaaaaaatagaattaattaagtatttagcttctaatctttctaaaatttaatttttaattgttttaaaaaaattaatcggtcaagctattttaactntttcaaaaattaatttttagttccaacaaaagtttgatggtgaaggttcctattatttttcataaaaanaattaatctctaaattttttaagaactcattattgtagatcccagaatctcattaaataatattttggttagggactaacatctaaaatttatagaagtttagagactctaactgataaacacanatttag

SEQ ID NO: 192603 - DNA, 443 bp, Glycine max
  unsure (1)..(443): unsure at all n locations
tgcgtgcccctagnttatactagatattgttctttgcttttttcattattctgctcttaaatgtgtttttgctttattttttgaccattttgtttcttcatcaattctccattgttgaagtctattcgagttttagaagaataaaaatcatgacacgttggcatgaactagactacacaattagggggtgcgggctacacattctacattattcccttggcatgatgatttgaaaatcaaatacagatgtcgacggcctgaaagtagggtagggtcattgataaaggatctttgtttcataattcaatataaatggttttgataaaattaattttgaattattgaaaatgattgatatgcgtgtttaaatcaatatcngtaacaaattntgtattgatatgcatgttatactgagagcaactgatttttattagttatcaaat

SEQ ID NO: 192604 - DNA, 473 bp, Glycine max
  unsure (1)..(473): unsure at all n locations
ctcgacccggatcttaagtcaccgcggctgcagcttagtgactgggacccaaatttatattgagtgttngcatggatatgttctacgattggttntgcatgaatttctaattgtcataacatatgattcatgggagtgatatgggaattctttctttctaagccattggccaaacagctgtcccaatatacattactttttccattttgcaagccctttgagccagacacttgatttatatcagaacactaacctaggatgaaagtttcctaccttaccttaggataggagagcaggggtgttttcaaaggagatttccatcatttttgtaagaaataaaggaagacaagaaataaaaaaatcataaaaaaaaaggggaaagaaaaaaattacaaaatggaaaggagcaataaaggtaaatagaaaagaanaacaagttctttggaataaacaagtatgtgaaccatgtactg

SEQ ID NO: 192605 - DNA, 465 bp, Glycine max
tactcagcttagagcctaacttgagcttcatgcaggaaacatgtttatagctaggaatccaaaatttggctttaggattagaaaagcattaaaatagggacttgtttgtaagaatttgggctgccccacgattggcattttgcacctaagtaacatgggagatgtttttcaagggtgtgtagatatatgtgtaaatatatatggcataaaaatgtgttgcaaagtgtgtgaatatatggcataaaaataccttgcaaagtgaatgaatagtaaataatgcatttcaaaatatgtatatttgtggataagtagcataagaagtctttcaaaaatgtacccgtgccaaagatggcacgagaatgcttcccatatgaatatatgatgtggaattgcccctcaagtgtagattagatggcatgaaagtcccttttgagtgcaaaagtgtgtgcataatgtaattagctt

SEQ ID NO: 192606 - DNA, 382 bp, Glycine max
  unsure (1)..(382): unsure at all n locations
agcttttaagaagcacttgaaatgccttaaattccttgctatgtatatcctcaatagccttttgtgctacctcttttggtttaaaagccacaaaggcataacccttgtggtctctagtggccctgtctttcactaatcacacctgaaaattaaaaacacatatttttttttaacaataatccctatttcccccacctacagaaaaggcgtgtttataacatgattagaacaattcatcaaggctttgacctcaagaatatcacccataggtattaccctgactcggggccaaagaaaaaaagaaaattgccacaagagcttaaaaaatctagcactatcaaataatcactcgaaacttattccangatcagtattgtgaatg

SEQ ID NO: 192607 - DNA, 428 bp, Glycine max
  unsure (1)..(428): unsure at all n locations
ttacagcagattntagtaatgacccactaacctagaattaaaataacttaatgccattaacctatggaattaaaaaaaacttaatggctgagtgtaactgaaattgtggcaaccaaaagtcacccccaacagccaacaagtcagccaccatttggtctcccaaaaggctgatgcctaggttgccaattgggcccttattacaacttgaactaaacctaactaaagcctttttaattgattaacccaaaacatatttttggtcagccaactttacaaggattgggccattatttagacaaactaaacactctaaaaattgagacaaagtggtgtcatttagtccttcttcatttgggccatgatacaactcacaaccttggaacttttctcttgaaacttgggcttgtattcaatagtatggacaacac

SEQ ID NO: 192608 - DNA, 435 bp, Glycine max
ctagccaccaggaagcgtcaaagatgtatactttttgggtgggccacactaggatggccttgatgtctcacggtccactaggaccccaattttaccaacttccaaccctaatataactatattatctacacatatgagtcacttctctatatttgcatagagggcgttcttcctacagactgagataacttgtctgagatgatctaggtgtcatttaggcttctactgacactaaaatttctttaatataacaactactaatatacctatgagatctcttaacacaagatgcataagccatataaaggtgcttggtgcattatcgagcccaaaatgcatcacaagccatacttacagaacaaacttggctgtgatagcgggcatcactcataaccctttatatcctgattcggggaacccactcttacatcatat

SEQ ID NO: 192609 - DNA, 373 bp, Glycine max
acggtcgactgccacataataaactatatgttatcacacctatactccacacatcaacctctgtgccataagatctatggacaactgcaagggccacattacatgcactttcaacattatcattaagcctatcatctgctagacgtgagtccagaggtataacattgtcaactcatgagaagaggaacttctaccactaccagttcgacttgtaacgaaacctgcttgacaaactgttaatggtggcggtagaatatcttgaacctgaatatatagcattcgttctctgacaaccaagggttatattaataaatcttttgaaagaaagtcattgaggaattcaactctgtagccataacaataacatcctttt

SEQ ID NO: 192610 - DNA, 463 bp, Glycine max
  unsure (1)..(463): unsure at all n locations
agctatgncactgtataaattngacaatttctatctgcagggaatatttatattctataataattctctgtatattctctntggtttctcctcttttttactggtttgtgagatattaacgtgtttttttaatttatgcctgcaaacacactgatttgtaaactttaaaaaaatataatttatgcaaaataaaaaaattaactaattaaaatcaaatttcatactcagtcccccttctgcgggagtctggcccgtcccggaaaanaacccatatacatgagatattcaggacatcatatgcctgcaaaaaaccacatgattataaacttataattaaagttttgatttgtagtttgtatttttacccatatattgtgatattatcataacctgttaaaacgcatgttacctgctaaagaanaaaaattagatgatgatcgatcttgaatcaccacttaatcat

SEQ ID NO: 192611 - DNA, 468 bp, Glycine max
cttctccccaatttcttaagagggggttattgaattgatataaggtcacccttttagcacttctctctctttcgaatttgcttagaaaaattgtttccgcgaagaaaatccaagccgaggcgcttccgtaacgttaccgtgaagaatttcgcgaaggttttcgaccgttctttgacggtcttcattcgttcttcatcgttcttcattcatcaacgggtaagtacctcaaaccaagcttttcaattcattctatgtacccgcggtggtccacacttggtttcatgtatttttattctcgtttcatctcacttttatacccacttttgacgtgcttaagccattttatttaagtcattttctcgcttaatctaaaaataaaataaatttccaccgatcgtttgaattatattatccgctaactttgttgaaatgatttcgaccgatcggtcgtgcccaaccacgttggaa

SEQ ID NO: 192612 - DNA, 429 bp, Glycine max
agcttccttaagaagattcctattgaagctagattctagcaacacacacctctctaatagctaagctcacctccttgagatgagaagctagagcttatctacacaccccctattatagctaagctcacccccatgacaaaatacatgaaaatacaataaaaagtccctactacacagaatactcaaaatgccctataatacaaggctataaccctatactactagaatggccaaaatacaaggtgttagacaagtggcctcagatatcttaagaagggggggttgaattaagatattccaaactatttcctctaattaaaattctatttcactttttactctagttatgaattcccttatagcaatcctttttaatataattcaatgaaacaatctgatatgaatataagctctaataaataaggagat

SEQ ID NO: 192613 - DNA, 468 bp, Glycine max
  unsure (1)..(468): unsure at all n locations
agctngacaggttcaggtgctggtgctgctactattggaggcacttgaatttggttgccagacctcaaggtgatggcactcacattntttggattctacaaagtttgtgaaggcaatttgtcagaattttgggactgagcttggttcaactgagtagccatctgccctatctgatttgtcagactctgaatggaggctcttgtctcttgctgaaattgcatattctggatggtcatttgcctcactaactcttctaatgaaggttgaggaggagcctcagttgcttgttgtctttgttgtgactgttgctatattggaggaggaacatatggcttgcttggaccagcagcattctggaagggagggacaggctgttgttgttgtggaggacttgcccatctcagaattggatgattcctccaacccggattgtatctgttgcttgaaggtcataattatnntctgtgt

SEQ ID NO: 192614 - DNA, 420 bp, Glycine max
  unsure (1)..(420): unsure at all n locations
tgcgacatatctccaggtaccactctgtggtcaacgaataaaagtaggaagactgactcttccacactttctcacttcaagcttgtaggattatggggtacccctcatatgtggtactaggtggcgaccgggtgatgttacaagtcgactctccacatccacaaatcacacataaacccaccatcttcagttgcccaccttcaactgagctcacgtactcccacgtagcccttatcctcgttcctctcaagactgggtccccatcaatctctccaagcttccacaacatccaagcaattcaacatacaaacatcataaactatccataaccaagagaacagggcagaggcagaaaactctgcccaaaacacaaccaataccacggctttccttactcanataccccagtaacattctctt

SEQ ID NO: 192615 - DNA, 425 bp, Glycine max
  unsure (1)..(425): unsure at all n locations
ttatattgattaatangtgatatagctcaattggcaccccagtatttgagattggggtgcaattatgttgaaagttgaatcatcatccaggccacctgtccccttcacctagacaggtcccttcacctccaaatatcaaattattacatgatactaattgaggatttacgttaggaaactttaaatgtgaatgttttattatttatattaaatctattctcatggcttccatttcaaaatttatgcatgtggtttgcctgcttcagtnggtacgtgatatgcttgctgtcttcaggatatatttatggtattaggacantttagtgattatttaaatgtnaaagcaggtggtagaccctgtttntgcggcatatcatttgcaatccaagctaaaaagtaaatcacaatcattgaatgatacagcg

SEQ ID NO: 192616 - DNA, 450 bp, Glycine max
  unsure (1)..(450): unsure at all n locations
agcttatctggttgggctgatgatgtangcttttctgcaggagtacgcaagtatggttgaggttgatcctcagtaacatcaaatgtttgtgagtctaacaaattggtggaaaatggtgcagaaagaagttgagtaaaagaagatgtgtttggttcatataaattttgttgtgcatgggttaaagaaaaagtgttttggattgcattaaatgtatgtgaataatgggataaggataatattgaagttcatgagatactgtttgagggtttgtggtgggaagtgtatgtagctggatgttngcatacaattcaatgcatgaaagaatcttatgttggaaaacaaaaaanaaaaatcatacctctgacatctttgtcgttaacaagttgtactattgtaaacttaagcatttcgcaccccactacttgtagtatcagaatgaatatccatact

SEQ ID NO: 192617 - DNA, 385 bp, Glycine max
  unsure (1)..(385): unsure at all n locations
agccttgtttggatcttcaatggagaatgaatatgaagagaatggccacgtgagggagagagagagttgtctgaaaagtgtggggctgagtgaacagagagagagagttgctttttgattttaaaaaggctttctcctcatttcttattattttattatatactatgccacatgtctccattngagtggagcaaaaagggcccactttcccttttgattgtgacccatactcagccacaaaagtgagaaaaatctgaccttcgaaacgctaaaatcccgcctcggtttgcgtgctgattctctggttccagtttctcgcgtttctctgcgtccgtcggggccagtttttgaaagtaagcaatatatatatcaaaacgctcagaat

SEQ ID NO: 192618 - DNA, 414 bp, Glycine max
  unsure (1)..(414): unsure at all n locations
ttcttttaatatggtgcaccagtattnagcatttgcttgtggggtcgtagcttgaccataaccaaatccccaatcttaaaattcacctctcttgtatgattgtcagcaaattgcttcatacgtttttgtgccttcataagtttctttttcaaactggcgaacacgacctccctgttagtcaaaaaatcatcaactacttcattattgtatgtaccaacaagatattgtggaaactaggaggtttctgtcaaaggaatttcaaaagagaacacccatgaaacctgatgtgttgaagacactcacctacatagaatcttcccagaagaggttatatgccaatgacccaatatgttatacacatcacactcatcgtcataaatggaatattctaactcacctactggtccctcattt

SEQ ID NO: 192619 - DNA, 437 bp, Glycine max
  unsure (1)..(437): unsure at all n locations
atgagctctaccttagtnntgtgctcttcttagtaagntcttaatcagtgcggtggcattgtccgaaggttcttatcaaattattggaataattttgtccacttggctaatcatataaaagtatcaataagaattgtaatgtggggtttcattttgttgtggcagttgattgtgctttacgtggttttcaagcttgacgagagttacancgccgagcaaaatttccatccgtgccggtgatggttttcacaacttgaaggtaaatttttattttattgcgttgtgtttgattgggatgattatgcttaattatttggtgttgactttgggaacatttttaggagattaagaccgtggaactcgtgaagccaactgggtgggtngatctatccttgtctggagctgatcctaggtaagtatagtgttctttctgtatc

SEQ ID NO: 192620 - DNA, 461 bp, Glycine max
cacagcacgagctgcactgataaacaaatactaaagctttagaagcatttttgtcatgagcaaccaaaacaatggctacataaataaaagctcataccaaattgtcttagaatttgggcttatgacctaacttaatcccacaaaaccagcttgattgatgtggaactaaacaccatgcaattaacacagtccccaaagaggccgcaactatagtaggttatgggtgaccgcaattaaggtgaatttccaacattttctgaaaacagactctttaatggatttgacactcaatgtactactgccttgatccttaccaccaaattaaattaaccacatagtcatcatttaggttaagattttaaaatcatatcaaacaggaaacttatttataaaattccacaatgaagcttgtcttacacaataaaaaggaattattaatacacgattcattgtagaatatg

SEQ ID NO: 192621 - DNA, 487 bp, Glycine max
  unsure (1)..(487): unsure at all n locations
agctngaatggagcttacatcactgccctccgtttttttctcgaaaaggtctctcgcatgggccaaggggtgtgtcttccattgaaggaaaacacgtggagtcaccaccaacgtttattcgaggaaaacgtcagaaaaaccaaaaatgataaaggtcgaaggtttgcatattttgaaaatgaaggtttgggaagttgttacacacggngaaggtattagcaccccacgcgcccttcataagggacaacaacctctaatcaagtgtgcaaatcatgatttcaatattatttatttccctacctctaatcaagtgtgcaaatcatgatttcaatattatttatttcccttttaatctttatttccctttttatatatntttaattttttggcccttttatgtcttnttttttactttttagggtcgacaagggtgtttccctcgctcctatgtattcctcaattgtgatgagaaaatcatacctacgta

SEQ ID NO: 192622 - DNA, 484 bp, Glycine max
  unsure (1)..(484): unsure at all n locations
atgcacagctttagtgggatatgactaaatattgcactcttctntntatttntagtgttacttgttcaattanngtttagggttatttgataatttacgattcatgggttacttgacaaattaaaagctgtttattccatgtcagttttgctggtgagacatttagttttttagagacgtgccaattgcagagtattgtaaaattggactgtgattaatgtctatgacataatttaggggaaaaatgacagaacatgagaacttaagtattgttgcaaggattcaaatcataatttcttcgattttgtactcgtattttgaggtagttgtccaaggaaatgatgcaccataaattcttttggattctctaacattcaaactatggaaaaagtgtgtcatgaatatcaataatttattggactaaattttataaaaatgcaaaacatgggcacttgcttattcgcaaagcgtctaaatcattgtt

SEQ ID NO: 192623 - DNA, 471 bp, Glycine max
  unsure (1)..(471): unsure at all n locations
agcttcaacatcagaccactttctggtgctgtgtctacttcacatggacttgatggggcctatgcaagttgaaagccttggaggaaagaggtatgcctatgttgttgtggatgatttctccagatttacctgngtcaactttatcagagagaaatcagacacctttgaagtattcaaggagttgagtctaagacttcaaagagaaaaagactgtgtcatcaagagaatcaggagtgaccatggcagagagtttganaacagcaagtttactgaattctgcacatccgaaggcatcactcatgagttctctgcaaccattacaccacaacaaaatggcatagttgagaggaaaaacaggactttgcaagaagctgctagggtcatgcttcatgccaaagaacttccctataatctctgggctgaagccatgaacacagcatgctacatccacaacagagtcacacttagaag

SEQ ID NO: 192624 - DNA, 492 bp, Glycine max
  unsure (1)..(492): unsure at all n locations
gatccttaagtcacctgggctgcagcttaagagatatccgctcgtnacatcattggtgatatctcanaaggggtaacaactagacattctcttaaagacttatgcaataatatggcttttgtatctatgaatgaacctaanaatataaaagaagccataatagatgataattggatcattgccatgcaagaagaattgaaccaatttgaaagaaacaatgtgtggaaattagtagaaaaacctgaaaattatcctgtcataggaacaaaatgggtttttagaaataaattagatgaacatggtataattattagaaataaagccaggttagtagcaaaagggtataatcaagaagaaggaatagactatgaagaaacatatgctcctgttgcaagattagaagccattanaatgctcttggcatatgcatccataatggattntaaactttatcaaatgggtgttaagagtgcttttctaaatggcttaatt

SEQ ID NO: 192625 - DNA, 458 bp, Glycine max
  unsure (1)..(458): unsure at all n locations
agcttgtaatacaactcacaattttttttaattttcaagcaaatcaagcatacacattttctgttgttgttctggacgtgtantttgatgttaatctttatcacattttcttgctcatttatttttcggttttgttcattcttttttcattgttttcatctagatgtctattttatccagntaatatttcatctcaaaactcagagtattcaagccatggtggagttaagaacacagtgtgccaaaactgacaacaaccagaatttcagcctagaaataaagagtagtgtttatgttgtttaaggcttggatagttacaatttgcgtttgcttatgctcaatngtcttgaataacacaattcaagagagcttaagacttattttgatttacaaatctagccacaactcagcaccacaactcaatttcttcatangcatcatataggaaacttaaaaaa

SEQ ID NO: 192626 - DNA, 418 bp, Glycine max
  unsure (1)..(418): unsure at all n locations
catgcaagcttggatatattatgaataataggatatctttgcagataactnactttgatttcttatttgtagactttaatagatggagacggcaaagttatttatgtagcactagaagaatatgggcattgcattcttgcagacatnaaaatggctaggaggacctaagaacatttgtgaatggaaagtaatgtgtttgtgggctgggtttaaccagtctagtccaatcctaatatcttggacatgtacatggaccatgttgagtatgataaaacgtacatagaggacatatcttatgaaagaaaacatcttatatgagagtgagagaattaaatttggaccgtataaccaaacatggagggttaaaattaacgttaaaagtccatgaactttaagtggtacatgacattacatttga

SEQ ID NO: 192627 - DNA, 428 bp, Glycine max
  unsure (1)..(428): unsure at all n locations
agctntaaatacactataaatacttactacattgcccacccactggattaggccagcccgaccactgattggagtcacagaataatagcgaatgctaagagaattgctacatgcagaagaagaagaatgcagaaaaccatttatagcctgcagtaattgcataattctagcatcaaggcgcaaatcttctcgtcctttaaggagatatgtgtacttctgaccatctgaaccaagtatacctagtttcttaggctttgtctttgttgataagatagtgacttgttcatgaaaagaagcaatagtgacaaccccttggagatcagttgctttgccagagtcaagtactttcatttgtttctcaagacctggcattggaacatctgaagatgatagcacagctaaatgaggtgaacttctcgcaaggaaac

SEQ ID NO: 192628 - DNA, 421 bp, Glycine max
  unsure (1)..(421): unsure at all n locations
agcttggcttcaattatttctgngtcgcaaaggctatggaanaaggaagaggaaaaagaataagatgatgattgtgatgagataagtgttccaaggccttacctttctgaagcatgggaggttcacgaatgtgataggagaaaaaaagagaaccctttggtgaattggaaaatgcctgctatcaacaatgaaactgacatgaaagaaagtcttagatggtgggctcacactgttgcttccactgtcagatgatgatgaacttcttcataatccaaaaactctcttctttttctttcgtttcatatatacatattccttgctctttcttcaattgttctatgtatttattcccttttctaaaactttctctggaatctggcattccacacaatttggtacatgttattttagattaaaagag

SEQ ID NO: 192629 - DNA, 451 bp, Glycine max
  unsure (1)..(451): unsure at all n locations
agcttgcaatgaaagatattgnctatttaggtttctggtgtcaatctagacacacaaaccaaggccataatggaaaataggtaaggtagaaatgatcatagtcattggcagaaatattgacttctgtaactgctactaagctngcaatggaagacattgtatatatatattgatgaattttgcattcactaacacaaatttgtttaaattgtacgctcaaatctattagcttatgtgttcaacttgaaatatgaaatttctattttacatcttttatttggcattatgtaacctttgtcagcacatcacaaattnttctttgaattctcttggccatagattagaacctgtttatatagttctactctgttcgtagtaaaatcaagaaatatagtgcgtaagccatcaatgaagttaaaaattgtcactgaaatatcgaacacatgatttt

SEQ ID NO: 192630 - DNA, 438 bp, Glycine max
  unsure (1)..(438): unsure at all n locations
cttaccagngagacactactcttaaaacaaaaatggcatacaacctcctcccataaatacaaacatcaatgtaaatttagagcaagcttatgcgcatatttccttacgaacgttcacttgcacaagacatcctattaactatgaaaaatgcacccatatacaatcaaggtagcttcatcacctagattatttacatgtactcccaaggtgtatttgttatttacatcacacacgcctccttggctgaatttacacacatgcatactcaaagcattttggggtaccaaaaaatgcacatgcgctcaccttggtatttctaatacctatacatatacaaactntacgatgaatcttgactatctacacaataaggtgctacattccatggcctttttcaaagttttgctacctaaagccgcatgcannatcaagcatatt

SEQ ID NO: 192631 - DNA, 416 bp, Glycine max
  unsure (1)..(416): unsure at all n locations
taccattttcttacacaanaatttgtgtctcttccattggtgatgatcatggagggctaaacattcaattaatccaaggatcctctccaagcaaggctgaattgatgtccatggacaactaaacaatcaatcaatccaaggatccactccatgcaaggctgaatttgagttctggtttagtatctctaacctttgtgaatgctcatctttctcttcaatcctatttgcaattttcatgaatatgattatgcttacgattgaaaatggattangttatggattcatttcctaatgtcaaaaattattcacagattgtttggatgattttccaaccaaatttgcgatctcaaacaattcagagattgatttgattgaactctctctaatgcatttgattgaactttcacactgaacat

SEQ ID NO: 192632 - DNA, 462 bp, Glycine max
  unsure (1)..(462): unsure at all n locations
agctntgcaagagagccagcatagccaaagctctgtgttcttttggttggcgaaaaatgcatcctgatttcttgcagaaaaacagttntgagatacatgatggtatatttgacagtctgaaggataatcagggaatcttaccttatgtgcacgagctttctgatatttctgtttatggcaatatgctaaaaggtcttgattcttctcagtattggtagtttgtgccaccaacattacctaagtgtaagcgtcttaaagagtcaacaataccatttatcgattcctgtgatatgaaaaaatatgatttatattcatttgatcaaattcgagacaataattctaataagatngcacaatcatttggaatgcaagcaccccttgatcctggtccctcctcgcacagctcaatgtgttacagccattcactttcannatggcattcctctacttctaagccttatg

SEQ ID NO: 192633 - DNA, 407 bp, Glycine max
  unsure (1)..(407): unsure at all n locations
gttataattgtactgattcatangtatgaaggaaatccttaatctggtttacttttggatttagtggaagaatattaattgttggctctttgtaatcataccaaaattcaagtaacagtaaagtaatatacaatggacaaatagaataaattaaacttctagagacatctgattgtaattntatattgtaggttaagatgttccacattggctaggaatgggtagaatactcattctgagacttggcaaaccctccttcattgagcntaactttgtggttgagttaggctcaatccatttctaataataggaaataccatctaatctatntccattatantttgataatttttacctttgttcttttctgtngatggagttgtgatatctttatgacatgctagaat

SEQ ID NO: 192634 - DNA, 501 bp, Glycine max
  unsure (1)..(501): unsure at all n locations
aacctgaggcatgcaagcctttactctggccgagaataacaangaatctcataatatgtagtctaaagnnataaaaaanncacaatacctgcttcaggtccaatctctgatccaaaaaaccgntcaggaagaagccatgtcaatccctgtccacattttcaacccctcaataagataactattcacaaacactctacaacanaatatgcttcaacacaatgcctccatagacttgaacaaccagaatacaacaatcatagcaaaacaggctgtttaatttattttctaacatcactttcactaaatantattttactaacagccacaaaaattccaaatatttatattttacaaatgacacaacgaaatcatgatcatgagtgaaataagtaaaacaaaatagcacctaatgcaacaactatagccaacttataaacccacgaaattcttatcagaatcaccacttttcccagaatattgtgtgctcgtataaatgtcaca

SEQ ID NO: 192635 - DNA, 399 bp, Glycine max
  unsure (1)..(399): unsure at all n locations
cacatncaccttatcctaagactaacacacgtatatatgcatggtctgcaaccgtcacacttaactagtaacttttccgatgaagagatttaagttcctacgaaaatttattgtatgatcagataacatatatcaaataatctccatcagtattctcatggtagatgtatgctctaacaaactactactaataatttatctaatatgtcattttatttattatttacagagcaacttatattttgtctacttgggattatcagcaatggtggccttcatgggtaatccaatttcaaacccaattttgctttactttattacgacaaaggtgtgaaacgttctaataacaaagaaaccaacattcagctatggcatctatctaactgtagtaggcattac

SEQ ID NO: 192636 - DNA, 475 bp, Glycine max
  unsure (1)..(475): unsure at all n locations
tgcaagcttgagctctccagctngatcttgcgtgcatantatgcatacacgagccaaagagccatgatcatcagcttgctngcgaatctgctccaaacgaggctngaggggatctgttttcagagcaataatggatctccttattgactcaacaccaccattagaatcctagttcaccaccacaacaacaacagattagctatcttactagcttcatcaaattntgtcccttctcagaagagaacaacaacaacacaatttaaaaaataacaaactttcctctttctagtactgacatttccattgaaaatttcccagactacaaacacaaatcanatcaaaacaaaccctgtntgttatttccacgttaaattagcatgcattaagcatggtttanaagtacatttacgaacatgcacgaagtaattatagcttcatcaaatctccgtactttccaaaaatagaaaatgcaaac

SEQ ID NO: 192637 - DNA, 465 bp, Glycine max
  unsure (1)..(465): unsure at all n locations
agctngntctngannnnnccttatttctttatttagtctttgaacaatatacttggccttcatntaactgtctttgcgcttggcggccacgctcaacaaagtactttcgacacctactgtacgttgatttgaccaatgctgttatgggaatgtttcgacaatccttcaaaaccttattgatacattctgaaaggttggttgtcatgtggccatatcgacgtccttctctatcataagccatcgtccatttttcctttgaaattcgatcaacccatgtggctatggctggactcagttcacgaaatttttgtaaattctgataaaaaatgtgcttgcaaggagtgtaggctgcatanaaatagttatgaataacaatcttaagtatataggacacttaaataaacgtcaccatcaaataggaaatcttacccaattttttcaacatttctttntgtttggcattat

SEQ ID NO: 192638 - DNA, 442 bp, Glycine max
  unsure (1)..(442): unsure at all n locations
agctngaccaagttaggggggcttatacacctttattttgaatnnntataccaaggtcacattgaagttattgttatctacttgcccttcttatccacttgcttgactactaaggctctggtggctgtttcatccccagagaagattttaattcaaactttgtatattgtttcgtacttttactctttacttggtatgaacttcctgctaaattgttcatattcttatttttcatatttatgagccaagctgatcatatttactctgatttcagttgttgtcatttgactcttgtggatgcttttttagtgtagacccttattgacatggacaaaattaactaaatgtttgatcattaattgaacatattgagtggcagaatcagttattgagttgtagaatgtaaattcattttgttattntcatangagttattcttatg

SEQ ID NO: 192639 - DNA, 459 bp, Glycine max
agcttctaaactttatattagaatgaagctctgttaccacttgttagacaaatggcctcagatatcttaagaagggcgggttgaattaagatattccaaattgtttcccctaattaaaaatctatttcactttttactcaagttatgaattcccttaatgacaatcttcttaaatattaattcacatgaaacaatttgaatatgaatataaagcaataataaataaaggagattaagggaagagaaaatgcaaactcagttttatactggttcggccacacccttgtgcctacgtccagtccccaagcaacccgcttgagagttccactatcttgtaaattccttttacaagttctaaacacacaaggacaatccttcctttgtgtttagagatcctttacaacaagagactcatagtctcttaatcccttagagaatgagaagaagaagaagaacaaa

SEQ ID NO: 192640 - DNA, 407 bp, Glycine max
atgttaaaagtgctgatgattatgtatctggtatgtcactaacattgcaaatccaagttagtataaatactttttgtctttcatagacatataaagaaaattccttagtatctatgacttgacagttgaatgtttaatgatgttaattatacttgttctactaacaggaaaaggtgaagaattctggtcgttttggggttcatgctctcagtgaagttgcttcagacttagctccagattatcttgagcgtcatggacttaaatctgttcctaaatctgtggcttatggttatactgcttcaggatatggatttattcaagacatgccttatgcttacattcatgaatttaccagaacttccatggctggaaaaattcgacgattcagaggtggatatacaagtctt

SEQ ID NO: 192641 - DNA, 334 bp, Glycine max
  unsure (1)..(334): unsure at all n locations
ccttaggcacttctctcttctttcgaattgcttaggaaaattgtttccgtgaagaaaatccaagccgaggcgcttcggtaacatttccgtgagtgatttcgcgaaggttttcgaccgttcttcaatgttcttcatcngtcttcagtcttcaaagggtaagtacctcaaaccaagcttttcgattcattctatgtacccgtggtggtccacattttgtttgatgtatttttattctcgtttcatttattntttatacccccttttgacatgcttaagccattttatttaagtcatttctcgcttaacctaaaaataaaataaatttccaccgatc

SEQ ID NO: 192642 - DNA, 467 bp, Glycine max
  unsure (1)..(467): unsure at all n locations
tgattacattctccccctntctcaagcaaatcttatttcttcttgacatcatcaaaatcttcatgatttacattctccccctttttgatgatgacaaccacctgtaggttaggagcaacaacaaagaanaaatatctattcgcatatagtttactcccctttggttntgcaatgattgcttatatgagacagttgaagatttcatatttttcatatgtaaacaaattgtctcataaacaatagataattnttcttactattttatcctttatctttctctctcccctttgtcaacatcaaaaacaaatcatgaatagagaggagaaagatgttaccacttgttgcaatgtattagaatcaagtgataccaaaaggcattaaaacaatccttcaatattaatcaagcaaaaacaagtacaataacacatcaatcaaacacaatcaaatacaatcaatcatcaaatatt

SEQ ID NO: 192643 - DNA, 243 bp, Glycine max
  unsure (1)..(243): unsure at all n locations
ccgatttttgtttttttgacggaaattttattgcactcanttacgcatgagctctgcgtaccatctcgcagagcgatggacatacagatgtgctgaacaggatagtagagcagtatctcagagctttcgttcacaataggccataccgtgggaggaagcttttgccatggattgactggtccataacacattgtggaatgccggttctgggacgactccttatgaggtcacatttgggaagaa

SEQ ID NO: 192644 - DNA, 273 bp, Glycine max
atatataagtcaaatactcataaaaaaggaacccaaagaatatgtcatttgataacactcaaataccgaggcttgaccactagtggaaattattcacttacaagaggcttgaatcagtcctagatatatcaattgcgtaatgcacctacaagtgttatctatctaaaacaaacaaattgctactgtgaaaatacatgcatctaaaagaatacaataattattgtttataaatatagagtaaccttattttagtaactatttacatctttctag

SEQ ID NO: 192645 - DNA, 484 bp, Glycine max
  unsure (1)..(484): unsure at all n locations
agcttaatagtcttctagtaaagaaatcactgttatgcatttataatattaatcagctatatatcacgggtgatattaaataaactgcctagttataaattatttcatgcattgggctgataatagcttgtcattaagatctctatacacaaaacagaggccttcaagttcaatgaagttaactacttcagtacttcatatatgggacgcagtatatataaaatggatacttctttgccaaaaagattaattagtataaatattttaaacattttatatttaaaatggatactttntaattaacaatatatatatactcatttcttcttttaaatgaatactttttaattttatttgattacatttaattaacttgttgtacagattttgaaaccagcttttacaataatagctgatcacgagatgaaatgccttttgttattgattcgtggcacacatagtatcaagtacactttaatagctg

SEQ ID NO: 192646 - DNA, 474 bp, Glycine max
  unsure (1)..(474): unsure at all n locations
agcttcatgatgatgaatcaagtagntttgggttgactaanagcccacaagaatgattcaagaaaagacatcaagaagaatcaagattcaagagaagatgaattcaagattcaagagaagaaatcaagaagcaacaagtcaagacttaacaagggaagtattgaaaaggatttttctaaaaccaaacatagcacaattttgttttacaaaagagttttctcaaatttttctaagttaccagagtatttactctctggtaatcgattaccagtttcctgtaattgattaccaatgataaaatttgatttcaaaaagtttttaactaaatttgcaacgttccaaatgattnttaaatggtgtatttgattacaatatattggtaatcgattacgagtgtatctgaacattgaaattcaaattcaattgtgaagagtcacatcttttcataaaatgcattgtgtaatcgattacatg

SEQ ID NO: 192647 - DNA, 477 bp, Glycine max
  unsure (1)..(477): unsure at all n locations
agcttagtanagctaagcactaacaatctcccttctttgtgcaaatttgtctaaaacatacttagacacttcctgagcaggtacgagcagttatgcaagtgggatcagcaactttcattatcagagtaatcaagcacagcggaaattctgcaagttgcaagtcgtttccaggatgtcaagacatctcacatgacatcagctttcttcttctgctccccctgtctccatgctcttactgcagcatcttctatcagctactagtcttttccaggatgtcaagacatctcacgtgacatcagcgttctgctcccccttactgcagcatcttctatcagcttacatcagtcagcatcagcagcagcagtctccccctcagaatcatgaatcatgcatacatcgtatcatacaactccncctcaaagtcatgaatcatgcatacaccgcatcctactactcanaatcatacatcatgactgt

SEQ ID NO: 192648 - DNA, 439 bp, Glycine max
  unsure (1)..(439): unsure at all n locations
agctngaaattgaacaacggattctctcgagataatcttgtggcataaattttcacacagatgtccgattcggggaaataatatatcgagacgcacgaaattgaacaacggaagctctcgagaaatttgaatggtcataacatttcactcggatgttcgatccggggacataatttatcgagacgctcgaaattgaacaaccgaagctctcgacaaattagaatggtcgtaacttttcacgcgaatgttcgattcggggacataactcatctagacgctcgaaattgaacaacggaagctctcgagaaatttgaatggtcataagttttcacacggatgtccgattcgggaacataatatatcaagacaatcgaaatngaacaacggaagctctcgagataatcgaatggtcataacttttcacacagatgtccgattc

SEQ ID NO: 192649 - DNA, 380 bp, Glycine max
  unsure (1)..(380): unsure at all n locations
agatagagttttaatgcaactacatgttctgcaactcactgcaattgccaatagagttatgtatatggctatggtcttgacatctttttagcattttgattgaataaggaaggcttcctgaaatgcttgtttttgcaaggcctatcatgaccaagttagtgcagcttccaatctcccatgggatctcacccttgagattcttgtttccacctgctcagaagacttggagctttcttaaagagctaatgcttttcggaatttcaccactgaggtggttgtcatagagtgtcaagtgcacatggcttgttagattgccaatgttggaaggaatgttttcttggaggaaagtcngtctaaatatttgatntcatacatgtaaa

SEQ ID NO: 192650 - DNA, 408 bp, Glycine max
  unsure (1)..(408): unsure at all n locations
agcttattccgcgcaatggaggcctctagagaatgattcggntattccttcttttgatgagccatggacacttatccccgatccaagtacaattcgtgcgaaaggtcggccaaaatcaacaaggataaggaatgagatggattggctggaagcatctgagcaccgacaaaaatgtagtagatgtggaagagaatgacacaacagacaccgatgtccattgcaatctgaatgtggaagttcttaaattaattgatttatgtattttatttgtctacttgaatgaaatgaaacctatcgatgataagtttgtttttaaattagttattatcatagttttgtgtgcgccatanacttgatcaattcgttaacattcataagataaatgataataccagtctaacatttaaa

SEQ ID NO: 192651 - DNA, 433 bp, Glycine max
  unsure (1)..(433): unsure at all n locations
agcttgtaatcgattacacacatactgnaatctattaccagaggagaaattcagataatattctcaacagtcacatcttttcgtttggctcttgaatgaccatcaaaggcctatatatatgtgacttgagacacgaatttgttaagagtttttcagaacaacaagtgtttattctctcaaaaagcaaaatcgttttatcctcttaagaattccttggccaattcaattgcaattcattaaggaatcatttgagtgctcagattgtaaaatctatctctttcaagagagattcattcttcttctctttctgattcactaagggattaagagaccgagggtctcttgttgtaaaagaattctaaacacacaggaaggattgtcctcgtgtgtttagaacttgttaaaggaatntaccagatagtggaactctcaa

SEQ ID NO: 192652 - DNA, 456 bp, Glycine max
  unsure (1)..(456): unsure at all n locations
agcttgtgttatgtttttgtgagggtgagcttttctcgtcggtcgngctaggctcaaatatctctctgttttcaaaaattgtggatttaggctaagcccagcttgctgcgctaagcctaatctgcaaaaaaatattttttgagtactcacgctaagcgtgtggctatcgcgcttagcccatgagtgaattttcataaggcgtgctaagcccagccttctgcgctaagctcccagtcctattttcagttctatttttctgtttttgttgagaataatcctgttttaaccctgttgttngatctaattcttttcagatggcttctaggaagagaaaggcccctgcctcagcatcccaggcctctatgattgctctagaatcacatctcaggaggcctgngatcgctattctgatattgtgaatggcaggaagaatcttcctgaaagaaatgtcatgat

SEQ ID NO: 192653 - DNA, 263 bp, Glycine max
  unsure (1)..(263): unsure at all n locations
cttctcagcctgaggccctacgtgaagcgccttatgatgtattatcanggctgctttcttcggcggcaccgtactccgtctctcgaaggacctcgccgagaacaacaagggtgcgagggtgctctctgtctgctacgagataaccgacgtgacgttccgcggaccctcggacacacacctcgactcgctcgagggacaggcactgttcggagatggcgccgcagctgtgatcatctgatcataccccgacccagcagtggagc

SEQ ID NO: 192654 - DNA, 413 bp, Glycine max
gaaaatagaaactacatagattatgtgacacaacatatatcaaaaagttgttgcatcagacactgccattagaatgatagtttgtatcatcaaattcatgagactgatacttgaagcatacaatctagagaaactcttatcataataaagcttggcaaaatccatccatatgatacactcttttagatatcatcaaattcaaaaagactgcaacatatgaagaacatattaagtatcttcaagttttctgtatgagtcacatcctgaggattcatcacaagcttaagtctacttaatgttacaatgtaagatatctaagagacatatgttttgtcacttataaaccacaacttatctccatatcaaaataagacatactttgtaagtcttaatcaaaggacacatcatgacaa

SEQ ID NO: 192655 - DNA, 396 bp, Glycine max
  unsure (1)..(396): unsure at all n locations
cactcanngagntggagaggaaccatgttccttcatgggaagatgcccacgaaatgagtnttcagaccttaccttgcttcaacatactatacaccactaatacatatgtttttattctttttacaggtgttgaggataaaagcccagcgtttcaagaacctcgggatttgaggtcaaatccttttcaagggggagggaatgatgcaatcctaccccgcaagggcattggatagaaaactccaagtagattgtgccagagatgcaagagcacgccctatggttcttatgagccttanggtagatttcgggcccatgggctaagtacgagcccacttatcttttgtaatattagataaggtttcattatttttgggccttgtattagggctccataat

SEQ ID NO: 192656 - DNA, 437 bp, Glycine max
gaagctgcagctgaggaaacttgtgccttagcaacttataactaattgtgtttgaatcacaaatctgcatctgcacctgttgcaagagtctgtggtctatgttctcctgcagatcaccatacagatctctgtccttatgtgcagcaatctggagtcaatgagtaacctgaagcttatgctgtaaacatttacaatagacctcctcagcaccgaaaccaacaacagcagaataactatgatcgtttaagcaacagatacaatccacgttggaggaatcatccaaatctgagttgtgcaagtcctacacaacaacaacagcctgtgcctcctttcaaaatgcttctggttcagcaagccatatgtttctctctcaatgtagcagcagcaacaacatcaacaactaagacaataagcaactgaggcccctcctctacctt

SEQ ID NO: 192657 - DNA, 436 bp, Glycine max
  unsure (1)..(436): unsure at all n locations
agctngagatgaggaagtgttgaatggtgatatttcctgctnttattggtgaccacagagtggtacctggagatatgtcgcgggggtcaggagaccttgtggacgtcaggtggggtgctattgcccaaaaccaagcttgaccaatcccgacccaacccgggcatagtcggtcagtgagaacctgtgatgtacctaagcaggcgagctcctggcagtcaacagataaaaggaacaaagaccacaaagcaaggaggcttgtggtggctggccagctgtgaaacttggttgatatgtgagatatggtctctggtaatcgattaccaaggtgggtaatcgattacaaggcttaataatgaagacaggagactangatggtctctggttatttgataccacggggtgttatcgantaccatgcttgaaaatgaggtcagga

SEQ ID NO: 192658 - DNA, 472 bp, Glycine max
agcttgtcattctttttgagtgactcatgacatctcttgagttacttcaattgttggtctctacaaaatttgtcttttttgaatacacataagaaaaatcattagtaggcataaactcataaagcttatgatttgtgttcaaaaggtttgtcataattaaaatgccaagggttttagactcaacaatctcccccttcttgatgatgacaaacctttaaacaaatctaagtcttttgaggggtttctcaacatatagattataatcaactcccccttaacatatgcatccatttcaacatatgataaatattcattaagcataaagatcatatatgaagacatcttgttcaaacaaagatatgaatgaataaaacttataaatcaataaggcacaaacatatcatatcagatcatatctttcatatccatataatatcatatcatatcttccatatcttttcctttcttcctt

SEQ ID NO: 192659 - DNA, 474 bp, Glycine max
  unsure (1)..(474): unsure at all n locations
agcttcaagacctaatattgtgttgaatgaacttatctntgtcttttcaaccatggttgttctgtcacagaattatgctgtacgatcaattttcaaacaaagactgaaattctatcaggaacaatgttactacagatgggagaaaactttatatgtttgatgtggttgattcatagtaagaaggtctcatatgtgatggtttatggtcagattcttgatttatcaaacgggcaatctgaaacttaaagtgcatattcttaattttgttcttattttatgtgtttgcagaatttatgtgcacgagtattttcatcttaattattcttattcaatgaaatcattcttaaaatattcttaatttaattgagaattatntgtattacttcttttttattcttaattcaattttcaataaacagtactttagaagaagaagaagaattaaataatattaactatatttcttaattaata

SEQ ID NO: 192660 - DNA, 450 bp, Glycine max
  unsure (1)..(450): unsure at all n locations
agcttaaactgtannagcaaatctcanaanattgttgatatgcgcaagatatttattctatcaccactcttatcattctacctaaactaagagagaagataaaatcaatttagatattttcattgatgataataaccaaatgagggatacaatatataacctagtggttgtcaataacacgtcctcatttaactttagaaaatttaaaatagaaatgaataatataaaaaggataatcttaactcatctaatatttaaactacctatttgggtttctttaatctcatcctatncattgtgacagattcacttggagcttaccctcaaggtctttaaaaaaattgagcttgatttgttcttcttttgaatgtttattangagtagaagtagtgtatgataggatggaccttgagggtaaggtccaagtgaacccatcggtagtgataggat

SEQ ID NO: 192661 - DNA, 428 bp, Glycine max
  unsure (1)..(428): unsure at all n locations
agcttctgttaacttatatggcaacaggattgtatatgtcaatagtcctttgctgaaaaaatatttctcaacggtatgtccctcattaatcctcatctgcctgcagctgatggcatttattctactaaattgttttgtgcatttttttctcaacaagaatttttaagtgagtctgacactgttaagtaaatctaaattgaaaagattttgtgaaaaaagcctcaccaacacacaacaaaagtcttatctcactaagtgcagtaagttacacgaattacaccttngttaactaaattttggagatattatttactataagattcatgtgaaaactttctctcccttttcatggactaaaaacaccatgtantttactctcctcactcatatcttgaatggtctttaattctttctatatatccaaatca

SEQ ID NO: 192662 - DNA, 431 bp, Glycine max
  unsure (1)..(431): unsure at all n locations
agcttctgaggaagctcatgaagctgcctctgttaaaatgctacccagccttcgttaacccgtggatcgtctctanaattggtcttcagcttcacaagacacttttacacaatctgaccattgngatctttgagaagttgtctggagtgtgtgcgaagcttccgttcccgagagcatttctcatttgagtgtttcagcctttgctttcgtgtagcttaggaaaaacaccatttcttctcctttctttcttccaaagccatttctaatgtcccaagcactttctccatcactcacaagcaccattagccaccacaaaccgtcgttgttctccgttaagaccccacaccgagagaaacccttcaaccgaagcagaatctttcaacttgccttgcagtttcggtagagaacgaaaccctaatctgaccttttca

SEQ ID NO: 192663 - DNA, 459 bp, Glycine max
  unsure (1)..(459): unsure at all n locations
agctnggaggggtttatggngacccagtgtttatatgaacgaggagaanggttatgtacgcttgcgtgagctaaatttaaaggtgggcaactggggatggtgtgcttatgcctgggcttgtggaagtgggatatttgttttgcgccatcgcccgatcgccacctagtaccacatatgacgggtgccccataatccaataagctcggtgtgagaaagcatggaagagtcagccagtgagaacctgtgacgtacctaagcaggcgagctcctggcaatcaaccaataaaagaacaaaagtccacgaagcagggaggcttgtgtggcggctggccagctatctatcttgggttgttatctgaaaaattccctctggtaatcgattaccattcgtgtgtaatcgatcacaggttttaaaaatcgaaacaggatgttcagtagcttctggtaatcgattaccaa

SEQ ID NO: 192664 - DNA, 453 bp, Glycine max
  unsure (1)..(453): unsure at all n locations
gcttgtcttgatntttagaagttctttaactaccttagatatatatactcngcctttatttaactgcctttgggcttggcgaccacgatcaacaaagtactttcgacacctactatatgtggatttcaccatagctgttatcggtgataggttgcgacaatccttcaataccttattaacacattctgagaggttggtcgtcttgtgaccatatctacgtccctttttatcataagtcatgctccatttttcctttgaaatgcgatcaatccatgtacatatggttggactcaactgacaaaacttttctaaattatgatcaaatgtatgtttgcaaggagtgtatcctgcatcagaaggttttgttagcaacaacaatttgaagtatatgtcaaacatcaattaacatcatattataaattagatcttacccaatttcttcaacatttcttt

SEQ ID NO: 192665 - DNA, 477 bp, Glycine max
  unsure (1)..(477): unsure at all n locations
gatctatcaccactgcagccaccattatctttagttttctanttattaatattacgagtactntgctttctagccgtgtatttggctatattatgacatttggatgatttagtatttctttatttgcattgtttgaatgaacaattatgaattatattataagactatgtggtttttatatatttgatctattcatgtttcttgcttcatggattggtttatattcttcaatgtatgtcttgtgaatgatgaatagtataggtttgtcttatacttgttacacactttggctttttgttgatgccaaagggggagagaaataaggaataaatcaagaactcacacaagtaattaacttaatttcaaatgaagcatatactcaaaaacaaaaggggagaatggaaatttatgtgagtgatcgactanganaaagtgtgtgtgtgtgtgtgtgtttcttgatttcagagttatcatcat

SEQ ID NO: 192666 - DNA, 449 bp, Glycine max
  unsure (1)..(449): unsure at all n locations
gtatcttcccaaaatattatatgatgttattggcagaaaatttttagtgccatanatgatgttagaacaataaattgaggctaanaaacaaataagcctacgttgaataaagtggatatttctaggataaatgctctcttataaccttatattttgaaattccagaaaaattataatttctttgattagccatgccaccttacaagccaataaaagtcgttagtgatccaccaagtgtaagcaggataactttaactgagatgaagtgcaaaactggaaatattaattacaagtcatggaattttaaacattcatccaagacacttgtgcataaagagaaacactaaagccttatgaggaaaagtgaggcaagccgacctaatttctgttactgaccaattctatctcaatgtttgtttatgcttccattgcaagatcatggcaaatgc

SEQ ID NO: 192667 - DNA, 478 bp, Glycine max
  unsure (1)..(478): unsure at all n locations
tgcaagctgggcctaactaaccgctaacncagcagatatctaacagatatatctataccagaactgtataacactatcatctactgatcatactaggtgaatcnttcaccaggcactaaacattaagacacttttctctggttagtagctatcctttctataacattaggatgaaaacagtgtataattgcagcttaagcaagtctgccaagtgaatcaggaatttattcaacagaaaagacaagaaaacatgagacaccacacctacactacaatatcaaaacatgcccaaaccaaacccctattatactacaagtagtcatctaaaattgatggcaaatatgtcaaatatggcctgcagcacaaaggaatatacatattacgtgattatactaattagtaacataaacctttcagcacttatgttggtcaacagcgtactagttcacctccatagtaccattgcacccacacatac

SEQ ID NO: 192668 - DNA, 468 bp, Glycine max
  unsure (1)..(468): unsure at all n locations
gtcacctgcggcatgcaagctntgagggtgtgcagcccaccatctgttcatagtagagttctctttatgtgtctaccatcacgattatcgtctcccttttcattattgggggtaccacctgggccgccagatccctccaccttttgggcgtgttctttgaaagatccgtccccctttttgcacatgttctgtagttgcatcctatccgaaaccatatcaaaattgtactgatactgcctaacacaggcaaccattatgtccttccaagaatggactcgtgaaggttccaagttagtgtaccaggtaacagctaccccagtaagactttcttggaaggaatgtatcaataattcctcatcttttgcgtattcccccatcttctgacaatacatcgttagatggttcttgagacaagtagtccccttgtacttgtcaaagtccagcaccttgaacttgggaatgaccatg

SEQ ID NO: 192669 - DNA, 410 bp, Glycine max
aagaaattaatcgcttttcatcctagcatacttattgatgacagaatgtgctaattgatgaaataatagcttattataataagcttgcttattgtgaaaatattgactaattgaggatagcacaactaattaatgaatgaagattatttattgaaatctagttaatggatgacatctgtgctttttaatacaataagactaattaatgaaagttaatgcgggctaagtgcaagaagcccactattcttctcctttataagatgaagataaaagatggctataaaacacacagaaattctaactaatacaattcgttttatgaggcaattactaggagaaggagaagattcatcagagtcttcattccctctatctctttctatatatcttccttcaattaatatttcctc

SEQ ID NO: 192670 - DNA, 474 bp, Glycine max
  unsure (1)..(474): unsure at all n locations
agcttgtcggccgcgaatgactattggtgcatattacgatgttagnctctactggctatcaggctntttgtcttacagacagcaaaaaagaatgtttatacggataaccactcgggtatctccgcccgtcagcgtgtctcanatgtcagtatgacagatcttgtgagcgcgaaagatgacgtaaatctccgcgtgtcaacgggcttgtcggccgcgattgacgaaaggcgcagaagacgatgtcagtcttcgcatgctatcaggcatttcgtcttacagacagcaaaaaagaatgtttatacggataaccactcgggtatctccgcccgtcagcgtgtctcanatgtcagtatgacagatcttgtgagcgcggaagatgacgtanatctccacgtgtgaacgggcttgtcggccgcgattgacgaagggcgcagaagacgatgtcagtcttcgcatgctatcaggcatttcgtc

SEQ ID NO: 192671 - DNA, 469 bp, Glycine max
  unsure (1)..(469): unsure at all n locations
agctngatcaaaacaattatctaatcattccattctattcaaatcatacaattgctcattcaaatcattctcaaacactcatttcatacaaaataatccactgtatatcattntcaaccaattcactgttgaaacatgctttntgtacaagcaaacaactcaaagtagtgaaatttaaagaactgaaacatagaactgaaatttaaatgactaaacataaatcataaaataactgaaataaactaaaatgttcaaaatgcacaaatttaaatgtcctactcctgtggttgctcctgtgcatgctcattaagatccaacacctgagcagctagtgaatcgtgagagataggctgctctaactcagatgctagtgcagatggtatggcatcattaggtatgggtgctggggatggctttgggatctggtctgtggaagtctcctcctcttgagccatgtatacacctacat

SEQ ID NO: 192672 - DNA, 443 bp, Glycine max
  unsure (1)..(443): unsure at all n locations
agcttctattntcaattaggagggtctcgattttttctagactcaatcttacatccgagtcaaaagttattgtgcgttgacttttcttagaggttccgttttcaatttcgagcgtctcgatatattacagggctcaatcggacatccgagttaaaagttattgtcgtttgatttttctcagaacttccgttttcaattacgagcgtctcgatatccttcgggactcaatccgacatccgtgtcagaagttcttgtcgattgaatttactcagagtttctgttttcaattacgagcgtctcgatatattacgagactcaatcgaacattcaagtcaaaagttattgtcgtttgacttttcttagaggctccgctttcaatatcgagcgtctcgatatcctacgggacacaatcggacatcctgatcaaaagttattgtcgtttg

SEQ ID NO: 192673 - DNA, 430 bp, Glycine max
  unsure (1)..(430): unsure at all n locations
agcttcaattgcaatgaacagtatatagcttgttctgttacatacaaatcatatccatgcaaccggccagataagcataatcatatattcaaccaaggaaaattgaaatccaagcaagagaaaagaaagcgagctagccttgttaactaattttgtaaagctaatgttaattaactgtatactcttttcgtcaaatttcaaaattgatgaattcaaaaattggatcccgaaattctagtaacagcaaattaaacattagttttacaaattaaacatgcgttgtgtctaaatatttttntttcttttagaggagtaatacaagatgagctgcagcagcatcgcaaaaaacctcaagttcaaataggaatgatcaaattgccgttagtgcttacctgaccagtatgaaggcaccagaaactctgaagaatgc

SEQ ID NO: 192674 - DNA, 431 bp, Glycine max
agcttgaggagtccagaccttcgcgtccaatttagtctcaaaggactcgtctatagaccactctagtaagaaaaagtgaaagatagatcactgagcaggctacaaaggatccgaagcttagggatttaagtgaaatagaggatgataaccctttgataatcccaaggaagtgaaaagcagaacaagaaaaaccaaagaagtagaggcctgatcaaccaattatcacatcctcttttccaaagaagagaaagataagacctagatgcaagtccttaaccctaaaggaacccattaagatcccatccttcattgtctcttgttcgtctgatagtgaggcaactccaactcccactccacatccatccagtccaccaccagtgtagaccaagaagcctacatatccaagtttccattgcttggatccacatgga

SEQ ID NO: 192675 - DNA, 405 bp, Glycine max
  unsure (1)..(405): unsure at all n locations
tatgtatcctaattatgaaaatttgaatttattaaaacatttcatcaattttggtttcttacaatttttattgtacaaacttgaacctattgttggtttattgtcaaattttttaatgaattttactaacatgacatataattgatgatagctgacatctaacataacataacaatctaatatatatattaaaatgacattagcacacatgctaacgtgattgtcatactaatataatactanaagatcaaaattacacaatcgtagaaattgaccaaaattacacacttaattnngctcagntttctctttattaattatatnnaatatattattattatttattatattcatttttaaatgaataaataaacaatttaaaaattataataacattagtaaata

SEQ ID NO: 192676 - DNA, 350 bp, Glycine max
  unsure (1)..(350): unsure at all n locations
cttggacaacnttggctgcatgccctggcatagctttaatctggtggtgcccaactccatacactacaaaaccaagtcaacaaagaataagctaactctttgccaaaatgaatagattattccatataagttacccaaccaagttgcaagttccttcacaatttccaaactcaaccatgtaatttggtacaacatattacaaagaaattcactcgcgattaacagaagggaacttttgaacccatttgattcaataaagcaatacttttaactacaatggttaaaattccatgatacattacatcacttaaaagaaaaacagagaatttcaattcttaacacatcaattc

SEQ ID NO: 192677 - DNA, 419 bp, Glycine max
cactaaaaattatcaagtccatcagatgagggaaatggaggaaatgtggcaccatttggatcatggaaaattatatgattgaaattattctgtaaaatgctgcacaaacatatatatttattgctttatgactactttaattagggtatataacggccccggcgaggtgagtgatgactagctctatcctgagtgaggctcagacacttgcaaccaaagaactaatacactgcctttcaaacaaagacatctgagtttatgtctaattggtgaactaaatgaaagagaagcttacatgaagatagggcagcgcatacacaattgacaaatatatgtgcatattcattctaaagtgtaattgctatttctaacataaattacacagttgtgatacaccaatcaaattcacatggcttaaa

SEQ ID NO: 192678 - DNA, 500 bp, Glycine max
  unsure (1)..(500): unsure at all n locations
gtcacctgcggcatgcaagcttacacatnntatttaatataatgttgtatgattgaacgttttaaccttcattatattcaaaatctctcaagagaactttatctcaatggttgtttatctcttaaagaaatctcagtaacatcacaagaaatgaaaacattggatttgtcttgcacctatagtattacatcattagcatttatgttatatgtatctaacgatagatgtttgtgttttaagtaaccacaatgtgattgaaagacttatccttcattcaaaatctctcaaagaacttaatctcaaatattgttcatgtctaaaggaaatcgcagaggcataagaggaaatgacaacattgaatgtatctggcatcgctatattcgcattgtcatcatcaatgttatctctccccaagcttacatctttaagtttaagtttaagtcaccgcanagagaatgaaagactntactttcattcaaaatctctcagataacttaatc

SEQ ID NO: 192679 - DNA, 476 bp, Glycine max
  unsure (1)..(476): unsure at all n locations
agctttanaataatcaaagagccaaggagggtttatacaanatantttgcacacaaagagatctccanaattgttcaagagacttaanagaattgattagagactctgatgctcatatgtttattcataattttaggagaaagcatgaggtgaataattcattttactatgattatgaggttgataatgaaaggaggctaanatatgtattttggaccaatggcgttttgtcgaanaattattctttgtttggagatgcaatttcatttgacacaacttacggtacaaataagtatagcatgatttttgcaccattcacaggtataaataactaatgtgtaaaatatctattcgctaaggacaagtgtatcctacgcaaatcaacagtagacttaanagtccagatatcgtaccctaataatcagagtgatcaattccaatatagaagtgaaagcaatagaaaaatacaatctatt

SEQ ID NO: 192680 - DNA, 478 bp, Glycine max
  unsure (1)..(478): unsure at all n locations
agcttatccttganaccggatgttgttaccattgttccatctagggaaaacacgtctctctgcaatgagaaagattcagaaatgtgtaaatgcttcagaacaactatcgccaactaagattgttacaagagttaagattacaaaaaaatagttaaacatttaacaggaatatacttatttaccctttaaacccatggatcttttacatttggaaaagtatcatgcctccagtattcagttattgaaaatgaaaaaacatgtaagataggaatgtgcaacaaacctgcattccaccttcagaaaagatgcgaagatagttaaaactagttactgctgcaacccaagcagaaccaagtgcaacaaccttcacttcttctccttcanagcgcatagaccactgcaaaaatnttaatcagtgagaatatggtaatctttcacatcatgcagagtgtngtaacttataagaactgaaatgctg

SEQ ID NO: 192681 - DNA, 477 bp, Glycine max
  unsure (1)..(477): unsure at all n locations
agcttcggncaatatacttacatatcatagcttctatcttccgantaaggagcctcccattgntgtccttcttatccttcagtttaattctcggggtgaattgcttgtgcaaatccttgcagtacagatggtcttccatcatcatcttccaataggaataattntctgcagttagcttgaacatatctccatcatgagtgacaacttcttccatcttgggaaacaccaacactatttccctctctatatactcaaaataggcacttagcaaaaacgaaaaacaagaatacagagtagaaaaatgacaccaagaattnttaacgtggaaaaccttttcaatgtgaaaggtaaaaaccatgggaccaagccagtaaatatctccactatntaaaagtaagattataatgactctcttaatacaagagaatacctctcaacctcacccaacaatgatggtctacaatttctttcaattct

SEQ ID NO: 192682 - DNA, 415 bp, Glycine max
  unsure (1)..(415): unsure at all n locations
agctagatcaggcatccgagttttacgnngttgcttttcgaaanagcaggggcannccatgncaactattaatcgacatgatatattacgggcctcaatcggacatgcgagtcaaaactatagcccggcataattcacccgagtcttccatgttaaattttgagcgtcgcgataggtcactcggcttattccaagacccggaggaaatgttatggccgcttgtatttgcgatgggcttcaattttatcctaagagcatctcgatatatttatgagcttgaattgggaatccgagccaaacgttatggctgtccgaatgtgtgaggtcagtccatttctactttcgagggcgaagatataatatgggcctgcatcggacatcctaggcaaaacatttgcccgtcggaatccacccg

SEQ ID NO: 192683 - DNA, 476 bp, Glycine max
  unsure (1)..(476): unsure at all n locations
catgcaagcttctatataagctgaaccattttatcaatttatacaaggngaggcttattcagnaaaccagagcttatctcttttatcttagtgagagngattctcctaaattcttgagtgattcaagaacaccttggctgtatcaaaggactttcacaacctttgtgtgttgcccttgctggaaagagtgaatctttcctttctttcatcatcacccttgttctttcaaaccacaattccagaaaatccacctctgcccagaattatctcgtggccataactcccattttacgcactcaaattaagtgattctcgagcctaaattgaatttcaaaacgagacctttcacctcgttatggaatcacctcatttggagccctgtagcttcaggtattgccatttctatatttctgtccagccaccacttaacctacgttttaccatcccattcatccattttatgccaagaaccacct

SEQ ID NO: 192684 - DNA, 420 bp, Glycine max
  unsure (1)..(420): unsure at all n locations
agcttattccgatgtctgtntattatcatgctctgtctgtgagagntggctcacaacaggccaatcatacctatggagcattttcttgagcaagtagcctggcctgaagcttaacttccattggtgagatccaacgaggctgctcctcttgagcccacacctgcacaggttgaaccagagccagctgatccacaatctccagtggtgaatccaccttcttctcctgagcttgaagtagttcccccatctccaccttcttgtgaaaattggtgttatgaacattttggattgaatgcatgattgtgatggagtttgtgtttcttttcatgagtntaagcaagtatgtngttagacaaagaaagaacaagaatgtgaatttgcaattagaattgttagtcaatagacagggttgatgagaaa

SEQ ID NO: 192685 - DNA, 409 bp, Glycine max
gactcaccataatatcttgacccaggtgagaatgtcaatccttaccctcggaagcaaaaaagaaaagaaggaaaatttccaatcaaagagaaagcataaagaaaagaaggataatttccaatcaaagagaaagcaataagataagatagaaaattcccaatcaaagaatggaagaatagtaaaaaaggaagaagaagaaggaaagatagctcctaatcaaggatcgaaagaaaacagaagatatatgcagaaaggtctttggaccggataatatctgaacaatacagaattgccaccaaatgaacaaaaagaaggaaaggaaaccattgacctaaagtggtttctccctttaattgccaaccaagatattgtgtgctagcgactttttcgccccgcacttaaccaaaac

SEQ ID NO: 192686 - DNA, 414 bp, Glycine max
  unsure (1)..(414): unsure at all n locations
ctgcaatatgcattgttnttgntgcatgtcacatcaattatcatattgcctaatggattggtgttgctctcaacaggtttggatcctgtgcaacgattgtggtaaaacttctcacgttcagttccattntgtggctcaaaagtgtccgaactgcaaatcctacaatacacgacaaacatgaggctgagcaagtggccacgattattcattggtttcgtcaaaagccttcacttgagttctcttgatgttgttgtgattcgtgaaggctgtgaaaatgcatgtgtgtccattgngtacgtggatgtgcacgtgggaatttgatattggagtgcacgatgagccacattcaaagggatagaataatggttctttttcttatatgttgatttggagtggngtagtgtaatttgttgg

SEQ ID NO: 192687 - DNA, 374 bp, Glycine max
  unsure (1)..(374): unsure at all n locations
ctgcagctagacaaggaatggcatctgcacattgtgtactttactcaagagccngcttaccttcacttcccttatctanattgggtgggtcgacatactcnaatgactttattcattcttcattccaggacccggatgaaagatgcaagcgtgctgtttatgattgaacgtaagtgcaacattaacaggtgtatcgtgtcaatttacttaaatgttatgacaccctgtgatcgaccaaatggtttggattcagggcaagatcagagtgatgttcttaggacaatagaagtaaagaccacacaggagttgaatgcaacattacccgattattatgtgcatatggtacaaaaatttaactagaatccatgatcatg

SEQ ID NO: 192688 - DNA, 358 bp, Glycine max
tctcctcacatatctggtaactactggagaactctcatgcaaccctctggcgtgtggccctccagtatgtctccaacaacccatctagcagcttttcttggaatcttgctctcattggactcttattctcatcgatctatgttttctgtgttttagtctctctactgagtagatcttttttctttttattctctttgaaccatcagctcatgtactttgtttattgactgtctagactgagtcttggatcttttttttatttggtcatctatctccctaagacccaaactcattcccgtcctttttctctatatcttaggttagacatggcattctcttgtactgaatactatttact

SEQ ID NO: 192689 - DNA, 482 bp, Glycine max
  unsure (1)..(482): unsure at all n locations
agctntaacatatgatcaagagggcccgagttttattgatccttgaagnacnagnanagaactaagtatttggaattnttaaacttcaaataatttttttgaaatatattcgattatttggtgctcttacacatttttattttttttacaaacgtgctctttnttttatcggcaaaataactatgtattatattaattagtaggtataagttatacccaatcattcagatacagttttacaagcgtgctcttatactttaagggctgtaaattttgaaatttggaatagaataatcaattaccacaatcattgaaaataataatcaaataacttacaaatagctagaaataaaaaattgctatcatgtcaactagatgaatgagaattctttccaataatcaattattcttaacaaaaggctaanatatgaattgaataatggatggcaacgacgatcaattatagacaaataactaattat

SEQ ID NO: 192690 - DNA, 443 bp, Glycine max
  unsure (1)..(443): unsure at all n locations
atcttatcattctattaagccatggataagattttgaaggaaggagaagatgagtgaagggagagggacagaaggagcatgatattttttgcctcaaatgaggtctgaactttgaagtgtaattctcaaatgatcaaagttgaaaaaatgcacacacatggcctctatttatagcctaagtgccacacaaaattggagggaaatttgaatntttattcaaatttcacttgaatttgaaattgaatntatggagctaaaatttcactaattatgattagtgagatttagctatggttcaacccactaatccaagatcaagtccaaggttctccactaagtatgcttaggtgtcatgaggcatgtanagcatcacngacatccacaaagtgtgactatatgatatggcaatggngtgtagcaagcaaatgctcacctctccctct

SEQ ID NO: 192691 - DNA, 471 bp, Glycine max
  unsure (1)..(471): unsure at all n locations
agcttcaccggatgacgccgatcttcttnttcttccgacgtcatgcanatntcgttcagggattgaattgaaaactcgttaggcgacatctgtcgtgaagtagcgaccgatatttttcagccgacattgcacaattctttttagaaaagctcgctggtcgataatggcctttttacggcagagtaagttttcttgttttggtgttgcataaaaaagttacaatgtacttcggctaggtttttcgtgcgagttcaaccgacattttgtttcggccaggataacattagcccacctctgcaaaaaaaatatntgctaaccgtcttcatgcatatttcattcaacgatggaatagaaaactcaatagccgacaacggtcgtgaaatagtcccgactgatatttttcagccggcattgcgccattttttataaaatacgctcgctggcagaattatgttttttcaccatcgagga

SEQ ID NO: 192692 - DNA, 473 bp, Glycine max
  unsure (1)..(473): unsure at all n locations
agcttcggngtcgtggaactacttattgtntttatatcttggcactngtctcctaactcgngaggaaactcggngaaaccaagtccaatttgaagtcaactattgttgctgtttttatagccaatgaagaaaattctgcgataactggtgttggtgtggatgcactcgtcaaagatggcctcctcaataagctcaaggatggtcctctgtaagcctttcttatatctcttgcatatttgaattaagagttaaagaaatgtgtaagtagctctgaatttgtctcttttgaaaaactttggtagcaatctcagttccaattgtaatgtttctgcgagttttaaatttgtgcaagttcttctcaggtattggattgacacggcggataaacaaccangcgtatggactggtggtatgataccctgnaaacttcacgtcaccgggaggctctttcacagtggattagctcataaagt

SEQ ID NO: 192693 - DNA, 419 bp, Glycine max
  unsure (1)..(419): unsure at all n locations
agcnttggggtgcgtagcccatcatcttttctgattagagtatcgataatgggtctaccatcacgatcatcgtctccctttccatcattgggggaaccacctgtgccgccagatccctccaccttttgggcgtgttctttgaaagatccgtccccctttttgcaaatgttctgtagttgcatcctatccggaaccatatcaaaattgtactgatactgcctaacaaaggcaaccattaggtccttccaagaatggactcgggaagattccaagttagtgtaccaggtaacagctaccccagtaagactttcttggaaggaatgtattagcaattcctcatcttntgcgtattcccccatcttctgacaatacatctttagatgggtcttgagacgaagagtccccttgtacttgtcaag

SEQ ID NO: 192694 - DNA, 487 bp, Glycine max
  unsure (1)..(487): unsure at all n locations
cttagtcacctgcngcatgcagcttttaaacttcgnttttttgttagtattattctgtagaaaacatttgtgtgctatcttttcttccttctccctcttgccaaaagattcaaaggactaaccgtctgagaattcttttgattctttctattccctttaaacaaatgatttcaaaggactaaccgcttgagatatcttttgtttccccttacaaagattcaagggactaaccgccttttggatctttgcttgtaaaggattttccaaggttattggaaatctcaagaaccgatggtttcttgggggctggacgtaggcacgggttgttgccgaaccagtataaatcttgcgtttgttntcttcttccctacactctttatctttccgctgtgtactttntatttccgctttacattttgtctaagtattgggtctggtctttactttcccataacttagtagtaaagcctaactgaatccagtaaca

SEQ ID NO: 192695 - DNA, 430 bp, Glycine max
  unsure (1)..(430): unsure at all n locations
agcttctcaaggattgtgagctantatgagaggggtgtgtgtagctaagctctagcttctcaaggaagttttctcaaagaagcttctcaaggaagttntctcaagaaagccttctcaggaagctacctagtctataaatagaagcatgtgtaacacttgttgtaactntgatgaatgagagtcttgtgagacacaactcanagttcaaattctctccctttttcttccttcaatttcgtgctcccccctctctctntctctccctctntcttttcctccattgaagcatcctctccaagcttcttatccaagggtcatcttggtggtgaagctccctcttccatggcttatntccttaatggatggcgcctctctcacctcttctcctttgtcttccgctgcatctccatggtggaaaatcaccattaaa

SEQ ID NO: 192696 - DNA, 412 bp, Glycine max
  unsure (1)..(412): unsure at all n locations
tcgattaccatatatgtgtaatcgattacacagtgcaaattttgaattcaaattttaatagctgttgtaaatcagttttggccactggtaatcgattacatcctctggtaatcgattaccagagagtaaatttgttgaanaatactttttaacttaaaattcttggccaaaccatttgctacttcaattggaattcccttcctatttaatataccctttctaagactctaaagactgtcttgatcatccatcttgaatatctttaatttctttgtcttgaataaagctttgagacgcatgtgatcctttggcatcatcaaaacatcagcttgatcctttgtctacaatctccccctttntgatgatgacaatccctgaaatcaagacaagctatatacaagatgatagcacg

SEQ ID NO: 192697 - DNA, 419 bp, Glycine max
  unsure (1)..(419): unsure at all n locations
agctttaagttcattctcaaccgaggccctttttctctatgcannaactttaatgaatagctgattaatatctacattaagaccatctgtcaagaagctctcaaatgttctcgtatgtacagaaatctgaaaattctggacttttcaaccgataatgaacaaccaatggagcaacacagaaacactctacagtgtattcataaggagaggggcattcttgactgggatagttaacactgtagtttccattcaagccattgtcaatntttggtgcacagaactgaactaaggtgttattatttgtgcatacaggatttccctcaaacctgaaaaacattaatgtgacaagttatctaagaaagatggaattcatatgcaactagctttgacctttatcataagggtttgtattattattt

SEQ ID NO: 192698 - DNA, 414 bp, Glycine max
  unsure (1)..(414): unsure at all n locations
agcttaaagctagtgcattcattaagtctattatggatcttggcttaggggagttatctaaggctctttctacctaaggaattaggataagaaaattttattgactgattttaacattaaagcatgaatgagatatatatggcacattaatgcatggaaagagtgaagaatagttgaaatctacccctacaagagcttctaccatctatgtaacatccctacgactatgtttttcttgttntaaaaccacataaaagcatctatttttcccgttttatcactcaacctatttgttactccataaatctaccttaaagttcatgtttttagtgtnttcttgtactgttcttaagcctaaggaaatatttcactgtattacttatattgcacgagtctcttgggaaaacaatatct

SEQ ID NO: 192699 - DNA, 389 bp, Glycine max
  unsure (1)..(389): unsure at all n locations
tcagcttgtaatctatctggataactcgcctgtgccattaagctcttaatgtctatagaggttaccttctcgttgacatcttttgtcttgaatggaattgccatgacaggtttattgttactgtctttgatgtctggtagttgatattgagacgtgggaggtcattccgattggattaactnaccatccttcactgtgccaattgatatgacatttgttgctggatcacctatgatgtcttgtttgcaacggtaatctatatcctttctgatggcataagcatgacacctatctaagacaaggacattaattttgactttttcgacaaactcctataacttcgcttggatttgatctctgttagactctagagatgtccaaaaaccatc

SEQ ID NO: 192700 - DNA, 415 bp, Glycine max
agcttattattgctagggtttcttctgtattgtgttggctatatcaccctagttggggatttctaatgagcaactgatgtaaatacctaatatctaattcattatgttttttgtgttcaatgcttaatgtttgtatgcttttggtctaatcatccatttgcgtgcatagttaggtgactctaacattgggaaatgtactgttgccttagaactagattgaagctagattgaaacttactcttacaagagggatctacggaatgagttctggttataattatgttgaaacaatattgctgtttataataggcctattcttacaagagggatttgcggatgaagcttatgctaaattacgctaaacttttgtaaactgcttgagctgagtctagtcgtaccagatggatcaatggat

SEQ ID NO: 192701 - DNA, 442 bp, Glycine max
  unsure (1)..(442): unsure at all n locations
ctcaagcttcttanttcagacgatgcagctgagtgtgtagctacctcatgcactcctctaatgactatagcatcatttctggcgctaaactgctgggagttggaagccatcttctcaattaaatttctggcttcagcaagagtcatgtctccaaaggctccatcactggcagcatctatcatacttctctccatattactgagtccttcataaaaatattgaagaagcagctgctctgaaatctaatggtgagggcaactggcacatagttttttaaatctctcacactactcatacaggctctctccactgagttgtctaatacctgagatatacttcctgatggctggggccctagaagcacggaaaattntttctaagaatactctcttaaggtcatcccagctcgcgatggaccgtggagtaacgtaatacaaccact

SEQ ID NO: 192702 - DNA, 309 bp, Glycine max
taatgctactacaaaactgcttacaagtaacagttgataaaatgttactatcgctagataacaatccttgcgagatgaatcaccacttggctggagttgcacggacaaggttttaaatcccgtgctgaagttgaagaaaataacctgcaaactatatataaactcactcacaacatatgctctgcattattcacatggggaagagggcatcccaatctttcccttgacgggaggcgcaacttgccatattataattatttggattacggacatctcaactttttacaaaaaaaattgcatcctgtagga

SEQ ID NO: 192703 - DNA, 411 bp, Glycine max
  unsure (1)..(411): unsure at all n locations
agctntaggccttaaggctctagccaatccatatgcaaatatcatacaactggtggataaggtggcaagagaactatttgagagaagggacgtcccaatttgagagtattttcttatgtgcttatgtcattacttatattttactactacatgtcaaataaaaagttaaagaaagtaatattttatctagatcatttattgggatataatgaaatttaactttttaatagttgaaaacaattttgtattgcgtacatttcttagacgcataacttctcattaaaagatattcaaatgaattattaaaaaccatttaatgtgtttgtctttctctgcatcattcattttattgcacacataccgcttttatntttatcttatcattttattggcttgagtacaaaaggtaat

SEQ ID NO: 192704 - DNA, 457 bp, Glycine max
  unsure (1)..(457): unsure at all n locations
ntanacatcctggacacactctataattgtaacatagatataactacttccataatacaaanataagcaggagtcaatttaagttctctttggcaacttacaaatttaaaagatattaaacggatcacaaccttaaatatctctattcaagtcttcataaaaccaatatttctatctcaaccataaagaccctaaatattttaatctacacattgtaaagaaaaaagtttaatgttcactgacatatgacacaaattactataaaataattattttagaagccaataaattcatcatatatattgaattatgattaaatgagtctataaatcatgtattatcttcttctcttgaaaataattctacacaaagtgcaaagttatatatatatagtatatatatatatatatatatagatatatcattccgagaatcaatgtgatctaatgaaagtcca

SEQ ID NO: 192705 - DNA, 411 bp, Glycine max
agcttcttatccaaggcacattcttggtggctaagctccttcttccatggcttattccttagtggatggtgcctcccctctcctcttctcctttgccttccgctgcatctccatgctggaaaatctccattgaaggacctcattgaagctcaaagatccagcctccatagaagttccacaagcaagcttccatcatctagtgtcaagggagattgctcggcgtcgagggtggtaacctcgactagtgtaagagttgcaggtttgtgaggcatgtcaagctcccctagcttggaccagtgttgtttacgcttcttctgtcaagttgtctggggtggacaagcttttgatcttgcaagcaaaattacacgtgtcaggtggatgatgtccttatatatgacgattctcgccttt

SEQ ID NO: 192706 - DNA, 426 bp, Glycine max
  unsure (1)..(426): unsure at all n locations
tagacagagataagagagcttacatagagaagaagagagtgcatatctagaagaagagagcgcgagcaaataggactcgcgtctgatatattctaaaatgtaagtccaacatcggttttcaataaaaaaaacaccgatgttaacaaaatgatgtttacgctaacatcagttctctggaagaaaccgatgttaacttatcatacattaacatcggttttcaaggatttattttgggttttatttctatttgtagtttcaaatactttatatttaatatttatgaaggtgacgcgataaacaaaaaacatgccaccactataagaatcataagtgacatgctgngacaagtgtcaaaaaagaataagataaacatttataatgttcaaacagtatagaactactgacatatatatttcatattaagat

SEQ ID NO: 192707 - DNA, 405 bp, Glycine max
agcttcaacttacagtgagtatttcaagcttagcgcaacaggcgcactaagcgcactttcaagagttcaaaaatcgtaagggattggcgcttagcgcttcctggccagctaagcccagcttaaaagctcaagttatacaatggattgggggcttagcgtaagagatcgcgcttagcgctgctacaataaaatttttccagagaagaaggggcgcttaacgcatcatcaacgctaagcccacaggttaaagttcaattaccgcaaagatgtggggcttagcgtagtgatgtgtgcttagctgaactattcagccaaccaatcaggggtatgtgcacttagcataagcaagctcagcttaacgcgtgaagactgagtgcttagcgcaaggtctgcacttagcggata

SEQ ID NO: 192708 - DNA, 445 bp, Glycine max
gaaggagacaaatattatccatgatcaatgtgcaaccactactgcaaaaatgacataagacgacagttcttaagcacattcaaagacgattcaaaatcatctttgaagccaacgtcgtcgaaagtcttgtctttcgacaacggttttcaaaaaatcatcttagaaaaatgtatccttctaagacggttattagctaaaaaccgtcttagaagagtacccttctaagatagttgttagctaaaaatcctattctaagatggttttttaaagaaccgtctcaaaatgtctttttttaaataaaaaaaattgaggattctaagatagttttttcaaaaatcgtcttagaatataaatattctaagatggtttttcaaagaactgtcttataatatctttacaacaagtagaacacatttaggaattgatgtgtcattattctctctga

SEQ ID NO: 192709 - DNA, 449 bp, Glycine max
  unsure (1)..(449): unsure at all n locations
ctttgagacaacttccttgagaagctagagctgagcttctcacacccctctaataactaagctcacctccttgagaagctttcttgaaaagagtcctaaagaagctagagcttagctacacacacctcgctaacaggtaagctcaccttcttgagatgagaagctagaacttagctacacaccccctataatagctaagctcacccncatgacaaaatacatgagaatacaaaaaaagtgccaactacaaagactactcataatgcctcgaaatacaagggtaaaaccctatactactagaatggccaaaatacaaggcctaaacgaaggaaaatacctattctaatatttacaaagataagcgggctcatacttagcccatgggctctaaatataccctaaggctcatgagaaccctatggccttccctttgatatctggcccgatct

SEQ ID NO: 192710 - DNA, 406 bp, Glycine max
agcttcagcattcacaatctttatcagagttcttagctatacatctatagtaaaatatatctaaaagatccttgcaaggcataaaaaggagttgccgggcgtttcttcccaataccatcttaatatattttttctattattttagaggaatttaatctacatattatatagcttcactcgatttgtcctaaaaaaaataatagaaatgctaacttatttcctgttaaatgcataaccatacttaaaaagataaatttgagatacttgtatagtaaagtctactaaagtgtcaacaaacgtaaattaaactatacaaggggatgacatatagtctatactttgtgtccaattaaatatttggacaaaaggacggcctatacaatataatgatcacaaaaagattatg

SEQ ID NO: 192711 - DNA, 473 bp, Glycine max
  unsure (1)..(473): unsure at all n locations
gtgtactgctgcattatactaatatatggagtnggcctttactttgcctgagaataacaattggttgaccacaacaatgctaaaggcggtaaaggacaacgatatttcaaataaacctgttgtgcgtgaacaaacattattaactcacatgaaccagggaagtgattgcataattcttatactaactaccttcaatgtacctgaacaaaatgatttccaaacacgtgaccgacacatatcatgtggtgcacaaaagaatcgggtggtggttgacttctaagaggaaaaaatgccatgctttgttttcnggacaatgacacaaggattacattataccgtgatgcaatgacatatctcatctccggtatatccatccacttgtccacactaacctgaatcaagcacacatacacatctaaggtatttagaggttgttcttaaaaaaataacctaaaacatacctggaaaaccat

SEQ ID NO: 192712 - DNA, 403 bp, Glycine max
agcttttgaatcctagaaaaaccatgaattgttggtatcctaaccccattacaagcctagaaagtccttcggattcatttttgtgtgttcattactgtatgatatgagatgaaatgcaaaggttggaacttgtgttggttgtttatgatggaataagcctaaacacttgagtttgagtaaaacaatgactgtgaagttttggttgatgattcttccttgatttttgtcatgcttactagcttatttcagctatgactctaatacttgtgctcctatctttgaaaacctgcatgcttgtaagaagtgattgatttaagcattccatgatattcagttcatatggttgatgtccttgatgaattaaacaccattttcttttgattggtcattgtctttgtcactt

SEQ ID NO: 192713 - DNA, 382 bp, Glycine max
ccatcagatcatcattcacatctcatgagaaaggtgttgcacttactaaaaataattctaaccctactcctacttcttcataaaaaagttctattaaatgttttaagtgtttacgaaagggtcacattgccttccaatgtgctaactacgactatggttgtgtcgggtaatggggatatcactagtgcatcttcttctagctcttatagttcttctagtgagagtgaaagtgaatgtgatgtacagcccctggaatgtgatcttttgatgattacgaggttaatatcgtatgtgtgtaacgatagagatgaaactcaaatggagaacatttttcatactaggtgcatggtcatggggaagatatgctccttgattattgatg

SEQ ID NO: 192714 - DNA, 408 bp, Glycine max
  unsure (1)..(408): unsure at all n locations
agcttatactgtgtaacatctcaatttttcgtaaataaatttaaaaagctttntagtaataaataaataaataaataaataaatatagagcaaataataggctgagtaccctaggtataaatagttatgttaagtcagctgcctccttttggcctcattttcgtttttccccttctcctctcaaaatcctttctttttccgtagcccaccaaaccagtctcagaaaaacgacgatctcgaacccgttcaccgttggatcgtcgtgaaatttgagtatcatgttcgcaacacaattccgagcattctcaccgttgggaatatcgatatcatgtctgaactaagagaaaaacccttcgcattgtagcctttttctttcccgcagaaacccagagctgtcttggtaaaact

SEQ ID NO: 192715 - DNA, 398 bp, Glycine max
  unsure (1)..(398): unsure at all n locations
attactagtaaacttagatcaagatgtgatgtaacctttgttattactaatgtgttttcccatggtgcagtcgagattaaaaatgaagttatcggcaaagtcttcaaagtgagtgatcactgactctagctttttcatgagagccctcaagtggaggaagagtttgtggtggacctctctttggtcttgccaatcttatgtgatgatgtgccatgaaaggcacttgaggagttttttcctcccttcgtttatatgttgcctctnttcattgcatgcttacattgacgacaatgtgcacttcaagtgcgagggaaaaggtttagaaaacatacaatatgttggttctctattggctgtcttctatacgctgaatctatattagtttctgttctgcgcta

SEQ ID NO: 192716 - DNA, 402 bp, Glycine max
agctttataagcgcgggtctgggagacaaaggtcaagtggtcgcgatatacaaagatgatgttccgagtaaattagatgtggtacgaccatgccctcctgatttgcagctgggaaattggcgagtggaggaacgccccggcatttacgcaacgagcataatgtaaacctttacggttttaaaagctctatagttgggcctaggctttagagtttttcattttgttaaggctttgtgtcttttgttgttgattttataatacaaggatctttcttcatctgttcctacgtctctacccattctcatccatttgcatgtttacttctttatttctaaaatggcagatccgatgacaagtcccccgaaggtactaatacctgtgacccgcctatcaacttcgagc

SEQ ID NO: 192717 - DNA, 488 bp, Glycine max
ggaccttaatactaagcttgaggtaaactagatgccttggttaacctggttacccatctggccttgaatcataaatctatacctgtcacaagagtctgtggtttatgctcctctgccgaccaccatacagaccattgcccttctatgcagcaacctggagcaattaagtagcctgaagcttatgctgcaaacatttacaatagacctcctcaacctcaatagcaaaatgaaccacaacagaacaattatgacctctctagcaacagatagaatcccggatggaggaatcaccctaatctcagatggtctagtcctcaacaacaacaacaacaacctgctccttcctctcaaaatgctgttggtccaagtagaccatacattcctcctccaatgcaataacagcaacagcagcaacaaccctataaacagcaaacagttgatggccagaattctgacagattaccttctcaatctgtccagaatcctaa

SEQ ID NO: 192718 - DNA, 413 bp, Glycine max
  unsure (1)..(413): unsure at all n locations
agcttggattaattaggcttgacaagggatcataggtttantaatgtatgctatagcatagaacaccagagcacaattgattagagaaatatatttctatgcatcaacttgtttgttagaaagacccaacatttctacctactgctgttgcttttacttactttgcattttatagtttttagcataaaagttagtttaaattctgtttgaaattatcaatcatacatgtcctttcaataatgcttcatttcttaacttaattcaggctaacattagttccctgtgttcgatacttagattcatccgttttaatttttaaatacttgacgatctaatgcactttccgganaactggaattcccttgaatatatttgaacgaagaanaagtggaacaaaaagtaaccgcatggga

SEQ ID NO: 192719 - DNA, 466 bp, Glycine max
agaagaaagacaataagagctcttccaaagtagtcatagtatatatataggaatctgatggactaaacaactccgatggatccacaaatggtgaagtgaccctcatgtcttggaagttcaaatagatgatgaagaacggaaagtctcaacattcctctatacataaagattccatattcaaaaagaagaatcacgaggaaaacaatgagatcatttgctttgagtgtacacagcctgcactcatgaacgcttaattgtccccagcaaaagaagaggagatattctatgcgaaagaagaagaaaagtctgatgatcacttgggatgacttagacagtgagaaaagcgacagtctagatgatgaacaagccaacatttgtctcatgatagatacaaatgatgaattaccctgttctagaagtattcaatttcagcccgtagcatctcatgctgatgtagttagagaga

SEQ ID NO: 192720 - DNA, 415 bp, Glycine max
agctttatcttaagggggatcaatataatcataggtggtttacgtgtctctcacaacttgttaattgcatttagggttcataagaactagtatctatgaagtagcagtccatttattcttagcccaggaaacaatactcacttagtccgtatatataaatgttatgcatgatgtactgcatacagaaagcagctttactcaagttattccatcctatcaccctctctatttgttcctttctttccctctaaactctacaagcactataccttgctggcatatcttcttattttgtgcgtgaagcctgtagcaaggttccccccatcaaaagtacaataaataatgagcaaacatcctatggtactcccagctcaatttgcatctgtgtagacttctatttgccaatctccatgct

SEQ ID NO: 192721 - DNA, 460 bp, Glycine max
acacaatgctgccccttaggattgcaagaatgatggtcatcaattgctttatcctccacacatcggctcgcgacacattcattatgatacgtgattcttactattccacaccaatgactctactcgtaatctacatgcaggaaaacctacttggctcacacaaaaagcatgaatagcaatgtactatttatattgctactttatgataaataaaatactatcgatcatacgctttataatcataggctataaatgatcctacaaatgtgagaaaccaccactttaaaagatatattgtatgcgtcaatgagttacattatataatgactcatatactctgtctatgcggaccaattccatactcaaccatggactgaagggaagaaactgacaatattgaggttcactatacggtcttacacaatgagccaagataactttatggcgtattcacatattt

SEQ ID NO: 192722 - DNA, 412 bp, Glycine max
  unsure (1)..(412): unsure at all n locations
cacccgcaggcatgcaagctgggagaacggctacacatagaacatggttgggtgtggttnggtttaatgaataaagggatgccccacattatttccatgacacaaacgcaaagatgatgatttggaaattttatgcaaaactggtcatgcatgcacctatgcggacactcaagagtcaaatttttatgggcatgtgatgctagggttaggatcactcctctatttaaatcaacccatgcttcaaaaatgttcattatcaatttgagcattcatccgagtccattttgggtacccgggaaaatcacacagcattcacccttcaggcgtacacacaattttcttccaaaaactacctatgatcatcaaattattctttaaagaaaagtcggaagtcatctcttaacacaagcat

SEQ ID NO: 192723 - DNA, 415 bp, Glycine max
  unsure (1)..(415): unsure at all n locations
agcttggcttccacttcatcaataaatgtattataataatataaatcaagaaaacattagttagaaattgattgcgcaatgaataaaatacggaaataatgaaaaagttgttagtaaagattacacaaagccttggaattcaatatcctaacacaaaaagccttggaatttaatatcctaacacaagaagccttggcattcaatatcctaacacaaaaaaatattttttttttcttggttacaaatatacatttcttaatttttaataaaaggctaggatttctaaagcatcataataatcccaactaggttagcaccaagaggatcaccaatcacctgtataagacgaggttccttactantagtgaattacatgttgaaaaacattaaaataagacttcaactgccattggag

SEQ ID NO: 192724 - DNA, 384 bp, Glycine max
ttgagccaaatcctgactcaccatataccttgacccagtgtgagaatgtcaatccttaccctcggaagcaaaaaggaatataacggaaatttcctatcccagaaaaagataatgaatatttccaatgatagccaaaaagaaaataaggaaaattccccaatcaaagagtgggagaaagcaataagaaaagaaaggaaattcccaatcaaataatgggagaaagtaaaaaagggaaggaaagaaagttcttgaacgaaaaacagaaggaatatgcatagaggtctttggaccggacaatatctgaacaatacagaattgtcaccaaatgaacgaaaaaagaatgatagggaaccacgacctagaatagtcttcttcctttgatta

SEQ ID NO: 192725 - DNA, 215 bp, Glycine max
  unsure (1)..(215): unsure at all n locations
agcttatatggacactaaactgctggtccctttggtggatcnantctatctaaagtgcttgcaataagtcccattgtgcataccaacggcaaacaggtcgccacatataccattgtctattattacaggtgccctaaattccatgtgctatcatcgaccgaatcagagacgccgcatccaaaaccatatttctttcctgtattactacaccacat

SEQ ID NO: 192726 - DNA, 483 bp, Glycine max
  unsure (1)..(483): unsure at all n locations
gcttctggagctntcagaccactgatgagaacaattgtaaagattagagaatattcatcctagggggaaatagaagcattgacaaagtggtgcataagtgtgtactggcaaaaaagttgcaaaccataattaccattatctactgaaatgtaccatatgggggaatactgaatacaagcattgaccaatggaccaacaaatactacatatcggtatattagctacaggatgaaatttgattcaaataacttatattggtgaaaagaccaaagtaagctggctcaccgttagaagaaaactggcagatatatacacaaggaaatctggtaaggcatctccttcagctatatatgtgtcccaaagacgtgtgacaagatggaagggtatctgattacataaagcagatatcagagttaacaaaagcatataattgcgccacgatttttgtactccataatttcgtctaactaaattaacaagtcc

SEQ ID NO: 192727 - DNA, 407 bp, Glycine max
agcttcctcggggccattcctgtgaaggcatacatttggaaagttagttttaccagtgggacgttactctttaaagcaaaaatggcatataacctcctcccataaatacaaacatcaatgtaaatttagagtaagcttatgcgcatacttccttacaaatgttctcttgcacaagacattctattaaccgaaaaatgcacccatatacaatcaaggcagcttcgttacctagattatttacacgtacctccaaggtgtatttgttacttacatcacacacatctccttggctaaactcacatacatgcatactcaagcattttggggcaccaaaaattgcacatgtgcacatcttggcatttctaatacctacatacgcaaacttcatgatgaatcttgactatcta

SEQ ID NO: 192728 - DNA, 274 bp, Glycine max
tatgagaagacacatgaataggtttatatcacatctcaattatcccttcatgcccaattccttatggcttgaagcgtggatagagtgcaatcctaccaacctcgtgcttaaatttaagattgtattacaaaaagtggggtaacacattaaaatccagaacactcagtcatataatatttgttaacatataatggacctattatcctaaaatcttgagcttattaattgaggatgcatgatgatcttatactacggcggtaactcacataatatt

SEQ ID NO: 192729 - DNA, 362 bp, Glycine max
cccaaccgtgacgggagaaattgtacatgtcaaggcacactacaagcaggcctggcagcgttatgctgaatgactaaaggtggttttttatccttccattaaagagcctatccaaccctcatcccacctctcgtggcaacgacaatcaactcataagcgaggacgaaaaatacttaaaacaaaccctgaccgaatacgaaccaattatgggagatcaagatgatgcattcgatgtacactcgtgcaatgatactttcgacaaaccacccaaaccaactcgagaacttgtcaagtacaactcggtccaacacatgggcaatgaatacaatcaccacggaccttactatccctgactacaaacc

SEQ ID NO: 192730 - DNA, 404 bp, Glycine max
agcttgagaggggttagtgtttttttatttcttttaattagaaaaaagatagtggtggtttttatccaccactatattaaatcaattatttcaaaattctaatgttaatagaatgttaatgtttatgatgaaaatcaaaagatagaaaaaatgaagcattttagaaactttaaggaccacagtaaaagtattaaaccataatgtacttgagtgaaacaactacaaacataataagcaaaaagtaatcttaaacctaaaatatataattattcttaggaagattatattattgactaaataattactagcttttctgtgtttttcccaaatattactaataaatataatatcctacagcgaccaaatattatgtcactggtgacaaaaattctattatatatata

SEQ ID NO: 192731 - DNA, 300 bp, Glycine max
  unsure (1)..(300): unsure at all n locations
ttatgagcctacattatacagntggatcaaggaagcctctgtcacaatcaagcgatctgtgatgtctccatatgtgtgcacactgatatcatgttctccgttctaaaattcatttgaaatgtctgccgctaaatctgaatgagtgatccttcttgagttaagaactatcgccttctaatcaatagagtgttcatctcgtattgtgcgctcatgttcaattatggcatgataaacttcctgatatattgccatgctgctacctctgctaccaatagagagagacctccctcttgtaatcac

SEQ ID NO: 192732 - DNA, 400 bp, Glycine max
  unsure (1)..(400): unsure at all n locations
agcttcatactcagatccctcttgttggactatgcccaatttagacgaccctcttaggtttagactaacttaaactgagtttcgtccgtagatccctcttgtaagactagactcagctcaagcagcttacgaaagtttagcctaatttagcctaagcttcatccacaggtccctcttgtaagactagacctagactaaatagcattattgtaacaacataattaaaaccaaaacttaatccgcagatccctcttgtaagacntaagttcgattctgcttcaatcaagttctaaggtaacaatacatttcccaatgctaaggtcacctaactatgcacactaatggatgatcagaccaaaagcatacaaacattaagcattgaaggaagcattgaacataa

SEQ ID NO: 192733 - DNA, 452 bp, Glycine max
tcttgagggcgcgcagcccaccatcttttcatattagagtaccgataatgtgtctaccattacgattatcgtctccctttccatcattgggggtaccaccggggccgccagatccctccacctttcgggcgtgttctttgaatgatccgtccccctttatgcacatgttctgtagttgcatcctatccggaaccatatcaaaattgtactgatactgcctaacaaaggcaaccattaggtccttccaagaatggactcgggaaggttccaagttagtgtaccaggtaacagctaccccagtaagactttcttggaaggaatgtatcagcaatttctcatcttctgcgtattcccccatcttctgacaatacatctttagatggttcttgggacaagtacgtcccttgtacttgtcatagtcccgcaccttgaacttgggacgggtgatgata

SEQ ID NO: 192734 - DNA, 404 bp, Glycine max
agctttaacaaaatgatatactctaaagcctatgcccaactatagagcttttaaaaccgtaaaggtttacattatgcttgttgcgtaaatgccggggcgttcctccactcgccaatttcccagctggaaatcaggagagcatggtcgtaccaaatccaaagtacttggaacatcatcttcacatatcgcgaacacttgaccttcgtctcccagacccgcacttataaagcttctacttatatggcagggcgggcttccttcactttcttgtctccaacgcgagctctgaccactgttcttccttcccgcgatgcttcttttcatgtccgcctgagtgggcttatagcctaaaccatacttcccacgatttccttgggtttttatcaggctagttatgccgccat

SEQ ID NO: 192735 - DNA, 411 bp, Glycine max
  unsure (1)..(411): unsure at all n locations
actataatactcaagctatcgatagatctgggacctatccatggtctaggtcttcacggaggccattgcctccctcacctaatattatgaccagcccttgaggtgctctacctttggggacttctcagtaacacccacgattgaagagtttgaagacatcctgtgatgccctctgggatgaaaganaccatatcacttctcaggattctatccctccttagctagaatttctaaaataatcaaattcttgacacaggaattggaccgcgggaagcaagtcgtaaatggggtatttggggtactaatgaaatgttcggaaacacaagcgagagtcttggctagccaaggcgaatggtgtccgctcatagacatcttatcactcttgatctaggtgtgtgcctctttccaatg

SEQ ID NO: 192736 - DNA, 389 bp, Glycine max
agcttgaagatgttcataagtagtggaatcataaaagaatcatctgagtcaaaacgaaaaaagtgttgtaacgctggtcagtttcgttgaacgaaagaaacttgagtgaatcgagtaaatcttagccctgctaagttagcaagtttcattgtatttgattttattgtgtaaacactctttgagggattataatacattttctatcaaacatctattgtttgtgaaagctaggagtggctaagtgacaaagaatacttggatcttaatctcagggggagattaagggtagtgccaagagtggcctagaaagtactcattgtaaccagaagtggcataaagaatacttggttgtgatcaaatatttgattaatggaacccttcaagttttg

SEQ ID NO: 192737 - DNA, 389 bp, Glycine max
  unsure (1)..(389): unsure at all n locations
tctgtaatgcttccctaanattcctataaccctaaataaacatatttcacttaatatgggtgagaaggaagagaaaataagaataaagtcaagtcctatatgcttgcgttaagcttccgtaacttttccgtataaatacgaaagaaggaggggtgaacttatcaaaaagggggtgcaaatagcaattttaaaatattcgaatgggccttccacaatattttcgaagcagggttgcttctggaggaagcaacccagctcgcctgagcgagctgggtggcaacctcctccactcttttcctataaataggcgagaggggctggtccaaatattcctaacccccgtggctatgcatttcagctgttttgggtgaaataaaatagcttccgtg

SEQ ID NO: 192738 - DNA, 414 bp, Glycine max
agcttcagaaacattattccaaccacaaaattattatcatgaattgaacccaagatgaagctctgggttagtggagaagaaaaccaagtcttgatgagattatgattttgagctaacttctttggtcttttgtttaaaagataaaggcaaaatatgaacatttctacaaacacactaatggacactaattaatgtcaaaatattttgtttgatgctgcttaattacaatgttttgcaacttttcaggtgcccctgctgagatggaagagatacccattggttgcagcaatgtgcatggtttctacatgggcatttgcattgccaatttcatttttccatcacatgcaggttctattctatagctaattgtgctttttatagacctctaattatgggtgatcgagcatgtaatta

SEQ ID NO: 192739 - DNA, 463 bp, Glycine max
  unsure (1)..(463): unsure at all n locations
tcatgtcntgtgccacttaacatttcccgccaacaacttttagttcaattcaatttgatttaggtaattattttaattcttctttctctttgtctaattataataatatctattactatgcattttttgaaatttctattgaatgccgngtgattttctagctctactttgagctacttggaactttgattctaaataagatatcaatggaaattgttagtacttcattttaaatgttagtacttcactttaaattggtaagttatcactcgattcaataatgtttgtctagatacttccactatgaacaacatctcagattgagtgcatagtattgcacatgctcgtttccttcaatggaagacgcacccttggcccgaccgagaggcctattcatgcccccgccggagggtaggttgcgacagttggcaactccactgtgggactatctttagagtgttag

SEQ ID NO: 192740 - DNA, 417 bp, Glycine max
agcttcaagaaaaagatggcctcagcaaattctttattttcataagggaattctatcaatagacctccaatctttaatggagagggttaccactactggaaaacccgaatgcaaatttttatcgaggcaatagatctaaatatctgggaagccattgaaatagggccttatatacccaccacagtagaaagagtttcaatagatggtagttcatcaagtgaaagcataaccatagaaaaacctagagatagatggtctgaagaggatagaaaacgagtacaatacaacctaaaagccaaaaacataataacatctgccctaggaatggatgaatatttcagagtttcaaattgcaagagtgctaaggaaatgtgggacactcttcgattaacacatgaaggaactacagatgttaaa

SEQ ID NO: 192741 - DNA, 468 bp, Glycine max
  unsure (1)..(468): unsure at all n locations
ngntanaggcagattctcattatgcagagcttgcaggaactagcttatcanaggccaattatgagtgtagagcacttcattgagaacgtggcctggcctgtagcctgacctttttttgtgggggataatgaaagtcttatagcccatgcacctcaacagcatgagctacagccagaaaatgatcactcatctgaagccatcatccctggagctgttgattttcaaaaagaagattagagacgagatccaatgaggctgctcatcctggaccactgctagtatcagctgatgtaccatttccaggggtggattcatcttcacctcaacacgcaggagactcttccactcctgtcttagagatacctaagggctagatcatactattcctggttctggacacttttctccagctactcagtattgatctacagatatgagatgtcaacacaaacaccagaccatctagat

SEQ ID NO: 192742 - DNA, 428 bp, Glycine max
gaccttaagtcacctgagctgcagcttgatgctcacaaactcacaattgtcttggactgtcatttcaaatactagaccatggaaatagtgttactcaagtactatcacattgctaaaattgtcattgacaattgtgaatgcttcaaaatgtactacataccaagagagagcaataacagagtatacctgctctccaagctggccaacactaagaaggttgggcacctcaagactatcatccaggagacgctccaaactctcatcatagatgctaaggaagttatggtcggagaataggaggaattatactatatgaccccttacaagaactttctagttcaggggtattgcaaacaggcgagaatgaagcttgatgcctaaaataaaagtctcgctactacgtcattcttgatggcgagctattcaaa

SEQ ID NO: 192743 - DNA, 414 bp, Glycine max
agcttatgcatccatcaaaattctcaatgggtctatgtagtcttctggaggatcgtgccaagaaactatccaccacccaagtaaggagacaaaaatatatgcatgtacaataataaaattaacatactctatctcaagagaattattatatacatgatccagaattatgtgatttccatcaatttccacttgttatgtaaccacacattctaatttacaaaaaaacaattaataggatggacacatatatatttgaaggatgtaaatgcacctcctgattataactttgagaaaaatacaagtatatattcattgtaataattccttttgcaccccctaattctataatttgaactagttagtttcaaattatgaattttattgactaatttgcactccctaatctttacattt

SEQ ID NO: 192744 - DNA, 280 bp, Glycine max
cgcagcatgcaactaggcagccctaccaagctggtaatgtttggatgatttacgccctaacacaacatcctacaatgacatcagagcctatcttagatcaattgttaggccacctgcatttgccatgctccagactggaactctcacatcgactacagataatcagactcaaatcgacgttaaaaaggttgggcagtcctcttctcatttgaaaaacatacttcctgggatatagtcacgccttaagtctaaatgataaagaccatgtttaacttcatct

SEQ ID NO: 192745 - DNA, 452 bp, Glycine max
  unsure (1)..(452): unsure at all n locations
tactcacgcttgtatnaaatatctctcactttatagctaacagagagtttatgtgagttnaatatattacgctcaagagctaattgaacacgagcattatttttaaaaataatgtgataaagataaaacacacacgtgtacttacacaacggagatgaaactacacctatctaaagttgacaactatcatatcatgctataatttctaactacatcatactttctaagacttaacgataaattgaaagattctttcatatcattcacataaaatttcatatcaatttaaaaacattcactaacacgttcgtatagattataatcaacttaatcttaatattctaaaaatatactgaaatatagaccatctgattattactctcgtactatacaattctaactaaaagtgactcagatgattctaacaatatatatatataaaataatgggta

SEQ ID NO: 192746 - DNA, 407 bp, Glycine max
agcttgcctaattaacctgatattgagagaatatgataattaaacaaacaaaaaggaagcactaagtatttattacctatacttaacaaaaaatacttataacactacaaaataaccataaattggaagagtttgctacttacacaagttttatacacaaaagttagtcgtattcaccaactaacacttatgcttaattatcttgaataacacaattaaagagagcttaatacttattttgattcacaaatccagccataactcagcaccacaactcaacttcatcataggcatcatctaggaaacttataaaacaaaaaaaagttcaacaacacgattacttctaggaattgatttagaacatgttatgaactaaataacatgtgtgaaatagactcacaattcaa

SEQ ID NO: 192747 - DNA, 408 bp, Glycine max
agcttagctacacacacccctgtaataactaagctcttctccttaagaagcttccttgagaagatgcctaaagaagctagagcttagctacacacacctctctaatagctaagctcacctccttgagatgagaagctagaacttagctacacaccccctataatagctaagctcacccccatgacaaaaaacatgaaaatacaaaaaaaagtccttactacaaagactactcaaaataccccgaaatataaggctaaaaccctatactactagaatggccaaaatacaaggcccaaacgaaggaaaaacctattctaatatttacaaagataagcgggcttatacttagcccatgggctcgaaatctaccctaaggctcatgagaaccctagggccttcccttggatc

SEQ ID NO: 192748 - DNA, 392 bp, Glycine max
  unsure (1)..(392): unsure at all n locations
agctgtcggagctactgagtatcaaaggatggaccacttccaacaaaacaattgatgcaatcctacccctcaagatcattggatagaagactccaagaagattgggcctacgatgcaagagaaggccctanggttctcatgagccttagggtagatttctaagcacatgggccaaggttgggtccaattatctttgtacatattatactacgatgtcattatatttggtccttgtatttatggctccatattgtaggtagggtatcctagaaatataggattcttcagccctctgattttatggcacctagactagattttgtattaggggtagtttcgtgatatcacacgcactaagtggatatttgatgtatgtgcgtggaaataaattt

SEQ ID NO: 192749 - DNA, 407 bp, Glycine max
agcttgtaggattatggggtactccatcacatgtggtactaggtggcggacgggcgatggtgcacaacaagtttttccacatccacaatgcgcgcataaacccaccatcccctgttgcccacctccaactgagctcgcgtactcccacgtagcccatatcctcgtttctctcaacaccgggtccccatcaatcctctcaagcttccacaacatccaagcaaaacaacattcaaacagcacaagctatcacagccaagcaaaacagagcaaaggcagaaaactctgctcaacacatcaaccaaaatcacacgttttctcacgtaaagaccacagtaacaattctttcgatccaattcgttaaccggtggatcgactccacaaatttactggaagtctatagtgtataa

SEQ ID NO: 192750 - DNA, 441 bp, Glycine max
atacgtgatgcctattgagtgcgataaggtaatgctatccataaaacgaagcgcatgatctctctttccaacatttagttttgtctgtatttatgtgaatcgctaacatttgaatttaaggaaagaacaaaataaaagagaataaaaggtatttatagtatattcctcaaaggtcattttttacgtaaataacgagtacatgtagttgactatacttttattcctttcctctccaatcagagtgtgccatgtcgccttacctcctagtgtgagacaatagacatatcaaacattaacgctaatcccataaccgatccttcactaaagtctataaaaggcaacctctacccaaaagcatataacgataaaatttataagaaatgaaaaattataatcgatatctgcaaatcatggatgacacgtcatctacctgttattctt

SEQ ID NO: 192751 - DNA, 397 bp, Glycine max
ctcccgtgacctgagagcatgtctaattttttcttttcaaccattgcacacccgtagccaacgaaatatgtcattcttcctattactatacaaacaaagccatataccaagcaccaagacccttctccaccctccacatccaccattagctcccacacattatcatcggtctccatccgtcaacccacaccgagaggaacccttcaaccgaatccgaacctaccaacctggcttgcggtcccggcacataaccaaaaccctaatcagacctctcattctatttccagcgaaccatggatctaagcacgactcttcgaagttccatcctgccagtccatctatactaactgcgcacccgccatagcacgtaccatgcctccctgcaaacaccctacat

SEQ ID NO: 192752 - DNA, 407 bp, Glycine max
  unsure (1)..(407): unsure at all n locations
ngctnatcctgtatcataacttactagattatattataccgacgacagaacaatnaatatatgtaattttcaagacaacacgtcaaatatattgtgactccaaaattaacaagagaaaagcatttttctgttactaaatttacgcactaattcatatacatccaatatacctgacatatcaaaagacctccaagacgtattatctcgtttttggcataaatcgcaaatactcatgttaacatatataaaatagattgtttgattatctaaccgcagactccttctgtaacggaaggcgtgacaaatggagcgtcacgttatcatgtcacatcagaaccacatcattatccgttttcctttctccttctctttctaacccttctccccttagtagtaccaggagatag

SEQ ID NO: 192753 - DNA, 403 bp, Glycine max
agcttatccttatggcttgcctctggactttactctccgtgccaccccggaagatttaagccaagcccctacttttgaggggcaactcccgccttatgacgactatcccgggcaagacgatgaggaaggagatacccatcttggccccctgctccacctcaaagatccgtccccacatgaactaccccaaccgaacatagtccgccatatcccggcctcacccacacccgtaaaagaatctgttcccttcgcggaagataagggaaagattgaggcgcttgaagagaggttaagagcagtcgagggccttggcaattacccattctcggacttagcggatttatgtctcgtgcccaatatcgtcattcctcccaagttaaaagtaccggactttgataagtac

SEQ ID NO: 192754 - DNA, 401 bp, Glycine max
agcttgagatgaggaagtgttgaagggtgattcttcctgcttttattgttgaccacagagtggtacctggagatatgtcgcgggggtcaggagaccttggggacgtcaggtggggtgctattgcccaaaaccaagcttgaccaatcccgacccaacccgggcatagtcggtcagtgagaacctgtgatgtacctaagcaggcgagctcctggcagtcaacagataaaaggaacaaagaccacaaagcaaggaggcttgtggtggctggccagctgtgaaacttgactgatatgtgagatatgatctctggtaatcgattaccaagggtgggtaatcgattacaaggcttaaaaatgaagacaggaggctaagatggtctctggtaatcgattaccaagggg

SEQ ID NO: 192755 - DNA, 426 bp, Glycine max
  unsure (1)..(426): unsure at all n locations
tgccgccaagctcgcccaggcgagctcagctcgcctaggcgatcaagggtgcttcctccagaagcaacagccttctggaggaatcttctggagggcccaagtgggcctggttgctatttacacccccacttttactaaatacacccccctgntcccttttttggtgattctttttccgtaacgttacgaaactctacgaatttcgtaacgatacttattttccttccgcaaggttacgaatccttacggattatgtatttactcttttttagctttcgaagaagttacagaaacccataaattgcacaaaaacacctcttttcgactttcgccacattacggaatttcacggatcgtgcaagcctgcttccttttgatttctgagacgtctccggacttcatttattgtgcaacacaggacgcatg

SEQ ID NO: 192756 - DNA, 419 bp, Glycine max
agcttgaaggaggttttggccatgacgaaattggaagagaaactgtgtatctacaaatttgaaacacgaaaacattaaaattttcgtataactacgaaatcgaaaaggggggaggtgcaaagttttacaaaaacaaaagcaaattcacaaacctaacagaaaaggatcaatgattgaaacgagggtttggtttctcaaaacgaaagaaagaggctatgtctctgtctgggagtgaatcaaatgaaacaaatgaagttgaaactagggtttgatttgatgatgggaaagagtggagggaaaaagtggacggagaaatgaaaagtcaagcgagggagaaacgaagagtcgaggctagggatttcaaattaaagcacacgcacacaaaaacaacgacgtttttgtataaaagcccgacattg

SEQ ID NO: 192757 - DNA, 500 bp, Glycine max
  unsure (1)..(500): unsure at all n locations
tacgtgacacttataatactaagctntccaactattgtcgagttagaggctcaactgaaaggataatgaagtctttgacaacataggaagcaagaccttggtgatgtagggagcaagaccttgatgatatacggagcaagactttggcggtcttgggtgaagtaaaaaagtagatgacattctcaagtttgagttcaaccttattaaaggtcttgccactcatgtggtggcgttttctttcgccttgcagagcttctcctcttatgcttgtgaggagttagtgtgatttgcacctagttaaaggtcttgtcgatcattatggtggtagttcctcttgtagaacctatacctctgactgtggtcgtcgtggctcttaaggagttagttgaccaaagggttgcctcgggttctgtaagagagagagagagagagataacgagagaccgcatggtatgtgtacagcggctccatggtggacgccatatgtacttactaaaatc

SEQ ID NO: 192758 - DNA, 413 bp, Glycine max
agcttcatagactcgtaagaatgatctatgttatacaaaaataatattatatgacctatcaatattatacaaattcaacattttaacaatattttaaagcacataaatgcataataaaacaaactacaccaagttgtaaatgtaactacataattagaaataaccttatatggtaaggcatagaaccgcctttctattggttattgtatattgaacaacatattttgagtgtataagtgcagaatctatttgtgaagtgagttttaatatgctatgtcagtcctatatttaagtgcagagactcggggcaaaccaaagaaaatagaaccaagttaccaaccaaaacagaacctaccaacaactaaatatatcatttgatgagggtaataggatcggaaatttaagatttggga

SEQ ID NO: 192759 - DNA, 409 bp, Glycine max
agcttccacgttcaatttcgagcgtctccatatgttacgggacttaatcagacatccgagaaaaaagttagtatcgtttgagttggctcagagattcaacattcaatttcgagcgtctcgatatattacgggactcaatcagacatccgagtaaaaagttattgtcgtttgaattggctcagaggttcaacattcaatttcgagcgcctcgatatgttacgggactcaataagacatccgagtaaaaagttattgtcgtttgaattggctcagaggttcaacattcaatttcgagcgcctcgatatgttacgggactcaataagacatccgagtaaaaagtttttgttgtttgaatttgctcagaggttcaagattcaatttcgagagtctcgatatgttacgggactc

SEQ ID NO: 192760 - DNA, 479 bp, Glycine max
  unsure (1)..(479): unsure at all n locations
ntacagcaattctagtaatgacccactaacctagaagtataataacttattgccattaacctagggaattaaaacaaactaaatgactgagtgtaactgaaattgttggcaaccaaaagtcacccccaacagccaacaagtcaaccaccatttggtctcccaaaaggctgatgcctaagttgccaattgggcccttattacaacttgaactaaagcccttctagttgattaacccaaaacatatgtttggtcagccaactttacaaggattgggccattatttagacaaactaaacactctaaaattgaaataaagtggtgtcatttaatccctccatttggccatgatacaactcacaaccttggacttttctcctcgagacttgagcttgtattcaaatagtatggacagcacttgttgagaagcttcttggctaccttgctctacccttgtataagtcctcaagtcttcaagggat

SEQ ID NO: 192761 - DNA, 417 bp, Glycine max
agcttctaaactttatacaagaatgaagctctgttaccacttgttatacaagtggcctcagatatcttaagaagggggggttgaattaagatattccaaactatttcccctaattaaaaatctatttcactttttactcaagttatgaattcccttaaaaacaatcttcttaaatattaattcaaatgaaacaatttgaatatgaatataaagcaataataaataaaggagattaagggaagaaaaaatgcaaactcagttttatactggttcggccacacccttgtgcctacgtacagtcctcaagcaacccgcttgagagttccactatcttgtaactcccttttacaagttttaaacacacaaggacaattcttcctttgtgtttagaagtcctttacaacaagagactcatag

SEQ ID NO: 192762 - DNA, 398 bp, Glycine max
  unsure (1)..(398): unsure at all n locations
aagcttcccatgtgcagagtcacaccttgcatgcttgtgtcatctatagaggaatatgtaagatgcctntggcatattcttggaatattccttttatacttacatgaaataaacataaaacacaaagtgaatctcatttagttagtgacctacgctataagtagaaacatgtgtacgacttgtcataactctgatgaatgagaaactatgagacacacttcaaagttcaacttctctccctatcctcctttaatttccacgcctctctctctctctctctctcattctcttcctccattgagagcattctctctaagcttcttatccaaggcactctcttggtggtgaagcttctccttacatggcttattctctagtggatggcaccttctttcacc

SEQ ID NO: 192763 - DNA, 399 bp, Glycine max
agcttccttaagaagatttgtttagaagctatgagctttctacacatacctctctaatagctaagctcacctccttgagatgagaagctagagcttagctacacaccccctataatagctaagctcacccccatgacaaaaaacatgaaaataaaaaaaaaaagtgcttattacaaagacaactcaaaatgccccgaaatacaaggctaaaaccctatactactagaatggccaaaatacaaggccttgacgaaggaaaaacctattctaatatttacaaagataagcgggctcatacttatcccatgggctcgatatctaccctaaggctcatgagaaccctagggcctttccttggatctctagcccaatctacttggagtcttctaaccaatgccc

SEQ ID NO: 192764 - DNA, 457 bp, Glycine max
gcttagcctccttacgaatcttcttaaggaaattcctcatggaggggagctctattatgagaggggtatgtgtagctaagctctatcttctcaaggaagttttcttaaataaccttctcaaggaagttttcttatgaaagcttctcatagaaactacctattctataaatagaagcatgtattacataaacctttcaattggggtatcgatgtcatgggtccattcccttcaattcctcaacaatcaataacttccacttccatgatgttttgcagaggcatctcatttctttgggaaattcctcccattctctgactttggtcacactttaataccagatgatgagcatctctacaacattctggcctacagaatcctgactgtcatacctcggctgttgtctagcctcctcataacgcctccacatggtgaattgtacaatgccaaatattcctt

SEQ ID NO: 192765 - DNA, 397 bp, Glycine max
  unsure (1)..(397): unsure at all n locations
agctncaaggaagaaaacaatgtttggagaaccactttattggctcataaggtgaggactggccaagcttgtaagagtataactctattagtttaaagctacctatggttagtctgttatggttaggttaactgtgttagttagttaattagaatctcttgttgcataaatacagttgtaaacagagaatcattaactaatcgtaacatctcttgtcataataatggatccattatctctctcttatatgttcctctcccaaagctttataaactcaaattaagtcatatctctagctcatgttggataaaacctccacacttgacgtgcaaataaggacggccctacagaagctgccgctaaggctggctaggggtgacaccatataaggccgatt

SEQ ID NO: 192766 - DNA, 444 bp, Glycine max
  unsure (1)..(444): unsure at all n locations
cacaaaattcttattcaaggcaataacagttcttgcatcaacaatacttgatctagaacaataatntataaaaaaggtttacagaccaatcactaacaagaaaatgaataatgttgagttgtcaacttaaaaaaggcaatcgtgttcaataactttacagctgttaacataatttatacctgttatcaccaacaaagtctgtggagaccacatcatcttcagtgtcaccaacaattcccttcaactagccctctgattcctccctgagaaagacaacattatataagacaatacaattgagaaggaccaatcccataatggaggcctttattaataacaagtaatgaaaacttgctctaagacccaataatacaccacatatatcagtagaggagaatcaaagaattctgcaatacttgatagcatatttaattatatcatatg

SEQ ID NO: 192767 - DNA, 396 bp, Glycine max
agcttattgaagtccttcggattcagattgtgtgtttttgactgtatggcatgagttgaagtgcgaagattgagacttatgttggttgttgattgatggaaagactaaacacttgtgcttgagtgaaaaagtgactgtgaggctttggttgatgatccttcctttatacatgtcattcttgctagcttatttcagttgtgatgcttaataatcatgttcatatctttgaaaagttgcatgtcttgtgagaagctgttgattgaaacattgtatgccattcatgtcatgtgattgaattctttggaacaaataccttgtgaataaccactgtgagtttgtcacttgaggacaagtgaattggtctttctttgcttgaggacaagcaaaactgttaat

SEQ ID NO: 192768 - DNA, 470 bp, Glycine max
  unsure (1)..(470): unsure at all n locations
ttaccttagaaattgtgtatgtcatcaatgttgaagttattaatactataaattattaacaaaacatgtccttgttattttcaaaatagaaatctcaatgaagaacgaagagcccaggttaagatccatgtggtcacacctgagactctagtaacaacattaacagtttgttgttggcttcaaatcacgactacttgtctctgagcaacaaatagcggtggaaggtaaaggaacaaatgatcaaatacttggacgaattgtatgacaagcttcaactggtgaaacgccatagggaagttgtgttcttgttgatcactctttaacttaaaatgtaacaaagcatgattatcnttacaaaactaacgaacatggtgtcaattgatttgcagcttctttactggtgatggcatcctcagaatcatgaacaagtatgaacaggtctcatgtggttcgtaaatattatctatggc

SEQ ID NO: 192769 - DNA, 400 bp, Glycine max
agctttataagcgtaggtttgggaggcgaatgtcaagtggtcgcgatatacgaagatgatgtcccgagtacattggatttggtacgaccgtgccctcctgatttccagctgggaaattggcaagtggaggaacgccccgacatttacgcaacgagcataatgtaaacctttacggttttaaaagctctatagttgggcctaggctttagagtttttccttttgttaaggctttgtgtcttttgtttttgaatttataatacaatgatctttcttcatctgttcctatgtctctacccattctcatccatttgcatgtttacttctttatttctgaaatgacagatccgacgacgagtcccccgaaggtactaataccagggacctgtctatcaacttcga

SEQ ID NO: 192770 - DNA, 428 bp, Glycine max
  unsure (1)..(428): unsure at all n locations
gtagaatggctagacatgatacatgtcatggtttggtttggctcaatgataanagggatgccccacattatttccatgacacaaatgccaaaatgatgatttggaaattttatgccaaactggtcatgcatgcacctatgtggacactctagtgtcaaatttttatggtcatgtgatgctagggctcacgattcatttcctctattttagtcatcccaacgtttccaaaatatgctctttaatcaattcgtgcattcatccgagtccatttcgggcgtccggggaaaacttcacagcattcacccttcacgtgtatacacactgtttgcaaaaactaagtatgatcaatgaattttttcaatgaaagttggaatatctcttttcaaagctgtcggtttagctaacacatattttctttgtctcttttt

SEQ ID NO: 192771 - DNA, 404 bp, Glycine max
  unsure (1)..(404): unsure at all n locations
agctnttcgcaaagcttacggttaaatttgggacctagccatggcagaggtctccacataggccattgcctccctcgcccagtattatgaccagccattgaggtgcttcacctttggggacttccagctatcacccatggtggaagaatttgaagagatcctaggatgccctctagggggaaggaaccatacctcttctcaggattctatccctctttggctagaatttctaagatagtccaaatctcggcgcaggaattaaaccacagaaagcaagtaaaaaatggggaggttggaataccgagaaaatgtttggaggcaaaagccagaatcttggcaggtagaggcgaatgggccccattcatagacatccttgcactcttgatcttcggaggagtcctctt

SEQ ID NO: 192772 - DNA, 465 bp, Glycine max
  unsure (1)..(465): unsure at all n locations
agtttaagttagtctaaacctaggagggctctctattttgatcctantccaacaagagggatctgaggacgaagcattgattgattcattcaaactacggatcgaggattagtaacttacgctacagaatagaacacaaaagcatgattgattagagaaatatctttatatgcttcagctggtctgttagaaagacccaacatttctacctactgctgtcaatnttacttgcattttttactgtttttagcctggacttagtttaattctgttttaaatcatcaattatcaatgtttctttcaacaatgccttatatatgaatgtaaccatgtcttagactagttctgtgagttcgattaaccctgtaacaatgtttctttctgggaaccagatttctcttaacatatttgcataatgagaaatggaccgataagatctgaggggaaatctacacacgcaagtgc

SEQ ID NO: 192773 - DNA, 402 bp, Glycine max
  unsure (1)..(402): unsure at all n locations
agctntaaagtggcatatcttaaaggtaanctgnatctgctacacgggagactaatctggnggttcatgaaaacataaattttactaactagaatgaatgctgggtagagcattactaccattatcaacataataaattacctggaatagtgggtggggaaccctgctctccatagccaagttttgatggtattttcagcttacgcttctcaccaagacacattcccaataatccctggtcccaacctgcaaagagaggaagtgatcatggaatattctatcttgaaagatttcccatcaatcataaaccagtaatttgtaataaaactagattatacaatacacacatgcatgcatgtgagcataaattatagcccatatatttggtggctatgtacatta

SEQ ID NO: 192774 - DNA, 409 bp, Glycine max
  unsure (1)..(409): unsure at all n locations
ttggcgctgtatataactatataacagcaccaaggttctattntangggacaccctctctccctcacgggagactctctctcccctcattcttatatttatagacttcagctcttagaactcttctcactctttcatcttataattagtcgcctcttccatctacaattagccagctccagtactctttaggctctatactatacaaattccattactctatttcgattaatcggaactgctatagtccgcaaccgcagttttcccttgatgatcaagctacagcattctctgaggttctattattaccgctaaatctgtctacctttctattcactactactttgaattcgtgctttaattcatgctcgctagagcatgactaatgttctgcctcaattacattcatg

SEQ ID NO: 192775 - DNA, 393 bp, Glycine max
agcttcagggtttaaaattttgattgcaactttagtgtgatcaagttggcctctaaacacaggtccatatccaccttcacctactttcaatgatggagagaacttttgagtagcctcttcaatatcctttatgctgtattttctgtacctagtatcgttgttgatcaaccgatttaatgttctatccttctcttgtgcctctctcctagccttgacctctaactgaaatcttttttgtgcttccttttcaaccatcttaatggcttcctcagctgcttccaaggcagcttgagctttaactttctccatttctaccggttctagagctgcctctttaggcaacttagtagcttcctcagatatacgttcctccttacattggttaatctcctt

SEQ ID NO: 192776 - DNA, 433 bp, Glycine max
tccaagcttattctgatgatgccaaagactcaagtcattattaagattcaagcgagtttcaagaatcaaagagtcattcaatcaagaatcaagattcaagattcaagtgaagaatcaagaaaagactcaagatatgcaagagcctcaagaaaaacatctaaataagtataaaaagaatttttcaaagaaaagatttaataacacaatttgtccaaaagatgttttcaaagaaaaatcttttaccagagtttttactctctggtaattgattaccataaggcagtaatcgattaccagaagcccaaatacagtcttataactgttttacaaagtagtaattgattaccatgggcatgtaattgattaccaatggttttgaactttggatttcatattcaagagtcataacttgtgataaaacatgttcaaacgt

SEQ ID NO: 192777 - DNA, 416 bp, Glycine max
agctgggtttgaggtacttacccgttgaagactgaagaaaacgatattcgaacgattaatcttgaagaacggtcgagaatcttcgcgtaattactcacggaaacgttacggaaacgttacggaagcgccttggcttggattttcttcacggaactaatgttcctcagcaaatttgaaagagagagaagtgcctaaggggctgaacccttttcttcttcacttcttcccctatttatagcaaaataggggagaagcttgccgcccaactcgcccaggtgagctcaactcgcccaggcgagcaaggttgcttcctccagaagcaacagccttctggaggaatcttctggagggcccaagtgggcctggttgctatttacacccccctgtttactaaatgcacccccctttctattttt

SEQ ID NO: 192778 - DNA, 452 bp, Glycine max
  unsure (1)..(452): unsure at all n locations
taccatcatcgacgtcatggataagagcttgaaggattgtgaagatgagtgaanggagacggagagaacgagcacatacatttgtgcctcatatgaggtctgaacttcgaagtttaattctcatatgataaaagttgataaaatgcacacacatgggctctatttatagcctgagtgtcacacagaattggagggaaatttgaatatttattcaaatttcacttgaatttgaaattgaatttgtggagccaaattttggagagaaatatcactaattatgattagtgaattctacctatagttcaacccactaatccaagatcaagtccaagattccccactaagtgtacttatgtgtgctgaggcgtgtaaagcctgaaggacatgcctaaattgtgactgtatgatgtggcactgaggtctacgaagcacaagctcccttcccctctaaa

SEQ ID NO: 192779 - DNA, 415 bp, Glycine max
  unsure (1)..(415): unsure at all n locations
agctncgnccacatatcccgcatgtaagactatgcctaatcttaacagcattattgtcacagcataattaaatccaaaacttaacccgcaaatccctcatgtaagattaagctttgatcctgcttctatcaagttctaaggcaacaatacatttcccaatgctaaagccacctaactatgcacacaagtgggtgatcagaccaaaagcatacaaacatcaagcattgaatgaatcattgaacacaaaaaacataatcaattagatattaggtatttacattagctgttcattaaaaatccccaactagggtgtttagccagccattacaaagaaaccctaattataaaggagattaaaagcagagaatgattgcttcttacacaagagaggggattcctcctcctcttctcagca

SEQ ID NO: 192780 - DNA, 359 bp, Glycine max
cagcttggtccgaggcactgacgccgggaagattgaagaactattaataacgaatgaacaacgtcgaaaaacggtccaaaccttcgcgaaattcctcacggaaacgttatggaaacgtatcaaacgcgcctcggcttggattttcttcacggaaacaatttttccaagcacattctaaagagagagatgtgcctaaagggctgaaccctttttcacttcacttctccccctaattatagaaaatcgggggagaagcttgccacacagctcgcccaggcgagcagggttgcttcctccacaagcaacatccttctggaggaatctcttggacggcccaagtgggcctggttgctattcgc

SEQ ID NO: 192781 - DNA, 400 bp, Glycine max
tgacgccactcatgacacatgtgcgcaggctgttctcctttgtgagacatttgttgcacgacatgacagcatggcatccctacatcaaagtcgtaaaatcatcacacatgtacgctatgaatgaaacaatactataactacacagcctgctaaatgccatactctacaaaggcatgtccattaacctaaattgacctcaaccttattcgcgcacatgtggacctcatatctcacgcccatgtcatcaccacatcacatgggagtccactgattagcataatgatatcagttctccactcttgtatactacactggacataatgctccatgctctccagaaagaataaccctgcgggcagccatggctctcatgatataacttctaatgctataaacattg

SEQ ID NO: 192782 - DNA, 410 bp, Glycine max
agcttggcagaagtctataccgctgatttaatgtaattagagcctatagatttcctttctcttttgttttctgaaatctacctcattaaataaacaaagagatcttgtttcatctgttcttgcagttccaccttttctcatatcattttgcatgtttttgtttctttggtcttgtttggtatagatatgagggtcgattctttgaggatcctaacaacgagggtttgacaatcgattttgatagagatataagccaaacgataaacgaggaagaggaagaggacgtcctgtcaccagagttggagaggttggtcgctcaggaagaacgtgaaatgaagccttaccaagaagaaaccgaattggtaaacatggggaccacggaggaaaagaaagaagtaaaggtaggaacc

SEQ ID NO: 192783 - DNA, 483 bp, Glycine max
  unsure (1)..(483): unsure at all n locations
ttatgattatatcaatgacatgtctgatatatgatattccttanacataattggcaaccattcataacaaatgaaatctttagtctatgtttattcaacaccaagaaagttaaaatatacaaggaaaccagggataagagcatgataaggaggacacaagaattttaatatggcaaagataaaggcaaagaacaaattatgaaactgaatttctctcaaggtaaaggttatggctttaaaagtagaatccttttgtagcatgtggctggaaatttagttattgactatgaaataagataaaatcaatcatctggattcaatgattctaccaacagaattattaactatacctccatgtccctctgttgaaaccatttcccttttagcatgaactcgtgatccaataaatcactttttggatcatatttagctctggatgccaataacggatacaatcataacgtattagcatataataagtta

SEQ ID NO: 192784 - DNA, 418 bp, Glycine max
  unsure (1)..(418): unsure at all n locations
agcttataagaacaacattgccttaatcattttcaaatatgtatgtgaatcangacgcatcaacaagaataaagccaaggctattgtgctagcaatcaatggggcaaaacacaccaaatgattataatgatggatggctcaaattctcacaaaggtaaaatcatcactttcaaattgagctttcaaaactatcatgacatgtatagaagaatcaatgatttcaagtcacaaaatgtcaagaacttttattttcaaaacaattacccatctcttgaacatatcctataattcaaagaaaaacatgcaaagtcgtacgtgcacatgaaattgacccataatattaaactgaaaatccgacgaaactaacaacattaacaaattaacacaactaacaaattatcaaaaccaacaaaactat

SEQ ID NO: 192785 - DNA, 483 bp, Glycine max
  unsure (1)..(483): unsure at all n locations
gctttttganaaactttcttgagaagcgtgcttgagagatctttcttgttaagctagagcttagctacacacacgcgtctcataactaagctcacctccttgagaagctgcctctagaagattcctaaagaagctagagcttagctacacatacctctctaatggctaagctcacctccttgagatgagaaactagagcttagctacacaccccctataatagctaagctcacccccatgaaaaaatacatgaaaatacaaaaaataaatccgtactacacagactactcaaaatgcctggaaatacaaggctaaaaccctatactactagaatggccaaaatacaaggctcatacgaaggaaaaatctattctaatatgtattaagataagcgggctgatacttagcccatgggctcgaaatctaccctaaggctcatgagaactctaagacctctccttggatctctggccnaatctacgt

SEQ ID NO: 192786 - DNA, 402 bp, Glycine max
  unsure (1)..(402): unsure at all n locations
agctnaaggatcacattatattttaaattattttgaaaagaaattaatctataattaaaacttgggctcctaattagaatgaaacccatttattacatacccatgttggtgcactattaggcttgaccatgaaatgtgttgataacctctaaattctcctttggtctctttactcttgcactctttggtatttccagcccaacctttgggttgtcccttagagatcttcctttcacaagttctttcagtccaattaagggattatttctcttacgtttttcttctcttcttggagaccttcacggatctctatcattccattaatctttagggaaatttttcctcaaatttaagcctcgaatacctacattaaaagatactatattaacttctttaaatgtt

SEQ ID NO: 192787 - DNA, 454 bp, Glycine max
  unsure (1)..(454): unsure at all n locations
ctattacgcgaactatacatactcaactctagagaccttttcccacttttagggattgcctttatcaacggtgntccatgtttatgacacgctctaatctacgcttaccttcgtgaatgatagaactggcctcttgcctttttccttcttccccatacaatgaaacctgtccatccctagccctttccactttttgcatagacccaggctccaagttacttttcagcccttcctcttgttttcttctagcacctttcttcaccacatccaaggttcgcacatagcggtttcatctagtttcacttcactatccaacgacgatttttccattaattagagttttaatggtgggcttctgaactggaaaaacaccttctaactctcttggagactaagactccatctggtgaggtgcttctccctctaccaccatcttgacttaccctcctaacct

SEQ ID NO: 192788 - DNA, 386 bp, Glycine max
agctttctccactaagttgcctggtgccttttatgtctttttctgacggcagttgtcctagatgcatggaagaatttctccaagaacaccctcttaaggtcatcccagctgaaaatagacctgggggcaaggtagtatagccaatctttggccactccctccagagaatgaggaaaagcctttagaaagatatgatcttcttggacgtcagggggcttcatggtggaacaaacaatatggaattccttaagatgcttataaggatcttcacctgcaagaccatgaaacttatgcaacaaatgtattattccactcttgagaacatatggaacaccctcatcaggatattgaatgcataagctttcataagtgaaatcaggtgcaac

SEQ ID NO: 192789 - DNA, 434 bp, Glycine max
  unsure (1)..(434): unsure at all n locations
tctctcatggaagtcaagagcatgatattgctctcataccgttgactggtgagcangtataccaccggggtcaacacctgaatactgtatttggaacgacccactagaaggatcacagtcggagttgcatatggaataagaggtccattttctttgatctttcgtactggtctgatctacatgttagacattgtatagatgttatgcatgtggagaaaaatgtatgtgacagtgtgatatggacccttcttatcattcaatgcaagacgaacgatggcttgaataccacgcaagatcctattgatatggggatacgatcacaatcgcatccaacgtctgatggaacaaaatctactgcgctcacttgaatgctttgtccaaaggacacgatagttttctagtgtttcgccggtgtgaagtccacaagaactctt

SEQ ID NO: 192790 - DNA, 404 bp, Glycine max
agcttgacttggcgaattgattttagccttattttcgctttagttattagtcaattcaattaagaatgagaaatcccaaagcgaaaacgtccgattgatttttttcgcttcattttactaaaagatattttttattattatattattattttacctctttttttatttccaacgtggttacggcacgatcgaatggtcggaattcattttaaccgaaattaacggatgatacaattcaaatgatcggtgtaaatttattttattttttgattaggcgagaaatgacttaaataaatgactgaagcacgtaaaaaaggggtatagaaagcgaatgaaaacgagaataaaaatacatgaaacaaaatgtggaccaccacgggtacatagaatgaattgaaaagctc

SEQ ID NO: 192791 - DNA, 434 bp, Glycine max
  unsure (1)..(434): unsure at all n locations
tacggacctatgaaactcagctgcactattgaatgggatgttgtgtgtcatcccattaatgaaagaggtctcgggcttacgtctatagttcttatcaataatgcggcctcccttaaactttgctaaaattctgtccatgcacatgaggaatggacgcattttctgcaggccaatgttctcaaaaacacaaaccatctatccttttacaagaaatcctcgctttggccttccctcaatacgcactttgaggaggtttgntccaatattgggtgggtccttagtgcaggagctttaactaacttttggaacaattattggtgctcgctctctcctttgattgcagctctttaacctcccccccctcggtcaacaagtgttatccttctcgtacatgattgtagattagaaaaagttggaatatccgcctattattt

SEQ ID NO: 192792 - DNA, 404 bp, Glycine max
agcttagcacgccttatgaaaatgtactcatgtgctaagcgcgacaaccacgtgcttagcatgagagcttagaaaacatttttatgcagaataggcttagcgcagcaggcacgcttagcctaaatctacaatttttcaaacagagggagatttgagcttagcgtggcaaggcgcgcttagctcaacctcacaaaaacatagcacaggtttagcgagtaggctcgctaagccttattccacaaataggaaaaatagagacgaaattgcgcttagcttagcagccaggcttagtgctgaacaaaattttgaaaaattctaagtgtctgaaatagtagtctcactcagcacacaaacgcgcttagcgagttcaccattgatgctcaacagagaagatgaatgttgtc

SEQ ID NO: 192793 - DNA, 363 bp, Glycine max
  unsure (1)..(363): unsure at all n locations
tnctagccctacatgggatggagcttttcatgtcttggagaggtatcaaaacactgcgtataggttggacctcccataatagtatcgagtcaacaccactcttaacatttctgacatacttccttttgcaagtggagctgatattgaggaggaggaactatcagtatttgtggtcaaatcctcttctaaggcaaggaggatgatgcatcccttcctaggaagggaccagtccctagagccataatcaacaggctccaagaggattgggctanagctgttgaataaggccctanggctctcatgaacctcagggtagatgtctgagcccatgggccaaagtcgggtcaactatttttgacatat

SEQ ID NO: 192794 - DNA, 403 bp, Glycine max
agctttaggagaaaccattattactaaggttgtttctaaacaaaaatcaagtgaggaagctttcgcgcgtgtcctcattgacaaacctttattcaaacctactcaagatcttgataatgctaaacgaataataagggagcttataaaaactaactccttatttgatggcgtcggcgacaatcatagcgaactactaaacaagatgagtatggtggttaatgtcataccatatactccgcaatgctttgtaaatgcttccaatagagaacaagaagtacctccagattaattaatgtgcttaatgaagatagtgaccaaggcttatatatcacaactgagatacgatcagtgtcatacaagaataataacccattgaactccatacactggataaccccctcca

SEQ ID NO: 192795 - DNA, 340 bp, Glycine max
gacacttaaaactaagctgcttgcatactcaatcgtgtagccatcattgtgttcatcactatgcctaacgatattatcgctacatcatatgctgtaccttcacattgatcacatgttctaagacaacatcttaagcactacacaccatctctcacgctcgattcagatacccaccatgacatagtaagtcactattgatcattacacagacgttgtgcaacatatatactaagactcaatcctatatagaatgtggcatcttatcattgaacaataacgctagggcacctaggatcacataatgaaatacaccacacaatgggttagcaggtcactctta

SEQ ID NO: 192796 - DNA, 410 bp, Glycine max
cttaagtcacgcggctgcagctggatcacccgaccaactatgactttaaccctattactggtagaggatctggccctcataaagaaaaattttgtagttacctgggggtagtggcgtgggagaaaatccctattgtgcattctacttggaaagttgttctcgaatgtctaaaaaatcttatatgggatgacattttggcaagtgcacttaagtaaccactttgcttttatttatctttaattcaggtgctaatgtcgttaatgcaataagtgtttcaaaactatttatttatttagggtaaatttaacatccctaaaggaacatctgtgaagaagaaggtcatgtccacggttgcaaccagatggaggcagtttaagtcctccctcaccactagatgtgtatatgctgag

SEQ ID NO: 192797 - DNA, 313 bp, Glycine max
ttcacaaacaagtcacttgacgaaatgtcacttctggaaatccatcttttcgatactagtcactggcaatcgattatcattaaggtgtcatcaattacacatcaacagatgtgactcttcattttaaactttgaaaattgaaacgttaaaagctcacgtaatcaattacaggtatcgtgtaatcgattacacaagttaaaaatgacttgataaatgttttatcactatctgtgactattgaagtttaaattctaacgttatgaaacattggaaaatgagtacatgctcatggtaatacaatacagcttcgtaa

SEQ ID NO: 192798 - DNA, 402 bp, Glycine max
agcttggacaacaaaattttacaactaatattataaaataaataaaaaataaaaatgtaagataaaattaaatttatattctttttttatattcttcttcctatttatttttgctaaattgcattgaaagtgaaatatatacaatattataattataataagaattcagaaaatataatttggtggagtaaaactgtagagtatttaattttaaataataaatttattaatgcaaaaaaaagaaaaacatgttggcttttagcaattgtgcaactttttttatgttaggtttataattttaatttttagagtacaattttaattaggatttataaatatttctgtaatattaatattcagggtatcaaaaaagaaagatatgttcagtttgatacaacatat

SEQ ID NO: 192799 - DNA, 476 bp, Glycine max
  unsure (1)..(476): unsure at all n locations
ggagatacaatattgtactaagaaagtatgaatcaaaccaattaaattaacaaaggctgctattaggtatctcatctcttggctatttcaagtagttatgcgtaaagacaataacaagaagaatcaagctaagaaaatcgtcaatgtcaactcataattaattaaaacattaacaaaacaattcctacataagtttactaattcaatttataaatatattgcattttgttaaagacttatcaatcctcaatacttattcctgtctcgattataagtaaaaaaggacatatgtcacatttattaaggaaattagttatcttcattaaagtgtgcgagtttcaattaaaaaatgagnttttttcctaaattatctttcatttacactcgatatcaangcataaaaatgtttttggtcatactacaatgaataatattnttgaatatagtctcattaaataataaggcaaaattaataa

SEQ ID NO: 192800 - DNA, 413 bp, Glycine max
  unsure (1)..(413): unsure at all n locations
agcttgggcttggtttattaaaattcctatgtatcatgagcaactatttgtgtcctacaatgacttgcgaaacaaaaggtgatcaaataacaagcagagatttaaaaggtactaggttgcctcctagtagcgcttctttaacgtcttgagctggacgcctgatgacttgtcgatcacggacctagtactttgcttaccttcggctttggacttggtcgcctattggtcgaccatgtgtcgtaggcaatactctaacctttttgtggatgagctgaggggctctagaggtggcgacggtgcatttattgcctgttgctggccatccccaggctgctgtggtgtttcgccttgcacctgcctgngggcgcattacttcttgatgaaagctcgattagtaggggacctgatgacct

SEQ ID NO: 192801 - DNA, 358 bp, Glycine max
ctcagcctattggaacaaaataccgagctcttgctgtgctatttctttatttatctccttctttctccaagctcttattcatggcctcctgtggtggagagcttcttctagactcatcttctccttgaagtggcgcctcctctccctcttccttctccattccgctgccattcatcttccaagaagcaaaggaatccactgatgaagaagattctaggcctacaagctcctatggagcttgcatcacgaggtgaaagccctataggaggaacttgaaagagcacaagcatgttaagagaagttcaatacatccgccatcaaggtcacgaaaaagtgcgactaactaagggacgcatta

SEQ ID NO: 192802 - DNA, 381 bp, Glycine max
atgacaatttgtaaaggcaagaaacacacgcacacttttgctggtccatccctcacataaatcctgcccatttggtctgaatgaatgcttatcttaagaatagagagatcgctcatgagaatacttgatttaatcccatttctctccgcctttggcatcaacaaaaagccaaagcgcgtataacacttacggtatactaatcttacttaaccatccatacgatgttgatgataaaatatcaaccaaatcatgaagcaggaagcatgaaccatgacaaccatgaggcaacatccatgagtagatgaattatgaactccacatagtcaaataacatacttagtattggtccatacgtaccatgcgaataaggaagtagtacat

SEQ ID NO: 192803 - DNA, 477 bp, Glycine max
  unsure (1)..(477): unsure at all n locations
tnctagcggttctaattatacgggccgttagatgtattatatgctgtctatagcctagacgtccgtggatctcctctggggcggagtaagtgtccgccattgctttggccttggctagcaatcggggaagtccttgactcccgttcaaggtaagagcaaatcgtgccatccacatggttgcctcttggcgtaaccctctagcctccttttccacgtacacttaagcatactcgttcgccaccctatgctagtgggtcgcggctagacttagttcctcttggtacttgctgatgatggctaacattgtggtctctgtctcgcataaacgttgagacaaactcttcttgtacctcgagcaagccttaacttatccttcaaatcaaactgtctactcgcgattggtccctctcctctcttcngagggtaagctcccttgtgctaccccacagagcctctcgaatttgatccaccgtgtct

SEQ ID NO: 192804 - DNA, 397 bp, Glycine max
acagctttgatttaaatccacatatgcctacaacataaaaagaataatttcataaaccccgaaatatattacacaaatggccgaagagaacacagccagactgagcataccaagcggaatcaaacaatggcacttccacctccaccggaactctaagcagaagtaaccactctctcttcctcatattccttatcatccggtgggagctcatacctgcaaacagggcaagaatttcgagaactcaaccaaggaacaatgcaatctccatgatacccatgcccgcacggcaacctctttgccaagtctccaacaccgagcaaattcttacatatagcgcacgccacggcttcgctttcggacgcaatcttcaccgtcggcaacgcctcccccgacgctt

SEQ ID NO: 192805 - DNA, 231 bp, Glycine max
gagtactgaccttcaactgtgatcattacttaaactttcacgacattgttctgaatataagctcgagtggtgacaatattacatgtgatcatcactctgactggccttgatacatccgcactatgtcgcatatatcacaatgtaatcattgtattgcacgaggcaggtggtttgatcgtggaacctacctcaaagaatgaaatctctcctcccttcttgatcctccttcca

SEQ ID NO: 192806 - DNA, 389 bp, Glycine max
  unsure (1)..(389): unsure at all n locations
cacctgaagctgcagctgacctcctaacgaaccaaggtaatatttgggccttttttnaccncccccgagtgaaccatgttactccttatgtgctgccattttccactattaatcgactcagatctaagaatggaaagtacatcaaccaaactaaggataggggaaaggttaatgacaaacaacaatgtgaaatataatgtatttcttgacgcaaattttggaacgtattccaggtggaaatactgcaaaacattctaggacgcaaatcttgccaaaacctcaaaatgctgtctcttatattatgaaagcgatagcttgattctggtcacatttggatcaaatgaatttttgtcaatgatatctcctgatgtgctgtgtcctctgcattt

SEQ ID NO: 192807 - DNA, 415 bp, Glycine max
agctatgatggggcctagaagaaatacatttttgtcatcttcaaaaaggggaagaatgcgaatgtatgtatacatgatcttgatgatgtcacacatgaatctaaccatgctgcttctaaagataagcatttgcctcaagaacaattcacgattgcttcaacaaacaaagccttgttttaagatttactaatagaccaacccttgccttaaaacatagtgctttcaagacatgctaggctctggtaatcgattaccatgaagtgtcacccattaccacaagacacggttgataaatatctgttgacaaaggatttgaatctcaattcttaacatgtaatccattaccctatgtctgtgatcgattactacgcactaaactttgtgaattcaacattcaaacttataacccttccaa

SEQ ID NO: 192808 - DNA, 429 bp, Glycine max
  unsure (1)..(429): unsure at all n locations
aacctccttaactgcacanagctctgaatatttgaatagtatccttgtggaaccttcactcgacgaagacactgacaaaaacttatcttctccttctttgacaaagaatggcaggctgggggcaagtaaattttctttccatcagactttgtatgcaactgtaatcgtatacccatatcagctagatcttgtccgtgattcaagccatccttcgtcttgccttgaatgttaaggagcgttccaatcccattgccacaaacattgttctccacatgcataacatcaatacaatgtctaacgtcaagatcacaccactacggaagatcaaagaagattgaccctctcttccatatgccactctgacttttatccttcctttgggtctctccaatacaatatttatgaggtgaacccgctgatatacctgct

SEQ ID NO: 192809 - DNA, 403 bp, Glycine max
  unsure (1)..(403): unsure at all n locations
agctncttgcgtagccgctcttggtgctcataaaatcccaaaaacaaatccctcttattactagctattttgaattctttagttcctaaatgtacaaccttcaaattgtcgcttgttcccctctttgttttctgcaaaaaagaaaatcaatatcaaagaaaacatggagagaattgtcatggttattattactcgaacctgaaggaataacatctaaacaagtcattttattcttagaatgtgaaaactctgcatatttatggaaaacatggggtatggaggcaagtaagcatgtgaataccacaagtcattttctccaattcaagggcttgattaattgctctaggaaaaaagcatacatctggtatattgtttggattgcagctgttcggagcatttggca

SEQ ID NO: 192810 - DNA, 446 bp, Glycine max
tgagcccaaatcctaactcaccatataccttgacccattgtgagaatgtcaatccttaccctcgaaagcaaaatgaagagaaggaaaatttccaatcaaagaaataataaaagagaaggtaaatttccaatcaacgagaaagcaaaaataaaaggagagaatgcaaatttccaatcaaaggaaaaagagaggaaaggaaattcccaatcaaagagtgggagaaagcgaacagaaaagaaagaaaattcccaaccaaagagtgggagaaagtaaaaggaaggaaagaaagctcctgatcaaggatcgaaagaaatcataagaaatgtgcagaaaggtctttggaccggacaatatctgaataatacagaattgtcaccaaatgaactaaaggaaggagatgaaaccactaccttgaagtgttctctctctttgataccaaccaaatc

SEQ ID NO: 192811 - DNA, 399 bp, Glycine max
agcttattcttccatggcttactccctagtgtatggctcctcctctcacctcttctcttctatcttctgctacaactccatggcataaaatcaccattgaagctcaaagatccagcctccatagaagcttctcaagcaagcttccatcatgttgttttattgtttttattgtttttacatacagaaaatagaaaaataaataaatgaatacatattttatagctgttgttttctaatgtttttcataagatttctaacctgtataatttgtgagagatgtatcatttttagttgaaaggtttcatgcttgatgtgaaccattgttgcaattgtggaagaaataaatatgcttgaaaattctgaggtggatcatgtgtcataaaattatgccttgtgagt

SEQ ID NO: 192812 - DNA, 329 bp, Glycine max
gcctgaggcaggatctcccacaagagtatggagtcatcgccacttctaatatttctgatttaatccctcttgcaagcggagctgatattgaggaggaggaactaacagattcgatgtcacatcctctcccaggggcaagggatgatgcaatcctccctaggaagggaccagtcactacagctatgagcaagaggctcccaaaggattaggctacagctgctgaagaaggcccttaggctctcatgaacctcacggtatattcctgagcccatgcgccacacgtgggtcctaatatcttcgtcatattacactgggatggcattatattt

SEQ ID NO: 192813 - DNA, 401 bp, Glycine max
agcttcgcacttgataatgcatatcacatgttcagcgctaggcaatgacattcatggtgctccaagcaaaggtggagtatggaggattgccttgagagtccacacttaggcaatcatgaaactcagctccaaactcgaaagtgaaggacacatgaacaaccctaagcaagaacattcaaggggctccggaaaaggaccgagaatggaggattgccttgagggtcctctcttaggcaatcatggaacacaactccaaactcaaaagtggaggacacatgaacagccctaagcaataacattcatgtggctccggaaaaggatgataatggacgattgccttgagggtcctctcttaggcaatcatggaacacagctccaaactctaaagtggaggacacatg

SEQ ID NO: 192814 - DNA, 395 bp, Glycine max
ctaagccatgagagagcaaagatccattgaatgaaaattttagcttgctaaacaagccaacaaagggagatagaaggttgtcttcgaacccacagattgggtttggatgcacatgagaaaagaaaggtttccggaacaaaggaaatcaaagctttaaccaaggggagatggaccatttctagtgcttgaaagaatcaatgacaatgcttacaaagttgagctgctcggtgagtataatgttatgtccatctttaatgtctctgatatatctctatttgatgcagatggagaatccgatttgacgacaaatccttctcaagagggagagaatgatgaagacatgaccaagagcaaaggctacgatccacttgaatgactctggagggctatgacaa

SEQ ID NO: 192815 - DNA, 404 bp, Glycine max
agcttttgcttgggagaaagaaggacaaccttgtattatgcctcaggctatagtgaacttcatagtgcaaagtcttggtaatttactcattcaagaaggaatgttcctatatagggtggaagacaaagtgttgcaactgcaaactgaattgaggatgatgaggtcttacttgcaagttgcagatagaaagcaagatggtaatgaaagcctaaggaattggatttcagaaatcagagaagctgcttatgattatgatgatgtcgctgagtcatatgcccttagaggagcttcaagaagaaagttgactagtgttttgagcctcatcaaaaggtatgctttaaacatcaacaaattcatagaaacccataaggtgggatctcatgttgataatgtcatagctagga

SEQ ID NO: 192816 - DNA, 435 bp, Glycine max
  unsure (1)..(435): unsure at all n locations
agcgctcggttaaacatgagtggtacatgatttgngacttgtangattcaatctgggcaaaattggatgagggaaagagtggttctcgaaatcttcactctatgcagaattttgctgttgaaatgtgcagcagaattttgtataagtgcagaaaaatgcttgtgtatggctggttgtgaaaagggtagtacatatgggggtctggacattctcttgcagatcccaacagtcaaaatgtatacttatgttatatagacttccagtaaaattttcgagtcgatccaacggttaacgaatcggaacgaaggaaatgttactggggtatttgtatgtgacaagctgcgattatgaattgtgttatgggcagaagtttctcgctatgccctgttttgcttgtttttgtagtcatgatgattgatgtggattacttggatg

SEQ ID NO: 192817 - DNA, 408 bp, Glycine max
  unsure (1)..(408): unsure at all n locations
agcttgtaagactttaatatgaacgagactttttatttaacaaatattgatataattgtgatttctgaacagtgatgtatgaacttttgcttgtttaacctttaaagctttgacaatgcttgctggtaacttttagaattgtgagttctgaaatgttgcatacagaaacagatatcagaaattagaggttgcaaataaaaaatgtggtttcaatcagatcaattaattggctagctagaggaaaataatggtcaattaatggatgttgttccttcaatcacccaagataaagctcgagcagtattcacatcccacttcacttgcaaccgaaatcaaaattaaagttgttgaactatgtgttgactcttactntatggcatagaagccaagaaaagacgtttaagactc

SEQ ID NO: 192818 - DNA, 442 bp, Glycine max
  unsure (1)..(442): unsure at all n locations
aagctccttcaactgcacaaggctcttttatttaattatttccttgtcaaaccttcacccgacgaagacactgacaaaaacttatcttctcctttcttggacaaagtatgacaagctgggggcaagtaaatnttcttcccatcagaccttggatgcaactgtgatcgtatccccttctcagctagatcttcacgggtattcaagccatccttcgtcttgccttgaatgttaaggagcgtcccaatcacactgtcacatacatttttctccacatgcataacatcaatacaatgtctaatgtctagatcagaacagtgcggaagatcaaagaatatggacctcttcttcttatgcaagtcttactttatcttcttttgggctttcaaaacagattaagtgttaacccgtggatactactaccagcaatgtatcgggcatatat

SEQ ID NO: 192819 - DNA, 397 bp, Glycine max
agcttcatagtcttacctgatgaattcgtttctacttcatgcactcctctaatgacaatagcatcacttctggcacctaattgctaggagtttgaaaccatcttctcaattaaatttctggcttcagtaggggtcatgtctctaagggctccaccactggcagcatctatcatacttctctccatgttactgagtccttcataaaaatattggagaaaaagctgctcataaatttggtggtgagggcaactggcacatagttttttaaatctctcccagtattcatataggctctctccactgagttgcctaatgcctgaaatgtcttttctgatggcagtggtcctagatgcagggaagaatttctccaagaacaccctcttaaggtcatcccaac

SEQ ID NO: 192820 - DNA, 426 bp, Glycine max
  unsure (1)..(426): unsure at all n locations
cgcgggtctgtgggactaatgtcaagtggttttttatacgaagatgatgttccgagtacattggatttggtacgaccatgccctcctgatttccagttgggaaattggcgagtggaggaacgccccgacatttacgcaacgagcataatgtaaacctttacggctttaaaaactctatagttatgcctaggctttagagtttctcttgttaaggctctgtgtctcttggtttgaatttataatacaacgatctttcttcatctggtcctatgtctctacccattctcatacatttgcatgtttacttctntactttttaaaaacggtagatccgatgacgagtccctcgaaggtactaatacctgtgacccgcctatcaacttctagcaaaagacgaatcataccgaagatgaagggaacgaggat

SEQ ID NO: 192821 - DNA, 402 bp, Glycine max
  unsure (1)..(402): unsure at all n locations
agctttntgctaccaaatattacacagtgcatactttaagtattaacatacaaaccaatacaggtatcctgctaaccaaatgaatatatcaacaaggtagttgccaaagtaattaccaaagggcgttctaatcacctatcatgcaacatatacattttatgaggtattttactatctcacatgcaatatgcctatacattcaggtgtcttcaatgatcacatttttgcttttcacatttcatttatacacatgtgcctactagagagtgaatttcatgttatacacttatttgcatttatttgaaaagtaatttcatgtcacacactcatgggaaaggcagaaatattttcactactcattcacattttgaaaattcatttcatgccatatgttcctatttt

SEQ ID NO: 192822 - DNA, 472 bp, Glycine max
taaacagttgaatgcagggcaaaagttaatgtccgtcgtcattaatgtccatcaccacatcccgaaaccccgaatataaagtaatgagagcatggaggtgtttttgtctgctgccctcagttgttcagttaaccaagtggttagactattaaggtgcatgagtaagccataaaagcctaagtagttgaatgtgggataaaggtaatgtctattaccacatctcgagaccccaaataaaacataaacaattagagatataaaatgttcctaatcattttcatgttaatttctttcatttcatttaaccattaaagtcgacaacttgtgtctgaaggtggtgcaagactaattagagttgctctcggtgccaaaactctatttgaagtttatctattgttgccaacatttgttctattgagacatctgaaattgaagccacacgctgcatgagttgaacttgtgattgctacag

SEQ ID NO: 192823 - DNA, 410 bp, Glycine max
  unsure (1)..(410): unsure at all n locations
tgcttgggcanatcacagcactcctacattgtatctntatcttgcntngcntaggggtctcgtcctttgtacgggaagccggaaggtccatatcaccttcttaattgtacacatggggcactgcgcccccaaatgctcaagtaagaagagataatttaccgggttctcgtgtccgtaaaatgcattcatatcatgcatcgcataagcatctctccataacatcataatggacatatcctgcttttgtccgctatcatattccatcctcacattttgcatgagtcatggcatcatcatgcatatgcgttcaacaaactttttgatttgcaaaattgcctaccactttgtttcatgtttgctcatccttgtgtttacctctacaaaaacaaaaaaaagggatgcgtgaaact

SEQ ID NO: 192824 - DNA, 281 bp, Glycine max
  unsure (1)..(281): unsure at all n locations
actcagctttcacantgctccacacaaacgaccaaaggcatattcctagttttactacccancataccggccaagacccaatacccacgaaaataatgtgagaaagaagcccacccctacctcgaatcagtactcgcacaacgtaaggatctgctccaccactccgacaatggataccctttgcgatgcagaacagaactggcgagcaaagcctgcagcttcgaaggagacttcactggtgaggaagaacaaaggaatatccacgtgagagagagatggag

SEQ ID NO: 192825 - DNA, 409 bp, Glycine max
agcttgtctccttgagcttgaaattcattattctttttattttgcgtgggattgataagggttgggaacacgcgtgttgtcttcaacgttagtgttggagtgtttgtcatgttgttgttgttgatgattatgctcaaagggaaggtcaatgcagcgtgtgagcttgatagaggacatgcgaatgagggtccgaggatgcacaaatgtggtcatgacggaggcttggccacaacggtgatggcggcatgccagagtgagtgagtgactgagacggactgagtgagtgatcgggacggagaagaaagtcttgacgaggtgtataactgggaaagccacatatgggggaggaggatactatacggagaatgagaagaaaatcagagtgactataagacactatggttgggtt

SEQ ID NO: 192826 - DNA, 412 bp, Glycine max
ttgagtgttgaaaggaactattctcttgaatcatgcacaggtcttcacctttaccatctgaatcctgatgggattgatttgaatcctatcttgaacatcgagaactcattctttgatggacctttgaactttttgacacaccattcgcctcctctttgtgctcatcacagcatgttggaatcactcttgattcaataagagaccctgcttttacaacatagctcttaattttatcattgtgagccttagatgctactggaggataaatacaagccacccaataatctccaattttatcaaaccaccgagtgaggaaagaatcagaaatactatacagactgttcaaatggacatctagaaaatcatcccgaatgggtgagtcctcatacgcacgcgtaatactactcagatc

SEQ ID NO: 192827 - DNA, 332 bp, Glycine max
  unsure (1)..(332): unsure at all n locations
cctgagctgccactatctctaaatacggggtgacttgtttggattatattcatgagggcgtccaacangcgggttctgaaggccgaaacttcatattcagcgacgatgcctcttttgtggagacccatcaagttcagcacctgttggatagagtcttgctgccatttaatgccgacgtatcgcactttccacaatatgtgttcccccgcatgataccgtctgttcttgaatgctacaacgaaattgtgcttgtcctcacaggtgatttttcttgcgaggttcaaccctcttgggcgtgtgatgcgacactacagccttgactgttaagttaa

SEQ ID NO: 192828 - DNA, 466 bp, Glycine max
  unsure (1)..(466): unsure at all n locations
ttgaatgcatgatatanaagaacagacatggccttattgtgtatgtcttctctctctncacttaattggaagtcataagcttgaacagaacaggattatctaagaattcaattgacaagctgactttagcaaatggtcaatctcaagactcgttgtaatccagctagcgaagaattgtttcgttttttttttcatataaaaaaaatcatcttttcatcttatccggctatccgctaggttacatgcatgcatgtatgatgctatatgtattgtaggagtaatctaatttaagaattccttgctgacttatggagctaggaagggctcctgttacatttcatatatgctataattctcaaatccaattattatctacctccttgagtattgaaaggacgcccataccaccaaatgacagaataatatgagcttctttacgaataataatatatgcggcatataaagt

SEQ ID NO: 192829 - DNA, 378 bp, Glycine max
agcttgcaaacttgcctatgtttggtcacctgcatgcctggaggaataaccatgtccaccttttcattcaagtcaccatgcaagaaagcgttgatcacattcaattgcttaagagaccattgattgatagtagctaaggccaacataagtctcactgcggataacttcctcactagagaaaataatgtcaaaatactcctatccttccacctgagtgtagcccttggctattagccttgccttatatctttctatagaaccattggatttgagcttgagcttatacacccacttacaaccaatatcattcttatgttcatgaagatcagtaagaacctcacgttcattaagttctaatgcttcaaaattgcattcatg

SEQ ID NO: 192830 - DNA, 433 bp, Glycine max
  unsure (1)..(433): unsure at all n locations
gtgatgatagggactaaattataactgtcatgaatttttgcctacaatatgattaatgagctatgatgtagaaattatgaaaaactgttatgttttgaggtttaagaccaagtgagtgtgtgatcacttggcaatgaatgttgcatgattatgattttgagctttacattagggattaggtctaggggtatttgcccttcaacaaagtatatatattgtagagtatgattgatgttgaataggtgtagtgtgctctatcgtgatagaaatgtgaagtacgatatcgagagtggtgtatgctagtgaaccacatgtggcatttacgtaggttatgcataaggcttaatgtttgtgtttgtggcttatgaacggatggagtattcacttcttttctaccattttangaatcttatgccatgtgtgacgctgactc

SEQ ID NO: 192831 - DNA, 363 bp, Glycine max
  unsure (1)..(363): unsure at all n locations
agcntgtgcccggtgaactgttgttgacattttatgtttngaacaaaaactcttaaaaagatgttgagaatgattccagaattaatcagcatagaaattcgtgccatcataacatatttatagtcatttgatggctttcgaagaaaccatgttaaaagttgtgactcttggcaatttcttcaaaactagtcactataaaagttgtgacttcttggctaattcttcaaaaaccagtcactttaaaaatggtgactatttatgttcagatctgaaaaaccaacgtttatatacactggtaatccattacaaatggtgtgtaatcaataacacaagtttgatattgcttcatcacaagttatgact

SEQ ID NO: 192832 - DNA, 420 bp, Glycine max
cttaatactcactctacgacatcacgtgcgggacctgcttatatgtttatccacatataaaaccacacactgctgagaataccagatgattgacgccccagttattagagatgtgtgtatctcttcgggtcttgaaactgtgggagagaaaagagctcaaggggcggagctggcccatagatcttgtagctgccacccaaggatgtcatgggagctattcagccaccctgtggatgcctagcaaccaccaaacatgtaattctcaaatattggagaatggtcacatgatgggacaagacaggtctctttggtttggttaagatacagaaattgaacattgaaacactgtgagagcatctaatgcactcagcctaaatgggctcccacttgtgaccggagaatctggttgtcgaatataat

SEQ ID NO: 192833 - DNA, 398 bp, Glycine max
  unsure (1)..(398): unsure at all n locations
agcttgtaagcgccaaggtgtttaaaaaatttttactacgggtagaaactaaataggtgccataagtgcagttagaacaataaatngaggctgaaaaaaaataagcctagacagaataagtggaagcttttctaggataaatgctctcttataaccctaatttttgaaataccattaaaaccataatttctttaattagccaagccaaattacaggccaataaaattccttagtgatccaccaaatgtaagcatgataactttaactgagatgaggtgcaaaattgggaacattaatcgcaggttgaagaaactatcaacactcatccaagacacttgtgcacagagagaaacactaaagccttgtgaggaaaaagtgaggcaagccgacctgattga

SEQ ID NO: 192834 - DNA, 324 bp, Glycine max
ctatagaacgctcgatcctaacgtgtctatattgcataacctcttaatgagctagtgaagaagaatgtggcatttacctgcggtgaaaaacaacagcaagccttagctcttgctaaagaaaagcttactaaggcacctattctagctcttcctgacttttctaaaacttttgagctacaatgcgatgcctctagagtgggaatctgagctgctctgctacaaggtgtgtttgacaagtgacctcatatatattaagaacgggggaggggttgaatcaagatatcgcaaacaatttccccaattaaaattctatttactttctac

SEQ ID NO: 192835 - DNA, 404 bp, Glycine max
  unsure (1)..(404): unsure at all n locations
agcttataacaaacatgtgatattgtagatttcttttccaagnncatagttgggggaataaatttttaaaaccttgaaacaaacacaccatgttatattcgtcctattcaaagtatctgaattctgaactgtatgctatacgtattagtcaataaaataaaaaacatgggagtatactccatgtatatgtatctaagagtatcttacatgtattagtatgtggatgtggatatgataccaatacttagtcctttttggagtgtatggactttatagatggcaactagtgtcattccattgcatttcctccattccacccgttccatcaaatcaaaacatagcctgcctgttgcggtatatttgtttttatacccgttgtctaagttcaatatgtcttttcattt

SEQ ID NO: 192836 - DNA, 312 bp, Glycine max
  unsure (1)..(312): unsure at all n locations
cgaacagtgntgcgtcgtgacttctgcgttagccaacttcctatctgctggcttaacgagcgcacgcctaacgtaacactcatgggctcagcgcgatgaagactctggctcacgatgagatgtacatgtttgctaagcgcacctgtttatccactaagccactgtccagtccgtccattaagtgagaaatgcgcgcgctaaaccaaaacttactaaagtgcgctaagtggcccataattgcgctaagcgcacgagcacgagcaaggtcacctatttaagccataaatcagactttgtgaaaagagtctgggc

SEQ ID NO: 192837 - DNA, 401 bp, Glycine max
agcttctgttttcaattacgagcgtctcgatatactacgggacacaatcagacatccgagtaaatagttattgtcatttgaatttgctacgagcatctgttttcaattacgagcgtctcgatatactacaagacacaatcggacatccgagtaaaaagttattgtcgtttgtatttgctacgagtatctgttttcaaatacgagcgtctctatatactacgggacacaatcagacatccgagtaaaaagttattgcggtttgaatttgctacaagctctcattttcaataacaagcgtctcggtatatcacgggactcaatcggacatccgagtaaaaagttattgtcggttgaataagctcagagctcttgtgttcgatttcgaaggtcttcatatatta

SEQ ID NO: 192838 - DNA, 379 bp, Glycine max
  unsure (1)..(379): unsure at all n locations
tgacactatnacactcacgcttacaagcgcgggtctgggagacaagtgttctttggtctcaacatacgaagacgatgtttcgagttcattacatttggcacgaccatgccctcctgattacaactgggaaattggcaagtggagaaacgccccggaatttacgccacgagcataatgtacacctttacggttttaaaagctctataactgggcctaagctgtatagtttgtccttacgttaaggctgtgcgtcctttgttgtcgatttttaatacaaggatctctttcatctggtctacgtttgtagcatactcattctttgcatgttacattttttctgaacaacagatcgatgacagtccccgatgactaatactgg

SEQ ID NO: 192839 - DNA, 383 bp, Glycine max
  unsure (1)..(383): unsure at all n locations
agctttaggaataaagttaaggttaagtttttcttatcattctcaaatagatgggcaacctgagaggacggtacaaagtttggaagatcatttaagggattgtgtgttaaatcatttggattgctaggatgaagttttgcctttagtggaattcacctacaacaatagttactatgccagtattagtatggccccttttgaggctttgtatggaataagctgtcagacgtcattgtgtcggtatcaggcggaccagagttagtataatggactatanaaaaggttaaaaggattcaagagaatataaggatctcttataggagaaaaaagtcttatactgatcgacataaacaaccccttgagtttgaagaaggtgatcatgt

SEQ ID NO: 192840 - DNA, 376 bp, Glycine max
  unsure (1)..(376): unsure at all n locations
tttagcagagcttatggtataatctgcgacctanccattatanaagtctctacagaggccattgcctccctcgcccagtattatgaccagccattgaggtgcttcacctttggggacttccagctatcacccatggtggaagaatttgaagagatcctacgatgccctctacgggggaggaaaccatacctcttcacagggttctatccctgattagctaaaatttccaagatagtccagatctcggcgtacgaattagaccacaggaagcaagtcaaacatggggtagtcagaataccgagaaaatatttggaggttaaagcaagaatcttatcagataaatgcgagaggatcccctccatacatattctcacac

SEQ ID NO: 192841 - DNA, 398 bp, Glycine max
gctggggcctatattattaaatactatttgttaacaaatatgctatcgggggtacttatttgggaaatcgtggttacatactgtatgcgcacagggcataaatatataaagatctgagtgtaaattcttaatggatttcctagactatcaattatagaaaatcaacaggatcttgaaacctatgattctcgcaaaccatcaatcaagaataatagataatgatgtgtacctttctgcataagaacttctctctactgcactttgatttccttgaaaatgagagaaataagatttcacttcctttggcctctcttttctgtctctctgcgcccgagatggctatgggtgagaaaagaacactttctggtcaggaaggggacattctttcacgtacgtgg

SEQ ID NO: 192842 - DNA, 416 bp, Glycine max
agcttgtctcagcgtttatgcgagacagagaccaacatgttatctatcatcgccaagtacgaagaagagttgggtctagccacggcccacgagcatagaatcgcggatgagtatgcccaagtatatgcggaaaaagaggctagaggaagggtgatcgactctttacaccaagaggcaaccatgtggatggatcggtttgctcttaccttgaacgggagtcaagaacttccccgattgttagccaaggccaaggcgatggcagacacctactccgcccccgaagagatccacggacttctcggctattgtcagcatatgatagacttaatggcccacataattagaaatcggtaggaaacttgtatggtctctaagaccttgactagatacgacttcctttgtgaaataaaatgagg

SEQ ID NO: 192843 - DNA, 456 bp, Glycine max
  unsure (1)..(456): unsure at all n locations
tcctgactcaccatataccttgatccagtgtgagaatgccaatctttaccctcggaagagaaaaaagaagagaaggataatttccaatcaaagaggaagcaaaaaaaaggagagaaggaaaatntccaatcaaaggaaaaaaggaagcaagaaaattcccaatcaaagagtgggagaaagcataatgaaaagaaagaaaattcccaatcaaagaatgggagaaagaaaaaaaaaagaaggagaagaaggaaagaaagctcctgatcaaggatcgaaagacaacagaagaaatgtgcagagaggtctttggaccagacaatatctgaacaatacggaattgtcaccaaatgaacaaaagatagataaggaaaccataacctacaagtgttcttctccctttaattgccaaccaaaatcttgtgcgtcggtgacttgttcgcctcgcgtcaaacaaaa

SEQ ID NO: 192844 - DNA, 395 bp, Glycine max
  unsure (1)..(395): unsure at all n locations
cacctgagctgcagctggtgagactacccgtgaagatgtnaactttgaanaacgaatgaagaacgccgaagaacggttgaaatcttttgcgaaattcttcacggaaacgttacggaagcgtttcggaagcgcctcggcttaaattttcttcacagaaacaatttttccatgcaaattcgaaagagagagaagtgcctaaggggctgaacccttttcttcttcacttcctcccctatttatagcaaaataggggagatgcttgccgtccagctcgcccaggcgagccaggttgcttcctccacaagcaacagccttctggaggaagcttctggaaggcccaagtgggcctgattgctatttacacccccctttttactaatgcgcccccttttcta

SEQ ID NO: 192845 - DNA, 449 bp, Glycine max
tattggctgagcattacaggacaagagaacaatactattatatgattacatggctaatggcagccttcactcctttgtttttggtatgtaacgtaaagaatgctttgattacatgcactagtgttatcttttctaacttcagtcacatttaatttaccagcttattaatcttgattaacttatttgctctgacaataaaaaaatagaccaaataaaaggtaaattcctatcctacacatgtttttttttttttttataattttccaaccccacaacctggtatgtgttcattttcccgagcacaacacaatagtgccatcatgtcttagacaaaccaaaacaacataaggagttggctttattatttacacaaagagacaatataaggaaatgtttcacaaaacagcagcgaacaccggacaattgagagacgaggtttaataccaacc

SEQ ID NO: 192846 - DNA, 411 bp, Glycine max
  unsure (1)..(411): unsure at all n locations
agcttctaaactttatacaagcatgaggcttttataccacttgtagacaagnggcctcaaatatcttaagaaggggggttgaattaagatattgcaaactatttcccaaattaaaatcctatttcactttctatgcaagttacaaattcccttaaaaatgaactcttaaataatgattcaaatagaacaatctaactataaatataaaacaataataaataaaagagtttaacggaagagaaaatgcaaactctgatttatactggttcggccacacccttgtgcctacgttcagtccccaagcaacttgcttgagagttccactatcttgtaaaatccttttacaagttctgaacacacaaggacaatccttcctttgtgttcagaattctattacaacaagagaccctc

SEQ ID NO: 192847 - DNA, 470 bp, Glycine max
tttgccagtgtaaggatcgatgtgtgtctgaataaaggcaaatttgatcatcctactacgacgactgagaaaactggggcaaataaagagggtgaggatgatggagaaacccatgctgtgactgccattcctgtacggacaagtttcccaccaacccaacaatatctttactcagccaataacaaaccttctccttacccaccacccaggtatccacaaaggccatccctaaatcaaccacaaagcctatttaccgcacttgcaatgacgaataccacctttagcacaaaccataaacaccaaccaataagtgtaatttgcagcgagaaagcctgtagaattcacaccaattccagtgtcctatgccacacttgatgccatatctacatgactattcaatggtagccataaccctagccaatgttcatcaaccttcatttctccgataatacgactcacacgcaacgtgt

SEQ ID NO: 192848 - DNA, 410 bp, Glycine max
agcttgtcaatttggcgagcaaaatagaaatttttttccaattatagcatggatagcattaagaaagttgctattgattcaaacagatgttgcagggcctcaaagaacaccttcattgaaaggcaatttgtattacactatatttattgatgactgtttctttaagttcaaatcaaaggtggctgaaattttttggatgttcaaagtcaagtagagaatgaaagtggtctcaaaattcaaattttgaggtctgacaatggcatcaagtacacatctgcaaaatttaatcaattttgggaggattctgacatccaacatcaacttactaatccttataccccacaacaagatggggttagtgagaggagaaataaatatatcttggagatgatgagatgcatgttgtatga

SEQ ID NO: 192849 - DNA, 339 bp, Glycine max
  unsure (1)..(339): unsure at all n locations
tttatcttgatcattacataaaccaaattgggcactggctattgacacatcctttggaatcgattaccacaaaaaaaactattttctaaaccatacaatgcattcggaaaaattcctttggccacatactaccatcatcaattaaagaatgctttctaagactctagggactaacttcatcatttatcttgaattactgagttcatgactcggactatacctgagaagcgcttatcangggacatcatcaaaacttcatattaaatatgcttctacagtaccctgatagtgagttcttagcaaatgaagtatatcacgaattggattacttccctttac

SEQ ID NO: 192850 - DNA, 398 bp, Glycine max
  unsure (1)..(398): unsure at all n locations
agcttcaaagaaatgaaaacagatttattgttaaataaaacatatataatatagtccaaaaatcatacatcattattgttaccgataatgtcggatattgttatgaaatggcatcatcaattaaatccagcctcaccatcaacatatgacataaagtttataacatgggatacattgacaaagaatcgatatgaagacatgcctaacatcaaaagaataattccaaaaacaaagtcacaaatatggaaatttaccaagaaatgatgcaagagcttgccacaaaagttaggaagaacatcatcacggattntaccaggattctgggttatggcagccaaagcagcaaactgctcagtcatatatgtagcagtcttatactcatgaagcacaagcttggt

SEQ ID NO: 192851 - DNA, 269 bp, Glycine max
acagagtggtacctggagatatgtcgcggcggtcaagataccttgaggacgttatgtggcgtgctattgcctcaaaccaagcttgaccaatccctacccaacccgggcatagtccgccaatgagaacctgcgatgtacctaagctggcgagcctctggctgtcaacagattaaaggaacaaacaccaccaagctaggacgcttgcggtggctggccacctgtgaactttgattgatatgtgggttatggcctctggtaatcgactacca

SEQ ID NO: 192852 - DNA, 384 bp, Glycine max
agctcgtgtgagaagtcattgtgacagtcattgtgccatccactcaacaaatcaccaaatgtaccatgagaggacatagcacatatatgtgaaactacacttcatcagagatgtgattgattttgagaaggtgaatgatgataaggtttcaacataataaaacccgactaatatgttcacaaagtccctctctagtgtcaagttcaagcactgcttggacttgataaattttgaagatgcctaaagcaaattggtagaagtgcatccttgaatcacaaggtatacacttgctgattcagagtcaacgcggagatttgtggtgtgtgacttcaaatctcaaatgacacacgtgagaagatctttaagtactgatgtcataactgt

SEQ ID NO: 192853 - DNA, 481 bp, Glycine max
  unsure (1)..(481): unsure at all n locations
aactcacctgtatgcacaacaccaatcttgtcttcgtctgtgaatgttccatactacttaggggccaactcttgattgtgtcacgctggcactaaaacttggcgataagcatgtcattttacataaaccaagtcaccaatatgaaaactcctatcatatgttcccttatctgcaagttgcttcattttgtcttgggacctcctcatgtggaatttgagtaactttaacatttgctcacgtatctgcaaactcctatcaaccaaagcaatcttagattctcccatgagataatgtatataaacaagacgatcttggtcatacacaatctcatatggacttgctataatangactggggtaagtggaatcgcaccaccattcagtcataagctaccacttggaccactgtgctatagagtcactactcatgcacctgagatatgtttcatagaatctatcaccacttctaatataccatcagt

SEQ ID NO: 192854 - DNA, 400 bp, Glycine max
  unsure (1)..(400): unsure at all n locations
agcttntgatgggtatggaacttcttgtgatactgaaaggttacgtacatttatgccaacacataggaacatgaatggatattcctattggcattgcaagatgtggatacatgaattgttctccaagtttaagttcttacgtgtcttatctctgtctcattgcttcatttatgagctgcctgactctgttcgcaatcttaaacatcttcgttcattagacctttcttatactgacataaaaaaactacctgattcaacatgttcactctccaacttgcaaatactgaagctgaactattgtagattcatggaggagctgccctcgaatttgcatgaactcaccaatttgcattgccttgaagttgtagatactaatctgatagaggtgccaccgcatctg

SEQ ID NO: 192855 - DNA, 494 bp, Glycine max
  unsure (1)..(494): unsure at all n locations
ctattacgtgacactatataatatcaactagtcaaaggtaacgcgagcctagatgaaccctctatgaatctacggttgtntcctactaaaccaagaaagctcttaatcttaaacactgacttatgactctcccaactcatcaccgcctctaccttggaaggatctactgatatccctcccttagatataatgtgccctaagaagctcacctcctctagccaaaaatcacacttggacaacctagcatacagtctattgtctttaagggtttgcaacacaactctcaaatgctcctcatgttcctctctagtcttataatacactaagatatcatctatgaagaccactacacaactatctacgcatgtgtgaaagggtctatttatataatccatgaacacaccacgggcgttggcataccaaaagcataaccacgcctcataatgactgaacggctctaaaagttatttcggacatcttatgcttcactctaa

SEQ ID NO: 192856 - DNA, 396 bp, Glycine max
agcttataacgttgtagcaatggaatcaagtttagcaaacgagtaatcaaagcagtaggctgctacatacttaaggccagagaagacaaagaatattagtctccaaattttgtagaaatattttttaagctttatgcacctcttaaaaagtaagccacatgaataaattgtaacctaaaaacttgggctacagctccagcaacatatcagaaaattatatagaaaaatgtattaacgatttttctcaaattaaaatcgttaaaattaagaaacaaaatattatccagtttgaacttatttttatataaaacaagtgtaagaacccatgacaatttggcgatgcaaacaaaacaaggataggcaatagttccctagccctctatataaacgaagttg

SEQ ID NO: 192857 - DNA, 451 bp, Glycine max
  unsure (1)..(451): unsure at all n locations
gaaggaaactagatgccttggttaacctgttaacccaactggccatgaataaaaaatctgcacttgttgccagactctgtggtttatgctcctatgctgaccaccacacagacctttgcccttctatgcaacaatctatagtaattgaacagcctgaagcttatgctgcagacatctacaatagacctcctcaacctcagtagcaaaatcagccacaacagaacaattatgacctctccagcaacaagtgcaatcctgtgtggaggaatcatcccaaccttagatggtcgagtccttcacaacaacatcaacaataagattagccttaatttcaaaatgctgctggcccaagcagaccatacgttccttctacaatccggcagcaacaacaacaacgagcccagaaacaacaaacaaatgaggctgctccgcaaccttnccttgaagaact

SEQ ID NO: 192858 - DNA, 400 bp, Glycine max
  unsure (1)..(400): unsure at all n locations
ngcttgttccaatgaatatactaattcatattataattcaggatattattggcacgaaaaactctgattcaaatgctttatcagaatttcggtttcaattggtgggattcccttgatattagcaagagctcccttcgtacatattgacatagttttgttccttatgtttggtttgatctccccaaatgtttggtttagtatgctttattaataaattaaattttgtgtactttctccaacagccggggtgtgataccaacgcagttgagatctcccggttgttttcgtgcattgtgccatattcattaaaaaaaaagttcttaataacttttcaacttttacccttcaaggaaatatatttgaaattaagattgctttgaaaactataaaaacaattatt

SEQ ID NO: 192859 - DNA, 436 bp, Glycine max
cacgaggatgctctaatggaggaatagagtgagagaatatgggagcatgacattgaaggaataatagagggagagaagcggaactttgaagtgtgtctcatatgactttcattcatcaaagttacaacaagtgttacatatgcttctatttatagactaagtagcttccttgagaagctttcttgagaaaaattccttgagaagcttgtttgagaaaactttcttgagaagctagagctcatctatacacacccctctaataactaagctcacctccttgagatgctttcttgagaagatttctaaagaagctaaagcttatctacacacacctccttaatagctaaggtcacctcctttagatgagaagctagagctcaactacacaccccctataatagcttagctcacgcccatgacagaatacatgataata

SEQ ID NO: 192860 - DNA, 400 bp, Glycine max
agcttcttttccttttccctggttttccatttctattttctttccttagagcaaccatggagattccatggaagtctttggttttgagcctaaatctgatttgttgttttggttgggtatggttggtacttttatggtgtgaacttctagttatgtggtaaaaagatgatctctttctctcttcttctcaaaaacccaagcttcaagacctttggtgtgttatatatgcaccattggtgcatagtcatacgttaagggtgtttggtgaactctcaacctaatgctaggagttattgtggtaatgagccaatagaatagacaagtaggtggatccctatatatataaggtctagcaaccctataagagactaattgaatggtcaaagagggagactatttt

SEQ ID NO: 192861 - DNA, 461 bp, Glycine max
  unsure (1)..(461): unsure at all n locations
tgaccaatcccgactcaaccctagcatattcagtcagtgagaacctgcgacgtacctaaacaggtgagctcctggcagtcaaccaataaaagaacaaagtccacgaagtaaggaggcttgtgtggcagctggccagctatgtatcttgggtggtatctgaaatatagcctctggcaatcgattaccaaaggtgtggaaacgattacagggcttaaaaatggagacaggaggttaaatggcctctggtaatcgatttccaagtgtgtgtaatcgattacagggcttacagatgcagacagaatgttaaatggtctctggtaatcgaataccaatgtcgattacacagggtgataaggcactggtaatnaataccatttactggtaactaatacacaatgtaatctgagattccatgtgcaaagctcantaattcgtgtttgtcactggtaatcattacatac

SEQ ID NO: 192862 - DNA, 397 bp, Glycine max
  unsure (1)..(397): unsure at all n locations
agctggtgcaaatcatatcactcctacatttcatctctagcatgcattttctttctttacccactcctcacgtttggttttttagggaaaaacaccataactaaacgcgccgcaagggatccctatcgcaccagatccaaatctagaacgatgggtgatcaagaggagacgcaggaacagatgaaagccgacatgtcggctctgaaagaacaaatggcctccatgatggaggccatgttaagtatgaagcagctcatagagaagaacgcggccaccgccgccgctgccagttcggctgccgaagcagacccgactctcttggcaactacgcaccatcctccctcaaacatagttngacggggaagggacacactggggcacgatggcaccctcacct

SEQ ID NO: 192863 - DNA, 350 bp, Glycine max
  unsure (1)..(350): unsure at all n locations
cgcggactataccttcgaccaaacactgtcgtgtttctgtctctgcccggatttaaagcgggttgcagcaccgactccgcttccctaaccgtactggaggcggtgtctgtggctttgtcctctatggctttctggagttttaacatgacctccgagatggaagccatttgatcttttaaggccgatagatcggccttcatctgtttctgcacgccctcttcattatccatttttctggatcaagtgtcatangggtgccttggcgtctcttacctatgatgaatttcctaaagaaataaacaaacgtgagtatgccaccaaaacatgaatatgcaaatgaatgatcggtg

SEQ ID NO: 192864 - DNA, 401 bp, Glycine max
agcttgtggaggtcttaagaaaaataattcttggtgtggtgcttgtgttaatgaaaatcgtataattgtaggatctacacataatccaagggtgtgggtgaaccaatatgaactttgtgtgtcccttcttccttttttcttatgctccccatgcatttgtttgttgtattttcatcatagattttgaaaagtctttaaaatttaaccaagttgaatgtatttacaattaagagatgtttttcaaaaaggtcttagcttcaaaagcaatacttgctttgaaacataaaaatcacattataaaaaacaactcatattttggattccttgagaagaatctttttaagatatctaatttattataatctattattgaatatctcttgaccctttggtcttctttg

SEQ ID NO: 192865 - DNA, 360 bp, Glycine max
  unsure (1)..(360): unsure at all n locations
attgcatgctaaaatcacaaacacacatcaaaattcagaggatatctgctgtcactaacactctaatatgttcacggaaataataataataaagagggagagagaagataagaaaagaaaaattgactagaaatctagaccttgttcacgcatgtataatttcatacatagaactaaatttcttccccaaccgtcaagggaaaataattcccaccttgtctagaaatatattgatccaggatacaagagtccaaataacaataatgaagcaatcatcaaagggtgtcaaacnctattccccaacttgtcaaccctattcaatctttaatttcagttggaaaacaaagaacacttttatga

SEQ ID NO: 192866 - DNA, 482 bp, Glycine max
  unsure (1)..(482): unsure at all n locations
gtcacctgctgcatgcaagcttaacatcaaaccacgttcagagtgctgtatctacttctcatggactngatggngcctatgcatgttgaatgccttggaggatagaggtatgcctatgttgntgtggatgatttctccagatttacctgtgtcaactttatcagagaataatcagacacctttgaagtatccaaggagttgagtctaagactttatagagaaaaggactgtgtgatcaagagaatcatgagtgaccatggcagagagtttgaaaacagcaagtttactgaatactgcacatctgaaggcatcactcatgagttctctgcagccattacaccacagcataatggcatagttgaaaggaagaacatgacttngctagaagctgctatggtcatgcttcatgaccaagaactttcctattatctctgggctgaagccatgaacacatgctgctatattcactatagagtcacact

SEQ ID NO: 192867 - DNA, 487 bp, Glycine max
  unsure (1)..(487): unsure at all n locations
agctntattcaagacanagaaattaaagatattctatattgtttatcaagacagnctctagattcctaggaagggtatattaaataggaagggaattcctaactgaagtagcaaaaggtttggccaagaaatttaagttaaaaagtctttttcaagagatttactctctggtaatcgattaccagaggatgtaatcgattaccagtggccaaaaatgatttacaacagttattaaaatttgaattcaaattttgcactgtgtaatcgattacacatacttgtccaacaatactttccaacctcaactagtccctttcagcccttcgaagcttgagtccgttgttgctgccccataaagcccctcggaacttngtttggacccattcttcttntttggccctcttcgtttctcgctctaatgcttcngtcgtggccatgtngacatccctcaacttgtcacactctttcctgaccctggtggctgtca

SEQ ID NO: 192868 - DNA, 442 bp, Glycine max
  unsure (1)..(442): unsure at all n locations
gtcacgcgcagtgtggtggttccctanccctcttattctatgtatcattgacgcacttgaagaggggatgacttctttgatagagacgaagttgattctcaaaatcttttttcttttttttgtttcattctgtatggttctctcgactgtatatttattaaaatgacactaattcgttttacttaacaaaataatataaaaatatagataaatttctcgaaatttgtaattctctctcggcttattttgtgtttctgtcttttaaaattactagtattcgctagaagttttattttatcttttaatagaaattcataagtatgttaaataattcaattaatatgttataaaaatcctttaagtgtttaataaatttttgttattccaatattcctaaattgttaacatatttaacactaatactatctgtatatataaatat

SEQ ID NO: 192869 - DNA, 473 bp, Glycine max
  unsure (1)..(473): unsure at all n locations
gaagtagtcttcttaacatgctatattgtgttggacatgcaatcacgtaagtgaaggtaagttagagccaaaagccaataagagattctntatgggctatgaagatggagtcaaaggattatgagtctggtctctatctaaaagaaagtcattctgagtcaagatgttgactttgatgaaccctctatgctgcattctaaatatgatgaagatttggccaaggctaaggatgtcactaagcaagtgaagtttaagagctccacaatcaanaacattattgatcaaaatgcagttgaagcacctgatgagattgattaggatctttaaatgcatccttaacatcaaaattcagcaccaattgaggagagtgactatacgagtcataaccatccaaagtagccaataaccacaacacctagaatgtacanagccaattaaagctcctgaagacatggctttgatataatatctat

SEQ ID NO: 192870 - DNA, 412 bp, Glycine max
tgcgaaagcaccactccatcattaggatttgttcctgacatctcatacaaacaaatctaacgtaacaagacaattatagttgctgtttgaatacctcacccactcaagtgtatcacacaattatggctgttctctaatgaaacactcttgccttttaccactctaattccccttgagttcttatgcaattcaagagattatggccacaacaaagaacaattcaccaatatgtgtaaggtaaggctagagagacaaggaaaaggttaaccaagaaaaatgctaacaatgtttttaggcacaaatgaaggaaataaaattcagaatttatgaattcaagtaacagtccttcatgcaaccaatatattaccttaaagagattgtgttttaaaagttcttcaagcatgaaccattc

SEQ ID NO: 192871 - DNA, 313 bp, Glycine max
agtagaagtaataaattgacttaaacataagtgaaaagtttaaagctctatctagctaaaaaaagaaagacaaaataatgaacttgttccattaactaatatccaattaagagataaagcagagatacgaaagattattagattgattatgtacttggctaaacttaatggagtgttgttcgccggcgagctggaggttgccgctgacaaatacgagcatggcggatatgacagcggatggctggtaatcgacggtggtgatggagtgctggcactgttggaacggaatggaactgtatttggctaggatgtt

SEQ ID NO: 192872 - DNA, 402 bp, Glycine max
tttttatggctaatgagaactgtgatgtatgcatacaacccaccaccacgtatatgaaaaaagtcgtttttgcctctctcattgggaatatgcatatggcacgcagtttgtgttgtgcttggagatgattcattttcttgtcttaagattttgctaatatcttaccctgtgatacaactccttgcctatgacattcttatctgcaagcttgcctgcattttgagttacatgacatataatcacatttattctactaaatgattttaactgaggcaattcaaaccgcatcaataatttatttgcatcttgttttctgctagttgcctcatactgtttgatgactgcacgtttgtatcaaactactgccacactatgggtggctctttggctggctatgaaatg

SEQ ID NO: 192873 - DNA, 440 bp, Glycine max
  unsure (1)..(440): unsure at all n locations
agctggcgcgtctttntctntcaaagactctcttatcatanatatttanagntnntntntctccctattaactaatttagagaaattattttcaaaacgcatataacataaagaatttttttttatcttttcagcttccaaattcaaaatccgtgtctcatgagaagttgagaacgatgatttctgggaatcattaaaaacattttattagtattaatatattttctgacaatcattaatatgattattttagataaataaaacttttcttgaattcaagaaagttggaaaaaaaattgtgagaaagtaacttaaaattgattcttaggatcatagtttattcacaatcttnttttaatgaatacataccanatatagataacttagtttttcaatttaagattcctagtaaatttaaattttccttctataaactcact

SEQ ID NO: 192874 - DNA, 413 bp, Glycine max
  unsure (1)..(413): unsure at all n locations
aagcttgacaacccattgtaaaactaacatgctgttgaactactctatcaatcacaaataagttagtccttactatatgcaataattaatgaaaataaaaagagttgggttgccttctattaagcgctcttttaacatcattagcttgacacatatnacctcatggatttggagcaagcttggctctggccatcataaccatctcattcttaaagttcttaacctttaaacagacactccggttaagtaagtgcttttctgcatcaaacagatcaaacttgatcttctgatcatctatgcccatttccaatttaccttgtcccttatccaccacacaaccggcggttaacatgaagggacaacccaaaatcaatgggatntcagcgtcctcttcaatatccatcaacataaaa

SEQ ID NO: 192875 - DNA, 429 bp, Glycine max
  unsure (1)..(429): unsure at all n locations
agctngtccgcataggancgnctttctatccatgcctgtntatangcacnnngtaggcataatcttataattaattatctaatttctctctctaggatttgttacgtataactcccaaattttgaattcagtctattccgctttttttttttataatgcggattttaaacatctagttttatctgacataaataagagatttttacactgtttatgtaataatataatttgtactaaacagagtctatatatcaatggaacaaatttaaaggctcatattnttgttagtatgttacttttttggtagaaaaacgaanatcacctgaaatcaacactaattatactgtatatttacgaagcataaataaaatataattatgctgatacttctcctatttaaaattcgtgcttgtctaaagaaacattgac

SEQ ID NO: 192876 - DNA, 370 bp, Glycine max
atctatactatctagtaatagatgccgcaactgttgaaatttgggctcttataatgccacaacaaatgtttgccaccattatatgtatccctctggtgagtgcaggcttccaatatatagtcgcatacaatttgttatttatgtcgggtaaaaaataccattgcagttgcatatgaatttcatcaagttcatgctgcaatatctctcctaaaaagttcaactagagactgatgctttgctaaaattttggcagaattgacttttatagaattaattctagataatcaaatagtgcattcaattcctgtcacaatttacattaaaatgtgggaacgtgtgtgagattgattctcaatgctaatcatatgcg

SEQ ID NO: 192877 - DNA, 457 bp, Glycine max
  unsure (1)..(457): unsure at all n locations
agctngtgcatccaataccctgtttatgatgttctatatgtnnctaaaaccggactgattcatttgcttccaaagtttgatggccttgcatgtgaagacccgcacaaacatttgaaggaatntcatattgtctgctccaccatgaaaccctcagatgtccaagaggatcacatatttctaaaggcttttcctcattctttggagggagtggcaaaagactggctgtattaccttgctccaaggtccatcacaagctgggatgaccttaagagagtattcttagaaaacattttccctgcttccaggaccacagccatcaagaaagatatctcaggtattatacaactcagtggagaaagcctgtatgagtactgtgagtgattaaaatatatgtgccagtcgcctcaccatagattctgacagcttttctcaaattttataagactagtatatggaa

SEQ ID NO: 192878 - DNA, 345 bp, Glycine max
tactaactgtaacgagcagaagcaggagtctctgtatctttccaagggtgtatcgattccagctataatggactgggatatgggaacctcggtattgataccagctggtatcgattccatagattggcactggtaatcataccagcatgtgaatctattcacacgcatattgatatttatgtccgaactggtaatcaagttagcctctggaatcgatacaagctggtatcgataccgaatgaaagcttatatccctttaagtatgtgggtttgaatgcttggcgcgctagtgatctgtgaaagttaccctttttcttttgttacggatgcggcactatcatgatc

SEQ ID NO: 192879 - DNA, 474 bp, Glycine max
  unsure (1)..(474): unsure at all n locations
atcctctaagtcacctgcggctgcagctttgccatanaatcattattaatctttntaatgtccaacaccttanatggtcttctttgctgttatcggttaacatggaccgttcaaaggcataaaatcaacacgtaactttaccgcttttgtaagaactacgtaggtctgatttcctcatcgcaattaaggatacataggagcaaaagtcccgcctttgtcgaccaccccaagagatcgttaatggtccaacgccttaacgtttcactcctttcaaaaaccaagatatcgttaatggtccaatgccttaacgtttctctcctttcaaaaccaagagatcattaatggtccaacgccttaacgtttctctactttcaaaaaccaagagttcgttaatggtccaacgccttaacgtntctctcctttcaaaaacaagggatcgttaatggtccaacgccttaacgtttctctcctttc

SEQ ID NO: 192880 - DNA, 493 bp, Glycine max
  unsure (1)..(493): unsure at all n locations
agcttcagaccatagcaactcataatctatgtttctataacccctcaatntagtgggatttcaaggtttgagaagtgaaaatgagaatggngtaaacttggagcaaactctcatctcaaacaagtctatatcatcaatctaaactcgctcaaactggttttacgacgaanactctaccgaatcanaatttgactcctcaacacccaattttaccctagaaatggctcttgttttcactttggtcactcatattcctcatttgcacagtctaagctttctcataagtcctaaatgacatttcaaactaggattaactccctttaacctccaaataccactaaatccagaattggccttccaactctcaagcctcactctntntccactcataacaccacattctcactntctaaccctaggtaactctacccttcatctctagcagtntccataagcatttcagacataacatccangcatcatataaaaccct

SEQ ID NO: 192881 - DNA, 432 bp, Glycine max
  unsure (1)..(432): unsure at all n locations
tgctgcccaatttctataatagggggagaagtgaagngattataggttcagccccatacgcacttctctctctttgaatatgcttggaaaaattgtttccgtgaagaatatacaagccgatgcgctctccaaacgtatccgtgaggaatctctcgaaggttttgaccgttcttcgacgttcttcattcgttcttcatcgttcttcgatcttcaacgggtaagtacctcgaaccaagcctttcgattcattctatgtacccgtggtggtccacattggaattcgtgtatgtttattctcagttcatttactttttatacccccttttgacgtgcttatgccatcttatttaagtcatttctcgcttaaactataaataanataaatctccaccgatcggttgaattggatatcccgtaaatttggtaaaatga

SEQ ID NO: 192882 - DNA, 500 bp, Glycine max
  unsure (1)..(500): unsure at all n locations
agctncgcaactctgttcctattcaacacacttgtgtaagaaacaactntatgcattcaatattaacacanaattaagaatccaaacatcaacatcaaccatagctatattttcacaaacgtatcctcattctccatatataatttgccaaaacatatccttattcctcatatataattttttgaacttacaatcctttagatagacatgtacctctttcctataaagaggcacttgctgaacttagaaatgcgtagacaatgttccatccatccagcacattagtaattttgacgcaacaaggacatgttaagatataatttatagtaagaattagttcaaaaattggtaataaacacaaattataaataacaacttcatatgaacatacatgaatgtagttgtggaacctcatatntgttgatgtcaattgggctatcatcggcactatcgacatcctcaactacacaatgacctacaaatgggcagttcggtcacac

SEQ ID NO: 192883 - DNA, 454 bp, Glycine max
gtagagggtgctaaatttcacattatcatttgtatttacatgttgctatgtcacgggtgggtgtgaagtttctcactcttatttcattgattttgttggtttaaatcgtcgtcttggttttatcgccctacacattaaatttcataatattttctctctcctctctgcaatttttctttaactaaagctctatctcattgaatattattatcttttgccctcattttctttatttgaacctcatttcatcgtcttttgcttcatcttctcgatattttttatctgaacctccatctcatgtatctaacaaaaaataacttattttgtttctttgtgcctcctctctcactaagtttttgtaatctaaatctgcatcctattatatatcttacctatctttgttttgttgtgcaaatatacatttaaatttagaacaaaggatgtctaagtagtg

SEQ ID NO: 192884 - DNA, 376 bp, Glycine max
  unsure (1)..(376): unsure at all n locations
atagaacaccagagcacaattgattagagaaatatatttctatgcatcaacttgtttgttagaaagacccaacatttctacctactgctgttgcttttacttacntttgcatttatagtttttagcataaaagttagtttaaattctgtttgaaattatcaatcatacatgtcctttcaataatgcttcatttcttaacttaattcaggctaacattagttccctgtgttcgatacttagaattcatccgttttaattttaaatacttgacgatctaatgcactttccggagaactggaattcccttgaatattattgaacgaagaaaaagtggaacanaaagtaaccgcatggganatcgcaacanagtatttac

SEQ ID NO: 192885 - DNA, 402 bp, Glycine max
  unsure (1)..(402): unsure at all n locations
aatctgatggactagacaactccgatggatccacatatggtgaagtgaccctcatgtcttggaagttcatatagatgatgaagataggaaagtttcaacattcctctagacataaagattccatattcaaaaagaagaatcaggaggaaaacaatgagatcatttgtcttgagtgttgaaagcctggactcatgaaggctaaatgtccccancaaaagaagaggagatattctaggggaaagaagaagaaaagtctgatgatcacttgggatgacttatacagtgagaaaagcgacagtctatatgatgaacaatccaacatttgtctcatgatagatacaaatgatgatataccctcttctagaagtattcagtttcagcccgtatcatctcatgctgatg

SEQ ID NO: 192886 - DNA, 354 bp, Glycine max
agcttatgaactaaaggagatcggagatgtaccttttctgtaacaccttcacaacttcgtcgtttacttcatacgaatccaactagctccttcttccacatacgcctggataagcaaactccacctcataccgcaactcatatgattccggaaattgcatccttagtcaccaagtactcttcattgtttcaaccccggacaaacttacctccatcacgatctacagatcactccataactttgcttccaaacacaacccctgtcaatgttaaaccctacaaatacccttattttcagaaacagaaaatataggaacaggttaatgccatgttagaaaaaggattcattcaaccg

SEQ ID NO: 192887 - DNA, 306 bp, Glycine max
  unsure (1)..(306): unsure at all n locations
gaacttatcagaaagagatttaacctcgatgctaagaaagtaatctagttgaccaagttgtttaagaagaaattttgagttgagctgagtggtaaggtgttgaatcaactaatgaggagtgatgtaaaaaggtaagagcaagttcaaccacatgtgttcattttctttccaccacccctttntgatgatgggtgtgagggaaaacaattttgtgattaatactacaatcaaccaaaaaaggtgctaatgggacaaattctcctcctaaatcagtttgcaaggtagagaaacacacttttgttgggg

SEQ ID NO: 192888 - DNA, 259 bp, Glycine max
  unsure (1)..(259): unsure at all n locations
gattcaannngngcaanatgggatgagggaaagtgtgatttccanaatctgcactctatgcagaattttgctgtcaaatatgtgcagcaaaatattggctttgtgtagaaaatgttgtgtatttgctggttgtgganagagtaatacagattgtgttctggacgttttctatcagatcccaacggtcataatgtagatntatgtgctagagaattccagtaaaattttcgagtcgatccaactagtaacgaattggaac

SEQ ID NO: 192889 - DNA, 389 bp, Glycine max
  unsure (1)..(389): unsure at all n locations
atctntgagtaggtttgtcctgtnttttctctntatccttngctagcatataggtggtgagactctctgattntgacttannctgtggttccctttcattctgaatgggaacttccctagagtttgttactcctcctaaaaactccacctcaagttgtgattggtttggntcttgtatctcaacaacttgattagttntcaccaagattgtcatttcttcctctttaaatacaacatcacaactgataaagcatttagtgaaactcaattcaagacaccagagcttatatcctttaacaccattaggcactactataaaaaagtgcttttacgtcggtcatatagaggatacaacaacgcttttcacccgtcgtagaatgtgacgtcgt

SEQ ID NO: 192890 - DNA, 437 bp, Glycine max
caataatacgactagtgttatcttgagataagtgtttatgtacagtgtttaagagaaaatgtaggtttcctatttaagaaccagcgttaaattgtaacgcatcgtgttaaacagtgtttaaacacgagtgtgaggtcgtggacattgtataattcatgagtagcgtctataaattgaatttgtgaagaattgtggaataacatgctgctttgggattataatattgttattgaaatttagtacaagtgcaaagttgaacatgtgttaatttgtgatatacatgttaacatgtgatggcggattgtgatattatgagatgtgaaatcgtgatcatgagttctaagttgtgaataagtgtgtgataacacttgatgtaacattacttgtgtcgtgagctttgaattgtacaattacccgactagtgtttatcttgatta

SEQ ID NO: 192891 - DNA, 386 bp, Glycine max
  unsure (1)..(386): unsure at all n locations
tgaggctgcagctaggaaaaatccttcaaaatntttttttaatatattaatttaaacttattgagttctattcaactgacataacacatggtaattttacttaaagggtaagagattttagtcttttattttcaaattaaatttaatctgaataaagctaactagcaagctacttcttttgttaaatttatctttaacaaagctgacagatccttaacttttaaaatttatttaatttaaataaagtaaattcattatttattattattattaaaagatttaaaataaaattaaatttaaacctgataatctnttgtcagaaatcaacctttacaaaagaataaaaatttactataacttattagatcaatataattagatattat

SEQ ID NO: 192892 - DNA, 296 bp, Glycine max
  unsure (1)..(296): unsure at all n locations
agaagcttaggacanaaacgaaaaananaatcattgcaatntgaaagtgttggccttggaccaactttatgaatgatgatgaccactgcttacgtattcataaacctaaggagataagttctgatggttgataaatagttaaacttgacatgtttatgtatcactactagaaataatatttactaagtcagttaaatagggcatttcatgatggttttgaactgttgtaaaaggtgatgtcgaanaatgtgcaaaaatataatgacggtctcgataaccgtcttagtatactcaac

SEQ ID NO: 192893 - DNA, 392 bp, Glycine max
  unsure (1)..(392): unsure at all n locations
actcagctgctttacanagcaatactcatttttattctaacatgtctcaacttttgaatttcatctcatgacatacaatcacaaacacataaattgaatctgaagggctttcttggcttgttatgagactgggctccaaacaagtcatggttgttctatgatgcaaaacttatgttctaagagagcattcatccttagatcaactctttgtctttttattcccaacttctattaactggccaatcaacatttaaggcacttaagtaacaacacacacatnactttattcttgaaatttctcctctttctttttttttagcagtctttgttgcttcctgacaaaatttttgtgtggctgtatactngtcttaccataattatcatcatccaac

SEQ ID NO: 192894 - DNA, 451 bp, Glycine max
  unsure (1)..(451): unsure at all n locations
agcttatagaatntctctagatatatatagcattgnttaagcacatagatatgtgcttttcattagcaacaatgttgacccctttcaaaagtaatacaatttctttcatgcttatatttaattattggaaatttttataatatctttctactaattctaatacttactttttctaacactttttacattaagtccatactaatattatcaagagaaaaaattgtcaactatccccgtatgaagttgacaaaattcatagtaaagaatttctatgtgaaaatttacattaagtccatacttactttcatgcttacattaagtccatactaatattaaatgttgcattaatttannaatttaaccacttgaaataaaantgtggtaggttgctcgattcanagagcagcgccacattctagtgacaaatgatatcaagtggatagcacatgat

SEQ ID NO: 192895 - DNA, 393 bp, Glycine max
  unsure (1)..(393): unsure at all n locations
tcgacactatgatacattgngccnncttcgttgtgtaatgagttctgcttcataanggaagatggacaagaaagtactcataaattttgctctaccaacaacatctatgttttccaagactgaagaattgaatttcgtaaaggacaaatgacgagtcctggtcttgatctttgtgtctctcccaagttcttctgatctaaaataaaaatctccaccgagtgatgtggctatatcatgcatgatgtcatgcatcacaaaccattttcgatgagaccaactacttgtatttgaacgttggaataatgatctcgataccaaatcatcaaaattctcatgaccaacctcttctaaagtcctacctgtgcttgatttcttctataagtcttctgccat

SEQ ID NO: 192896 - DNA, 336 bp, Glycine max
  unsure (1)..(336): unsure at all n locations
agctnggattagatgtagcanattatggaaatttgntgttagcatagngnanaagtagacattggaacaacctanataagtttctatcagactttcctcaatatgcaaatattctcctctttggtatgtcgagcttgtgttaggtgctgattggtttccttttgcttattgattcatcgtaaaattactggttattaagtaacgctttggattatgtaatgaaggtgtgaataataactcctctatacaaagcattcaatactttaagatattaaatggttccacatataactatcattacaattaataagggaaagtacataagagaaatgtcat

SEQ ID NO: 192897 - DNA, 423 bp, Glycine max
ctttaactaacttgtgggtgggtatgaaaatctcattcctttgatatgacatacaatatttgacagcagttgagttgccaccctcttgatgaagccagctctaatcatgttctcgaattctgtcttcatagcttatcacctttctttactgaacatctatcgtctttgttctactggttttgcttcgaagaaaatataaagtttgtggcatttgaaatcgaaatctatgcgggcatgtcagcatcactccaagcaaacatgttggtgttctattttcaacacctctttgatctctatctgaaagtgtttgtcaagtgtctcccctatcttggtgcattggtaaggtacttttctagttaaatattcgtatttctcgatcggatatgccgatcgcctcttatcttgtcggtttgaagcgaccac

SEQ ID NO: 192898 - DNA, 426 bp, Glycine max
  unsure (1)..(426): unsure at all n locations
agcttcatcctcagatccctcttgttggactatgtctcttntagacgaccctcttaggtttagactaacttaaactgagtttcgtccgtagatccctcttgtaagactagactcagctcaagcagcttacgaaagtttagcctaatttagcctaagcttcatccacaggtccctcttgtaagactagacctagactaaatagcattattggaacaacataattaaaaccaaaacttaatccgcagatccctcttgtaagactaagtttcgattctgcttcaatcaagttctaagggaacaatacatttcccaatgctaaggtcacctaactatgcacacaaatggatgatcagaccanaagcatacaaacattaagcattgaaggaagcattgaacataacaggctntaaataggctctgaattac

SEQ ID NO: 192899 - DNA, 369 bp, Glycine max
ctgatggtgcgcagcccaccatcttttcatagtagagtaccgattatgtgtctaccattacgattatcgtctccctttccatcattgggggtaccaccggggccgccatatccctccaccttttgggcgtgttctttgaatgatccgtccccctttttgcacatgttctgtagttgcatcctatccggaaccatatcaaaatggtactgatactgcctaacaaatgcaaccattatgtccttccaagaatggactcgggaaggtccaagttagtgtaccaagtaacagctaccccaagaagaacttcttggaaggaatgtatcagcaattccctcatctttggcgtattccccatcttctgacaataca

SEQ ID NO: 192900 - DNA, 424 bp, Glycine max
  unsure (1)..(424): unsure at all n locations
caaaccaaagcaacacaagtccttacttttatagatcaaattgtagattagctatttccttcctataaaaatatcttttatgtacataacattctaaatctatctttcaataagttntgttcctcaattgttgtccgccccatcctattaaaatgtaagagaaagcgagaaggaagactagtagtggaaacgggagaaggtaaaaggataaaaaccgtaactatgattctatgaaatacgtaacaagttgctataaaacgttagtgtcagaaattaaaaagtatgtacattaaattatacatccgggcttcaatctactcagcctctggctcatctagcagaactttntttgtgttgtcataatttcttgcctacttatcangtttagctcatctcttaactcccctttgactatcccgttctt

SEQ ID NO: 192901 - DNA, 445 bp, Glycine max
ttattcaagacaaatatatttaagatattctagatggatgatcaagacagtctctatagtcttataaagggtatattaaataagaagggaattccaattgaaattacaaaatgcttggccaagaatcttaaattaaaaagtcgttttcaacaaattcactctttggtcatcgattaccaaaggatgtaattgattaccagtggccaaaactgatttacaacagctattaaaatttgaattcaaagtttgtactgtgtaatcaattacacatatatggtaattgattaccagcactttgtgaacgttttaattcagaatttatagcttgtaatcgattacacgcatactgtaatcgattaccacaggagtttttcagattacattctcaacaatcacatctttttgtgtggttcttgaatggctatcatatgcccatatatgtgtg

SEQ ID NO: 192902 - DNA, 445 bp, Glycine max
  unsure (1)..(445): unsure at all n locations
tccgtgctatggagttcttaatcctcagttggttcttcctatggggtaattgatataaatactctcatatctatctaatgatggttcatgtgttcactatgctatcagtacttaattctaatgtgcctttgccttgatcacgtaactgcatgcttagttagggtcactcaacttttggaaatggtttgatccttataacctgatatgacagggctagcttatcgtactttcatgagacatcggggtacggtaacctaatttttgttatgctatgtcttaatgcaatcctggttaagtttagtgtgacatccaagaaatttctacccgaaacttttgtaaacggtgcattttggatgggtatatatatatgagtattattcagcgtatgtatatatgtatatactcctggtagagtaagtatattggnggaaagatatgcggatta

SEQ ID NO: 192903 - DNA, 479 bp, Glycine max
  unsure (1)..(479): unsure at all n locations
tgcaagcttgacgatggccaggaacacanacacctccattaatgatagtctgaactatattaagctatccatttcgcaacaaactntgcaaaagcctctctcccaaactaagttcaaaccatgaatgagtgcaaatagctcggattagtccacatcccaaacgccatcaaactaagttcattgttacgaagtaaaaatgtntgatagatagcataagtaaattcataaaatatcaagaaaaaatatagtattcatcgttgctatgtttgatagagagaatgaatgaaatacgataaatgataattaaaagagagagtagaaataggtgagaaataaaataaaaaataaaaaagtatttctgttggagagaaataaaanaaatgaaaaaataaatagagaaaaagggtaaaataatcccgtgtgttaaactaattaaaataaatctaccttaatatataaacgaacgcacaacttattta

SEQ ID NO: 192904 - DNA, 248 bp, Glycine max
aacagtacgaattttgaaaatagtagtgcctacatgatggtgataaccttcagttatttttaccctctattaacaataaatatgaacataaacctattctaaataatttcataaagataaaaatagccgcctttatatataactattcagattaattactttcgagttccacacccctaagacagcaggcaaggataaaaatttccctaagacagctgtattattagctctaaattacatgatgacac

SEQ ID NO: 192905 - DNA, 258 bp, Glycine max
  unsure (1)..(258): unsure at all n locations
acgtgcaagcttctcctatttctcccgtccagggaaagaagaatcctacgttaacatttntgggggaaattcaacccatgattctgtgagggttgtttcagcgtaaacgttgcttgtttgggtatttgaggtaacagaagagaaaaagctganaactttttctgccttgtgaatttgttgatttcatgggtttaaggtcgctctccttacgcaaatggngttntgaaatgattggctattattatatttgctgtaagt

SEQ ID NO: 192906 - DNA, 369 bp, Glycine max
  unsure (1)..(369): unsure at all n locations
cacttcaacacttcttccttcccaaatggcacggttaaaaatagagaaacttgatgtgtaaaataatgttgcataaagggaaatatatcctatgcaataatatcgtggactcgaaaagttagatatcatatcctagaaattagttgttcctaaataattcaaatgataagaactaaataattttggacattttatcttgtgtggaaagtgtttcaccaattgtgtcaaagaaatataaatcaagctaagcaatagtttttaagaaaaatgtatgaatgaagataagctcacattatgaatctgcatatacttatttntcccttattccacatttaattaagaatcctaattctatgatttaatcattga

SEQ ID NO: 192907 - DNA, 457 bp, Glycine max
  unsure (1)..(457): unsure at all n locations
agctntgagcaagtgatgaggaaaccaaatnntttttctctttctcncctggaggtttggccagataaggaaaaaaaaaaacctgaacttgtgttntgtgatgttttagtgagttgagagagnttgaaacaagtgtggtatgaaccaaaagataatggggttttattggctaataatgaacaattaagggttttgcatatctaatgagtatttattaaggggttttatgacaagtttattaatataggtaatcgtattaattacttagatcaacgaccgtgtaattcaaattaatcatccacaatgtgatttacacagtctaatctctcacaatacttgtattttacacaatgtagaaattaaattatattaactctaccacatanaataatgtgaatgtaataatatttatattaattattgaaataagnctttattataataatttgacatcaat

SEQ ID NO: 192908 - DNA, 420 bp, Glycine max
  unsure (1)..(420): unsure at all n locations
cattcatgttttgaatagaagtccaacctttgctgttcaaaatatgacaccataagaagcttggaaagggaggaggccagcggtagatcgttttataatctttggatgcataacatatgcttatgtaccagatgtaaaaagaaagaaactggatgacaaggctgaaaaatgtgtcttccttggtgtaagtgaggtctcaaaagcatataaattgtttaacccattaacaaataagattgtgaccaccagggatgttgtttttgatgaagaanacacttgggaatgggaaaggcagtagcctattcaagtcatttacgacaacgatactgaacacgatcaaatatcagcaccttacatgctcgaaaacaccacatattcaactcctatagcatgctgtacttcaccaacaaccactatcat

SEQ ID NO: 192909 - DNA, 490 bp, Glycine max
  unsure (1)..(490): unsure at all n locations
agctnggggggtgcacatcatgtatnggagatgaattgaaattctaaaatatgaaagacactttaagggtaatggataggtggggagccaacaacgttggtatgatggatgatttgtgcaaaggaatggacgattgtgatttaagtaggagggtcttttgagttataaaaacatctaatggtgcattgtggatatggggaaatggttagggtacaagtgtcttgtggtcaagtgggactgcaagggatgtggtggtcaaggttttagagagtgggttttgggaaatcattggattaacaattgagctaggaaagacacgtggtcggtgtacaatgcttgcaacatgatggggtaaaatggatggttcanatgtgtgcaagtttggctttcacattccaatttgggagaatggaagggattggaaacacgatgccacctacganagcttttatgcataatgtcatatcattggttgnaacttcatcttcac

SEQ ID NO: 192910 - DNA, 458 bp, Glycine max
  unsure (1)..(458): unsure at all n locations
catctttaacgctntagaaatcacttattagtgttgggaaaaattattgtgtgaagtagttgaaaaatgaaaaattatataaaggatgaaagtagtcaatttttactttaaatagaaaagataaaaaaaataagaatggtttaaatatatttttcatacttctaaaatagattattttcattttattatttaaatttcattttttaatctaagtattcaacatttttttatgtttcactgtagtatctattattagtcccattttgtaaagtgacaacatgaaaaatagagtgttgcattatctaacacctaatcactaacacgttatacaaattttcacatcattgtttattatttaaattatttaaaaaatctaatttttatattgtattaactaatataaataaaaagaaaaactgagttccctttttgaaccctaatggagacatttggaaatt

SEQ ID NO: 192911 - DNA, 494 bp, Glycine max
  unsure (1)..(494): unsure at all n locations
ctgcaagctggagttcttttgccttagctatngtttgttctcttagctngagagggagncacctcagnggaaggtcgaacttattgctgagttctgagtgctagcgaatagggaggcatattaacaatagttggctacactgggcgagtcaattgtgggggaggcaaatgaactattacatctgatggaagagctgtcaaggcctcangcggagtgtgcacaaagtcatagtgtgtctaggtgggtgcttgaacatatatggttnttgttaccattggtttagagaaaaatagctttggagattatggtgacaagtgtaggattattgtgaatgaatgccagagggaatctctagtcattagataatggctcccttggagctgcccttctaaacctacccaggtgtagagtagaaggangtggacatggtttaatgaatggtatagaaatatagaggggtgagataagagtgtcatcaatggactcactatctg

SEQ ID NO: 192912 - DNA, 282 bp, Glycine max
gaagacagacccttgttgactcaagaaaaccttattggccctatgataaagatgtcatttcattgcgctggtgtgggcttattacaaactaatctaagggatgcctctgggctaacacacccttaccatcctatctgcaccttggatacattaatatgaacttgtacttgggctgtgagcaacctacccttctggggtggcgacgcgagactccggatgcgtgtccacgaaagaatcccgccgagtcgccccacttatttgggaaaactgcgaaaccggaaa

SEQ ID NO: 192913 - DNA, 406 bp, Glycine max
  unsure (1)..(406): unsure at all n locations
gaaatgaagacgcacagcaaacaaacaaacaaatctctaattatataagagtaacaaatcaagaatattcnttagttgcttaagagggacaaatatagcatactataagcaacaagttacacatcacatacctttttctgacttgatcccggaagagtgcaaagcaatgtctgtgatgccggtgtcggaagagtggaggtggcatccatatttgatggttggagttagaatgttggaattaaaattggaaagaacccacgtgcaagtagaagaagagtctcaaaagtcaatactcattaataaataaagcatcatcatntgatgatcattgcatttgatggcctatatattgtgataactcatgctcacttatagcactntcatntntngaaagcttacattacat

SEQ ID NO: 192914 - DNA, 399 bp, Glycine max
  unsure (1)..(399): unsure at all n locations
agcttcaaaaacatagatgtcgagtgtatactatntttcttccatgtntcaatggtacgtagcttgtgtcttcttcatagacagggcatgcacgatggcccttaacactgtatccactcaaattcctgtatgctggaaagtcattaatggtacaaaatagcattgcacataacttgaatgtctcatttcgagacccatcaaacacaacatccctttcatcccacaacgagacccatcaaacacaacatccctttcatcccacaactttgtcaagtcttcaatgaagggactgagataaacatcaatgtcatttcttggttgtcttgggcctaatatcatcatagaacaacatcttgtattttgcttcatgcataaccaagagccaagttgtaaattact

SEQ ID NO: 192915 - DNA, 410 bp, Glycine max
gatatccactccacaaaagtgggcagtaaacttgaatggtcgtcattgtcaatgcggaatgtattctgcgcttcactatccatgttcacacattattgcagcttgtggttacgtgaacatgaactactaccaatatatagatgttgtttatacaaacgagcacatcttataagcttactccgcacaatggtggcctcttgggaatgaagtggctattcctcactctgatgacgcatggacacttattcctgacccaactacaattcgtgcgatatgtcggccaatatcaacaaggataagaaatgagatggattgtgtcgaaccatctgagcactgaccaatatgtagtatatgtggagcagtccaatgctatctgagcgtgtgaagtgtcaactcgatgattatgcatg

SEQ ID NO: 192916 - DNA, 382 bp, Glycine max
tctcacaggaataccatcaatgacaatcaagtatggtgtgtgggatgtgttctgtctataaatatacatggcacttgttctttgaatgccaattttttctctagagttaggtgcggttactttaggtggtgggggattatatttacacaatataatgactctccttctaacttctcacaattcgtgggtttgccaagttgcaatgattagaatgagttactgtgataaccaatttgtttgtagtggttagggctaaatggaggactcgtagttctcttgttataaaaccataagaatgagttttgatttaattgtaacgggtaacatacaccctctgtcaattaatagtactatagtatgtttttttactgtcctactcatg

SEQ ID NO: 192917 - DNA, 436 bp, Glycine max
  unsure (1)..(436): unsure at all n locations
ggcacactcaaagagacatctcacctgtgtcttattaaatactatcatgtacatcgggccattacacaaaaataacaccatctaagcaaacttaactgagtagagactagtactctccttcttccataccaatatgtgctcctcaatcagaatcaaattaatacttctaaagtcatgaccttttatctaaggaaattattatatgtatttctcctaatgatatagagatgtctccattcccatcaccacaatcaatttccctccctccggtcacctaaacttgacaccctggctgttatggctactacaaggttgtataatctagtatacttcctatatgtgaaaataaaccacttccacccgaaggtcttgagaaaataaaagtatcccctaaccccncaaccgccaaccaccagccaccttctaacaaactcaa

SEQ ID NO: 192918 - DNA, 483 bp, Glycine max
  unsure (1)..(483): unsure at all n locations
agcttcttttggaccttgaataggcaactaactcctctntctttaccatgctatgtgctcgcgactggtccctttcttcccttcgcaacttgagttcactattgctaccccatagagctccgcgaaatttgttccggccatactcttccttgcgagccctcttggtttcttgttcaagggctcttgcggtaattgcattctcttcccgtaatccggcacactccttccgaacgtgtgtagcggccaacttgaacttctccttggcaagttttgcctttcctaactcgcttttgagagattggacttcttcgtcctcttccggtgcttcaaaatcctctttgctgacgacttttaacttggcgagccaatctaaacctcgtatatgaactttcagccattcgtggtacccaccaatgataccattacgaatgcctctaagctcttgacctttccttaacggnggttcccatgccttatggattc

SEQ ID NO: 192919 - DNA, 431 bp, Glycine max
tcaagaatcaagattgtagattcaagaatcaagtgtcaagaatctagaatcatgtgtcacgaataatcaagatcaagtttcaagacacatgattcaacaatcgagagaagactcaatcaagataagtactaaaaaagtttgtcaaaacattgattagcacaagaagttttcacaaaatcattaccaaagaggtttactctctagtaatcgattaccagtgctgttaaaacgttagattcaaatttaacagttttaatcatgtaaacttgtgaatcgattgacaaaacttgaatcgataacagtgtttctaatgtttcaatttaaaattcaaatgaagagcacatctatggtgtgtattgatacacctaatggtatcaattaccatgccgattcgaaaatactttcaaagtacaatctcagtgactgtttga

SEQ ID NO: 192920 - DNA, 419 bp, Glycine max
tgcttctacagaaactccactagataacttggaggaatttatttgtattgctgaataatacatcaactataaaaatgtcttggaagctagaaagtttaagtcatcaaaaaaacaaaatacacaatagacagattcacaaacaataaactacaagctgccttagtcgaatgaaggaactacttataaagtcagaacaaaaattgacgactattatacacccttaaacgcttcacaggggagaatattgaatgaaatcatgaacatggagtcaaaagatatagatcttgatgtacctaagccattaataaccgggaatgtgaatatagatccgccaaattattgtcgctaacaacgtataatggtgcatggcactaatgaactgtttcaattgaaaaatgccattgaaatccttatacaat

SEQ ID NO: 192921 - DNA, 500 bp, Glycine max
  unsure (1)..(500): unsure at all n locations
agctnngaaggatgcttcaatgaaggaagagatatattgagagaaagagagaggcgggagcacgacattgaaagaataaaagagggagagaagaggaactttgaagtatgtctcacaagactctcattcatcaaagctacaacaagtgttacacaagcttctatttatagactaggtagcatccttgagaagctttcttaagaacttccttgagaagcttctttgagaaaacttccttgagaagctagagcttagctacacacacccatctaaaaactaagatcacctgcttgagaagctatagcttatcaacacacgcccatctaagaactaagctcacctctgtgacaaaatacatgaacatgccgataaaaagtgcctactgcaacactattaaaatgccctgcaatcaaggctaaaacccttactacttgaatgtgcaaatacaatgcccataagataganaacctattctaatatttacaaagaagagtggatcc

SEQ ID NO: 192922 - DNA, 316 bp, Glycine max
catacaacacaaaagcatgatcgattagagaaacatccttatgtgcatcatctggcctgttataaatacccaacacttctacctactgctgacaatcttacttactttcatttttactatttgtatcctacacctagtttaattctgttttaaaccatcaatcatcaatgtttctttcaacaatgccatatttctgaatttaacccggtcctatactattttccttaagttcgatactcggattcatccgttttaattattcaccacttgacgatccggtgcactttctggcatacccgatttcccttgaatatat

SEQ ID NO: 192923 - DNA, 500 bp, Glycine max
  unsure (1)..(500): unsure at all n locations
agcttctntgaatcagtttccaatgtatcatacataggggcatgtgcttgttgaaaagactattatccaagatcacgaatcatatcctccaagcaatctcccatttgtacatcaaacgatttagattgggacccactttacatgtctgtcaattcaccatgccatattcactntgtataattcttcttaatcccatcacacaacagatgctcccgtatgtcgttgagtatttgtcgtctcccattcaaacaagttatgcatggacaaaaaaatttcccattttcatccggtcgacttctttccgaagcanattgcaggaattgttccacgccttcctcatatgcaaggctcatgcaaatttcactgatcgaacgtcgatccatcaaaatagtaactctgtgatactccgaaagttattcgatgcataaaaatctcacttttttcattaaagtgtgaccctatcccattcaagaagacattntttatggtagaatcatacg

SEQ ID NO: 192924 - DNA, 393 bp, Glycine max
  unsure (1)..(393): unsure at all n locations
cacatttgcttggatgttgaaataatgtggtattccacctatttgatgttagataccactttgaagcatangaaggcatttgaggagtttgaatttcatgacaaaaaatatgctaatgaattaagaaaagggataggtctgccttcctatgaagattgggaatatgttgaggctattctaccattcttgagcattttctataaagtcactttgcgcatctcaagtatctcttatgttactagtaacatttacatgttagaggtggtaggtatttggcatggggttatggatttgcttaactctaacattaaagatagcgctacacataagatggctaaaaatatgaaagaaaaatataaaanatattanggtgattctaacaagttgaacatg

SEQ ID NO: 192925 - DNA, 326 bp, Glycine max
  unsure (1)..(326): unsure at all n locations
gcccaccctgccacataagtaggagctntataagcgcgggtctgggggacgaaggtcaagtggtcgcgatatacgaagatgatgttccgagtacattggatttggtacgaccatgccctccttgattccaactgggaaattggcgagtggaagaacgccccggcatttacgcgacgagcataatgtaaacctttacggttttaaaagctctatagttgggcataggctntagagtttttcttttgttaaggctntgtgtcttttgtttttgaatntataatacaaggatctttcttcatctattcctacgtctttacccattctca

SEQ ID NO: 192926 - DNA, 388 bp, Glycine max
ttctataatgggggagaaggaagtatataaggttcagccccttatgcacttctctctctctcgaaatagctgaggaaaattagttccgtgaagaaaatccaagccgacgcgcttccgtaacgttttcgtgagttattacgcgaagattctcgaccattgttcaagattcatcgttcgttcttcgttttcttcagtcttcaacgggtaagtacctcataccaagctttttcaattcattctatgtacccgtggtggtacacattttgttcatgtatgttttattctcgctttatttacttttataccccctcttgacgtgctgaaccatttatttaagtcatgtctcgcttaatctaaaaatataataaattctcaccgatcgtttgaa

SEQ ID NO: 192927 - DNA, 426 bp, Glycine max
  unsure (1)..(426): unsure at all n locations
aaatcaatcaattagcatagtttcttcttgtccaaatctggctattcttgatgagcctgaaattacataaagaaacagcttacaatggcaaagccaaatttagtattctgattaaggaaaacagaatttctcttacctcagggaagatttaagattaagacattagacaccatatttagttatttaccacataaatttgataaaccaagaaaatattttatcaatgatatacaaatctagtgtagttaattagctgttntatccatacaattatataaatactttaataagagagtggttaggtagatatccttttgtgagcatccagagaaagtgtatgtctggcatganactggaattttctttagattagattcattcaacaataacagatntagtctatttcctnttgtaaacttgtcactg

SEQ ID NO: 192928 - DNA, 471 bp, Glycine max
gtgcaccatcgcccgaccgccacctattaccacatgtgttgggtaccccataattctacaagcttgagatgaggaagtgttgaagggtgaaacttcctgcttttattgttgaccacatagtggtacctggagatatgtcgcgggggtcatgagaccttggggacgtcatgtggggtgctattgcccaaaaccaatcttgaccaatcccgacccaacccgtgcatattctgtcagtgagaacctgtgatgtacctaaacatgcgagctcctggcagtcaacagattaaatgaaaacaagaccacatatcatggatgcttgtggtggctggccagctgtgaattttgtgtaatatgtggatggtggcctctggtaatcgattaccaagggtgggtaatcgattacaatgcttaaaattgaggacaggaggctaagatggtctctggtaatcgattaccaaggggtgtaatcga

SEQ ID NO: 192929 - DNA, 470 bp, Glycine max
  unsure (1)..(470): unsure at all n locations
gcttgacanatttctcatatatatggctgctttatccaccttattnggngcttattaacaagtttcaccaaaattttaggacaaaaatatccaattatcacttccttcattaattgttttaatgcatattatagtaattaaatatttcttgttctaaaaaataaaaaanaaatatatttgtcacctctctcacgttaggcctgcaatctctaacgatttcagaattattatcatcccaagtagaggttgtgcaggcacttgatggtagcgtgaataaaccatagaactaaaataatgatttcatttnttggcatgggtgaaagtccttataaagaaaagggtgcctgtaaatttatgtaggacgagagaactatgagcaacaagaaccacatcatgaactacngactaagaggaatntacgaatgctatgtgaaagaatgcacctaaacgtgacacagatgagagaaata

SEQ ID NO: 192930 - DNA, 468 bp, Glycine max
  unsure (1)..(468): unsure at all n locations
ctcagcttaacatcagaccacttccagggtgttggaactacttcacatggtattgatggggcctatgcangttgaaagccttggaggaaagaggtatgcctatgttgttgtggatgatttctccagatttacctgggtcaactttatcagagagaaatcagacacctttgaagtattcaaggagttgagtctaagacttcaaagagaaaaagactgtgtcatcaagagaatcatgagtgaccatggcagagagtttgaaaacagcaggttcactgaattctgcacatctgaaggcatcactcatgagttctctgcagccattacaccacaacagaatggcatatttgaaaggaaaaacaagactttgcaagatgctgctatggtcatgcttcatgccaaagaacttcactataatctctgggctgaagccatgaacacagcatgctacatccacaacagagtcacact

SEQ ID NO: 192931 - DNA, 427 bp, Glycine max
  unsure (1)..(427): unsure at all n locations
gcttaagagtatgagcttatactacacactgtctatatgagaatgaggaaatngacaagaaaaaaaaagtatggtcttagtagcagcttcatcaaaagttgaaaaagaaaacagtgaaagtaacaattctgtttttctttttntttaaaaaaaatagaataaaaaaggaaataaaaatgaaagttataattagactagaaaaacaacttcctatattattataggagcataactntttaactttnttcacactctgccatggaaatcatttgccatttatttggacatgaacaaaacacgaaaataattntgtaaaactcatgataaacatgaagatgttacatttctaacttcacatttatgagaaataaatngtcaatctctaaacaaagttaaaccctcttcgctagagtnagctaccatacat

SEQ ID NO: 192932 - DNA, 455 bp, Glycine max
  unsure (1)..(455): unsure at all n locations
ataataataataataataactattattattattattaaataaaaaaacttctaaataatcaaatatttgaggtaatctaacattagttgatgagtaatctattacatagagattactacagttatatatcccaaacgtaatctattacaaagtttttaatgttcaagaaaaaatttcaacataattttgataccaaagtcaaacataataatgttaggaagtcatacatcgtcggtatcaactctcggagtgcagtttatatatctatggggtaatttcacttgatgttaatggattgtatgataaaatttaacatagtatcggagcctataactcatcttggttctcgcctgtactgttaggatctcttgttcttgtatgcattntggcaaacatctctggtgggggtgcttgtattccgacacatattgtagtctagtgctacacaacactat

SEQ ID NO: 192933 - DNA, 453 bp, Glycine max
  unsure (1)..(453): unsure at all n locations
agcttattcaaatgagttctgtcataattaacttaagcagtaactaatgaaatgcaactaatagagtgtaataacaaatntggaatntacagctggcaaaatctggatacttttaatttaaatagtaatgacacatgtacctatagacatggattggtaagattgataaggaacttcatatcaactatgttgcgagcaatagaagtagggttcattcattgataaaatatttagcctcagcttctttaaagtcatatcttgtataatatttaaaaagttaacgacattacatgatgaatacatgacagccatatttgtttcttcttgtatacatgcggaactggataccagaatttggctgatacatatgataaatngacttaaattaaattaaacttaggctattaagctcgatacaggtgttgatcgataaaggaattgatatcaagtatg

SEQ ID NO: 192934 - DNA, 398 bp, Glycine max
  unsure (1)..(398): unsure at all n locations
agcttagacatttataccacanatattcttggacatgcaactatatgttatntactnttagtctaatctttaaagaatctggtccatctcatatagcaacaaggaaccattgcgattntcaccataacctaacgactaagtcacaatgagtattgaattgttaagttattatcacaataaatcttgatattatntataaatcttgacctggttgtattcctattattgttatagtattgaactattaagtcattatcacagtaaatcttcaatggtcttttaatgtcatcaaccacatgtaaactagtgataaaattntgtagctatattccatggttggatagctcanaacaaacaacgaactntgtgtccatggttaaagaagctatgagactctg

SEQ ID NO: 192935 - DNA, 383 bp, Glycine max
  unsure (1)..(383): unsure at all n locations
gacctttatactcaactgcaaggatgatgatgtttttactgctgcttttgggatttnggtctggccttactaattccgtagccttgagcttacatggttaaatatttcttatcaagttattgcttaaagcttcaataaaataatatagttaccgcgaaagagtgtcaatgacttaaattataaaatatccggttgttgagtgagaaaaaatagcaactttttaataaaagtgttaaaaaaaacattattttttatacaagataaataaaatgatagtttgtagctcctttcaacattaatatcatctaacaacccagtcattttggcattagaatctgcacataaatctggattaaattcttttaacattggccatgttattc

SEQ ID NO: 192936 - DNA, 446 bp, Glycine max
  unsure (1)..(446): unsure at all n locations
agcttcatgatgaatcatgactgattcacaatgttttgatgatcacaaagatgatgacaaacagctcataagtcaagaacacttcatgataacaaaagatgatgatctcaagaatcaaagaatgagttcaagattgaatcaagaacacttcaaggttcaaaagaaaatttgatttcaagaatcatgtttcaagattcacgttacaagaatcaagatcaagattcaagaatcaagagaagactcaatcaagataagtattaaaattttttttcacaaactgagtagcgcatgaatttttcttaaaaccttttaccaaagagtttttactctctggtaatcaattaccagattgttgtaattgattaccagtagcaaaatggttctcaaaaagctctcaactgatattacaacgttccaattgattcanaatgttgaatcgatacact

SEQ ID NO: 192937 - DNA, 461 bp, Glycine max
  unsure (1)..(461): unsure at all n locations
ntctttcgccctgatttctgcctnttcttgtattatttaggtttgctaacttcttcacactttacaatttcttaacatccatgaatgtatagtgcaaaacttttcattgttcaataattgagttaattatgttgtagttcatcaaattaaggagtcaatttttttagtccctcaaattcaaaaaatattatttatagtccattctaaatattttttttttcacttttagcctttgaaattccaacggagggactaaaaaaattatttgttgaatttgaaaggctaaaaaaattatattttttttatgaaaactaaaacaatatactctctaattgaaaggacagaaaacataattgaccatcccaaattcgcactaactgttcttctttttgaactttttttcaattatttttgggacaagtgaagcagttgtattcaaaagatgtcatcaagtgttacac

SEQ ID NO: 192938 - DNA, 426 bp, Glycine max
  unsure (1)..(426): unsure at all n locations
agctntataagcgtaggtgtgtgaggcgaatgtcaagtggtcgcgatatacgaagatgatgtcccgagtacattggatttggtacgaccgtgccctcctgatttccagctgggaaattggcaagtggaggaacgccccgacatttacgcaacgagcataatgtaaacctttacggttttaaaagctctatagttgggcctaggctttagagtttttccttttgttaaggctttgtgtcttttgtttttgaatntataatacaatgatctttcttcatctgttcctatgtctctacccattctcatccatttgcatgtttacttctttatttctgaaatgacagatccgacgacgagtcccccgaaggtactaataccacggacctgtctatcaacttcgagcaagatatgaatcanacggaagatg

SEQ ID NO: 192939 - DNA, 462 bp, Glycine max
  unsure (1)..(462): unsure at all n locations
gtgtagaatggctagacatgatacatgtcatggtgtggtttggctcaagggataaaagaatgccccacattatttccatgacacatatgcaaaaatgatgatttggaaattgtatgcaaaactggtcatgcatgcacctatgtggacactcaagtgtcaaatttttatggtcatgtgatgctagggctcaagattcatttcctctattttagtcaacccaacgtttccaaaatatgttctttaatcaatttgtgcattcatccgagtccatttcgggcgtccggtgaaaacttcacagcattcacccttcaggtgtatacacatttttttcaaaaactagttatgatcaatgaatgtttttcaaagaaaaggtggaaatcatctcttttcaaaagcatgtcggttgttagctagacaacttatttttcttttntctccttctttttttgttatcattatcat

SEQ ID NO: 192940 - DNA, 472 bp, Glycine max
  unsure (1)..(472): unsure at all n locations
agcttaatataagcataaatatttttttttatttttttttatttctcatgttcgcgagcgcacacatgcgcatgtacatgtatggtggatgtatgtgtgggtgtgttcgcgtgtctactaataattagaaaaataattaaagtgattatttttcgtttattctttaatttataaattcaaagtgatcgatattngcattgcctgtttgcctaaagctcacagaataattntaacaattcttagcggtgttcacatttaggaggatttagcattactcatgtgaatgttcacagtttactgacctgttaaatcttatntatgcgtgtaataattanaagaatacatactaaaaatatatattgtatttataaaagaataacttataagtaagttatcttttctattcacttanaaatagacatantagaaagtaagacttattcttttactatngtcctaatcccttttcttt

SEQ ID NO: 192941 - DNA, 191 bp, Glycine max
aataatagtaaaatacgtgtgggaggaccacagaaaaaaggaaaccagagacaaatgatggtgaataatataggaagccatagcgagcatggctcttgctggagcaatcataggagccgcagtcggcggatggatcaacgatcgattcggaaagagaaaagctatccttcttgcagacacactcttcatta

SEQ ID NO: 192942 - DNA, 447 bp, Glycine max
  unsure (1)..(447): unsure at all n locations
agctngtgtgaatcanatcactcctacatnntttctctagcatgcattcattnttctttacctactcctcacngttggttnttttaggaaaaacaccataactaaacgcgctacaaggcatccctatcgcaccagatccaaatctagaacgatgggtgatcaagaggagacacaggaacagatgaaagccgacatgtcggctctgaaagaacaaatggcttccatgatggaggccatgttaggaatgaggcagctcatggagaaaaacatggccgctgctgtcagttcggctgccgaagcagacccaactctcttggctaccgcgcgccatcctccctcanacacagtaggacggngaaggaacacgctggggcacgacgacaaccctcatctgggatcaaccgaacagctaccctatggattgcgctaactactcaccccatatgc

SEQ ID NO: 192943 - DNA, 309 bp, Glycine max
  unsure (1)..(309): unsure at all n locations
agcttcatgagttatcatttctattgcnaccgttgtgtgaacacactggcctataaacacaagtccatatacaccttcacctactttcaatgatggagagaacttntgagtgacctcttcaatatacctttatgctgtatattctgtagctgacatcgttgatgatcaaccgaatcaatgatctatgcttatcttgagactctctactacccttgacctataaccgaaatctattgtgcgcttacttttctaccatcttaatggcttcctcagctgtcttcagggcagctagagcattaactgtctcca

SEQ ID NO: 192944 - DNA, 353 bp, Glycine max
tggcagcttattttgtttatgccagagactcgtgtcaagatatctcgattcatgcacgtgtctagaatcaaagagtcattccatccagaatcaagattcatgatggcacgtgagaatcgggaatagactcacgatgtgcgagatcccctagaataacatcttcatcagtcttaaaagaatttgtcataaaaagatttaataacacaatttgtccaatagatttgtgtaaagaaaaatcgtttaccagaatggtcactctctggtgactgatttccattagggatgtcatcgatgaccaccatcccataaacagtcgtataactgactgacaatagagtgattgtgaccatggg

SEQ ID NO: 192945 - DNA, 520 bp, Glycine max
  unsure (1)..(520): unsure at all n locations
cacctgcggcatgcaagctntctaggcataccaatgtctacaactntatgctcaattctgtccatgttcaagggtncatcattcatgcaagttgaatatctttcttcaagctntctatagccaccagaaacaacttaattccatttctggaactccagatacgatgtccaaaatgaacacatcctgttggaaaaatttcattgagtttgttgcaacaatgttgttcttcatgattactcatactagttctatcttgaaaaatgctattcttgtcctagagaatgttagtgagataatgactagaagcaagaggattgattctaaagagaatgagggcccctctctaaaaacaacaaatgatgtcctcactgaagaggatgaagctcctaagaagattaagattcctactgatgggtgtgacatcctggannnattctacctggaatttgaaacgataccattttgaataataatatataagtatattcagggntataatatatatatatatatatatata

SEQ ID NO: 192946 - DNA, 288 bp, Glycine max
atcttcatctaggtgatggtcttttgcttcctctatctttttgttcagagaattccctataattccttgttcttcatcttattctccatggttatcctccattgtcctgtgggttggtgctgtttcaagatattccaaaaaataatatacccgttaaatcctatatctacacctgttcttgcatttctttggtcaaatcttgagatctactttgaatcattctctgtgcgatttacgtctataattttcattaaaaaatcctgtgcgaacctaaactaaatttcttca

SEQ ID NO: 192947 - DNA, 449 bp, Glycine max
  unsure (1)..(449): unsure at all n locations
ctgaggctgcagctgagcaagaacatatggactagttatgaaatctttcttatctatttnggatatggtgtgaaagctntatatggtgtgaaagcttgccctgctgaacaatagcttgtaactaccatgctttggtatgtgaaatgaaattatgggtgaaccatattggttctctggtttaggaagtgtcaaatgatatttgctagcagttctctggactaagaccactgttaaaccttacatcaacttctagactntgaaaaataatcacatgagttaatgtctatttcttctctttctttatactctacacactggtttggagctggactangaaccacctggttagtgctttntttcctagttggtttgtcaaaattctcatacatgtgctacttcaataacttcaacaagctatacaacaacaaaatttatgtaataaataacaa

SEQ ID NO: 192948 - DNA, 416 bp, Glycine max
  unsure (1)..(416): unsure at all n locations
catgcantaaattattgcattttcccaaagttgaaattaatggcagattggtttggttggcaagtatgcaatctcaattgttgtttctgaaaagtcaaggttgcatgggcgttataatcattggcaaggtacacgggtgtgcaagcggctaaagggttatttgtgcatagtaaataattatatcataaatggttttaatgctacacattttgtgtgtcaactggatttgacaattgggccatcaacatgatcaaacaatgcagactgaggtttgtcacttgctntctaatttaatagaactgggctgatattgagaatatgtgttanaaaaatgcagagtagaggataacaacattctatattttgcacaggcataaatgtaagtggaagttgacctcatgcatgatcattggatc

SEQ ID NO: 192949 - DNA, 472 bp, Glycine max
  unsure (1)..(472): unsure at all n locations
agcttgatgatatggttgttagacaagtggcctcatatatcttaagaagggggggttgaattaagatattccaaactacttccccaattaanaatctatgtgactcttttttaattgagttataaattcccttaacaatgaacttcttaaatattaattcaaataaaaaaatttgaatatgattataaagcaataataaataaaggagtttaagggaagagaaagtgcaaactcatatttatactggttcgaccacacccttgtgcctacgtccagtccccaaataacccgcttgagagttcgactatcttgtaaattccttntacaagttctaaacacacaaggacaatccttcctttgtgttaagaatactttacaacaagagaccctcggtctcttaatcccttagagatatagaaggagaagaagaatgaatctctcttgaagagatagatttacaatctgagcactc

SEQ ID NO: 192950 - DNA, 391 bp, Glycine max
ctcaattcttcaccaaatcacgtgccgtaaagcccaatcttcctctttttcactcctctttcacttccaccgatcaaaatccagaaaaacttcatcaaatggcagagccatcaaagaagagaaagggatcatcctccaccgctaccgctgctgcccatcgtcgtcacggcccattcggagcacccacagcacctattcctccttctttgtcatctccaagatcatcaacactgttgtcatccgatgatcaatgtatacggtacctttctaagtttcttctaaataatctttaccctaatacctagacgtgagttctttatgatgaaacgttgattgtatcaagtgttcaaaattctggcgtggtgattcatgtcatttaaatggcatatta

SEQ ID NO: 192951 - DNA, 432 bp, Glycine max
  unsure (1)..(432): unsure at all n locations
tcgcccaggcgagcaggtttgttttcttatattcaacaaccttctggagaaatcttctggagggcccaagtgggacctggtgctatttccacccncattttaactaagtacacccccctgcctttttttgtgattcttttttcgtaaagttacggaaacttacgaatttcgtaacgatacttgttttcttttcgtaatgttatggaaccttgcggatcacataatcatcccctttttgacttacggaatgttacggaacctcactaattgtgcaacgatgcttccatttgatctccggtgtgtcacggaacgttacggattgtgcatcaatatnntttttgttntccggcatgtcccggaatttcacaaattgcctaatgatgggtgccaagcacctcacaaggaccaaacataagtggcatgtcatcaagc

SEQ ID NO: 192952 - DNA, 228 bp, Glycine max
aagaaaagctctcatatcttagcatacaaagtcatcccattaatgatttgatgaaagacatggtgcatttcaagtaatgtttttacgtacagaaaagtaattcattaaacttactcatacttagtcaccacgttattatctttatgctatacggcaaagtacaattaatattattattcattgtatgaaagttgactttttaattgatattcaaacactttctcatta

SEQ ID NO: 192953 - DNA, 415 bp, Glycine max
  unsure (1)..(415): unsure at all n locations
ttgtgtggaaattgtattgtaaataaacttcttggntttgagactagcttatctttaaagcttcagctgtagagtgacaacctatgaatgatttttgaaaaaatggcttaatcatcttatctgtaaattactctcaaaaaagctctatgctgttcaagattttaataaatggttcgtaaccagtgtcaaggtttttgggatttgtgactacatgacaatcgtaattgtagtagcatgatctggcattgttcacnaattttatttttattttgtaatattgtgacaaaagtgcaatcataactgtgaccataatttcttgatgcttgtcactttaacatcaacaatgtgaccaaatcgagactgtcttctgtatgataaccagtgataaaggacataagatgagataaaattcaga

SEQ ID NO: 192954 - DNA, 449 bp, Glycine max
  unsure (1)..(449): unsure at all n locations
agctggactaggcgaattgatnctatctcttattttcgctntannnannanncaattcaatctaagaatgagtaaatcccaaagcgatatacgtcccgattggatcttcttttcgcttcacttttactcaaaaagatcattttcttatctatttactatgtatgtattgctaccactcttctttcttatttttccaacgtgagttaccggctacgattcgaatgtgtcggatattcatgtttaacncgagatttaacgcgatggatacatattcaacatgagtcggtggtaaattctattttatctgtttgagtaggcgagaaatgacctaaatatatgactgaagcacgtaacaaaggggtgttgaaagcgaatgaaaacgagaataataatacatgaaacataatgtggaccaccacgggttcatagaatgaattgaaagctcggtt

SEQ ID NO: 192955 - DNA, 428 bp, Glycine max
tctattagttcatatacaataatggcggacctcaccttataactattgctaataatgtttgtgccattcgcagatgatagatatggactgcatttttctgcatggccatattgtctcataaaacacgaaaccactctattccttttacatagaaatcactcgcttttggccttccactcaatatgcacatttgaaagaggtttgctccaatatatggtttgggtccttaatgcaggagctctaactaacgtttggaacaattattggtgctcgctctctcctttgtttgatgctctttaaccttctcccactcggtcagcaagatgatatcctcctcgatacacgattttagattataaagaaattggaatatgccgcctattattgtatccaagctttctgccattcacgaagacatcaattatgtg

SEQ ID NO: 192956 - DNA, 230 bp, Glycine max
attggatgacctcaacggattatattggatgttgactaatctgcatatatctttgataagcacgcatttaacatcgccaagttaccctaccgttgtttaatatgataagatttccatttcgcttccaattataatttagaaatcatctaattggcaagctgatttttctccccctgagtttaagagttcttcaattttacttttgcacttttgattggccccattcattg

SEQ ID NO: 192957 - DNA, 258 bp, Glycine max
catcaatcatctatctttcagtctcttgcgacatcatctctcgaacatctttcaatatctttctacagaggcgtccgatttatttctcctcatctttcgtaaagttattgatcaacaccttctctgtcaagaaaagtgctttgtcagaaacttgtgctactcatatattttattctattctccctcttgccccataaacatgaatgacttaactgcctcgaattctctgggtatcctctcttcttcctttccaataga

SEQ ID NO: 192958 - DNA, 449 bp, Glycine max
  unsure (1)..(449): unsure at all n locations
agcttgtcaaaactcagggtgaacacatccttgttctaatgctcattaaacccaaggttcacccttggtgaacccttcttttgctaagttctatctccacaggaactcaaggtatgcaaggtctacccttgacaatattttatattcatagctcttatctatgtagggaaactagtctacaggtgcatcagaaacccaaggttcacccttggtacaaaaacccaaggtccacccttggcacatagtcctaaagagcccaagaggcaaaggtccaggttccacaagatgaactaccaccacaatggtcgataataccttcagtcaactgaaagtcatacttactcctcataaccatcaggggagaagctcaataggccaagacgacttatcacagaactggttgacaagaccttcagccaggtgcaaatcacattaactnctcacaagca

SEQ ID NO: 192959 - DNA, 386 bp, Glycine max
tctttacggacctattaatactcagcttctcaggaggtgagcttaactattagagaggtatgtgtagctaatctctagcttctttaagaatcttcttaaggaatcttctcaaggaggtgagcttatttatgagaggggtgtgtgtagctaagctctagcttctcaaggaagttttctcaaagaagcttctcaaggaagttttctcaaggaagctacctattctataaatagaagcatgtgtaacactagttgtaactttgatgaatgaaagtcttatgagatacacttcatagttccacttctttccctcttttattccttcaatttcgtgctcccccattctctctttcttttactccattaaagcatcctcttcaagcttctta

SEQ ID NO: 192960 - DNA, 451 bp, Glycine max
  unsure (1)..(451): unsure at all n locations
agtcacctgcggcatgcaagctttcattcattctatgtacccgtagtttccacattgngtttcgagcattnttattctncgtttgtttactttntataccccctgttgaacgtgcttaagccatttactcaagtcatttctcgcttaacttanaaataaaataaatttccaccgaacgtttgaattgtattatccattaacttcagttaaaataaattctgaccgttcggtcgtgccgtaaccacgttggaaatcaaaaagaggtaaaaaataatataataatcganaagacatcttttagtagaataaagcggaaaatcaatcggacattntctctgtgggatttctcattcttaatcgaattgttaataactaaagtgaactaaaggctanatcaattcgctagtcagctagccataaaataggctttgagttgtcattatttctacta

SEQ ID NO: 192961 - DNA, 459 bp, Glycine max
  unsure (1)..(459): unsure at all n locations
ntagagagacgatcttgtgcagacaaaagttgattgtacccttttattaaatcttctctagattcaaatattacctcttcaccatcaaagttgacaatgtcatcaagctaaggatcctcatcatctaaacttgcgtccaatgctggttcaactttactagtggatgcatcaaccatcaaatactggttgtcttcttcctcattgtcctcatcagacgatgaatcatccaagtcctcgcaagtgctcatgaggctgtttctttggacttgaagaatttcttattcttatcctttgacttttcaaggttaggacattatgacttatagtgtcctagcttcttgcactcataaaatataactgtactttttacttttttacagaaggatcttttggacgaactgttgaacctggaagaattacttattttcacatctttctaatcttatggtctttgaactg

SEQ ID NO: 192962 - DNA, 499 bp, Glycine max
  unsure (1)..(499): unsure at all n locations
agcttaatcttgatatacctcagaacaatacatttttgttaccacgagatatattgacagctgcggatcatntgattggaatgaaacttggaatgggtatacttgacgatataaatcatttgaaaaataaacgtattcgttcggtagcagatctattacaagatcaatttggattggccctggttcgtttagaaaatatggttagaggaactatatgtggagcaattagacataaattgataccgactcctcagaatttggtgacttcaactccattaacaactacttatgaatcttnttttggattacatccattatctcaagttttggatcaaactaatccattgacccaaatagttcatgggagaaaatngagttatttgggccctggaggatngacggngcgaactgctagtnttcggatacgagatatccaccctagtcactatggacgcatntgtccaattgacacgtcggaaggaaatcaatgtggacttat

SEQ ID NO: 192963 - DNA, 354 bp, Glycine max
  unsure (1)..(354): unsure at all n locations
tcttacaaagcatacggctntctggatgtagatgatgatatctatacagatggatcttatatatctatatatctatagatagatatatagatatagatatatagatatagatcatacaatgaagtaccgcacgagtgggtatataggaatccaaatctgccgaatcactcatgttatgatcttctacatcctaagtcttcccgttccttcatctggcttatgttcttcatgtagcattcagactgaatgactctatgaaattacgtcgctacttccacatggtacgggtaacgtatgagacatctctatctttcccggcgggaatccttatatataccacagcttaactttcaa

SEQ ID NO: 192964 - DNA, 441 bp, Glycine max
  unsure (1)..(441): unsure at all n locations
cctaggatcatgagcattcttgtgtgtcctacaatgactngcgaaacanaaggtgatcatataacaagcagagaattaaaaggtactaggttgcctcctagtagcgcttctttaacgtcttgagctggacgcctgatgacttgtcgatcacggacctagtactttgcttaccttcggctttggacttggtcgcctattggtcgaccatgtgtcgtaggcaatactctaacctttttgtggatgagctgaggggctctagaggtggcgacggtgcatntattgcctgttgctggccatccncaggctgcttgtggtgttcgccttgcacctgcctgngggcgcagtacttcttgatgaaagctcgattagtaggggacctgatgaccttgccggtggtgataggcactctgtataaatgacagaggcccgtaatcagagctg

SEQ ID NO: 192965 - DNA, 447 bp, Glycine max
  unsure (1)..(447): unsure at all n locations
agcacataatttcgtgctcttctctccctctccctttgttcatctccttcttcctccaagctcttatccatggcctcctgtggtggtgagcttcttctatactcatcttctccttgaagtggcgtctcctctccctcttccttctccattccgctgccattcatcttccaagaagcaaaggaatccattgatgaagaagatcctaggcctacaagctccaatggagcttgcatcaggaggtgaaagccctaaaggaggaacttgaaagagcacaagcagttaaagagaagttcaagacaacggccatcaatgtcatgaaaaagtgcgacaaactaatggacgcattatggccaccaccgaatcctgngaacgagaaaccaagatggcccgtaaggaatcaaaatgccgaaacaagttccatggagctttatggngcagcaacaatga

SEQ ID NO: 192966 - DNA, 534 bp, Glycine max
  unsure (1)..(534): unsure at all n locations
cacctgaggcatgcaagcttattatccaagacactctctnggaggtgttgctcctctttctatggctnannccctagaggatggcgcctcctcccacctcttttcctttatcttccgctgcaactccatggttgaaaatcaccattgaaggaccttattgaagctcatagatccagcctccatagaagcttctcaagcaagcctccatcacttggataaccattngatcaattccaagctntgcataacaaaatctaaaaaaattaaacttgaattgggggtctagaatgcatccaaagcaaagcaataatgctatactcaccctaatattntatcaatttctttttcatatcaatggtcatgtttctaatggtctcatcctcattattcacantttgaatcaacaaacataanatcttcctgacttgcatgaaatgcatattagatgtaggataagaggaaccananatcaactcattaatntgataaaatggatgcanaaantcacacnatttttcacctctatcccactct

SEQ ID NO: 192967 - DNA, 386 bp, Glycine max
  unsure (1)..(386): unsure at all n locations
catcttcatgttgtgaaaggaattggaatacatattcatttatccattctttaaagagaaacatgatggcaccacatagagctgaagatttagtatttgttcatagcaacctacaacttctctcaatgaatactccacaatatcatcaagaggaaactaaaatgtgggatgtagctggagatgattttggatcactcgatgattgtggtattcttgaaattgctagtttgtctttagatgaaccagaattagagggtgtctttttcaatgataatgatcacctacggagtgaaaggccttatatggtggaattcttgaagacttgaaagtactaactcatcatcttgctntataatttgttttttgtaaagaaacaaagcgtacaa

SEQ ID NO: 192968 - DNA, 312 bp, Glycine max
catttccgcactccatatgctttggttgtcaaagcacccggatggctcttatatctgtcaaattcagtagcaagtgtcttcaccatggcttcttccaacatgaaatgatccatgtgcccctgagaacctcttggatgtgacaaatatataaggctgatcttatgttgcccagaactgctcctgatccttccctgatgttacctatcacataattaacgcgcataataaatatatatctctcttttaccagtgcagacagataaaattatctggatctatcactatgacacatacctgtatgcaaaagtctgc

SEQ ID NO: 192969 - DNA, 315 bp, Glycine max
  unsure (1)..(315): unsure at all n locations
gtcacctgcatgctgcagctcgggctctcgcctaagcggaatgttattctatttttgttaatgctgaccccacacctatacttgttgactcgcgaagattctcttcaaagatatcttatcctctcgtacacagtggacacgtccaacaacttgtttacttgacaacgcatgctggcgtggtttctaanatgaaagcttcaataatcttatgcattgtattgttggtacctacgttacagctgtattgaactaattgcactgcctcctcctcatggtctcaacttgatgggtttttgatctctgatcggcacacac

SEQ ID NO: 192970 - DNA, 404 bp, Glycine max
  unsure (1)..(404): unsure at all n locations
tactggngtagccccatcctctaaatctatccgatgcatacatgtgtatgggcttatactaggaatgtccgccagggtccaacctataaccttcttatgcttcttgagaactgataataacttcttctcttgctcatccgcaagggaggcagatataattattggaatacttttgctatcatccaagtaagcatattttaaatttgatggcagaggcttcaattctggtgtgggcggctggataatggtagataaagatggtttctcatcctgtacctcatatagaaagtcagaagtatgtgtacttcctaaacacggttagttctatctgctttataaaacaatctccagaggtaaacatcaccggacatgtagcaatatcaattcagatcactctccataaa

SEQ ID NO: 192971 - DNA, 316 bp, Glycine max
gacggccttgactgattatgacatgatgctaggatagattcctaacatatcagaaggttgccacacgaataaatatgtgttcctttgcaggacttagctatgtgtctatacatcgggctggtgaggtccttgctaagttgagtgcactgcccaggtttggttctaagttgtaacttaacaagttcttcgatgtgttttgggcctctttcgttaatgtcatcacgtggaaatacattgaatacgtcatcttgatctcccctaattgcttcatagacagacagagtctggattggtgacccttcgtccatgcccatga

SEQ ID NO: 192972 - DNA, 362 bp, Glycine max
tctccaaccactataaagtcgtatcatatcgaggatgtgagctttcttgatcctatcagacctgatcctttggaatgatctcacgaatattgtcacgtgacaatgatacctgcgatatgtagtgccttggcagcgaatgtttcttagcactatctcacattttttcacatttattatgatatcaataacatatcattcatggctgtaactgccttcatcgtataccaaaataacgggtaatatcaagcttctatgttttattgagtataatatattataccgcgtttacatatgggtgtgcttttctaccgctgaacaaatatcaattctagtatttttatgaaatgacatctatgagatct

SEQ ID NO: 192973 - DNA, 486 bp, Glycine max
  unsure (1)..(486): unsure at all n locations
agctagtgacttagagagatcttatctngtantttgnccannncnngacctctntaaatttaagctaatgacagaatgccttgttttgtcccaagatgtgtatagcaaggaagcttaagttcttagtctttatgctttaataaaatgttgtgttgtatttctgacttaaagttatgaatcttctctttcaatgcaccatgcacgtgggggaatacaatagccacttaagtgtcatcaatgcaaaagcatgcctctcatgtatataccaacagaatgtaaaaatattgctatcatttcaagtgcttcacatttaaaaatctgccagagcatgtctgagttntttcttcctgctcggatatttgctgctggatattgtaaacttgctgctctgtgggcaggccgtctctaatgtctttgatgggaggatggattacgtggangaatgtttctaaggtatatccagtatgtggaagtggatttctcaca

SEQ ID NO: 192974 - DNA, 247 bp, Glycine max
tccaatgattgcgtcaataggttatgagagaagtccaattcatataacgatatttcatgtaatccaatttgtgcactctaacctttaatgtgtgttgttggacaaatggagccatgtcaaaattgggactttttccgataattttggaaattcagtttaacccatagaagataagtgccaacttaataaatcggagaattatacttgacattggatttaaatttagtgaaactgatcattctgtgaa

SEQ ID NO: 192975 - DNA, 431 bp, Glycine max
  unsure (1)..(431): unsure at all n locations
agcttctcaaggaagttttctctatatagctttttaaggaagctacctantctataaatagaaacatgtgtaacacttgttgtaactttgatgaatgagagtcttgtgagacacaactcanagttcaacttctcttccctttttttccttcaatttcgtgctctcccctctctctttctctccctctttcttttcctccattgaagcaccctctccaagcttcttatccaaggctcatcttggtggtgaagctccttcttccatggcttattccctaatggatggtgcctcctctcacctcttctcctttgtcttccgctgcatctccatggtggaaaaacaccattaaaggacctcattgaagctcanagatccagcctccatagaagttccacaagcaagcttccatcagtcgagatgtaccgactact

SEQ ID NO: 192976 - DNA, 452 bp, Glycine max
  unsure (1)..(452): unsure at all n locations
ntgatcccctcacgcaagnccttcccgtatgaagtcgtctcttatatcaatctattntaagagtttctggaatggtgtccaaatcaaggttttggcgatgttgacagactgcggtgtaaaaaaaaatggcatgttagctcgcctgggtgagctgagctcgcctgggcgatcaacccctgcactaaaatataaaaaacgagggaggggaacgttgttgcactcaaaaacttccccccctcattcaaaagacccaagctcactggaaccacgatagcagcagcccccaagcctccattattgagtttttgcttcctttttcatgctttaattcactccccgcaagtaagtgcgctttatcttgtttatttggctctccattgatgtgttttggtgtttaattgctcattttttgcagaaattgtgaagcaattcacatgtgaattcgtgcttga

SEQ ID NO: 192977 - DNA, 426 bp, Glycine max
  unsure (1)..(426): unsure at all n locations
agcttcgcacttgataatgcagatcacatgtatctcgctaggcaatgacattcatggtgctccaagcaaaggtggagtatggaggattgcctngagagtccacacttatgcaatcatgaaactcagctccaaactcgaaagtgaaggacacatgaacaaccctaagcaagaacattcaaggtgctccggataaggaccgagaatggaggattgccttgagggtcctctcttatgcaatcatggaacacaactccaaactcaaaagtggaggacacatgaacagccctaagcaataacattcatgtggctccggaataggatgagaatggacgattgccttgagggtcctttcttaggcaatcatggaacacagctccaaactcgaaagtggaggacacatgaacagccctaagcaataacattcat

SEQ ID NO: 192978 - DNA, 330 bp, Glycine max
acactttatactcagcttatgagagagtcaagatcaaatgtttgtaaaataaattctgtgcctaacaagccaacatatggagaaagatagttgtcttcgaacccatagattgggtttggatgcacatgataaaagaatggtttccggaacaaatgaaatcaaatcttttaccaatgggagatggaccatttctagtgcttgaaagaatcaatgacaatgcttacaaagttgagctgctcggtgagtataatgttagttccatctttaatgtctctgatctatctctttttgatgcagatggaaaattcgatttgatgacaaatccttctc

SEQ ID NO: 192979 - DNA, 438 bp, Glycine max
  unsure (1)..(438): unsure at all n locations
ctgcaactttgctagagagatagaagacaaccttgttatatgcctcangctatagagaacttcatagtgcaaagtcttggtaatttactcattcaagaaggaatgttcctatatagggtggaagacaaagtgttgcaactgcaaactgaattgaggatgatgaggtcttacttgcaagttgcagatagaaagcaagatggtaatgaaagcctaaggaattggatttcagaaatcagagaagctgcttatgattatgatgatgtcgttgagtcatatgcccttagaggagcttcaagaagaaagttgactagtgttttgagcctcatcaaaaggtatgctttatacatcaacaaattcatagaaacccataaggtgggatctcatgttgataatgtcatagctaggaattctagcctcacaaggagttcggaaacttat

SEQ ID NO: 192980 - DNA, 278 bp, Glycine max
caaaattggatgagggaaagagtgtgtttcgaaatcttcactctatgcagaattttgctgttgaaatgtgcagcagaattttgtataagtgcagaaaaatgcttgtgtatggctgtgtgtgaaaagggtagtacatatggggttctggacattttcttgcagatcccaacagtcaaaatgtagacttatgtaatagagacttccagtaaaattttcgagtcgatccaacggtttacgaattggaacgaaggaaatgttactggggtatttgtatgtga

SEQ ID NO: 192981 - DNA, 331 bp, Glycine max
  unsure (1)..(331): unsure at all n locations
tatngatataatggggatttctgaacagagatgtatgaacttttngcttgttaacctttaaagctttgacaatgcttgctggtaacttttagaattgtgagttctgaaatgttgcatacagaaacagatatcagaaattagaggttgcaaataaaaaatgtggtttcaatcagatcaattaattggctagctagaggaaaataatggtcaattaatggatgttgttccttcaatcacccaagataaagctcgagcagtattcacatcccacttcacttgcaaccgagatcaagatntaaagtgttgaactatgtgttgactcttactttat

SEQ ID NO: 192982 - DNA, 379 bp, Glycine max
  unsure (1)..(379): unsure at all n locations
taagctccttcaactgcacaaggctcttaatatntaaagagttttcttgtcaaaccttcacccgacgaagacactgacaaaaacttatcttctccttttttggacaaagtatgacaagctgggggcaagtaaattttcttcccatcataccttggatgcaactgtgatcgtatccccttctcatctatatcttcacgggtattcaagccatccttcgtcttgccttgaatgttaatgagcgtcccaatcacactgtcacatacatttttctccacatgcataacatcaatacaatgtctaatgtctagatcagaacagtacggaagatcaaagaaaatggacactctcttctatatgcaagtcttaactttatccttct

SEQ ID NO: 192983 - DNA, 460 bp, Glycine max
agcttaaggatggtatactatctatgtcggtgatgaacaaaaccgcactacggtgtcaatagatgcgattaaggatgaccctagggctgcaaattcgacaatcccgtgggtatggcttctgaaaggggggaaaagacatgtctgaatgtcataacgcccccccttccgtcattataataatctggagcaagggaggctcgcataacattatcagatacaaaactcgagacaacctgcgcggtgagggcaactgtcacatatttttttaaaaggggaacagtatccatatacgctctcttcactgagatgactaatgcctgaaatgtctattctgatggcggtggaactagacgcagggaacaatttctacataacactctcttttgtataccactaaaatgacctgagaccaagagatagcaatcttttcctcctccaaatgagatagcttaaagaagca

SEQ ID NO: 192984 - DNA, 290 bp, Glycine max
  unsure (1)..(290): unsure at all n locations
catcgacatcattggtttctgcgccatcgtggcgccactagatccggcaggtctatccacctttgggcgtactctcttgaaagatccctccccgctttttgcacacgttctatggttgcatctcatccgaagacattatacggtcactgcctaactaaggcaaccactaggtccttccgagaatggactcgggaaggtgacaagttattgtaccantgaacagctaccccactaagacattctttggatgaatgactcatctactcctcatattctgcgtatgcccccat

SEQ ID NO: 192985 - DNA, 497 bp, Glycine max
  unsure (1)..(497): unsure at all n locations
agctntntgctaccanatattacacagtgcattctttaagtattaacatacaaaccaatacaggtatcctgctaaccaaatgaatatatcaacaaggtagttgccaaagtaattaccaaagggcgttctaatcacctatcatgcaacatatacattntatgaggtattttactatctcacatgcaatatgcctatacattcaggtgtcttcaatgatcacatttttgcttttcacatttcatttatacacatgtgcctactagagagtgaatttcatgttatacacttatttgcatttatttgaaaagtaatttcatgtcacacactcatgggaaaggcagaaatantttcactactcattcacattntgaaaattcatttcatgccatatgttcctatnttgagaagcatnttcgcgccatttttgcacacgttatatnggcaagcacttggtacctactcaaacccacatgctatttcgcccttgtacctactct

SEQ ID NO: 192986 - DNA, 310 bp, Glycine max
taaacaggtgaatgcatggcataagttaatgtccgtcgccatttatgtccatcaccacatcccgaaaccccgaatattaagtaatgagagcatggaggtgtttttgtctgctgccctcaattgttcaattaaccaagtggttagactattaaggtgcatgaataagccataaaagcctaagtagttgaatgtgggataaaggtaatgtctattaccacatctcgagaccccaaataaaacataaacaattagagatataaaatgttcctaatcattttcatgttaatttctttcatttcatttaaccatt

SEQ ID NO: 192987 - DNA, 443 bp, Glycine max
  unsure (1)..(443): unsure at all n locations
agctntgagaaatatggtgcagccataggtcaatatgggccatcattgcccattcctagctatcatgacatcagagttccactcctgaagaaggaaattgaatatactgaaaatttgatgaaaggccacaaggagcaatgggtcaagtatggttgtactattatgtccgatgcatggactgatcggaaacaaagatgcatcattaattnttntattaactctcaagctggtaccatgtttttgaagtctgttgatggctctgattttgtaaagacaggtgaaaagctttttgagttgcttgatgccattgtggaggaaagtggagaagagaaatgtgttcaagttgtaatcgataatgagaagcaactatgtttagcgggtaagttgttggaggagaaaagaaacctatntattggactccttgtgcagctcattgtattgat

SEQ ID NO: 192988 - DNA, 430 bp, Glycine max
tttctggtcatctacagcctatacaatagtacaaggttatcatttcttcatattgttgtggaagcaattcatatatgtttgacatcatcacttacatgcacaacagagttaggatgtttaattagagaacttttggtagacaagatcaaattgtttcccttaacatctacattgattaaaatgaaacattaaactaatagttgcagccttgcaggtttatgatataagttatcaacttgatagatgacactgaaaagcaaaacacagaataataagagtgaatcttattacattgggcaatcagattctgttccatttcagtacaaatgtacaatatattctgtgtggattctgtggctgattctgttccttggcatcaagtttgcagcctagtttggattcattccacatatatatagatcatgttata

SEQ ID NO: 192989 - DNA, 495 bp, Glycine max
  unsure (1)..(495): unsure at all n locations
agcttgtangattatggtgtacccatcacatgttgttctatgtggcggtcgggcgatggngcacaacaagttttccacatccacaaatcgcgcataaacccaccatcccctgttgcccacctccaactgagctcacgtactcccacgtaacccatatcctcgtttctctcaacaccgggtccccatcaatcctcccaagcttccccaacatccaagtaattcaacattcaaacagcacaaactatcacagccaagataacagggcaaaggcagaaaactctgcccaaaacaccaaccaaaatcacagctnttcccacttaaagaccccagtanacatttccttcgttccaattcgttaaccgtggatcgaactcgaaaatttactggaagtctctagtacataagcctacantttgaccgttgggatcggctagcatacatccagaactcatcctgcaccactctttccacaaccagcaaaacatatgcattttc

SEQ ID NO: 192990 - DNA, 273 bp, Glycine max
agccttcgtttaccgatggatcttgtagaaatatgggctgtaacttcacaagacacttgtgcatgatctgaccgttgggaccgcggagaagatatctggagttcgctagaagtctcttaatgaagcttctggaggaagcctctcattgaagcttgtagagaatactacatgccgctggctctgtaattacgcattccagccttcggtaacacgtggatcctctgtgaatttggctctctactgtacaccacaatcttacatgatctcgaccgt

SEQ ID NO: 192991 - DNA, 398 bp, Glycine max
  unsure (1)..(398): unsure at all n locations
gaaaatgtgatctcgnnaatataaattattcgactgtatttgaattgttaagtacataattgtttcaagtcatcattaaagcattggctacaacatacatcacaagaggtataagaaaaataacgcttacagcttaacatcccatatatataaaatatgaattctacttagctgtatgcctttatccaatgcacacactataaggatataactcttgcgatttcatgaaagtatctgaatttgaaagtagcaatcccattaagataaaataacgtgtttcacacgcacaaaacagttatcatgaatgaaaagttgcatgcacaataggagctgtacaaaaccatagtttggccttctcatataacacatgtttgttacgtggagatattacataaaag

SEQ ID NO: 192992 - DNA, 360 bp, Glycine max
  unsure (1)..(360): unsure at all n locations
aatgtcaaattaatgttgattaaatgaattctttcttttggggggaaaatatatgttttctaaatttaaactaatataatatgaagtatatgacttatcagtcgcttcgttaagtgaaccttactacatttaacgaaatttaaacctagataattttagcttaatgtgaccgtagcttaaaaaaaagctcatagaagataagctgttatcatacataggcctcattttatatggttgaattgaaaattgactctcttgactaacatgtattttgcaacccatcaaatangagatttgattgagtcgaactcactcaatgaaatattgatgttagatttaatctttcaatacaaattgaat

SEQ ID NO: 192993 - DNA, 509 bp, Glycine max
  unsure (1)..(509): unsure at all n locations
atcctctgagtcacctgcggcattgcaagctgtctccttgagcttganattcattagccaatttatgttgcgtgggatngataagggttgggaacacgcgtgttgtcttcaacgttagtgttggagtgtttgtcatgttgttgttgttgatgattatgctcaaagggaaggtcaatgcagcgtgtgagcttgatagaggacatgcgaatganggtccgaggatgcacaaatgtggtcatgacggaggcttggccacgacggtgatggcggcatgccagagtgagtgagtgactgagacggactgagtgagtgatcgggacggagaagaaagtcttgacgaggtgtataactgggaaagccacaaatggnggaggaggatacgagacggagaaggagaagatnatcagagtgactaagagacactatgggtgggttgtttgtttgggaattatatttccaacagaataatccgtcgaacattaatttcgaggaataatcatggtatttac

SEQ ID NO: 192994 - DNA, 413 bp, Glycine max
atctgatcttgatttgaataacttacttgaacatgatttttcttcaactttcctctcgaatactgaaggttgttcttgattctatcttgaacatcttgaactcattctttgattgaccttagagctttgtgtcatcacctttgtcatcatctttgtgatcatcaaaacatgtttgaatcaatcttgattcatcatgaaactctgcttctacaacatcgctcttaatattatcattttgagcgttagatgctcatggaggaataatagaagcaaccatataattcacattattagcaaaccaacgagtgagggaggaatcagaaatactatacagaatgtacaaatggtcatctacaaaatcataccgaatgggtgagtcctcatacgcacgctcaatactactcagatcgtca

SEQ ID NO: 192995 - DNA, 321 bp, Glycine max
gcctgaggcaatgacaattatgacatgagcatgataatcctacatacagaagtgcccacgaataatatgtgttccttgcaagactactatggctatactcgggtgggaggccttgtaagtgatgcctgccagttggtctagtgaactaacagtcttcattgttgggcctttcgtatgcatcacggaaaacatgatactatttgactcctattgtcataacaaaatctgatgggacctctctgccatactgatgactgccgagaggtggagctgcggtatataaagtaggcccttaacttattacactgtgctgtcatttct

SEQ ID NO: 192996 - DNA, 483 bp, Glycine max
  unsure (1)..(483): unsure at all n locations
agcttctacatagaactggcatgtctntaactgtacataagatatccatagncaaatgttggtttaaagggacaccaattagtgctgctaaagcttcgtcataatactgcccaaaatattgcatctcaagtgaaagataccctctttgtcccttcttataagtatcttttcaagttgtttttgcattaattattttttaacccaaatacctttaattactttacaataaatgttatgcactaaaaagataaatgcatgatctctcttataaggattagataagaagactagtacacattaattaggcgggaaagtaattaagtgaaaaaagagagctcgagtcccaataattctaagggtagtttgggtaaataaaacacattgctaacanacttaatgctactaactatattaactaactntntttaaagtgcatgaattnagtaaaagagtcttatattnagtgatagaaagagtaattct

SEQ ID NO: 192997 - DNA, 455 bp, Glycine max
  unsure (1)..(455): unsure at all n locations
tcactcccacatcttatctctagcaagctttctttctttctttacccactcctcacgtttggttttttatggaaaaacaccataactaaacgcgccacaaggcatccctatcgcaccagatccaaatctagaacgatgggtgatcaagatgagacacatgaacagatgaaagccgacatgtcggctttgaaagaacagatgacttccatgatggaggccatgttatgaatgaggcagctcatggagaaaaatgtggccaccgctgccgctgtcagttctgctgccgaagcagacccaactctcttggcaactgcgcaccatcctccctcaaacatattatgacggngaagggacacactgtggcacgatggctaccctcacctgtgatacaaccaatcggcttacccttatggattgccgcccaactactcaccacccgtcttgcatgacgatgc

SEQ ID NO: 192998 - DNA, 399 bp, Glycine max
  unsure (1)..(399): unsure at all n locations
agcttctcaagcaagcttccatcttataattgttagtattcatgtnctgcattctntatttcaccatgggtgaacttttattgtcatatcattaattntcatgattctgccacaataattgtcataattctatctttattntatgctatttaatttttctaaatctacacatttattttggcaatcatgcatttattgtcattatatatcacttcaatttgaaagttaattaataatttgtattttgctgggaatattaatactttgttacaagtgaaaaacaaataggggtaggaaaataaaaaaggagaaatatgtttcataaaatagaaataaaaataaaagatatcctggaanaaagaaagatctccccttgcacttaaagaagttaaagtgtat

SEQ ID NO: 192999 - DNA, 375 bp, Glycine max
tcctgactcaccatattctcttacccagtgtatttttccaatccttaccctcggaagcaaaaaagaatagaggggaaatttccaatcaaagaaaaagagaaggataatttccaatgaaagcaaaaaagaaatgaaggaaaattccccaatcaaagagtgggagaaagcaaaaaaaggaaaagaaggaaaattccccaatcaaagagtgggagaaagcaaaaagaatagaaagaaaattcccaaccaaagaatgggagaaagtaaaaaaggaagagaagaaagcttctggtcaaagaaaccagaagaaatgtgcagagaggtctttataccggacaatatctgaacaatacagaattgtcactaaatgaacaaaaa

SEQ ID NO: 193000 - DNA, 512 bp, Glycine max
  unsure (1)..(512): unsure at all n locations
agctngcttctacaattaataaataccatattcatacataaacatccatgggtccaacatacactcaacaaccagttatcagtcatctataattccaatcaatcatgctcagtgtgatgcatgcacctgacctcaactctcaaacgcaatattgttccatttgtcaagatatagtctaagtgtgtccatgcaacactcacttaggaaaactaggcagcaagtgtccaggtcaccctgcccgtggtgatcaacccgagtctcaagggagttccaaactgagtgacatgcccccaagtacttactgacaaagtttatactatttcaatgcaatatgaagtatgaaacataggcaccatcaatgcactaaccgtggataattaaagattctaagtcatccccctctagagatgtttaaaactctctaaccactctatttcctcactagggatatccatcatggtcacttgacccncatgtacatacacaacatacatcatcacaatgacattttc

SEQ ID NO: 193001 - DNA, 338 bp, Glycine max
tactaagcttgaaagtgttgttttcaccttctcgctaagccaattatctggcttatcgagcgtctgctaagcgcaacactcatgggcaaagcgtgaggaagactctagaagaagatgagttgtacaggttcgctaagcgcaccgcttcatctcactaagcgcaccgcttctgttcatccgctaagcgagaaaggcacgcgctaagccataattcactaatgtgcgctaagcggtccataagtgcgctaagcgcacgagcacgaacaaggctacctatgtaagcctgaaatcagaatttagagagagagttaaactgggattcagagctttgcatgtct

SEQ ID NO: 193002 - DNA, 396 bp, Glycine max
  unsure (1)..(396): unsure at all n locations
agctggattngngagttgattntanccttagtttcactttagttattagnccattcaattaagaataatctcagagacaaacgtctgattgattntcttgattattttatttaaagaatatttttattattatttcgcctctttttggttttaaacgtggttatggcgtgaaagatcggtcaaattttattctaacagagattaaaagatattacaactcagatgatcggtggaaatttattttatttttgattaggcgagacaacgacttatataaatgattaaaacacgtcaaatggtggtacgganagcatacgaaataaaaataaaagcacgcgatacaagtggtgaccactaagggcacatagaatgaattgaaatgttcgatttcnggag

SEQ ID NO: 193003 - DNA, 292 bp, Glycine max
  unsure (1)..(292): unsure at all n locations
gcacagcatcacagaatctatgtgtccaacaccctttcattcaatggtgttttctaagtttgaaaagtgaaatttagaatgaggtannatttgaagcaaactctcacctcacacaagtctataacatcaatctaaacttgctcaaactggatttacacctaaaatctcaccgaatcaaaatgtgactcctcaacacccaattttgccctaaaaatggctcttggttcactttggttatttgctttccctctaacacagcctaacctttctcataagtcctaaatgacatttc

SEQ ID NO: 193004 - DNA, 413 bp, Glycine max
  unsure (1)..(413): unsure at all n locations
agcttctgttttatttacgatcgtctcgatatactacgggacacaatcagacatccgagtaaatagttattgtcatttgaatttgctacgagcatctgttttcaattacgagcgtctcgatatactacaagacacaatcggacatccgagtaaaaagttattgtcgtttgtatttgctacgagtttctgttttcaaatacgagcgtctctatatactacgggacacaatcagacatccgagtaaaaagttattgcggtttgaatttgctacaagcttccattttcaataacaagcgtctcggtatatcacgggactcaatcggacatccgagtaaaaagttattgtcgtttgaattagttcagagcttttgtntcgatttcgagtgtctcgattattacgagactaatcgaca

SEQ ID NO: 193005 - DNA, 275 bp, Glycine max
  unsure (1)..(275): unsure at all n locations
ttagattggtccaccatgccctcctgattccagctgggaaattggcagtggagaaacgccccggaatttacgcaacgagcataatgttaacctttacggttgtaaaagctctataattgggcctatgctntaaagtttttcctttcgttaaggctttgtgtcctttgttgttgaatttataatacaaagatctttcttcatctgttcctacgtctctacccattctcattcatttgcatgtgtacttctttgtctgaaacgacagatccgatgac

SEQ ID NO: 193006 - DNA, 482 bp, Glycine max
  unsure (1)..(482): unsure at all n locations
agctntaggaataaagttaaggttaagntttgcttatcattctcaaatagatgggcaacctgagaggacggtacaaagtttggaagatcatttaagggattgtgtgttagatcatttggattgctaggatgaagttttgcctttagtggaattcacctacaacaatagttactatgccagtattagtatggccccttttgaggctttgtatggaataagctgtcagacgtcattgtgtcggtatcaggtggaccagagttagtataatggactatagaaaaggttaaaaggattcaagagaatataaggatttcttataggagaaaaaagtcttatactgatcgacatatacaaccccttgagtntgaagaaggtgatcatgtnttattgagagtcacacctatgactatggtaggcagaataataaaatcaagaaaacttagtcctatatttcttggaccttatcagaatctatgtcatgt

SEQ ID NO: 193007 - DNA, 412 bp, Glycine max
tacgtgacacttgaatactcagcttgttgcaagcttatggtataatctgggactctttcctgatataagtctctacagaggccattgcctccctcgcccagtattatgaccagccattgtggtgcttcacctttggggacttccagctatcacccatggtggaagaatttgaagagatcctatgatgccctctatgggggaggaaaccatacctcttcacagggttctatccctgattagctagaatttccaagatagtccacatctcggcgtaggaattagaccacaggaagcaagtcgaaaatggggtagtcagaataccgagaaaatatttggaggtaaaagcaagaatcttagcagataaaggcgagtggatcccgttcatatatattctcacactcgtttgattttt

SEQ ID NO: 193008 - DNA, 423 bp, Glycine max
  unsure (1)..(423): unsure at all n locations
atatagagcanataataggctgagtaccctaagtataaatagttatgttaagtcagctgccttctnttggccacattttcgtttttccccttctcctctcaaaacccttttttttcccgcagcccaccaaacctgtctcagtaaaacgatgatctcgaacccgttcaccgttggatcgtcgtgaaattgagtatcatgttcgaacccatatccgaacattctgaccttagaggaaaacccttcgcatagagcatcttaattcccgcagaacccaaaactgatcggtaaactaaatctcggttcgtagccgtggatttcataaaattggatatgtgtcgaaatcaattcgatgttcaccgtgggattgcaatatatcgtgatgagaaaagattcatgaaaagtcagtgatgtcaactctctcgc

SEQ ID NO: 193009 - DNA, 305 bp, Glycine max
  unsure (1)..(305): unsure at all n locations
ctatggtcttaggtcttatccactantaatcacataaaacgtatgtttattgggttactgtantttttattagcacatgatatatatacctttagcggaacagttatacaatggccctggaagaccatttatagtgtatgcatcagacacatttggtcctccacctgtttgcaatgcctgtgttatgactgcctcatgatctgtattccaccattctcctgaaatatgttgttatatgcatgttaaagataggtcactcctaagtacattaagggaaatataggaacactatggtatgatgtcac

SEQ ID NO: 193010 - DNA, 509 bp, Glycine max
  unsure (1)..(509): unsure at all n locations
agctggtacctccttcttcactacatcaagaatcactgngttgagtcttctttgtgggtgtcttactgatttagccccatcctttaaatntattcaatgcatacatgtggatgggctaataccaggaatgtccaccaaggtgcagcctatagcctttntatgcttcttgagaactaataacagcttctcctcttgctcatcagcaagggaggcagatataattaatgggaaacttttgctataatccaagtaagcatattttaaatttgatggtagaggcttcaattctggtgtggccggctggatagtggtagaaagagatggtttctcaacctgtacctcataaagaaagtcagaagtatgtgtacttcctgaaacatggntagttctatctgactntatanaatcaatctcaagaggaaaacatcagacatgtaatcaatatcanaatcagattcactcncaacatcaaattcagacatatgatcaagtacanattcaaattcaat

SEQ ID NO: 193011 - DNA, 445 bp, Glycine max
tctataatagggagtgaagtgaagaatatattgggtcagcctcttatgcacttctctctctctcgaaattgctgaggaaaattatttccgtgaagaaaatccaagccgatgcgcttccgtatcgtgtccgtgagtaattacacgaagattctcgaccgctcttcaaagattcatcgttcgttcttctttttcttcagtcttcaacgggtaagtacctcataccgagctttccaattcaatctatgtactcgtggtgggccactttttggttcatgtatttttattctcgatttcatttgctttttatacccactgttgacgtccttaagccatttatttaagtcatgtctcgcttaatctaaaaataaaataaatttccaccgatcgtttgaattgcatcatccgtttatttcgatcaaatgattccgaccgtcggtcgtgccta

SEQ ID NO: 193012 - DNA, 488 bp, Glycine max
  unsure (1)..(488): unsure at all n locations
agctngaagtgagaaagcgtggaagagtcagtcttcctacntttatttgttgaccacagagtggtacctagagatatgtcgcgggggtcaggagacctcggngacatcaggtggggtgctattgcccaaaaccaagcttgatcaatcctaacccaacccgggcatagtcagtcagtgagaacctgtgacgtacctaaacaggcgagctcctggcagtcaaccaataaaagaacaacgacctcaaagcaaggaggcttgtgtagtggctggccagctatggatcttgagtggtatctggaatttggcctctggtaatcgattaccaagggtgtgtaatcgattacaaggcananaaatggagactggaagttgagatggcctctggtaatcgattaccaaggggtgtaatcgaatacaagggcttaaaatggagacaagaatgtgnggtggctctagtatcgataccaatgtgtgtatcgataccagag

SEQ ID NO: 193013 - DNA, 372 bp, Glycine max
  unsure (1)..(372): unsure at all n locations
tattgttaaaaattacatgtgttgtagcgtgatgaataatccctagcaattgtgcctctctaaaccctcgctagtgccttgcaattcattatctggtttcgctcactaatccctagctaatttcttgcaattcatagccttatgtccctctttattcccacgttaatcccttgcaatttttaaatattttaaaaatcaattttcttacactattatgaaattataaatttatattaaaagaattacatttaaaatttatattcaatgaaatttagcaattaaataaaatatgtatctaattaaatttctatacatacagaataattataaagaatatatgcaacanggtaattacaacctacacaacaccct

SEQ ID NO: 193014 - DNA, 476 bp, Glycine max
  unsure (1)..(476): unsure at all n locations
atctcacagtcacctgaggcatgcaagctntcaccagatcatataagataaattcattcatccaatctgcagatatatccctccaaatgtcaaattctctgcctatatattcaacctttccatcactggcacaggagtgaatcttcctccatggtgcaatattaaagttatattgtcatccattcctcacaatcagaaaccacaaacattgccatatattaggaaataaaaaacctaactcaaactcaaacataggcacatcacacaacaacatgcaatgtcatctataaaaatagagcatcatcaatgaaaataataaaggaccataaacctccctacgaagcgcgtagacaatgcaaatgaaaacccttgaacatataaaaccccaaatgaatccaccaaaacaatgaatatgaaaatgaatgcaaaaaaaccaccaacctgactgccaagcgcgaagactcacaatcaccgac

SEQ ID NO: 193015 - DNA, 317 bp, Glycine max
cttcatgatgatgaatcaagaatgattcaagttggtgtgatgatgattacaaagatgattacttatagcccaagagaatgagttcaagattgagtcaagaacacttcaagaatcaagagaaatttgatttcaagtttgaagaatcaagaatcaagaataatcaagttgaagattcaagaatcaagaaaagactcaataaagataactactaaaaagtttttcaaaacattgagtagcacatgattttttcacaaaatcttttaccaaagactttttactctctggtaatcgattaccagtttattggtatcgattac

SEQ ID NO: 193016 - DNA, 385 bp, Glycine max
  unsure (1)..(385): unsure at all n locations
agcnttgagatgattaccaactatgttaaaggtccttaggggggaactaatcatgtaaacggttgatgggaagggtagagttagttaagattagttaccactaactcgtgcggttagggatgattcttacatccatataaataagctgtaacgaactcaaaggagaataacagaaatatcatcgagaagcttcctctctcactntctctcctttctcttctaatttccgtcatcgtcttcgcgagccctcagcttgcgcaagtctgtgaccgtggaggttgcctatccctcgaacgctaggtatcaacgaccctctccaaaacaaataattagacaaatggaaactttacataaaacacagaataaaactctagctaatcaatac

SEQ ID NO: 193017 - DNA, 397 bp, Glycine max
  unsure (1)..(397): unsure at all n locations
tttacggaccttagatactcagctgtgataatgagaatctgtccttcaaacattctttgaatttggcatctgaagncngagagctctaggcagataagtttgctaaatctggaagtggggctgaagtaaaagatgcagggatgccagctattggtgcaaatgaagatggaacatcagttgctctgagcttggtcttcctttcctctggaaaattaactgtttggtcattcgcattccaacagttccttatgatataagttaagtcaatgaccgaccttaggttttcataggagataagagcatcagatccaactcccctcaatctacacaatggtgtgattaaagctgggaagcctaatcgagaagtgttagactgagccatcatggtcatttgtct

SEQ ID NO: 193018 - DNA, 495 bp, Glycine max
  unsure (1)..(495): unsure at all n locations
agcttctgtgagaaaacttccttgatattcttctttgaganaacttccttgagaagcttctgtgagaaaacttccttgagaagctcctttgagaaaaattccttgagaagctagagcttagctactacacacccctctcataactaagctcacctccttgagaagcttccttaagaagattcctatagaagctagagcttagctacacatacctctctaatagataagctcacctccgtgagatgagaagctagagcttacctacacaccccctataatagctaagttcacccccatgacaaaatacatgagaatacaaaaaanaatccctactacaaagactactcanaatgcctcgaaatacaaggctaaaaccctatactactagaatgtgcataatacaaggcccanacgaaggantaacctattctatatattacaaagataagcgagctcatacttagcccatgggctcaaatataccctatactcatg

SEQ ID NO: 193019 - DNA, 459 bp, Glycine max
  unsure (1)..(459): unsure at all n locations
tctcaaggaagctacctagtctataaatagaagcatgtgtatctcttgtggtaactttgatgaatgagagtcttgtgagacacaactcatagttcaacttctctcccctttttctttcttcaatttcatgttcccccctctctctttctctccctctttcttttcctccattgaagcatcctctccaagcttcttattcaaggctcatcttgatggtgaagctccttcttccatggcttattccctactagatggcgcctcctttcacctcttctcctttttcttccgctgcatctccatggtggaaaatcaccattaaaggacctcattgatgctcaaatatccagcctccatagaatccccacaagcatatttccatcaaagtattgaaaagatgtgcaaanaaacatacatagcacaatgttgtgttcaaaagagttttctcataatttctaagta

SEQ ID NO: 193020 - DNA, 374 bp, Glycine max
  unsure (1)..(374): unsure at all n locations
agcttgagccaaaatcctgactcaccatataccttgacccattgtgagaatgtcaattcttaccctcggaagcaaaaaanaaaagggggagagggaaaatttccaatcaaagaggaagcaaaaaaggagagaaggataatttccaatcaaaggaaaagaagagaggaaagggaattcccaatcaaagagtgggagatagcaaaaagaaaagaacgaaaattcccaatcaaagaatgggagatagaaaaaagagaaggaggagaaggaaagaaagctcctgatcaatgatcgaaagaaaacagaagatatgtgcagagaggtctctggaccagacaatatctgaacaaatacagaattgtcaccaaatgaacaaa

SEQ ID NO: 193021 - DNA, 404 bp, Glycine max
  unsure (1)..(404): unsure at all n locations
aagaaacaatttgacgctggtttttggctgtcactcggtacccataatgggtcgccaacattgtaccaatccctaataatgatgggaaggtgcgaatgtgcataaattatcgggacccgaatcaagctaatcccaatgacaattttcctctgccacccatcgatatcctcatggataatacggccaatttcgctttgttttccttcatggatgggttctccggttacaatcagataaaaaaggtgccagaggatatggaatagactacctttttcaccctgtgggggacgttctattataaggtgatgtcctttaaactcaagactgncggngcaacttatcaacgggctatggtagctttgttccacgatatgatgcaccgagatatcgaggtctatgtggac

SEQ ID NO: 193022 - DNA, 440 bp, Glycine max
  unsure (1)..(440): unsure at all n locations
agcntatgactttaagacaatgattcatttgtgactattgcaacttgagcatgtacaactcactggagattatgggtatcttcctaagcatctgagatggatctattggaaaggatttcctttaaaatacatgcctaaaaacttttatctgggaggcgtaattgcgattgatttaaaagacagcaatcttagactagtctggatagacccccaggtatatattacatgacaatttcttttaaaactcagctaaactacaatagtaattgttgccacttaccactgtttcattntttattttcttatctatttntttgtcaaaaaaaaatctcattgtagggtttgccgtggctgaaaatcctcaatcttagtcattctaagtacttgacagaaaccnctgacttttcanaactaccaagtcttgaaaagcttattctcaa

SEQ ID NO: 193023 - DNA, 438 bp, Glycine max
  unsure (1)..(438): unsure at all n locations
ngatcatgtcatcaattcgaaggatagtatcttcagttgctttctgttgaaataaaanaacttcatgctcatgcagttgtgtaaggaagctgtatattgaagtcaacaattgttgatatttaactaaatacatacctgaataatttttactttgctcattgcaggctcaatgactccagtctcgaagttgtttctgattttccctttagaaaggtccatgaatgcatagaagcctacaaatcatacacatttaatagttagtaacaataaaaaatgtagattgttaataaatttgaaatatgtaaccatggaatcaccgtatttggaattgtttcaataagagcaatgtaagaagaagtacataacacttaatatatgcgtaacatgagaagangccagcttattggaaaatatctggcatcaaaatgtaatgataat

SEQ ID NO: 193024 - DNA, 444 bp, Glycine max
  unsure (1)..(444): unsure at all n locations
agcttgttccaatgaatntacatattcatattataattcaggatattattggcaccgaaaactctgattcaaatgctttatcagaatttcggtttcaattggtgggattcccttgatattagcaagagctcccttcgtacatattgacatagttttgttccttatgtttggtttgatctccccaaatgttttgtttagtatgctntattaataaattaaattttgtgtactttctccaacagccggggtgtgataccaacgcagttgagatctcccggttgttttcgtgcattgtgccatattcattaaaaaaaaagttcttaataacttttcaacttttaccctcaaaggaaatatatntgaaattaagattgctctgaaaattataaaaaaaattatcttgatcttaggtgttgagtcgaccatcataattatatctttagt

SEQ ID NO: 193025 - DNA, 326 bp, Glycine max
atgctgtaatggaggaaaagaaagagagaagatgtgatcatgaatttgtaggaataaaagaaggagagaagtggaactttgaagtgtgtctcataagactttcattcatcaaagttacaacaagtgttacatatgcttctatttatagactaagtagcttccttgagaagctttcttgagaaaaattccttgagaagcttctttgagaaaacttccttgagaagctagagcttagctatacacacccctctaataactaagctcacctccttgagaagcttccttgagaagattcctaaagaagctaaagcttagctacacacacc

SEQ ID NO: 193026 - DNA, 490 bp, Glycine max
  unsure (1)..(490): unsure at all n locations
agcttgattgttagatatggcctcctctagtttcacattcttagaaaagaatanaacagatntatgaacatttattttttgtcccgagccactacaaaagcatccataatagttttgataacctaagcttgttgtagagaagcctcaaccacgaattatgtcatcgatgaagaataaatgcaacactgtgactcctgtactattcccaaaccagaagggtttccaattaccctcattgactgacttttaaatgagatatgctagcctctccatgtgcaagacaaagaggtaagggggtgaagggtccccttgcctcaatccccatgtaggagcaaaagaattccaattgatagctaaagaagtgctcatacaattagagagaatatcaatcatccaagagggaatcttcagttgattaagagtgtcaatcacaaaactccattccattcgatcataggctttgtgaaggtcaagcttacatcatatgaca

SEQ ID NO: 193027 - DNA, 308 bp, Glycine max
atacaatatagtgtatttccagagaccaccatgatcccggatgctacactttttccaataatgatcatatcttaagacctcccgataaaaaactctgtcatgcataactatgcatccgaccccattcaaatactgtgcagggacagcgatgatgacactgattctatcgatatatttatcgagacactatgcatgttcaacttcaattgcaattgtacttgctctttgattgcacatacaacacacaaaatggtcgaaacgcttccatcaaccttactgttcatttggtgcaacatccaaattataca

SEQ ID NO: 193028 - DNA, 453 bp, Glycine max
  unsure (1)..(453): unsure at all n locations
agcttgaacctctngatgaaatanaaatttgtttatatatccaatatttgaggtagttaattagtctaattaaaaaatctatataattgagttagttagtcctagctagcatcacaagctggagtggatatcgatctccatcaatggccaacactaagaggcaaggttgtcaccaattgcaatcatcatatagcaaagagaaaagatggatttcaacctatggcttgttctccctcgctttcctctttgtgtttgctgcaaccaatttcattgccaactggcttgacctagtaagtcatcactctcttaattntgctatcttaatagcccctcttaattaatttctgtatatatgtatgtgtgtttaagcttgattntgatgctnntgcttccaagtttatgaatagtacttatgcatatatatatatatatatatatatatatnggntatct

SEQ ID NO: 193029 - DNA, 449 bp, Glycine max
tgagaaacagtggttaattgaggtacttcaacattttcatatttcaacataatgaaacaaaaaccttaagcatatgttcccttaatagtgtaaacattaaacatcagacacagagtacttgcctctggcacaaggtaacaatggatttgtatttatatactttataacaatcatatatctaagaataaccgccattgatgaatacaggaaaaccaaacaaacttaaaataactacccatgcatgcaaacacatacatggggcatgccatgcaacctttaattaacttgtaatattggccatccataacttattcaatggttgtttagtgttacgcttcatattcacatcataaccaacagcgggaacaaagacaacagatcacaaactcagcaaatacattaccatccaatgtcggtctaagtactcccttcgtttatcatctggtatg

SEQ ID NO: 193030 - DNA, 451 bp, Glycine max
  unsure (1)..(451): unsure at all n locations
cttttggaaaaaaaagcatgggcatttgttaaattaagattgtgaaaaaaaattggttgggagaatatcatatatgtattttgaatgtgtgccaaagtcatgcttttatagactctttatgtcttggcaaagaaacccattggaaagagttgtgactttagaaaaaaccctgttaagaagtataactcataactttttcttcanaactgttcactggtaatcgattaccacaaaggcgtaatcgattacacaatgtgttttatgaaaagttgtgactcttcacaattggatttgaattccaaccgtcaaattccctttaattgattactaatacagggtaatcgattacactacttgaaaatcattttggaacattataaatcatttgaaaacattntgaanaccaaaccggtcactggtattcgattactgataactagtaatcgattac

SEQ ID NO: 193031 - DNA, 331 bp, Glycine max
  unsure (1)..(331): unsure at all n locations
tgttcaattattttngttttaagtgaaaccggtttatgaacccaacatggttggctcctaacacatgaaacttataatgtactgtgaagttccacgctttccccttctttgtttttgttttgtagaggaaaacgcaaggatgagcaaacatgaaaacaaatggtatgcaatcttgcagatcaaaaagtttgtcgtacgcatatgcatgatgatgccatgactcatgcaaaatgtgaggctggaatatgataacggacaaatgcacgatatgtccattatgatgttatgaagagatgcttatgcgatgcatgatatgaatgcattttacgga

SEQ ID NO: 193032 - DNA, 411 bp, Glycine max
  unsure (1)..(411): unsure at all n locations
agcttcggaagaaagtgatgaggacaagccctataggcatagcttgaaagagcccgggtagtcaaagagaagttcaagtccatagccatcatagtctgaagagagtatgatgaactaagggacgtcaatatggccaccgatgaagccttggaatgagaaaccaagaaggcccgaaaggaagaacacgaccaaaacaagttttgaggggctttatagggcagcaatagtgagctcaaactccgaagaggtttaaggaatcatcacgggtcaaaggcatgatctggaaggatgagctaaaggctttccttangtcgaaaagaaatttgtcccaacagttaagtgagactgaagggaatatgtgggccatcatcgatgagtgcanagagaagctaaatctatcggcgactcacg

SEQ ID NO: 193033 - DNA, 452 bp, Glycine max
agcttaatagcatgtgcgtcaaaacacccatatttctttttttattataacctcaatagcattcaacatatacatgtattctggtagttctcatagaaaattaatgtccctatttatgtatagtataatatcctcttaggaaatagaatcttggtttctcttgttcatcaagggctattcggagccagaacatacatcttgcatgcatgtgaatctaattgagcagagatttctcctaaagctgtttgttgagtagaattatgtagaattcatattacacatgatcaaaaccttatgtaattaatcaagcatacgttagtgtttgggtttgttgtacattcggtaaatacggaattaggagtcgcgtatccattattaccgttaatatatattcaattggttgaatatgcattgacacttggtttcatgtgatgctcctcttttttctctca

SEQ ID NO: 193034 - DNA, 388 bp, Glycine max
  unsure (1)..(388): unsure at all n locations
gctgaaattgaacaactgaagttctcaagatagtcagatggtcatagtatttcacttagatgtccgattcacgcgcataatgcatagagacgctcgaaattaaacatggcagcacaaggcaaattcaaaaggccataactattgactcgaatgtccgattcaggccattaatatattgagacgattgaaattgaactacagaagctatcgagaaattcaaatggtcacaaattttcactcggatgccgattcaagcgcataatatatcgagatgctcgaaatttaacatggaagcacaaggcaaattctaaaggccataactnttgactcggatgttcgattcacgcacataatataatgagatgctagaaattaaacatggaagcac

SEQ ID NO: 193035 - DNA, 431 bp, Glycine max
ctagcacactccagacatgttctcaaagaatccaacggtcagatcatggaaaattgtcttggtaagtcgcagaccaaatttcgagaagatccaacgtttaacgaaggctgggcagcgtttttaccgaggcagcttcatgtagctttctctagaagcttcctcgtggtttctttgagaagctctctcaagaggcttctttgagaagctagatcattatctatccacactcctcttttaactaaattaactttcttaaaaataattacggatgaaaataacgcaacaaataatcaaacatcaaacataattactaataatatatagatatatatatcacggtgttacagttttgatatattgatatctatgttcgcttttatattgcataagtttatatctttgatatacacactattcaaccccccctcccc

SEQ ID NO: 193036 - DNA, 413 bp, Glycine max
  unsure (1)..(413): unsure at all n locations
agctntctagctgttcattggtgtgtnttgatctccttttggggctctaaattgtgggaatgtgctcaaatatatggggcaattttggtttgttttcttgcttgattaggttgaattaggggtttgtatgggatggccctaggcctataatgcattttggaacaatgggacatgccacattgtccccgttctcttgctattgacgcctaaacgcgcgcccaccaagtgttcgttgaaatgcctcaagggcattagcgcgtgacttttgtaaggaaacaacccatggggcattttggtttgtacatattttctatttttggaatatgtattcattcccganaaaggctagagtaattgccccacatatatcctangcctaggaactaaaaattttatgcaaaaagaacacaagt

SEQ ID NO: 193037 - DNA, 410 bp, Glycine max
  unsure (1)..(410): unsure at all n locations
gctttagcttgaatacaatttatacaatctatatattccaaagagtnacgaccaatgtcagagtcaattaaaataacttccaattcagggcttgcttcatataaatgaaaacacggaaagtgtctacaagactatatatgtcaaacacactacagcatgtgacaacagaccagactagttccttgatctcactaaagtcaaggctacaaaaatctactgaaatcaatcttaagcagaaaaataaccaatcataattttcagcactaaattccagctttttaccacaagtatattattcagcatttttatccaagatagcaaccaaaatatcactttaaccatgtgaaatttagtatatatacctgaactgtgcatttagatgaaccggcatagcgcttgtttgctttatc

SEQ ID NO: 193038 - DNA, 441 bp, Glycine max
  unsure (1)..(441): unsure at all n locations
agcttatctttcgcaaatattntctttcgacatggacatggatactatcattggtgggcttcaattcaagtgttgataaggtgaagaccttgatcttgccattgcaactttcttcttattttttaaacatgatatggagttaaaaatgggagtgcaaacaggcatcagccttaaggcaatatgttaaatgctagttcttgtagatgagcaatgagggccacctaactttaatatgatttgaaagttttgtggcatatattatgaccaagttgatatgggtctctagttttggccatttgtctaaccttggatgataattgatcagaagcttacacataagctcttagaatcttcttgcttattgcgataagattttttattagcgatgcattactcttatgncgaattctggttctaattagtctatacacattttttttt

SEQ ID NO: 193039 - DNA, 435 bp, Glycine max
agcttgtgtgagagaacttgcttgtatagcatgagcttagctacacacacccctctaataacttagctcacctccttgagaagattcctaaagaagctagagcttatctacacacacctctctaatagctaagctcacctccttgagatgagaagctagagcttagctacaccccctctataatagctaagctcacccccatgtcaaaatacatgaaaatacaaaaaaaaagtccctattacaaagactactcaaaatgccctgaaatacaatgctaaaaccctatattacttgaatggccaaaatacaagcctaaaaaaaaggagaaacctattctaatatttataaaaaagagtggacccaaccttggcccatgggctcaaaaaatctggccttagattcatgagaacctcagggccttctttagcagctcta

SEQ ID NO: 193040 - DNA, 374 bp, Glycine max
  unsure (1)..(374): unsure at all n locations
agcttgtgcaaanaaanctcttctacatcttttctctagcatgcattttctttctttacccactcctcacgtttggttatttggggaaaaacaccataactaaacgcgccgcaggggatccctatcgcaccagatccaaatctataacgatgggtgatcaataagagacgcacgaacagatgaaagccgacatgtcggctctgaaagaacaaatggccttcatgatggaggccatgttaggtatgaagcatctcatggagaagaacgcggccactgccgccgctgtcagttcggctgccgaagcagacccgactctcttggcaactacgcaccatccttcctcaaacataataggacggggaaaggacacactg

SEQ ID NO: 193041 - DNA, 240 bp, Glycine max
  unsure (1)..(240): unsure at all n locations
ttatgatggaacaacaatgcctaaaatacttaagtaactgcacataacgtttgtcctactaagaatagttggagagtctgatattctaattaaaattgaaattggttttgcaattgcatgcaggcctgtatcangggcttccatgaaccctgcaagagtattggtccggcacttatcaaacatgtttaccaatggttatggatatacgtagttggtccaattggttgatccatagctgga

SEQ ID NO: 193042 - DNA, 385 bp, Glycine max
  unsure (1)..(385): unsure at all n locations
cctcttttcacttctttnttttcctttctcttatacaaatttcggggtttttccattantgatgattatggaaagctaaacacttaatcaatccaaggatccactccaagcaaggctgaatntgagatctggtttagtatttctaatctttgtgaatgtttaactttttctttaatcctattttttattttcaagattatgattatgcttaggattgaaaatggatcaggttgtggattcatttcctaattttgaaatttaatcgcagattgtttggatgattttccaacctaatttgtgatctcgatcaatntanggattgattcgattgaactatctctaatgcatttgactgaactttcccactctgaacatcatttgtagt

SEQ ID NO: 193043 - DNA, 441 bp, Glycine max
  unsure (1)..(441): unsure at all n locations
agcttgccacccanctcgcccaggcgagtagggttgcttttctccagaagcaacagccttctggaggaatcttctggagggcccaagtgggcctggtttctatttgcacccccatttttactaagtacaccccctgcctttattttggtgattcttttttcgtaaagttacggaaacttacgaatttcgtaacgatacttgttttctttccataatgttacggaaccttgtggattacataatcatcccctttttgacttacggaatgttacggaacctcactaattgtgcaatgatgcttccatttgatttccggtgtgtcacggaaccttacggattgtgcttcaatattttcttttgttttccggcatgtcccggaattcacaaatttcctaatgatgggtgccaagcacctcacaaggaccaaacaaaagttgcatg

SEQ ID NO: 193044 - DNA, 371 bp, Glycine max
  unsure (1)..(371): unsure at all n locations
cactttctatctagaccaattnttacaacgagttgaatggatcacccagggaacctcccaacaactcactatccctcggttctacctcttcctgttttacatcctttctgtcagtcttgacgaaaggaaaggtcagacaatgagacaactagttttaaatgaaactaaagatttttttttttaaaaaaaggttatcgaacaacttttaacttaaaaggagttttaaagcttaaaaaatgaaagctaacgatcaaattttaccctttttttcaagtttttatttgtagcaaaacttataagtagcttttatgtaaataaaanaaaattaagaattggacaaaacacacccttattcttgtgtctcgagcact

SEQ ID NO: 193045 - DNA, 389 bp, Glycine max
  unsure (1)..(389): unsure at all n locations
agcttctccctatctgctatatttttttgttatctgaagaaganaggggttcagcttcttaggcacttctctctgtctcgaaattgctgaggaaaattatctccgtgaagaaaatacaagctgaggcgcttccgtaacgtttccgtaacatttccgtgagtaattacgcgaagattctcgaccgttcttcatgattcatcgttcgttcttcgttttcttcagtcttcaaagggtaagtacctcaaaccgagcttttcaattcattctatgtacccgtggtggtccacattttgtttcatgtatttttattctcgctttcattagctttttatacccccttttgacgtgcttaagccatttatttaagtcatttctcgcttaatctaaaa

SEQ ID NO: 193046 - DNA, 448 bp, Glycine max
  unsure (1)..(448): unsure at all n locations
agcttatttgttctttaatcagnggcttcatttttttaccaatttacagatttagttgtgagatctcacgaagtaaaggatgagggttatgagattgaacatgagggtaaactcataactgtgttttctgctccaaattactgtgaccaggtaaccatatcccttctgctatattcttttttatttttatggcatttgcttacttgattgtcttggaagatttgagaggagggagaaagggggctgggggaatgggattcatggatcccagccccatgttattgaaagaggcatttgttgtagtaatcatttatataggctcatccctcaggttgtgctttgtgtatgtaaacatattatcgagataagttccaggagtgaggaaattaatcatgttacttgcctgattaactaggatgcttttccagccacattaagtgtgtaaatg

SEQ ID NO: 193047 - DNA, 407 bp, Glycine max
  unsure (1)..(407): unsure at all n locations
agcttgcacaacaagtatactaaatttttttttggtacaaaangaaataacaaactaactaaattccactaatatatacaattactactcaaaaggaagggatgggccttgattaggcccctctaatctacctagttaaactaattacacaaagaaaaacccaaatcacaacccaattattcaagtgcaaaggttttgacttccatgcccaatttgacccatgaaatggcagaattggcccaaacatatttgttacaaaattgaagatctttttcttatatttccagggactactcatatgctccatttgaggttctatattgtcctataggccctacacaagacatatatgtcaagtaagcacaaaaatccaaaaataagccacaattatcaattgagatcaatca

SEQ ID NO: 193048 - DNA, 397 bp, Glycine max
  unsure (1)..(397): unsure at all n locations
agcttgcattacatgcaatattctttcttgaatgattgaanngnctaactcttcttgagccctgataaccaattatcatactgtcatgtaaattatcagaanaacaattttactaacatgtcagcatatgacaagtaccagctgaagttttgaaataatggtagtataagacaaggtagcagctttctgaagcctatagttgtagctacatttaagatggcaggggattacacagtaccaagtaccaacctacatttgatttcttgcagaaaacctcttactcaaatcccaagaagttcttagaatctttcagatcttcttaacaactaaactgaccaagcaatatatactattttgacttcatagtcttaatgcaaaatccagatttggagcatta

SEQ ID NO: 193049 - DNA, 314 bp, Glycine max
gaaaaaatcaccatacggggctttcatctaaccaagtggtcctgccaattcaagggcaacacttgaaaaaaagttttttcacacaatgtcaaacttaggtattttttccattgccattatgattcctttttttccagaatttttttcactgacagtatgagatatcaaagaatactactttgacatgtatttgcattttggaattttgttttttcctttccatgaccattgaaaacttagctaaatatatttcccgggcaaccacaggattttatgccacattaatgtggaaaaaggactcgggtgtgcggata

SEQ ID NO: 193050 - DNA, 452 bp, Glycine max
  unsure (1)..(452): unsure at all n locations
tgcagcttaacaatgcttacaaaagcatttccgtttttaactaactaacccacccctcatatttcccaaaaccccatacccacgataatcaagagggaaagaagtccacccaaacctgaaatttcgaagtcccactcgtagccacgcacttcacgactccaaaaatgctctcctttcacgatttggggcagaaatggtggccaaaggttgaagctttgcttgaagcttcaatggagaatgaagaagaagaaagctacgtgagagagggagagaaaaggcttctgaatttctgctttggctgagtgaggagagagaaaagctttttggttttaaaataaaaagggttctcctttcttttttttccattattttattcaagctctgccacatgtccctanttgattggagcanaaagggcccactttctctttntgactgtgacccatactcag

SEQ ID NO: 193051 - DNA, 367 bp, Glycine max
  unsure (1)..(367): unsure at all n locations
acaaaaagctttgaattttatctacataaaaaccttgggtttatatatgtatcattgggtaacttttttttttcgcaacccaaaagcttaaatttttttgggtgttctgcctttatattttttttccctttaacactagctaaagttatttgaatgggttatanttttttatttgttctgtccctttagttagacacttccagtttgattttcaaatatatgacatgctttattatcacatatatgacattctttgnctatgtcttatctttattatcaaatatatgtcatcctttatttatatggtcagatgattgaatataggtagtttggacttctttgtttatggttctttntgggttacagg

SEQ ID NO: 193052 - DNA, 442 bp, Glycine max
  unsure (1)..(442): unsure at all n locations
agcttgtgcaaatcaagtcactcccgcattgtatctctatcatgcattggatgtnggtctcgtcctttgtcacgggaagccggaaggtccatatcaccttcttaattgtacacatggggcactgcgcccccaaatgcgcaagtaagaagagataattttccgagctctcgtgtctgtaaaatgcattcatatcatgcatcgcataagcatctcttcataacatcataatggacatatcctgcatttgtccattatcatattccggcctcacattttgcatgagtcatggcatcatgatgcatatgcgttcaacaaactntttgatctgcaaaattgcataccatttgttttcatgtttgctcatcctntgcgtttcctctacaaaacaaaaacaaaaaaaggggaagcgtgaaacttcacactacattcttagttgcatgtg

SEQ ID NO: 193053 - DNA, 452 bp, Glycine max
  unsure (1)..(452): unsure at all n locations
agctcgagtcttagcataactgttgcatacactttcttattgtttattatgaaattgatgtgttattatgtcttgatcggagtgtgtgattcctgtgtattgtgattgatgattgaaaggtgtgattgatggatgaaaagtgtgattgatgaatggcaaagtgatgaaataatgtgagatatgctaagtaaattgtatttggctactatatgttgcgttgtttctctctagtagttagaaatgtgataactcactcccggtttgctatttgtgtttggatcctgtgatgatattgaactttgtgttcgggggagcagatgaatatgtggatgactatgaagaacctcatgctagaggacacaggaacaccacgctctgatangatgtgacattangatatangttctatattaattgtatgaaacttagatgacctactttgagtcgagatg

SEQ ID NO: 193054 - DNA, 389 bp, Glycine max
  unsure (1)..(389): unsure at all n locations
tctttaaaaatcagacatgaaccttgtcttctacttaatacctattaacaatatgcttgcatggctaaagtgtacacccttattcttttactcttacgtaactcagtaaattacgaaattctcgaccactgagctactaattttcatcccaatgcttgctagatgtgcgggacccatctatagtttgcagacattnttttagtagtcaacagtcatacactttggctgcgtgccagtaaaacaatttattattgattaaaattaattaaaaactataaaagtacggaataattcattaaataagtgtgattcataacaacaaaaattagtcaataataatatattagagaaggttgctagcattttctaaatcactttaaatgataatg

SEQ ID NO: 193055 - DNA, 367 bp, Glycine max
  unsure (1)..(367): unsure at all n locations
agcttgagctnntggaanaagnagcttacatgtggtattataagccgccnacataaccaagccgncaagagntcaatccttcctttcccattatagtaaaaaattgaaattcaacaaaagggtagagagcttgtgcattgtccatgcttcaagaatcaaggccaaagggctcttgcatgaagggacacattagagatataatataaaaccattaatgtgtcttcacattgaagctcggaagaaacctaacataaacaaaggtgttcaaaccttttggcctaatgatcaacaattggcatggtataatcttctagcatactgattcataaagntcagtaacaaagtcatttgatgtattttttttatg

SEQ ID NO: 193056 - DNA, 423 bp, Glycine max
  unsure (1)..(423): unsure at all n locations
gcttctttgagaaaacttccttgattatcttttttgagaaaacttcctggagaagctagagcttagctacacacacccctctcataactaagctcacnttctaaagaagctagagcttagctacacatacctctctaatagctaagctcacctccttgagatgagaagctagagcttagctacacaccccctataatagctaagctcacccccatgaaaaaatacatganaatacaaaaaaaaaaccctactacaaagactactcaaaatgcctcgaaatacaaggctaaaaccctatactactagaatggccaaaatacaaggcccaaacgaaggaaaaacctattctaatatttacaaagataagcgggctcatacttagcccatgggctcgaaatctaccctaaggctcatgagaaccct

SEQ ID NO: 193057 - DNA, 424 bp, Glycine max
  unsure (1)..(424): unsure at all n locations
ctgagtatgaaatttgaatacttaaatttcttaggatcatatgttntaactcttgggaatggggatntatttatatcatacaaacaggccatgattcaatacctctatcaaaagcattgatttgtattagttgagtggtttttttcttggttttagatagtagatactaaacaaaaaaatactaataccaagggggtctatctcagttggttgagcagggtgtgtaaatgttgtaaatctcctgataccatgttcaattcctatggattaaaaaaaataccaatgagacgctntaagttatgaattatagcataagggaagtctactaatgccagtgcggtttgtgtggtcttttagtttgttccgtgctaagataatttcttaaacctttttgtttatatgagaaatgaacattgatccaatg

SEQ ID NO: 193058 - DNA, 397 bp, Glycine max
  unsure (1)..(397): unsure at all n locations
cctgcggcatgcagcttaaaatatacaataacacttgttttctcttcatgaagncctgctnaattatcacgctatcatggaacctcttggtcttttctttgtaaaacttggcattctcaaaggcttctaggcggacctaatctaactcactctgttgcaactttctttcctcaccagctcgatccatatagaatttgcaggacctcactgcccactatgctgtgtactcaatctccactggaagatgacatgcctttccaaagacaacccgataaggagacattcctatgggtgctttgtaggcgatcctatgtgcccaaagagcatcatcaagcctagtactccaatctttcctgcttggctgcacaatcttctctaaaattctcttgatctccct

SEQ ID NO: 193059 - DNA, 345 bp, Glycine max
  unsure (1)..(345): unsure at all n locations
gtggctatggagcccactgaaagtgaggacgcgtagccctctaaaggcgaggacatctagtccactgaaggtgagaatgtgtagtcctctgaaggtgagggtgtgcaaccctctgatggcgagcacgtgtagtcctctgaaggtgagggtgtgtagccctttgaaggtgaggaggtgtagtcctctgaaggtgatggcatgcagctctctgatggcgaggacgtgtagtcctctgaaggtgagggtgtgcaaccctctagagcgagggcgtgcagccctctgaaggtgaggacgtgtantccgctgaaggcgaggacgtgcagtcctctgacggcgaggacgtgt

SEQ ID NO: 193060 - DNA, 361 bp, Glycine max
  unsure (1)..(361): unsure at all n locations
agcttgngnaanagatttctctgatttggttttattattaccagcgggggtnctaaataaatcaaaagatgtcactattcaacaagattttgactttttcaaattggctttaagattatctaaaagctataactcttctaaatggtcttcttggccagacatgaagagtctataaaagcacggctttgatttgctattcaatatactcttcacattcatttgaccaatcctttacaagccttgaatctcttttaacttcttcttcttctttgtaccaaaagctttctgaagttatctatgtttctaaaccttgagaacttgtgctattcatccttttcattcccttctccctttgccaaaa

SEQ ID NO: 193061 - DNA, 421 bp, Glycine max
gcagctaacgctgtcccttgtaatgcatttttttttggctgcaaaaagaacgtgagatttataataccctacctagctggttactctgctctgttactttgtgtccctaaaaccctaatctgggacaaaacataataccctgttacgtatcaagtgaacttgggcctttcttttgggtcaaagctcaaattggatcccgttcttcactctttactttttaataaacgaaccactttcttttttatgtcgtttaactcttgtatataataaaacactgaaaagaatctaaaatgttattattctttattgaataattatcatacgataatttatttgaagtgatgttatgatttaaacaacataattactcctgatttttttaaaatattttgtaaaatattacttatttatattgatcctt

SEQ ID NO: 193062 - DNA, 380 bp, Glycine max
  unsure (1)..(380): unsure at all n locations
ataaaagggatgccccacattatttccatgacacaaatgcaaaaatgatgatttggaaactttatgcaaaactggtcatgcatgcacctatgtggacactcaagtgtcaaatttttatggtcatgtgattctagggctcaggattcatttcctctattttagtcaacccaacgtttccaaaatatgttcttttatcaatttgtgcattcatctgagtccattttgggcgtctgggaaaatcttcacagcattcacccttcaggtgtatacacantttttcaaaaactagttatgatcagtgaatttttttcaaagaaaagttggaagtcatctcttttcaaaagcatgtnggtttttcagctcgacaacttaatttcctt

SEQ ID NO: 193063 - DNA, 408 bp, Glycine max
  unsure (1)..(408): unsure at all n locations
aattcaataaataggccttctatttttaatggagagggttaccactactggaaaacccgaatgcaaattttcattgaggcaatagacttaaacatttggaaagtcatagaaattggaccttattgtcccaccatggtggctggaaatacaacaatagagaaacctatagaagaatggtctgaagaagaaagaagattagtgcagtacaatttgtctgtttccattttcggccacgtcattgctgcaattgatcatccttgtgcagctagcctcatccgaatttgtctccttattttcctgcagttctgacatctgcaccactcctncactgtcttctcccaatctttnttgttcctcttgtcttatanttgcatcagcttcctttttgatggaaagcctagtctgaat

SEQ ID NO: 193064 - DNA, 391 bp, Glycine max
gctttgatgatgtcgagaagagattttttgtttgtcatcatcacaaagggggagaatgtgaatgtatgtatacacgattttgatgatgtcaaaagaagaatcaaacaaagttgcttcaaaagataagcatggcttcaagattaatacaagaatgcttcaacaaacaaagctttgcttcaagagtaactcaagatcaagccttgccttgaaacaaagtgttttcaagacatgcaaggctttggtaatcgattaccaggctgtgtaatcgattactagaagacagggttgagaaatagctattataaaaggttttgaatttgaatcttcaacatgtaatcgattaccagtggagaattttcagaaaatcagccaccagtcacatcttttcatt

SEQ ID NO: 193065 - DNA, 309 bp, Glycine max
gaatacactcatatttttagaacaagtagcacacttaggagcgtgagcggctcagatatctatggtaataacctatttttacccatctcataggggaatacactactcatcccacaacataacagaacattgtctccatattcacatcggaaattaaatgctacacttgaaattatctattgaccataagcgttgatacattacctattgacaagctaaacatatgaaattcctacaggaaaaataccaactttaccttatagacaacttccaactttctacttgaaataaagctaaactagtcaaaat

SEQ ID NO: 193066 - DNA, 383 bp, Glycine max
  unsure (1)..(383): unsure at all n locations
atgctcataccaacacgctctttcccaccttctctctgtctctcaggtatatttgcaattcatgcatatngatatgctcatatgcanaaactagtttcaaaatttattcttgcgtatggtgttggttattatatgcatagtttgtcaatcttccttaaaactttattntaatattaatggtatgtattgaatgtttttaatggttgagataggtagcactgacacagaagtgctgaatttattggcagttgaaaggagaagagatacttgagcaattcgaagcttctagttcttctgagccggtcgcttctataactcaggaaacagaaagtgaaaatgaggatgctggggaaagtaagggaagtgaaaatgatgagataatc

SEQ ID NO: 193067 - DNA, 463 bp, Glycine max
  unsure (1)..(463): unsure at all n locations
gatccttaagtcgaccgcggcatgcaagcttgtgtttcaatgtggagcgtctcgattattacgggactcaatcggacatccgaataaaaagttattgtcgtttgaatatgcttagagcttctgttttcaatttggagcgtctcgatatattacgggactcaatcagacatccaagntaaaagttaatgtcgtttgaattttatacgaggttccaatttcaatttggagcatcgcgatatattaggggactctattggagatccgagaaaaaagttattgtcgtttgaatttgatacgagcttccgttttcaatttggagcgtctcgatatattacgggactcaatcggacatccgaataaaaagttattgtcgtttgaatctgcttacagcttctgttttccagttggagcatctcgatatattacggcactcaatcagacatccaagttaaaagttaatgtc

SEQ ID NO: 193068 - DNA, 427 bp, Glycine max
  unsure (1)..(427): unsure at all n locations
agcttctagatgggtataccatgctacagctgttctggtctagctgtcttgaaagaaatggaccaacaacttttcgtccgcagaatacgcccccatctttcggcaatacatctggagatgcccttttggacatgtcgtccctttgtacatatcaaagtatggtactttgaacttgggagggatgacgatgttgggcacgagacataaatccgctaaatccgagaatgggtaattgccgaggccctcgactgctcttaacctttcttcaagcgcctcaatctttcccttatcttccgcgaagggaacatattcttttacgggtatgggtgaagccgggacatgacggactatgnttggttggggtagttcatggggggatggatctttgaggtggagcanggggctgagatggggtatctcttcttca

SEQ ID NO: 193069 - DNA, 429 bp, Glycine max
  unsure (1)..(429): unsure at all n locations
agcttaattatgcctcatttaactactaaggtatttaagttatgcttacaatggtgagattttatgtttcttttattttctaccaagtacatgagaacttatttgtataaatcaattgtgaagtgaatggataggggctttttgctggttttatcattgaagcgtgagaattgtctctattagggttcttccttgaaccatttgatcttatcaagaattggtcaattcttgtggcgatcgtcaaggcttatcagacatcattgtttgtggggcctatcttattcttcctttcgcattntttgtgtccttgttaattntcgcaatgttaattctataattctgtttgaatttcttatttgcatatctctcattntacttaacctttnttctgtggtttttttttgcctaaattgggttcagaatgtcctc

SEQ ID NO: 193070 - DNA, 367 bp, Glycine max
  unsure (1)..(367): unsure at all n locations
atgaccgggcactccttcactcgccaatatcctagncgaaaaccataagggcatggtcgtaccaaatctgacccactcggcgaatcatcttcgcatattgcaacgacttggccttcgtgtcctagacccacccttataaagctcctactgatgtggcagggcgagcctccttcgacttcttgtcccaatcgcgagccttgacccccgctcttccttcctgcaatgcttttccttatgtccgctcgtgtgggtttatagcctaacccaaacttcccacggtttcctttggcgcttatcaggctggttctaccgtcgttgtctttgcctaaacccattccgggcacgtaaccattccccaacatcactc

SEQ ID NO: 193071 - DNA, 429 bp, Glycine max
  unsure (1)..(429): unsure at all n locations
cacctgcggcatgcaagctngagaaaaaaataccccaattactcttgttatggattgcatttttaactggccattgcacgggttggcatcaattgatattgatatggattctctttcatttaatacggcttcatggatcactttctataacctcaaaagtgctcttacatgcctggcattacaatccagtgaatacagtttattatagctgttatctctttgagttgatcagaatcaagcttgtctaaaaattgtttgatgcctatcttgtcctattattttattctgtgtcttttgccatctacattattgatgactgtgatgttgagtcatctaagggtctcttaacttgaagatcatatattttcagctttctatgctagtngcttaactgcaaatgtaggggagcaactttgaaattatgcttgg

SEQ ID NO: 193072 - DNA, 280 bp, Glycine max
gcgaaccctgtaccaaatacataccctgtttttaatgaaaggagacatgagaactgcatatacactttaggtgatttcttatctaaaaggagaattgacccctatcttgaatgtgggattaatacgctaacatatctggctctttcattctgataatgcctaacaaatctatcaaagaattggaggaggccctgctagccacggttgttgaaatagaagctactccaaatattgccatcgataacttgccacaatacaactgctagtaaccattgatact

SEQ ID NO: 193073 - DNA, 374 bp, Glycine max
  unsure (1)..(374): unsure at all n locations
acacccgatggagagggcatgaatattnttctttctcgagagcatccgctgttcaaataatagtggctcgatatattattcacctgaatctgacatccgtgagataagttatgaccactcgaatttctcgagaacttccggggatcacatttgagcatctcgatatgttatccacctaaatctgacatccgagtgaaaagtcatgaccattcgaatttctcgagagcctccgttgtcaatttctagcgttccggatattattcacctgatcttgccgccgagcgatgagtatgaccctttgtattggccgcgacttcggcgtccaattcagcgtctcgtatattagcgcttaatcgacttcgccgaaagtatga

SEQ ID NO: 193074 - DNA, 394 bp, Glycine max
  unsure (1)..(394): unsure at all n locations
gcttaagcgagccgtccgctaagtgcaacactttatgtgtctaagccacgagggaagacntntggaaagaagaataagttgtacaggggttcgctaagtgcanccgcttcatctcacataatcgaacccgcttcaggtccattccgctaagccgagaaagggcacgccactaagccaaaattcactaatgtgagctcaacggtccataattgcgctaagcgcaagagcacgaaatcagattntagagagggagtttggattgggattcaaagctntgcatgtcaagagtttctagagagagaaaggtccacgttccagagagttttgagagaatttgctatgtaaagaattgtagagactanagctngaagcacgagtcggtttgtgagcttga

SEQ ID NO: 193075 - DNA, 205 bp, Glycine max
ccttataaaaataaatcctttactgattaaatgaaacgtactataactccacaacactattcgttaggggacacatggcatatacgcatgactctctttatgcttttaggcaattccttacattacattacatgctaaactgactcttcctatcccgttcactcggacttcttctcttcactacgacacacaacttttcagataa

SEQ ID NO: 193076 - DNA, 438 bp, Glycine max
  unsure (1)..(438): unsure at all n locations
agcttggttttgggcaatagcaccccacctgttgtccncaagggctcctgacccccgcgacatatctctaggtaccactctgtggtcaacgaataaaagaaggaagactgactcttccacactntttcacttcaagcttgtaggattatggggtacccgccatatgtggtactacgtggcgatcgggcgatggtgcaagtcgactctccacatccacaaatcatacataaatccaccatccccagctgcccaccttcaactgaactcacgtactcccacgtagcctttatccttgttcctctcaacaccgggtcctcatcaatccctccaagcttccacaacatccaagaaattcaacatccaaacatcatgaactatccataaccaagaaaacagggcaaaggcagaaaactcacccaaaacacattcaataccaca

SEQ ID NO: 193077 - DNA, 437 bp, Glycine max
  unsure (1)..(437): unsure at all n locations
agcttatagaatatataataagagaactatgtctattgtagaatctattcatgtttcctttgatgagtttaatgccattcccccaagaaaggatattntagatgatattgcagaatctttagaacaaatgcatatttatggacaagattctaaaggaaaagggaaaggaagcaatgaagatcctccagaagaagccaaatcaaattatgaacttccaagagaatggaaagcttcaagagatcgtccccttgacaacattattggtgatatctcaaaaggggtaacaactagacattctcttaaagatttatgcaataatatgacttttgtgtctatgattgaacctaanaatntagatgaagccataatagatgatcattggatagttgctatgcaagagaactaaatcagtttgagagaaacaatgtgcgggaact

SEQ ID NO: 193078 - DNA, 435 bp, Glycine max
  unsure (1)..(435): unsure at all n locations
agcttgttcaaagttggtgtactaagtaggatattgtataaggngtctacatccaccaaaacaaatagaactattaatgattgagaaagcttgcccgagccaaaagtgttcagcaaatctacatttcctcttgcatgcacttgttcaccaacaaaacatattataggtttctcatgaggttgcataagatcatgagaaacgtctaatttttcaaagatagactagtataaaatgttagcaaaacttccctaatcaattagagttttttggactgctaaaccagctattacaattgtaaccaccataagctcatcttgaattgatcatttccaatgaagtcaacatcaatgaatgtaattgcttgtagagattngcaagaaagttcttcttttcttatgcattaacactttttaggactcacatatgtcatttcct

SEQ ID NO: 193079 - DNA, 388 bp, Glycine max
  unsure (1)..(388): unsure at all n locations
agcttcaaccttatgagactaattctcttgtttgaaaanccttaaataatgtattaaatttgaattttatgatggaaaacatatttaatagagaaattctactcaaaattattagttaaatctattaataaaaaaacacctattggcaaaattaataaatattttatacttataacatttagctatttcgtaaataaaacaacaataaaggttgtatggctaaagattgttggttgtgattgcatgttgttgcattaatcaaagaaagaatgttgttatattaatctgtgctaattggtctaaatctaacatgaacaaataccaacttaactcatcgataacaaaaaaccgtaataaaattactcgtggttttgcaaagtaactataa

SEQ ID NO: 193080 - DNA, 431 bp, Glycine max
  unsure (1)..(431): unsure at all n locations
tactggggtattatcacaagggcatcatgcttttttatcttatagancctaaggacataattggtatttggctaggtcaagtcgaataccatacaatataattagagtttaaaatattaatttaaataatttatttgagtaacttctattagaaacttaactaatttttattaaaggatccaaaataaatatttaaaataaatcatttataaaatgacatttttttgtcataggttagacaccataaatgtttctcaacttattgagttaaagactaatttcacttatggtgtatgattatcgttggttcaaggaaaataaatcattttaactctaaacaaatgttctcccactaaacatattgtttccactcatataaacacaatngagtcttatactactatgtcaatccttttaaattttttaaaata

SEQ ID NO: 193081 - DNA, 446 bp, Glycine max
  unsure (1)..(446): unsure at all n locations
gcagctacaatctgtttaaatccaagcccatttataatatcttatcanatctaganaagaaaagataagataagatctagatgaaataatatctagatgagatcaaatctaaataatatctagataagggaagatctaattttgtagaataaaatagtctgccctcttcaagtccaagcccaattctggattcaagcccaaacccaatgcttcattaattcctgaaattagattaaaagcatcaaattagcttaataggcccaactaataaaactgcctaattaatttgacaattaagactaatcaatacttataatggtgcaaaaagggttaagaaataggagagaataatggcacatcaaaacccctgatacttatgcctttgcactcctgngcaaaatgaaataaagaacaaaatccaaggatatcaaagagagacaaacaaa

SEQ ID NO: 193082 - DNA, 434 bp, Glycine max
  unsure (1)..(434): unsure at all n locations
gctgntaatatncacgataatgatgttagttctatcttttattnnttatncnntaaaaaatactaataattatttgtgattgattgataatatatgtcttttacactaaccatgcataaaaattaaactcttttttcaataattgttttactactatagttaaaatttattaaaaatggcataattatgagtgcagntcattaaatgcatgtttagattcatattgaatcatacaaaatcaagttgaaatatcaatttatgtgattttagataaatgttcatatgtttgatgctctatttgagaattaattgaatctaacattaattttgagttgaataattctaagtaatttttgggttataanaaatgttataacaagctttgttgataactcgattttagaataaaaaaacattcagacacaaaacacttc

SEQ ID NO: 193083 - DNA, 435 bp, Glycine max
  unsure (1)..(435): unsure at all n locations
agcttgcacactcaaagggacatctcacctatatctntattattaactatcatgtacatctgtccattacacaaaaataacaccatctaagcaaacttaactgagtagagactagttctctccttcttccataccaatatgtcctcctcactcagaatcaaattaatacttctaaagtcatgacctttttttatctaagcaaattattatatttatttctcctaatgatatagagatttctccattcccatctccacaatcaatttccctccctccggtcacctaaacctaacaccctggcttttatggctactacaagggtgtataatctagtatacttcctatatgtgaaaataaagcactttcacccaaaggtcttgagaaaataaaagtatcacctaaccccccaacccncacccaccttctaacaaactc

SEQ ID NO: 193084 - DNA, 437 bp, Glycine max
agcttctattttcaattacgagcgtctcgatatattacgtgattcaatcggacaaccgagtaaaaagttattgtcgtttgaatttgcttagtgcttctgttttcaatttcgtgcgtctcgatatactacgggacacaatcggacacccgagttaaaagttattgtcgtttgaatttgctcagagcttctattttaaattacgagcgtctcgatatattacgggactcaatcggacaaccgagtaaaaagttattgtcgtttgaatttgcttagagcttctgttttcaatttcgtgcgtctcgatatactacgggacacaatcggacacccgagttaatagttattgtcgcttgaatttgctcagagcttctgttttcaattacgagcgtctcgatatattacgggactcaatcggacatccgagtaaaaagttattg

SEQ ID NO: 193085 - DNA, 441 bp, Glycine max
  unsure (1)..(441): unsure at all n locations
agcttctagccaaatggacgtactttgtatatttttctttgatagccctctggagccttgttttcctttccttggtttgaagctcactacaagccttaagtgaaaaaccatgatatcaccatatccttaaggaattttggagctttggaattgttttgggaataagtgtggggggtttttgtttcattggacaacttgttttgttggctatgcttcatgatgtattttgggccatacttgatgtacattgtatattgattaaatgttggacatgctgaatgaaatgttgtttctcacaggctatagagtaaaaaaaaaattcgaaataagaataagacaagcaataacgtcgagtgaatacgatcttaaatggcacaagaatgatgaaactctnggctctactcttcnactgttaaatttatcttcttttatattttctta

SEQ ID NO: 193086 - DNA, 367 bp, Glycine max
atggaacctatgtgtgcttatctttatcaggagaaaaacaatgtaactttatttctctatcccactatttttacaaactaattacatttattaagattatattagtttaaaaattattttacatttattttatatttagaataatatattgatgatttgttgttgttgtttggtcttatactattgtagatggttgtttagtctaaaaatcggttagtacttgtttatatggcgtttagtttagtctctttctttttagattaattaatccttattttatatgttttccgctagccctccctacaattaacttctggatccctgtccctaacaatattaaagatggatactaaataaactaatgatg

SEQ ID NO: 193087 - DNA, 397 bp, Glycine max
  unsure (1)..(397): unsure at all n locations
agctnttcgattcattctatgtacccgtggggttccacattgngntncgggtatntttatcctcatttcatttactttttatacccccttgtgacgtgcttaagccattttacttaagtcatttctcgcttaacttaaagataaaataaatttccaccgaacgtttgaattgtattatccgttaacttcggttaaaatgaattccgaccgttcggtcgtgccgtaaccacgttggaaatcaaaaaagaggtaaaaaataatataataaaaaacaacatctttagtaaaataaagcggaaaatcaatcggacgtttgcttgtgggatgtctattctaagggaattgatagatactaaaggaggttagggtaaataacttgcctagtagctcgccataa

SEQ ID NO: 193088 - DNA, 452 bp, Glycine max
  unsure (1)..(452): unsure at all n locations
agcttgtcattgttacttttgcttattgtttttgtacatgaacaatgcctacgctatatatatatatatatataaggaatttttaaatttatttgtttgtaacacaaaagcaagatttttattctttatttaaaggcctgaagtaattcgtaaagcgtttattcaatatatgcattcttaagcttttaaataagaacaatataacgttaaggtaattaaattgtttaattaccatgatttcaattaatatttttagtagttttattattcattataattaaattattttatgtaatactccgttttaattaacgttaatattctaatcatggtaatttaattactttaactaanatcaaataccatcatttattttttaattatcataatattttgctataattcttaaaaaaaatagagaacaaatcattaaattacaagtgatgaattgg

SEQ ID NO: 193089 - DNA, 370 bp, Glycine max
  unsure (1)..(370): unsure at all n locations
atagaaaatgcttagtgcccaccacacattangtacagctctaaggggatgtaaagagaaaataaataaaaaattggcgtatccttcaactgtattgtcatgtgtcagttacactctatngttcgttttcttatagatgagggttagtttggtaaatagctaagaaatctcttgttttatgtgattctttttatatggtctctccatatcgacattgatacgcacaattactaaaactttaacttctaagttataatatatatagtgcctggttgttgaatatgctaataatggccatggtgccaaatctcatttccaagtcataattctatttcttctttcatttatatacaatacatcccactatact

SEQ ID NO: 193090 - DNA, 331 bp, Glycine max
  unsure (1)..(331): unsure at all n locations
agctttgaacataatattatttattattctcttcaaactaanaacaacaacggtaataagttcacattcgctaggctggctgatttgctgaatcctcgtcctacagctgggatttcctaggcatctccactcattcaagagtgactgctagaattttaatttaagataaccaccatgcgtctgtgtctctgtcactctctaattcatcattgtataatgcctataatcaataaaaaagatcttattcttttactgcaataaaaatatgcatttatttctacgttgtataatatgtttagagttttttaaacacaacatatttctcattaaa

SEQ ID NO: 193091 - DNA, 405 bp, Glycine max
  unsure (1)..(405): unsure at all n locations
ttttttaccagnggggacgtactcttaaagcaaaaatgtcatataacctcctcccataaatacaaacatcaatgtaaatttagagcaagcttatgcgcatatttccttacaaacgttctcttgcacaagacattctattaaccgaaaaaaaaaaaaaatgcacccatatacaatcaaggcagcttcgttacctagattatttacacgtacttccaaggtgtatttgttacttacatcacacacatctccttggctaaattcacatacatgcatacccaaagcattttggggtaccaaaaattgcacatgtgcacatcttggtatctctaatacctatacatacancaaacttatgatgaatcttgactatctacacaataaggtgctacatttcatgctcttttc

SEQ ID NO: 193092 - DNA, 441 bp, Glycine max
  unsure (1)..(441): unsure at all n locations
tgcagctttctctggtgcttgctagttttttctttttaaaaagagaagagattaaagtcttcattcactgtctgcatgcgatgaatatttctccctccacagacaatcccaatggtgggtgtgtgcgaaaataagttctgaacaacgtgttcaaatttcacaatgatccaactgttaacgattctgagctcatcgttttactaaaacaggtttggatgtatgcggggaaaatagagggttttaggagagggagaatggaaaacgaatttgagaggaagacaaaacgtagagacgtatcgctagtctaaaaactgacctanaatgtctctatttatagttagggtactctcagcctattatntactctatntatttgtttataaaaaggaactctattntatttcctatcaaatgaataaataaaatatcttntttattttc

SEQ ID NO: 193093 - DNA, 370 bp, Glycine max
  unsure (1)..(370): unsure at all n locations
agcttaaccttaagaaatgcataacatgattctcatttttattcaggaaanaaaaaaanngctttggaaataccataatatattttgtccagcttgcatgtcattttatagaaataaaatatatcaaatgctcaccgatgttcctactgtatctgctaacaggcgttacaggtgtagcaattgcaggattgttgatatgtattacgattctctgtttgtacaagttaccaacctggaaaggacattttgggttgaacacaaatagtaacaaaaatattgaagctttgctgaaagttcatggtgctataatctctaaaagatataaattgtcaaatgtcaagaaaatgacacataacttcaaagtaaaact

SEQ ID NO: 193094 - DNA, 474 bp, Glycine max
  unsure (1)..(474): unsure at all n locations
ttaagtcacctgcggcatgcaagctnttactccacanaaaatcatctctgtatctacatattctctcctacagactagagatatacaaaggctttgtccccttaaagttcttatagtaaaaacatcaacttcacacgttgctaaccaccccaaaaaatcacccttaatgatgatgtccccaacattttgtccatgcaccgcttctacattaccaatgaacatctgtgttacgtgcagggttgttgctgaactttgagggtgagcacctccagaaacaaagaaggaagaaggagaaaataagctggtttcgaggttaccagtgcctccagaggaagaagaaaagcanagagaagagtaatttgctaatttcattcatgattgatgttgtcattacatagtcatatatatactgaattctaaatttgacattnntgtgattctagaatggttagaattcagcaatttggttattct

SEQ ID NO: 193095 - DNA, 399 bp, Glycine max
  unsure (1)..(399): unsure at all n locations
actacacacacctttctaatagctaagctcacctccttgagatgaaaagcttgggcttagcttcacaccccctataatagctaagctcaccccatgacaaaatacatgaaaaaacaaaaaaagtcctactacaaagactactcaaaatgcctcaaaatacaaggctaaaaccctatactactagaatggccaaaatacaaggcccaaacgaaagaaaaacctattctaatatttacaaagaagagtggatccaaccttgatccatgggctcaaaaatctaccctaaggttcatgagaaccctanggccttctttagtagctctagcccaagcctcttggagtcttctatccaatacccttggggggtaggattgcatcaggtaccctacctacattatg

SEQ ID NO: 193096 - DNA, 370 bp, Glycine max
  unsure (1)..(370): unsure at all n locations
actctgctctcggcccaatcttgttgcttgcgcgtaaaaatgggcactgtgtagtgtaaaccggaaggagggagacacagatcatattacatataagagagtatnttcaagagagagagagaagtatcatttcattttcattgcttctggcgttttccatcttttaacacacctcatttttctcatgcgtgcaagccattctcaaataaatctcaacccacccacatttcttggttcttaaccgctttaattgcctttaagattctgcaattcctctcccacctcaacttctgtgttcatctatctatcttcatttcctctctcccaaaaaactaaacgaccaaatcaaaaaccaccctttagctccatc

SEQ ID NO: 193097 - DNA, 428 bp, Glycine max
  unsure (1)..(428): unsure at all n locations
agcttatctaatatcataagcaaatgtcctgtatgatatatctatnnaaccttctggtctgttcagtctagaagcaaaagtgtgtgggcctcatcttgcagatctatgctgcttcatcaactntttgcttttgcttcaagatgtgactcacttgcttcttcatattcagaacctagtgagcaaagatttgaaaagttttttatttgcaatttaaattatcttcctttttaatctgaaatggaaaaaaaaaaaaactttatacaaagatttcagaatgcggcacatatgcttcgagtgctttcattctttcggcatgggtaagttgaagggctttcttgccatcaaaattggcagcaagattttctagacactactatattttctaattctctaaaagttcttgcagaagatcattcctttatgttctc

SEQ ID NO: 193098 - DNA, 377 bp, Glycine max
  unsure (1)..(377): unsure at all n locations
agcttaactattcccttcaatgctctctaatcttttcttgcccggaaactcttaccacttagtgaatggtgtgcaagaatctacagtaaggtggcttcagtttcttattttcatctaccgncacttatgtttcttttcccttaaaatatagntccagttcagaagttaccatactcttgattttgggaaatcactaattggttgaagaattctagtgaagtagtatttatttattttataacaaagtcatagttctgaaatttnggtgtgcttcagtttgcgtatccttttatgtttggtttctcaatttaactgagcctatcagtgatcacctagctaagaaaagtgaacaacgtggaaaatgaaagttgaatgat

SEQ ID NO: 193099 - DNA, 460 bp, Glycine max
  unsure (1)..(460): unsure at all n locations
ctcgacccgggatcttaagcacctgggctgcagctgaaggggctttttggtttgtaattatgagagaagggaggagcacgaaattgaaggaataaaagagggagagaagtggaactctgaagtgtgtctcgtaagactttcattcatcaaagttacaacaagtgtcacacatgcttctatgtatagactaggtagcttccttgagaatctttcttgagaaaacttccttgagaagcttctttgagaaaacttccttgagaagctagagcttacctacacacaccaatctaaaaactaagctcacctccttgagaagctagagcttagctacacacacccctctaataactaagctcacctccttgagaagagaagctagagcttagctacacacccctataatggctaagctcacccccatgacaaaatacatgaaaatacaaaananaagtccctacta

SEQ ID NO: 193100 - DNA, 353 bp, Glycine max
  unsure (1)..(353): unsure at all n locations
ttaagtcacctgcggcatgcagcttgataggcgagtctattttattcttaatttcactctagntatttagncaattcaattaagaatgagaaatccccaagagaaaacgtccgattgattnttcgctttattttactaaaaggggattttttgagtattatattattatttacctctttttttgatttccaacgtggttgcggcacgaccgatcggtcagaattcatttcaaccaaaattaacggatgatacaattcaaacgatcggtggaaatttattttatttttagattaagcgagaaatgacttatataaatggcttaagcacgtcaaaagggggtataaaaagtaaat

SEQ ID NO: 193101 - DNA, 368 bp, Glycine max
  unsure (1)..(368): unsure at all n locations
gaaaacatgttaggtcatcatttcctcaaactgtacaaaagatgaactctgctttctctaccattcactctgatatttggggaccaagtagggttacatcttttgaatttcggtattttgtaaccttcattgatgaatttttcagatgtacttgggtttatttaatgaaagacagatctgaacttttgcctatattcatgttgttctttaatgagattgagaatcaatttggcaaatcaattaagattttcaaaagtgataatgctaaagagtatttctctcatgatctctcttcctttttatcttcaaaaggtattttgcatcagtctacatgtcctcatacacctcaacanaatggtatagcagaa

SEQ ID NO: 193102 - DNA, 384 bp, Glycine max
  unsure (1)..(384): unsure at all n locations
ctctctcatataatagtttaatatttttacttatttttgaaggcttaatctttttacttgttgtcattatatttttcttttttattattgtatatttatgtttcattgttggaatagaactataactcttcatatctcctttgttttctcttctttttcctctctttatatttgtattgttaatatgatatcaagagtaagttgaattcaagccacaccttttgcatatatatattttgcacgtaatgantattatagttttntataacatgagatgatataaatttatgaataaattttattttanaaatggtttataaaataacatnttgatttaaaantttgtaaattaattcgatacatataatgtctaaatttatatat

SEQ ID NO: 193103 - DNA, 443 bp, Glycine max
  unsure (1)..(443): unsure at all n locations
gctngcacgaatttggtaagagaaagagagatgttgatttttnnnaatctctnaccaaagctttgatgaaagaaacctcatgagctctcgtatgaagcttggaaaatgaagaagaatgtcttcctctccctctcggtgaactcgtgcaaatgaggaagaaaagggttccaaattgatttttaaagaatcatgaagatgaggtttaaggctttgttcaaaggaaacttggttaggcttatgttgacaagcttaattggcagcatgaatgactaatgaccaacttaaggttaacgtgccaagctatgccatttgaggttattgttgcttcttgaaatttaattacaaaatggctaaaatagggttaaaccagaaatgaaattttagctcggaaaggtttcgtatctttatcaaatcatgtcaacaaaacacatacacttatttat

SEQ ID NO: 193104 - DNA, 446 bp, Glycine max
  unsure (1)..(446): unsure at all n locations
agcttgcttctacagacattgcttagcatttatatctttattctgtaggcactcttcattttcttgtttgcatcgtgatcccaacattacttattggacaatatagtgaccatcatcacaagtacgaatgtttttcataaacttttgatgctttttttgttagcaaggcttttataacttgttgactgtgattaatgactattgttttatatacaagttatgttcatcatgagtgaaccttacattcccgtttgagattcaatacaattattgttgcggacaatttgcattaatcattggtttgaatcttgaattgtcggtttggacagtttgggaagagtcatttatttatagtagattcactacccaacggtaactttctttttttaaattnggtgaaatatacggtagtgcatttcacttttgtctatgggtgaatattttga

SEQ ID NO: 193105 - DNA, 408 bp, Glycine max
  unsure (1)..(408): unsure at all n locations
agctntaataaaaaaatataactttttttctttntagagattctttaatttagttgataaataaaaatcaagttttaatttcaaatcaatcaaacaaaattttgtttgtttaaatagtggataaattgaaagtgctaggcattgagacaagtttttgtggtaacgatactctatatacattgttaaattagctgtataggtacacttgccgagaggtcaactccaacctgttcaatctcattcaagtatgggttaggtcaggagtgttaatttttaaacccatgaacccaactcatagacccattgatgtgatatgtctttaaaattactattgttntttatatgtttacatantttttatatttaaaaagttcaaatattagtgataacactttcactaacttattc

SEQ ID NO: 193106 - DNA, 433 bp, Glycine max
  unsure (1)..(433): unsure at all n locations
agcttctccccattntcctatattttgttgtgattaatgaaggaaaaaatgttcagcccttctggtaattcgagaatcacttgaaattagtgaaaaaaattattttcgtgaagaaaatccaagtcgaggcgcttccgtaacatttccgtgggtgatttcgcgaagattttcagccattcttcgacgttctttgttcgttcttcatcgttcttcggtcttcaatcggtaagttcccgaaatcaaacttttcaattcattctatgtacccttagtggtcctcatttgttttcacatgcttttattttcatttaatttacttttcgtacccccttttgacgtgctttagtcatctacttaagttattttctcgcctaatcaaaaaataaaataaatctccaccgatcatttgaatggtaatatccattaatttctg

SEQ ID NO: 193107 - DNA, 333 bp, Glycine max
  unsure (1)..(333): unsure at all n locations
cacaagaaggactacaatgcctgcaatgttgatagaggtgaaggttcttcaactagtccttcaaatttttgtttttaactatccgggacatgtgccaaatcccatgaatattacctataanaacgtgacaaggaagttgcccaattgtacgttcttcaacattgtgaagaagttgagccatatttatattaagtaggtgtagagggcattaactaatgaatttttattcattaagtacatgttacaacttgcctattattttcacttaattaaaatatagatacaaatgcactgggataagatcctattacacaacaaatatggattacgaaa

SEQ ID NO: 193108 - DNA, 384 bp, Glycine max
  unsure (1)..(384): unsure at all n locations
catgcaagctntgagaggtaactatggtgttttcatttatgcanncaccatgtaatagtgctgaaactactatgcatttggaataacgaagcatttaaagtaaagaagaagctgaggggaagtggtgtcatttacctggaagggacaacggcaacaaatggtgcaaaagtgataattaaaacatttactcgccttgtgatacagttctgaaaagaaatctgtgggaacaaatcagacaactgaaaactgcaaatagggggtgggggtggctatggctatggtgtgtattangatactttaacaatgttacacgaccattagaaagagtgggtatttctcaaaggatgcaagatganggcattataaaggaagttaatgaatgga

SEQ ID NO: 193109 - DNA, 432 bp, Glycine max
tgcaagcttcttatccaaggctcatcttgttggtaaagctccttcttccatggcttattccctagtggatggcgcctcctctcacctcttctcctttgtcttccgctacatctccatggtggaaaatcaccattaaaagacctcattgaagctcaaagattcagcctccatagaagccctacaagcaagcttccataaaaaaatatatgattgtaaaaaaaattctcaatgaatttttcctattatgattacctatgtgacacaaggatataaatatgaattagcgcaacataaatagaatatataatagttaaaaaatatatttttataattttaaattaaaaaatgaagaatgttttgataaaagaaagaaatatagacatcatttatataaaagttatatacattacaattaaattaaatataaatatc

SEQ ID NO: 193110 - DNA, 428 bp, Glycine max
  unsure (1)..(428): unsure at all n locations
agcttaatngaatatgaataattggttatgcatgttatgntaacccaatgaagttaaccccaatgatttcatccattgatacaaaccaagttttctaggcacaccaagtgtttgaaaaacttcaacaatgaactttcttccctttaactctttacttttatgcaattgtctttacttttggtttcttaatcactttgaacttcatagtccactaaatttactgttaaataatccaattattacacaagtctttgtggagatgactttacttatcactatttttacatgagcaatttgatactcttgccaaaatcccagcaacagattggaagaaagatggaaggcctttattatgnttggacggaaaanaatggctaaagacttaactcaatntatatatattaatatttcctttcagttttactctt

SEQ ID NO: 193111 - DNA, 380 bp, Glycine max
  unsure (1)..(380): unsure at all n locations
agcttattccgaggacagtttattatcatgcacagccggcaagagttagctcacaataggccaatcatatctatggagcattntcttgagcaagtagcctggcctgaagctcaacttccattggtgagacccaatgaggctgctctgcctgagcccacacctgcgcaggtgaattcagagccagctaacccacaatctccagtggtgaatccacctttttcgcctgagctttgaagcagtcccccatctcctcctctgattgtcatttttgatgcatcatcagatgaagcagctgcccctcctgattcaccagctgcagaaatagttgacccctctgtttccccaattggaggaatngctaatncttctaattcatcatc

SEQ ID NO: 193112 - DNA, 245 bp, Glycine max
ggtattcagaaaatggagaataaatttcattaccgattagttttttaattaattgcccctaaaaataatttgtgccgttaaaacgaaagggatcctttgtgtcctactttaaccatattatcttgcccttcaacagaaacagttcatttcatatataaatgaaatactgagtgaaaattgcttggtggaattatttcaagaattccatttttttatactaccttgtgggattatttcgagacttg

SEQ ID NO: 193113 - DNA, 422 bp, Glycine max
  unsure (1)..(422): unsure at all n locations
tgcagcttggaggatctgatagggaaaggaacataactagtatggcagtgtatgaaatcttcatattcatcataacccttgaatattgaacctatatgcacacaaacaatgtgcacatgctttttatatgtagtactatccgggtctacgaccaagtatcaaaatttttcttaattgtcacttgtcaatatgcatcacaaattgtattaacatatatatgccaacctaccacaaaaggctagttaaattattgagaactagttgtctagttaatcgaaggttccatcaagtggaaaacgaaaaagaacctttatttgatcaggtctgcctccaagagtggatcataaaatagcaatttatgtagagtaaattactatgacatcccatcatgnttggtgagataagttgcacacaatctcctt

SEQ ID NO: 193114 - DNA, 426 bp, Glycine max
gcttaacattcaattttgagtgttcgttatattacgggactcaatcgaacatccgagtaaaaagttatcgtcgtttgaatttgctcagagcttcggtattccatttcgagcggctcaatatattacgggactcaatccgacatctgagtaaataggttattgtcgtttgaatttgctcagagcttcaacattcaatttcgagcatctggatatattacggtactcaatccgacttccgagtaaaaagggtattgtccgttgaatttgcttagagcttcaacattcaattacgagcgttcggatatattacggcacttaatcagacatccgagtaaaaagttattgtcgttagaatttgctcagagcttcggtattcattttcagcttctcgatatttacgggactcatcggcatccgagaaaaagt

SEQ ID NO: 193115 - DNA, 205 bp, Glycine max
  unsure (1)..(205): unsure at all n locations
attctcacaaaggtaaacttatcactttcaaatngagctttcaaaactatcatgacatgtagaggaaaaacaaggatttcaaatcacaaaatgtcaagagacttttattttcagaacaactacccattacttgaacatatcctataattcaaagaanaatatgcaaagttgtacatgcaaataaaatngaccctaaatattaaac

SEQ ID NO: 193116 - DNA, 320 bp, Glycine max
tttattcaaaaaaatagaggttatctcttttatcttaatgagagtgattcttctaaattcttgagtgaatcaagaacaccctggcttgatcaaaagactttcacaacctttgggtgttgccctcgctggaaagagtgattctttccttcctttcatcttcacccttgttctttcaaaccacaattccagaaaatccacctctgcccaggattatctcgtggccataactcccattttacgcactccaattaagtgattcttgagcctaaattgactttcaaaacgagacctttcacctcgttttgcaatcacctcatttg

SEQ ID NO: 193117 - DNA, 310 bp, Glycine max
aaaattttatgttttgtattgatagtatgagaaccaaagtagatattgataatatgaaatctgtccagggtagttatggcattttttttggccaattcatgaagactaaaatatcttggtatcaaatgttctaataatcaggacagaagtgattgaatcaagagacttttctttttctcgccagtagttatcaacaacctatatgagtttatcaaaaaaatgtagtatatttgcagaacaattattatttggcacgacaccaactaattagcaatagtagttattaacaaataccaactacgaataaatt

SEQ ID NO: 193118 - DNA, 307 bp, Glycine max
acttcttgctcattaaggattccaaaacactacatcccaccccccccaccctccccaaaggaggagggttagcaggttcgttaacaatttacatgaaataataagaatacacaaagcttacaaattgcataccaagccttcagtcttcaaagcaagcacactaacccaaaggtatcccaaattaattgaattgatgagtacaaatatcattgcgaagccagatattcttaatataaataatgaactctaatgatgaaacttgataatgacaactagaagatcataatactacttgtccccaatggat

SEQ ID NO: 193119 - DNA, 343 bp, Glycine max
aaaacgcttgaatttctcttcaagtcccacgccctaacaggccttttttacttttatcgattaaaaccgaccggttagaaatcttaaatcaattctccacattactttctcactttttaaagaactatgtagggctgaattccctcatcgcaatgaccataccgtagaaccaagaccccgctcttgtcgacccccaaaagataaaagcatataaaaaggaaaataaaatagagattgagtcatgatcttgcgcatttgcttaaagggtgttgtcccttgtgatggacgcgtggggtgctaatacctttcccgcacgaaaatgacttccacaccttttattctc

SEQ ID NO: 193120 - DNA, 357 bp, Glycine max
cccaaacccaatcacctggttcaagcatgactttctttctgcttttgttggcttgccttgcatagctcgcatttttcttttcaatttgggccttcacttgctcatgcaacttcttcacatactcagctttagcctgtgcatccttatgcttaaacatagcaatgttaggcataagcaacaaatcaagaggagtcaaaggattaaatccatacactatctcaaatggtgaacaattagttgtgctatggacacgcccgatataagcaaactcaacatgaggcaaacaggcttcccaagattaaagattttctttaaaacagtcctaagcagtgtgcctaaagtcctattgactacctc

SEQ ID NO: 193121 - DNA, 380 bp, Glycine max
  unsure (1)..(380): unsure at all n locations
ttaaaaaaaaatataatnttattactcctaatttttgcatttatcttcttttcaaacattatatataaatacaagattcttttacatcaaaaatatataaatctaaacatgagaggacgcgaggaatcattttcttatttattttattcccatataaaagtattgggggtttgtctataagnttttttaaaaagtactacatttatggtatatctaattttagaaaatttattatttctaaatttaaaaaattacatagatataattctttacaaaatcatcctgaataacgacaattattgttaactaacaatataacataggttgtactttatatntcttaagtaaaaactatacaaaacaagttgatagtaggagta

SEQ ID NO: 193122 - DNA, 362 bp, Glycine max
  unsure (1)..(362): unsure at all n locations
tctttttcctagtcaatcactcacttaattctccatattctccccctttggttttgattttaaacttcacttgaaattaaattacttaaatggatgagttcttgatttaatccctattttctctccccctttggcatcaacaaaaagccaaagtgcataaaacatacatgattttagaaaaatcatacacatagcatccattgtaaatcaatcataaaagattctaaactaatcatgaagcaagacatgaataaaccanactaaaatataaaccacatagtcatataacataattcataaatgttcagtcatactaagaaaatattaaaagaaatactaaatgttcacatgtcataataata

SEQ ID NO: 193123 - DNA, 431 bp, Glycine max
  unsure (1)..(431): unsure at all n locations
gctttgatctaccaccaccaccgccactatcatcttattttttctattaatttttaatattactagcattttgttttctaaccgtgtatttggctatactattatgacatttgaacaatttagtatttcctttatttgcatggtatgattaaacaattatgaattatgttatatgactatgtgatttttatatatttgatctactcatgtttcttgcttcatgattggtttatattcttcaatgaatgtcttgtgaatgattaatagtgtatgtatgttttatacttgttacacactttggccttttgttgatgccaaagggggagagaaatagggattaaatcaagaactcatatangtaattaatttaatttccagtaaagcataaactcaaaaacaaaggggagaaaaatggaaaatagtgagtgatc

SEQ ID NO: 193124 - DNA, 391 bp, Glycine max
agcttcattttggtggttatataggtttgacttgataaatgatgtgagttcatgcactcgatttgatcaacctattatggtaattagtttttgtttttaacccattttgttaaaaaagcagcgggggagaatagggagaggaagtgaaggaagcacatgcagctgagagatggagtcctccttcagttggtagccttacgtgcaatgtggacgctaacttgacaggagctggggtgtgtgtctgagatcaccatggaagagttgttgctactcgaactgattttagaggcccatgtctaacagttgcagaaggagaagagtgggtactactgaaagctttgatgttgctatcttcgttgggcatgcagaatgatacttcgaagttttgtaa

SEQ ID NO: 193125 - DNA, 179 bp, Glycine max
cttggataaaaagcttggagaggatgcttcaatggaggaaaagaaagaaggagagaaagagagagggggagcacaaaattgaaggaagaaaaagggagagaagttgaactttgagttgtgtctcacaagactctcattcatcaaagtacaacaagtgtacacatgcttctattatatac

SEQ ID NO: 193126 - DNA, 196 bp, Glycine max
aacggtcagatcatggaaaatttatttgtgaagttgcagaccaaatttcgagaagatccaacggttaatgaaggctgggaagcgttttaccgagcagctcatgtactttcttaaagcttattagagcttctctaaacttctctgcttcttgaaactgatctattatcacaccttatataaataatcctaaatatac

SEQ ID NO: 193127 - DNA, 418 bp, Glycine max
  unsure (1)..(418): unsure at all n locations
atatntcttgcactaaactttcttttaaactttaattaatgttcccttctttccttctacatgtcacgttggtgaaactagtcagtattttcatcacttcaaataataaggactgggcttacttccttttttttttttccagagttttctattaaaaacttgtttgaggattaaattgaagatttactctatttgcttctcatgactcaaactcaaggcgtaaactacacagcattagagaataaacatagatattcccaagcactacatgtaaggtagaattgcttcaaagcatatgtgaaacaagtctttactgaagtgtttcatcaatagtttagtagggtatttttattcttcattatattttacgtttaaataatccttgcaaatttcccaagatgacgtttgatacataact

SEQ ID NO: 193128 - DNA, 389 bp, Glycine max
ttaagtcacctgcggcatgcaagctttcatatattatttataagtacatcttgttgctgggtgacattggtagctctacgaatatcatgttttatgatttctttaagaatctcataatcccacaatcagagttgcttccctacaacgaggtcctcataagattcttcggtatttgttagtcattttatacgactaacttttgtatagaaacttttgatcattatatagaattcctccaagttacagttctttttgtacgattgtaaatacttttggctaataaattgatcattactcattataatctttcacttgtattaatgtaaattcacatctatttcacgcgagaaggagattttgtgagtgctgaatctggtgtctcctaagcc

SEQ ID NO: 193129 - DNA, 382 bp, Glycine max
  unsure (1)..(382): unsure at all n locations
cttgacttgagtcatcatatatatttcttatatgtgaccatggcatgagtttaaaatataatccttcaacatctntataatcatcaatcatctttgaatcatctatctttcaatctttttcaacatcatctctcaaacatctttcaatatctctctacagaatattctgattcatttctcttcatctttctaaaagttgttgatcaacactttctcttccaagaaaagttctttgataaaaaacttgtgctattcatctttttcattctcttctccctttgccaaaagaatgaaggactaaccgcctgaattctnttgtgtctctcttctcccttaccaaagaatcaaaggactaaccgcttgagaattcttttgattcatc

SEQ ID NO: 193130 - DNA, 364 bp, Glycine max
  unsure (1)..(364): unsure at all n locations
caagcttgtgggtaaattacatgaaaatgatngtacatggagcttgggcgcatgcaattctaagaggcataacaaatggattatcaagagtatcagaggtcatcacacttgtctcgtgccaatgctcaaacaagatcatcgccaacttgacaaacacgtcataacacagatcatccaaccaattgtcaaaacaaacccaaccgtctccatcaagacgttgattgcagagatcaaaacgttcatgaatgataccccatcctacaagaagacatggttagcaaagcaaaaagccgtggagatgattcatggaaactgggaagaatcatacaccaaatngccaaaacttttgggagccttgcaatct

SEQ ID NO: 193131 - DNA, 456 bp, Glycine max
gcaagcttcacatggttgagtggacttcgtcttgttaaacatctacttgatcctaaagggttttctcaatttttaaatgatctttggatagattcttgaaatttcattgtaggtttttgtaagcttttgagagaatagactagttagatagaagctcatgataagcatttctaagagatttagggtccgaaatatacctcatcttcttagtctgattcaaactcctcagaggttgtatttgtcatcaggcatatgtgggcttcttctgtgtcttcattagatgaggtgttgtccaggtcttccttcccactgctcataagaacctttctttctttagtcttgaagaatttcttcttatcttgactgttctccagatctagacattcagacttagactttgtatactcgtagcaaactatagagcctttgtcttatccctcttttctttgggattct

SEQ ID NO: 193132 - DNA, 337 bp, Glycine max
atttgcaccccccatttactaaatacaccacttcctttttttgctgattcttttttcgtaacgttatgaaactttacgaattttgtaacgatacttgttttctttccgtaatgtcacggaaccttatgtattatgtattcatccctttttgggcttccggaaagttacgaaacctcacgaattgtgcaacaatgcttccttttgacttccggcatgttacagaacttcacggattgtgcaacaatgcttccttttgacttccggcatgtcacggaacttcatagattgtgcaacaatgggtttctttgactttcggcatgtcacgggacttcacgga

SEQ ID NO: 193133 - DNA, 358 bp, Glycine max
  unsure (1)..(358): unsure at all n locations
tccttgtggaaccttcacccgaccaaaacactgancaaacttatcttcttcttcatggacaaagtatggcaggctgggggcaaataatatttttttccatcagaccttggatacaactgtgatcgtatacccatatcagctaaatcttgacgggtattcaagtcatccttcgtcttgccttgaatgttaaggagcgtcctaatcacactgtcacaaaacattttctccacatgcataacatcaatagaatgtctaacgtcaagatcacaccagtaccgaagaatcaagaaaatggacctcttcttccatatgcaactttagactttatcctttcttggggtcttcccaaatacagtat

SEQ ID NO: 193134 - DNA, 300 bp, Glycine max
ctcatatgtggttgctacaaattcatgtatgctggccaaaaaaccttactatataattattcacattttaaataaaatgtgtggcctaatttttgctttaagtcttactttattgtggatcggccctgtattcatcattaaactgtagttcacagaaagaaatgataacatgcatccatattgggttaatcttgtgtcaagaaaatctagccaacagaccaatcatggctaaacgtgcactcatgctaaatagttgttctctctacactagtgcctacaaaacctgcgtattttatgaca

SEQ ID NO: 193135 - DNA, 318 bp, Glycine max
gcttaatataaaaaaaccaaaattaaatctactcctcaacttcttcatttcgtaaaaaaccaacaaatcatttcaaggtccaacgccttaaccattcttttcgcttttcaaacctgagaagatcatttcaaggtccaaccccttaatgggcctctccttttttcaaaagtttaaaacatcgtttcaaggtccaacaccttaaaccagtttgttcgtaattaaaataaacctttcaaaaacataaatataatttaacacacaaactttcaaattaaagactacataggtctgatttcctcatcgcacttgaggacacgt

SEQ ID NO: 193136 - DNA, 429 bp, Glycine max
agcttgtcgttttcgttcacaggttccatatcagtgaatcattggattgagtgtaactgtattcagggatctgccttgtctgatgatcctagtaaacgtttcacatgctatgcgaaattgaccaccctttccatacgtgtcaatcaaggtagcatatgtatgaaagcttaaacaaacattggtatgtgatactaatttatcatccacacctaatctaaaaggtgcacctcttatccatctcctgaaaaactcttgagctttttgaaactctccagccctcttgtacaagagaacaacaatccctatggtgacctcatcaggctctattccttgactttgcatcgtctgaagccaaacaagtgcttcctctttgattccacgtttactataagcatcaatcaaggtcccataagtggaattcacaggggc

SEQ ID NO: 193137 - DNA, 320 bp, Glycine max
  unsure (1)..(320): unsure at all n locations
ttttttacaccangngngccttcctttcaactgagaatcccattggttggtccatataaacatcctcctctaaatctccattcaaaaaggcagttttcacatccatctgatgtagctccaagtcataatgggctactaatgccatgataatcctgaaagaatcctttcgtgagactggtgaaaacgtctctttataatcaatgacatctttctgagtaaatcccttagcaacaagtctagccttgtaacgttcaaagctgccatgagagtcacgtttagtctttaagacccacttacaaccaactctcttacaacccttt

SEQ ID NO: 193138 - DNA, 379 bp, Glycine max
agctttgaattatcaatatctttacttgtttctacacccataattcttgcacctaattggaaatatggttttgagctcatatgttacgcaagtgattatgtagttggtgttgtcttgggacaaaaaaaagaagacaaaatttttcatgctatacattatgctagtaaagtccttaatgagcatcaagtgaattatgcaacaaccaaaaatgaattactagctataatctatgcattggaaaaatttagatcttatctcatttgctctaaagtggttgtttatacagattatgcaactattaagtatctcctatctaagcccgattccaaaccaaggcttattaggtggatacttatgttgtaggaatttgatcttgaaa

SEQ ID NO: 193139 - DNA, 402 bp, Glycine max
  unsure (1)..(402): unsure at all n locations
agcttacatgngtaagtacttacttatatttcagtgtattntctggtagagttatggccttggttacataaaacaacctatcttattagtcatgatgtcatgccattgtaggttactttattttcagtgcatgctgctgcatgctttttctattttcttgctgcacgggataatccagaatctacatggcttggacttgttcctgatgccattgaccacaatctatggggaaagtatgtagtagcaatatattggtccatagtgacccttgtatcagttggttatggtgatctacatcctgtaaaaacaaaagaaatggnatttgacattttttatatgctctttaatcttggactcacctcatatctgataggcaacatgaccaatatggtagttcactgg

SEQ ID NO: 193140 - DNA, 384 bp, Glycine max
tgggtctcatatacacagatgtacatagacaaatcacaagcgcataggatcaaatatatattgatatatcttattaaagaaatttccatcatgttcaatccaacaaaacaaaggcatcaattgtcccacaagttggatcatcaaaaaccaacaaaagtgcccagttttggaattaatgccaattcttgtgaaataactacaattattctacgattgggcgagcttgactaagagaaagtctacatatatctactttgtaaaattgagttgagtgtctaaactctaaaggggctgaactatgagtggaagttcatgactcggccttaaggagagcataataaaatctcacatattctattggatgtttgtgtgaaaaaaaaaaat

SEQ ID NO: 193141 - DNA, 445 bp, Glycine max
  unsure (1)..(445): unsure at all n locations
agctnttgtggttgtgttgcggaacagatggtactgtgtattatgaaaatatagtacttaggatttaggaaaattgtatcttagttgtaggagtatacttactcggtgtagtagtttacttttttaactgatctgtaaggctaaactatagttaggagttagtctatagttgttatctgttaggacagctntcactaactaactcagattagttaaccgttacagttgtgtaagtgtctatataaactgaggtgtaaccatcttcttcttggttgaatacaatcaacagtttcacctcactttatattcgtgaaattctcttagactcttttctggtatcacacnaactagttttcgatccttagcttatcttcatggcttctgcttctcacaatcctcctcctcctncttcgctgccaatgaacaatgaagttccaatgaatga

SEQ ID NO: 193142 - DNA, 394 bp, Glycine max
agagaaagaacaaggggggagctcgaaattgaaggatgaaaaatggagagaagttgaactttgagttgtgtctccaagactttcattcatcaaatttacaacaggtgttacacatgcttctaattatagactaggtagcttcctttgaaagctttcttgagaaaacttccttgagaagcttctttgagaaaacttccttgagaatctagagcttaacttcacacacccctctcataactaagctcacttccttgagaagcttccttaagaaaaatcctaaagaagctagagctttgctacacatacctctctaatagctaagctcacctccttgagatgagaagccagaacttaactactcaccccctattatagcttatctacgcccatgaca

SEQ ID NO: 193143 - DNA, 397 bp, Glycine max
  unsure (1)..(397): unsure at all n locations
agcctttaattactattaaaattcttttattgngannngttgtataatattataacagtgttaaattaaaagtatggttagatctgatgtattttaaagatgagtctgattatattttagattatatcagctcaattagtgttgtatatatttntagaaagtctatttttttattaacatcttgttatcacgaaaaataaatttcagaatttagtccaaacataaataaaacaaagtaaaaaattattttatcaatgattaaacttggatattacttaaaaaatttatattttttaacccaacgtataatgataagaaataaatatatgaatggaatatataatatttctataagagaaaagactacgtgttgatatcccttacatataaataatta

SEQ ID NO: 193144 - DNA, 387 bp, Glycine max
  unsure (1)..(387): unsure at all n locations
taccatatatgtgtaatcgattacacagtgcaaattttgaattcaaattttaataacttgttgaaatcatttttggccactggtaatcgattacatcctctggtaaatcgattaccagagagtaaatctcttgaagaacactttttaacatgcattacttggccaaaccttntgctacttcaattggaattcccctcctatttaatataccctttctaagactagagacttgtcttgatcatccatcttgaatatctttaaatttctttgtcttgaataaagctttgagacgcatgtgaaactttggcatcatcaaaacattcagcttgatcttttgtctacacaatcaatcttcttcctttctcatttngctaccattgaacttca

SEQ ID NO: 193145 - DNA, 383 bp, Glycine max
aaatcgatgaacccccagctctgggcaaatatcagttattcactagttcactgagtatttggctaagttttatgaagactaattccaagggtcactccggcccaatgaggaccaattgccaactgggcaaaccaactatgttaatctggcttttactagtccatttaggggcaacactggaatatatatatcagaactaaggaggggttaaggcccaacacaaaagctaacaagaagattaaccttactggtccaacccaaatgctttgttgttgagaaaaggaatattaatatgccatttaatttcctccgcgaaataagaatcaacttaactcttttattaataggagaattaatatgactttaaagaagaatacatggta

SEQ ID NO: 193146 - DNA, 395 bp, Glycine max
  unsure (1)..(395): unsure at all n locations
ttaaccatgtagttagataaatggttcaacctaggtttttaaaatcagactagaccggctggttcaactaattagatgacctgtccggagactctaaaaactagagcattttagaactggtccagaaccgatcaaaacagtataaaactggccaaaaccggtgttgaaccggcataaaaaaccggtgttgaaccggtctttaaattnttttttgttttttaaattttatttatttaatcaacatatctttaagaataataaaattacattaaatattgtacataagtatcaactattaatagttcttatcttataaaacatataatttagtcatgtacactaanttataagtggtttagatccctaatttttattatatatatcttatacttaaa

SEQ ID NO: 193147 - DNA, 456 bp, Glycine max
  unsure (1)..(456): unsure at all n locations
agcttgtccgcgacatgcagaccaacatcttgaacattgtcaacctctacgatctcgctgccggtcacaacaaacgcaggatcatccaacaagtactttttatcgtttctcaattaataaataataaaattgtgatatgtttgttattattgcttatgcatgccctctggattattctattctatttgtaggctgtgtttaacgaactctgcaaaattctggaccctgggaagccctctttcactcccaaaaagggcaaaacaagtgttgtcatgtttgttggtttgcaaggtctgttaccatgtttggattctctcatattctttatgctccgnnttggtatgtactcaacctttatgcattatccttagtaatatgtagcatttctcagcttttgttctgttctttttaacaaacaatannnaaaatagttattaatattgatgagtacttata

SEQ ID NO: 193148 - DNA, 349 bp, Glycine max
  unsure (1)..(349): unsure at all n locations
taattaaccatgcattaggtaccatgttcaattattttttaaagtgaaacgggtttatgatcccaacatgggtggctcgtggtgcctaacacatgaaactaagaatgtagtgtgaaggttcacgcttcccccttttttngttttggtttgtagaggaaaacgcaaggatgagcaaacatgaaaacatatggtatgcaattttgcagattcaaaagtttgttgaacgcatatgcatgatgatgccatgactcatgcaanatgtgaggcctggatatgataacggacaaatgcacgatatgttcattatgatgttatgaagagatgcttatgcgatgcatgatatgaatgc

SEQ ID NO: 193149 - DNA, 372 bp, Glycine max
atcatcaaaaagggggagaatgtgaatgtatgtatacatgattttgatgatgccaaagaagaatctaacaaggctgcttcaaatgataagcatttgcttcaagaataattcaagattgcttcaacaaacaaagcccttgtttcaagattcactaaagaccaagcattgccttaaaacaatgtgctttcaaaacatgcaaggctctggtaatcgattaccaggaagtgtaatcgattaccagaagacagggttgagaaatagctgttgaaaaagggtttgaatttgaattttcaacatgtaatcgattaccatatgtctgtaatcgattaccagcaacgaaactcttggaaattcaaattcaaagtcataacc

SEQ ID NO: 193150 - DNA, 344 bp, Glycine max
  unsure (1)..(344): unsure at all n locations
tcattcaaggaaacttccaaagaaaaacatccgattggtttttttggatattttattcaaagatattttgattattttattattattttgcccttttttntgtataaccgagattacagcgtgaacgatcggttggattttagtttaacagtaattaaacgatattacaactcanatgatcaattgaaattcattntattatttattaggtgagaaaacgacttanataaacaattaaagcacattaaaagggggtacggaaaacaaacaanatgaaaataaaagtacgcgatacaagtggggaccactaagggtgcatagaatgaattgaatgattcgatttc

SEQ ID NO: 193151 - DNA, 374 bp, Glycine max
acctgcagctgcaacttggtagataaggagatttgatctttttcattgatatattagcactattgatgtttgggatcgtactctttccaaatgtagacgggctagtgcatttggctgcgatcgatgcttttcttgcttatcaccatagcaaggaaagcccagtcgttgcagttgcgaccaccagcaccgccgctgaggcagatccaactcacccatccggtgtaaaccaaacaagtcgtccagccctatacatggtaggtcagggaggagaagtgttgggaagtacgggtggtcctcatatggtgcaatgtacgaattctttcccaccgtactgctgaccgcctaactatactccacccaatgcggtgcatgtg

SEQ ID NO: 193152 - DNA, 369 bp, Glycine max
  unsure (1)..(369): unsure at all n locations
gaatcaagcccaggctattgtgcaccccatcaatggggccaaacacaccaaatgattatgatgatggatggctcaaattctcacaaagggtaactcttcactttcaaattgagctttcaaaactatcatgacatgtagaggagaatcaagaatttcaagtcacaaaacgtcaaaaaaatttattttcaaaaaaattacccatttcttgaacatatcctatgattcanagaanaacatgcaaagtcgtacatgcacacagaantgacccacaatatttaaactaaaaatccgacgagactaatcaacattgaccaattacaccaacttacaatttaccaaacccaccaaacttaccaaacccaagacact

SEQ ID NO: 193153 - DNA, 355 bp, Glycine max
ttcacctcttaatgagccggtgaagaaaaatgtggcatttacctggggtgagaaacaagaaccagcctttgcattgctcaaaaaaaagcttactaagggactttgtggaactcttcctgacttttctaaaacttttgagctagaatgtaatgcctctggagggggagttggagctgttttgttacaaggtgggcaccctattgcttattttaatgaaaaacttcatggtgccaccctcaactaccccacctatgataaagagctttatgccttaataagagccctccgaacttgggaacattaccttatttccaagggaattgtcattcatagtgatcatcaatcacttatgtac

SEQ ID NO: 193154 - DNA, 360 bp, Glycine max
tcttaatacaccaagatgatgatctcagctatttggaaaagattcaaccaatttcaagagtcaaggaaatccaagaagaaccaatatttaatccaagaaaagggaagaagattcatcctctatttcaaaatgttttgaaagcaatcagcctggacatctgagggttgattgcccaatcttcaagaaaagaatagagaaatctgaaaagaaattatttaatgaaaagaagactaagaaggcctacattacatgggatgacaatgatatggacccacttgaagattcaaaaaacgaagttgtaaacctgagtctgatggccaagaattatgaaagcgatgaagagatgacatttcagaatca

SEQ ID NO: 193155 - DNA, 126 bp, Glycine max
ccccaaaagaacggccgcccacaaatcaacacatacttcaagaaaaggcaaaaaaacccgaaaaacggatgcgcaaatgaaacaaatcggtaccaaatacacaagagaacttttagggccaagccc

SEQ ID NO: 193156 - DNA, 354 bp, Glycine max
gcttacccctatggctagcctccggactttactccttgtgccactccggaagattaagccaagcccctactttcgaggggcaactcccaccttatgacgactatcccgggcaagacgatgaggaaggagatacccatcttggccccctgctccacctcaaagatccgtccccccatgaactaccccaaccgaacatagtccgccatatcccggcttcacccacacccgtaaaagaatctgttcccttcgcggaagataagggaaagattaggcgcttgaagaaggttaaagcagtcgagggcttggcaatacccattctcggattagcggattatgtctcgtgcccacatcgta

SEQ ID NO: 193157 - DNA, 335 bp, Glycine max
  unsure (1)..(335): unsure at all n locations
gaatcaaaaatttgtacctggtgcaagggtttgtggtttgtgctcctctgctgaccaccatacatacctttgccctttcatgcagcaacctggagcaatcgagcagcctgaagcttatgttgcaaatatntacaataaacctcctcaacctcagcagcaaaatcaaccacagtagaataattatgacctctccagcaacagatacaaccctggatggaggaatcaccctaatcttagatggtccagccctcagcaacaacaacagcagccttgctcttccttccaaaatgctgctggcccaagcagaccatacatttcttcaccaatccaacaac

SEQ ID NO: 193158 - DNA, 396 bp, Glycine max
  unsure (1)..(396): unsure at all n locations
agctttgagccaaaatcctgactcaccattatccttaccctttgaagcaaaaaaagaatagaagggaaatttcccatcaaagaaaaagagaaggaaaatttccaatgaaagcaaaaaaagaatagaagggaaatttccaatcaaagaaaaaaaagaaggaaaattccccaatcaaagagtgggagaaagcaaaaagaaaagaaaggaaattcccaatcaaagagtgggagaaagcaaaaaggaaagaaagaaaattcccaaccaaagaatgggagaaagtaaaaaagggaaggaaagaaagttcttgatcaaagaaactagaagaaatatgcagagaggtctttggaccggacaatatctgaacaatacanaattgtcaccaaatgaacaaaaaag

SEQ ID NO: 193159 - DNA, 427 bp, Glycine max
agcgttaaccttatacaatcagttcgcctggacgagctaataccttcaagcttaagaaatcagctcgcctgggtgagcttcccctacaccaaatggttttctctataaataaccatatatagaaggggtttaagggggatccaactaaagaaaatagaggaaaaaacgcagaaggaaaaggagaagaagaaaagtaaagtcaaggcgttgtagaattatgactgtggatcatttcctttgtcatttctcttgttagtcttgtgccctgcgcaacgattagttaattatttttttttgaaggatcaggtgtaatccttgtacccttgtgtatccctcttgatattatatatgtaatctcttctactcaaatatcacttgagaatctttcaggtccaacgcctaccactttttgttgaataaaaaaatc

SEQ ID NO: 193160 - DNA, 387 bp, Glycine max
  unsure (1)..(387): unsure at all n locations
gctatcaaagctatgcagtctgatgtttctgtcatgancaatgctcacagcttactcctaagaaaggtggaggaaaaaaaaaatagaaaagtaaagatagtgttctcctttattgctcttgtaaatgacattcttgattcatacaaatccaaattccaatcattcaaatcacaccacaatgctaattctcctttaacttatatgaattaaaagtcttgattggaccgacagaaaaaatacataaaccaaagagaaaaaaaaaaagcaagagagggagagaaaaatacaagcacaccaatacaatccttcttggccaacaaaaaaaaaattccttcaaccttcaagtatttcttctatacgcagcagcactgtgaatagcaactatgt

SEQ ID NO: 193161 - DNA, 381 bp, Glycine max
  unsure (1)..(381): unsure at all n locations
agcttttatgtgaaaggatgtgactctttttcattgaattgaatttcaacattcaaaggcactggtaatcgattaccacaacattgtaatcgattacaactttttgaaattaattggaacgttgtaaattcaatttgaaaactttntcaaatccattttgctatgggtaatcgattacaacaatctggtaatcgattacccgagagtaaaaactctttggtaaacatgttttgagaaaaatccatgtgctcactcaattttgagaaaaaccttttcatacttatcttgataagccttctcttgattcttgaatcttgatctcttgaatattgattcttgaaatctcgatctcttgaatcttgattcttgatttgaatcttg

SEQ ID NO: 193162 - DNA, 388 bp, Glycine max
gtgattctctgatgtaaccaaggatgttttatctttgcggtcatatgggctattatgttggccagggagcctatccctgttaacaccaactttgagaccaatgcctttaactattccaacattggaagaaaataatggaccaaagccaatcgttatttcatggaatcatccacaactataggagaatgtaaattattgatagccaaaataagcttctggtttcaaaacgatagagcgatcagtaagctcattgcctaactaaattaatattctctaagatggaaaaatgttggatggatgaagttcccttttatggaggaccaaatcatgggacttttaccagaaggggtgtaaattttttgttcgaatttttcatatgggtgaaatt

SEQ ID NO: 193163 - DNA, 253 bp, Glycine max
ttgtgaaggggtacataaaaatgctttcaagtagtgatgaggtaccaattcaccggatgccttgggtattggattcaaatctaaaaatatgaaatattctataaaactacaagttaattgacacgattcggattctacatatcgtattggattgcatatggataaattcttaggtaagcatgttgtcataaatgtaggactactgatcgacatcttatttaccatgatgataaacttggcatcatacaatatg

SEQ ID NO: 193164 - DNA, 324 bp, Glycine max
  unsure (1)..(324): unsure at all n locations
tcttaattggaggagtatacttactcggtgtagtagtttacttttttaactgatctgtaagcttaactatagttaagagttagtctatagttggtatcttgtaggacagctttcactaactaactcagattaattaaccgttaccagtgtgtaagtgtctatataaactgaggtgtaaccatcttcttcttggttgaatacaatcaacagtttcacctcactttagattcgggaaattctcttagactctnttctgtatcacacaactagtttttcgatcctagcttatctcatgggctctgttttcacaatccctctctctct

SEQ ID NO: 193165 - DNA, 412 bp, Glycine max
  unsure (1)..(412): unsure at all n locations
ctgcagctgaatatattgttccaacacctttcaaagcttataacaaaaccaaatgccatactcatgttaaattcacgactgaaaagtgaaaattcgtcctcttgaacttcaacatttggtttttgtgtaggtctcccatcaatacaaaatttctcaagtggctgtccacaaagatcaagaatatcttcataactcgaggcattgaaactctgtaactgtgtgctggttggaatttttccagttagatggttatgtgacaaatctaacacgccgaggtcataaatttgtgtaagactcagaggaatngaaccaggcaactggtttcttgacaaatcaagagattcaagtgatgttagctctccaatctttgagggaaattntcctatcaaaatgtgtcttgataattcaatga

SEQ ID NO: 193166 - DNA, 295 bp, Glycine max
ggattgagtcccgttatatatccagacgcctcaaatggaatggtgaaactctgagcaatatcaaacgacaataacctttttactcagatgtcggatagaggcccgtaatatattgagacgctcgaaatggaataccgaagctctgagcaaattcaaacgaccataactttttactcggatgttcgattgagtcccgtaatatatcgaaacgctcgaaattgaatgttgaagctctgagcaaattcaaacgacaatatatatttactcggatgtccgatagagcctcggaatatat

SEQ ID NO: 193167 - DNA, 408 bp, Glycine max
  unsure (1)..(408): unsure at all n locations
agcttgtgctttactcaacatttgtgcttatcatgcaagaatnttctcccaaatttcaattcatcggatcactatgatgactttcacactgttaatgtaagagttttcacactattaattaattagaaataagtatcagccaaactttttattcgtaatattagttagttttaaacttaacaaacttattataaatattagttgtgactgaatgaaaatataaaaaatctttacattgttaatacatcaacgacaaacaatattaaaaccaagtcattgataaaatataatcaaattgtatatgacttattgcaattaaatataattgaataatgtattctctacatatgaattgccacaaanatatatatatatatatatatatatatatatatatatatatatata

SEQ ID NO: 193168 - DNA, 424 bp, Glycine max
  unsure (1)..(424): unsure at all n locations
agagtgtgaacttaaactatgagtgttgactagctgtgagtaataatctttgcatcaatctctgaatnttagaatgaaatgtataaacgagaacatgatgaaggccatgattgtacatacacaagccttttgaccaaaaagcttaccttgaatgataattatatcctttgcaccctttttgagctgagtgattttgtcataaattgaaccctgaacttaaataattatctcctgataccttgcttagattctaggagagcatatggttcaagacaaaatttaccccaaatttgggggagtaaagtcagttaaaatgcaaagaanaagggtaagcatcagcacacacaacanataagtngtatgtttaananannaatgtgctgatgtaagaatgtcaaaagcaaatgaaagtgaaaagctagtg

SEQ ID NO: 193169 - DNA, 414 bp, Glycine max
  unsure (1)..(414): unsure at all n locations
agtcacctgaggcatgcaagctttacagcagatgttagtaatgaccctttatcctattaataaaataacttaatgccattaacctagagaattaaaaaaaacttaatggctgagtgtaactgaaattgtggcaaccaaaagtcacccccaacagccaacaagtcagccaccatttggtctcccaaaaggctgatgcctaagttgccaattgggcccttattacaacttgaactaaacctaactaaagcccttttagttgattaacccagaacatatttttggtcagccaactttacaaggattgngccattatgtagacaaactaaacactctaaaattgagacaaagtggtgtcatttagtcctacttcattggagccatgatacaactcacaaacttggactttttctcttg

SEQ ID NO: 193170 - DNA, 426 bp, Glycine max
  unsure (1)..(426): unsure at all n locations
ccacctacatagcatanggttttcatgggtgatcaatctaggctgtggttgctaatttgagaatctctcccatacccaaatatgaaccaagtagtaaaagtgtgaccaaagagttacctcttatcatcagccaaagtaactattgttttcttcaacaaacctaaatcattttatatgttggcttaaaatattggtcgtgtaacatcccaatttttgtaatctagattaaaaaggattgttatttataaataaatagagttttagaaaaatgatgagattttataaataaataaataaataaggagatataattattaattaaaataatgatttgagagaaaataaaacgggtattttatttatttgtttgatagaagataacatagagtttggttttataaaataaataaatatagagcagataat

SEQ ID NO: 193171 - DNA, 347 bp, Glycine max
  unsure (1)..(347): unsure at all n locations
agctttgagaagcatatgatcctttggcatcatcaaaacattcagcttgatccgttgtctacaatctccccctttntgatgatgacaatccctgaaatcaagacaagctatatacaagatgatagcacgttcacacaacccttactccccctatcttttggcatgtatgcctaactttaaggattgatttttaatgctagatttctaatttgaacttgatttctaacccaagttctatccccctttggcaacatcaaaaagaactaagcaaaacaatcaatatccaaacagagccagacattagaccaaaataagtccatacattgtcataaccaaccaaagccaag

SEQ ID NO: 193172 - DNA, 464 bp, Glycine max
  unsure (1)..(464): unsure at all n locations
tctcaagaaaagttctcaagaaagtttctcaaggaaatttctcaagaaagctacctatgctataaataaaaacatgtgtaacacttgttgtaactttgatgaatgagagtcttgtgagacacaactcaaagnttaacttctctccctcttctcttccttcaatttcgtgctctcccctctctatttctctctctttcttttcctccattgaagcatcctctctaagcttcttatctaaggcacattcttggtggcgaaactccttcttccatggcttatcccctagtggatgacgcctcctctcacctcttctcctcgtttgttgcatctccatggtggaaaatcaccattgaaggatctcattgaagctcaaagatccagtctccatagaagcttcacaagccagcttccatcaccgcacacaacanatcagcaggagcctgagcaactacatctctatggat

SEQ ID NO: 193173 - DNA, 441 bp, Glycine max
  unsure (1)..(441): unsure at all n locations
agcttgcttcatacaatatacaataatatcactaactctttctctctttttcttaatcgcaaattcaattgattaatacgaatgaaaggaggaagaggaagaaagtttcaaacgtcgccgaatatggcgggaacaagagagaactgccagagacacgacactcagaagtgaggagaggagcacacaaatatatatacctcttcattttcttcacattttttactttctactttgatatcattgacagaaaaatgaatataaaatgatatttttggtcaacataatctcaaaaatgtaaataatttaaatttttttgtagtatacacataactattctccatttttagttttaaaaaatgtttaattntattattaaagagcattataattatatgttgtttgaattaacacttagagtgatatcacattttattaacaata

SEQ ID NO: 193174 - DNA, 462 bp, Glycine max
  unsure (1)..(462): unsure at all n locations
tttacgtacgtacgtgagtacgtgcatcttataagcttcagccttttattccttacacaactcaatttacaatcaccactaggcacgtgctattcctcctagctatactcacaccacttttcacgttaactaccagtttattaaatatagcacatgcacatccactctgttcatttgacgaggttggccaccagaacccataatagacccctcattaaatatgttctgaagtactgaaaaataaaatgccacctacccgtcattaactttgatccactacttctgaaattatttgaagagaactaagacgaacaaagggaagaagatctgaaaaaatttaaaaagatctagcaattatatttgaatacacattntctttcaacactcacattaacactttatnttattttgttctatcttcttatcatatcatatcacttataatacataatatgttatctc

SEQ ID NO: 193175 - DNA, 463 bp, Glycine max
  unsure (1)..(463): unsure at all n locations
agcttgtgatgttttccggcgatgctgaatttgttgatggtgctcataatattcttaacaaagacagtgaaataggccgtggaggatttggagttgtttattgcactgtccttagagatggtcattgtgttgcaatcaagaagcttacagtgtccactttgaccaagtctcaagaagactttgagagggaagttaaaatgcttgggaagatcaagcatcaaaatcttgtggcacttgaaggttattattggactccatccttgcagctcctaatttatgagtacctagccagagggagtttgcaaaagcttctacacgatgatgatagcagcaaaaanttgctttcttggagacaaaggttcaagatcattcttggaatggcaaaagggttggcctatttgcccaaatggagttaattcactataatctaaaatcaaccaatggtttcatagattgttctgat

SEQ ID NO: 193176 - DNA, 478 bp, Glycine max
  unsure (1)..(478): unsure at all n locations
tgtattgataagagttgcttacattgaagatgtacatatggttaagcaatgaatatttcataccaagtttcggtttctctgagcaagaaaggatgcatctgatgttccattcaagtattcaacatcaaatatgcatcataatattctttttaacacaatgtttaggaagtttctaccttggcacttaaccctcaagtgcatccaccataactccataagtagaagtctgtttcaagttaactacagagtgaatgtctgtatggaaccaaggtctacatgtaagattcaaatcctcaattgcagcaccgttttgctagcaattcagtaaaagagtattccaattaactacctggtaagaatttgaatggacctaaataccccacaattagttagtagttccaaaatatctggttctttcgataatgtttcttgagatactttngtatcaaagaacggtaagtccatttcctttgcgtct

SEQ ID NO: 193177 - DNA, 303 bp, Glycine max
  unsure (1)..(303): unsure at all n locations
agcttggcgatgaggaccaatcttcanagataggcagctntgagaaacagcggagaaaatggaatcatcctcacagtaaaaaatagagatcacttcacttcacttgtatgtgattaatgtatcattattcaatttataatccctctcatccagacacgttattagttcaagggtttcacgtattctgattgaatctactttttacatcatcaatagccattatgctttccacgactattttgttagtggtttttcttttttaataaaagctgctcatattattatttcctgcaaatactgatc

SEQ ID NO: 193178 - DNA, 308 bp, Glycine max
  unsure (1)..(308): unsure at all n locations
agctntntcagcagctgaacatgctggacataaggctgggatggcatanaattctccaaatcattcaactcctgctgaatttgcttcatcttgttacacatgtctgctgcattttctttactccataatttcagtctagcttttaagatcttgagcttattttttaagacaaatccaccccacccaaatagctggttggcagcccaacagtccctcaccactttctggtactccttgttcttgagccaagcatcaaaaaccttgaaaggctttgaaccctagtcgatgctcttagatttcataataat

SEQ ID NO: 193179 - DNA, 440 bp, Glycine max
  unsure (1)..(440): unsure at all n locations
gcatgtcaagctgtgcacaagatctatgggaagagttgcgatctagctattatagatgtttctattgaagccattgcagccctcactcagtattacgatcagccactaagatgctttatgtttggggactttcagttagtaccaaccgtggaggagtttgaagagatcttgggatgcctgctangaggaagaaaaccatatctttnttctgggttctatccttccatggcgagaatagccaaggtagtcaaaatctcggtgcaagaattggaccgagtaaagcaaaatagaaatggggtggtcggaataccgaggaagcacttggaggagaanggcgaaggcttggcggatcgaggtgaatgggcttcgttcattgatgtcttgggcactatggggtattggagtcgtcctctttcacatgtggatgggctagtggacct

SEQ ID NO: 193180 - DNA, 330 bp, Glycine max
agcttaacgccagtaagagcttaccaggattgaccactgtaacattaatggcttagcgagacaggcttgctaagccctattctaaaacagagaagaaattgcaacaaaaatatgaaaaactaaattgccttgggcttagcgtgacaaactcgcttagcccaagcttattcaccacagaggcatattggcttagcgagcgtggctcgtttagccgcaaccagaatactaaaagcctctgatacacagacctaactaagcttactcgctaagcgcgacacgccggcttagtgagttcatacgaactcagaaattaaaaacttgaaatttaaa

SEQ ID NO: 193181 - DNA, 347 bp, Glycine max
taccactatcatcttggatagttaaagtagtagagctataatgtgggacttcttgtatttgttgactcgaatcctcaagaatatcttgatcttgagttgagacttctgcttctaattcatcacccctcatttgtgttacaccttcagacactgaaggaacagaaaagtattagaacatggtttgcacaaccaagaaaatagaataaaaataagaactgactagagtagtagacttatattgatgaataaaaaattgtcaccttgaggtacaactgaacataattccacatctcttcttttcatgtttgcttcaacattaccattgatgcttgagtcttcagttgatt

SEQ ID NO: 193182 - DNA, 348 bp, Glycine max
agcttccacaatatccaagaaattcaattttcatattcatgaactaccctaaaccaagaaaacagggcagaggcagaaaactctgcccaaaacatattcacatattacagctttccttactcaaatactccagtaacattctcttcattccgatttgttaaccgttggatcgacttgaaaattttactggaggttcctagtacataaatctacattttgaccgttgggatctgctagaaaatatccagaacccaatatgtactacctttcccataaccaacaatgcacaagcattttctacacatgaacaaaaattctgctgcacaaattgacagcaattttctgcat

SEQ ID NO: 193183 - DNA, 371 bp, Glycine max
  unsure (1)..(371): unsure at all n locations
gacctataaaactcagcttaagagaagcttaacttcagaagatttggaatggtcatattcaaagagtcattgntactccaaaagtctaggtcaaggtgaattaatgagagagattgcaacacaaaactttttcattcaatcaatgagttccataggcatggagtccttccaagaggtactaacttatcttttttagatttaattgccaagtgtgataatacacaaagtttagatcattttagacctatttctttggttggatgtttgtataaagttttggcaaagattttagctaatagaatgaaaaatgtacttgataaggtgattgatcctagctaaaatgctttcctagaggggagagaagttctaca

SEQ ID NO: 193184 - DNA, 416 bp, Glycine max
  unsure (1)..(416): unsure at all n locations
agcttgtaggattatggggttttcgtcatatgtggtactaggtggctatcgggcgatggtgcaagtcgactctccacatccacaaatcacacataaatccaccatcccaagttgcccaccttcaactgagctcacgtagtcccacgtagcccttatcctgattcctctcaacaccgggtccccatcaatccctccaagcttccataacatccaagcaattcaacatccaaacatcatgaattatcagaaccaagaaaacagggcagaggcagaaaactctgcccaaaacacaaaccaataccacagctttccttactcaaataccccaataacattctctntgttccaatttcgtcaccggtggatcgactcgaaaattttactggagggtcctagtacataagtctacattttga

SEQ ID NO: 193185 - DNA, 453 bp, Glycine max
  unsure (1)..(453): unsure at all n locations
tgcccagagaaggagtccacggatgatatgcttaccacctcataagactggaaaaaggtctctaatgactcctctacggcttcgacataaggcatagaggatgggcagctcaccaagatgtcctcctcgcctgatacgataaccagatgcccttccactacgaatttcaacttttggtggagtgttgagggaacaactcctactgagtggatccacgggcgccccaacagacagctgtaggggggttaatatccattatttggaaagtaacttgacaggtgtgagggcctatctgtattgngagatcgatctctcccctaacctctcggcgggtgccgtcgaaggtgcgaaccaccattgaactcggctntaagtgggaagcgttgaatggtaatttctccaaagtgcttntaggcatcacgtttaaactggaaccattatcgatgagcactt

SEQ ID NO: 193186 - DNA, 283 bp, Glycine max
  unsure (1)..(283): unsure at all n locations
agcttgtatccacttaaccataatgtgatttggattccttagggaatcaaatgcatgttcatgactctataggcgagtgaaacaatagtgacagttntcaaaattgtcggactaagatgtggtgtttaaattttggagtttagttgtgggtgctgttgagatgacttaaaaggagctgaagcaaatacagtggttatctcgtgatgttgagctgcagttaagggaattgcaatgcttattgcaattcactgcgatgggaacaaacagggatgttgggagtcac

SEQ ID NO: 193187 - DNA, 431 bp, Glycine max
  unsure (1)..(431): unsure at all n locations
tnctcaattnttgtggattgatgctcttaagacggctgtttatatattaaatcgagttccaaccaaggctatctcaaagacaccttttgagttattcaagggttggaaaccaagtttgcgacatatacgcgtttggggatgcccgtctgaagtaagaatttataatccacaagagaagaaactagaccctaagactattactgggtatttcattggatatgctgaaaggtctaaagggtataggttctattgtccatcccacaacactaggattgtggaatcaaggaatgcaaagtttcttgaaaatgacttgatcagtgngagtgatcaatttcagaacatttcttctgaaatggatcactatgaagctgaaccttctgggacaagtaatanngtggtagtcanttccacccccntcagtaaatgggtgt

SEQ ID NO: 193188 - DNA, 332 bp, Glycine max
agcttctacttatgtggcagggcgggcttctcttactttcttgtctcaaccgcgagctttgaccaccgctctttcttcccgcgatgcttctatttatatccgcctgagtgggtttatagcctaaaccatatttcccacgatttcctttggtatttatcaggctagttatgccgccgttgtctttgcctaaacccattccaggttcgtaaccgttccccaacataactcgggccatcattactgctgcatcagacaggcaagcttgcccagagaaggagtccacggaggaaatgcttaccacctcaaaagactggaaagcgatttctaatgac

SEQ ID NO: 193189 - DNA, 469 bp, Glycine max
  unsure (1)..(469): unsure at all n locations
ctcanaatctaggtatgcaaaacctcttaatttaatggattttcaaggctngtttagttaaattgagaatgaggtaaatttggagcaaactctcacctcacacaagtctatgacatcaatttaaacttgctcaaactggatttacaccgaaaattccactgaatcaaaatttgactcctcaacacccaattttaccctagaaatggctctttgttcactttgatcatttgtttttctctcttgcacagcccaaactttctcataagtcctaaatgacatttcaagctaggattaactcactttaacctccacataccactaaatccagatttggccttccaactctcaaaacctcactcttgntgcactcataacaccatattctcactttctaaccctaaggtaactctacccttcatctctaacagttttccataagcaatgtctgcacataaacatcacaatcata

SEQ ID NO: 193190 - DNA, 308 bp, Glycine max
  unsure (1)..(308): unsure at all n locations
agctngatcattgtggggttgtggtgtacttatccatatttcaaggaaaggcctaaggctgcacatgtaataaaagttcttcagcttgaagaatcattgccggtgcttccacttgatatgcatgatcgttctcctccttctttaattacgaatacgcatgcacggcccacttattattcttcgcaatcactacccttcactaacagccttggaagtgttggacgttaatttgccaagtcaacctttgaattcatctattttggcactaagaacttgtgcttctatgtaaactcacttcggttatggtt

SEQ ID NO: 193191 - DNA, 445 bp, Glycine max
tagtgctaaaatctgtgtccaacaacacattagccaacttaatatccctatgattaacactttgctctgcatcctcatgaagataacgaagtgccaaagccacgcttaatgctaccttgtacctgtgtgaaaatttgagaacaatagtggaaaaggttttaattgcataagccaactgcattacaagcgagtaaagagtgtgtttgtgtgtatgttataaaaactctctatatataatgcaagattatacttcctttaattatgaaaaaaaataaagacaaaatatagatgtatattcataggtattttgagtgctgttctctcgtcaattgaagttccataagtgatgtaatcaacgtaatactgtaagtgtgtgcacatgtgtgtatattgctctgtgtccatggaataaattatgtatcacctttaattctaaagcgaaata

SEQ ID NO: 193192 - DNA, 313 bp, Glycine max
  unsure (1)..(313): unsure at all n locations
agcttgaaggtatcagctcacccaggcgagctggttgcttaaggctgaagctttcccatggcccaggcgagccaaatgctggcctgngtgagtttaggtctagaaaatgaccattttgcccctttccttgtggcttttgtttctggatctaacaatcaaacatcaaccctgagcgacccttctgcattgcgctgcaactggtgccaaacaccgtaattcaattagcaatgatcaaaagatcatgtccaaatgataaaaacattatacctggatgaaattagggtctgacagttgcccctctttacttatcttt

SEQ ID NO: 193193 - DNA, 432 bp, Glycine max
  unsure (1)..(432): unsure at all n locations
cgagaatcctccttgagtatatccttgtctctgttgatttcccatatagtgaacttcttgagtgttttcttcaatgggaatacattggcctatttcatgagcctcaccacagatggtacaacctgtaacttgcaaaatagaagaatgtgtacgttgaccaatagacattttagttggaaacttaccaagtgtttatgttaaaatctcaagttgcctagaaaaaacttattctgtgcctataaagcgtcatgtgatgatagctctaacaagcttttcttagtgggttgatgaactctgtcgcgcaaaatggcatgattgttggttgacatattctcaattaggtcagttgcctcttcangggtcttcagctntatttttcccctgctgaagcatctagcagttgcttgggttgtggtttcagtccatcaataa

SEQ ID NO: 193194 - DNA, 330 bp, Glycine max
agcttacccccactactacccacaaccacctaccaaacctatcaatgttaagataatgacatcggcagaaatgcagttgagaagagaaaggggcctatgctttacttgtgatgacaagttttcccctagccatcgttgtcctaataagcaatattttgttccacagtgggaagaagaggatgaacctgcattacaaccagatccaccagacgaggttgagacagctggtgaccccagtttgcaagatcatcatttgtcttataatgctttaaaaggctcatcaagtcttgggacaatgaagtttcaaggatcaataaatggattgggagt

SEQ ID NO: 193195 - DNA, 434 bp, Glycine max
  unsure (1)..(434): unsure at all n locations
atactcttagctgctgtaggtgtgatgacaagacccaaagcagtagtcactttgggagaaatgaaattgtggctcgcaccactatcaatcaacaccaataaatccacattctgtatcttaccttcaaccttcatggtgtgagactcacccatgcttcccaatacccccatcaatttacattccacctccacttcttcttcactttccaccgtcacatcctccatacttagaatttccccttcctctgtcatggattcatcttctcctatgattagaaccctaagagctcgttctggacatttatgcaacgtagggtggtattttcccccacattngaaacaaagacccttcgctctcctctcttcgaattcatcattgtggatacttcgtattcccttccacctctccgtttgccggaacgcagacncccatca

SEQ ID NO: 193196 - DNA, 456 bp, Glycine max
agcttcaagaaaaagatggcctcagcaaatttcttattttcagattgtaattctatcaatagacctccaatctttaatggagagggttaccactactggaaaacccgaatgcaaatttttatcgaggcaatagatctaaatatctgggaagccattgaaatagggccttatatacccaccacagtagaaagagtttcaatagatggtagttcatcaagtgaaagcataaccatataaaaacctacagatagatggtctgaagaggatagaaaaagagtacaatacaacctaaaagccaaaaacataataacatctgccctaggaatggatgaatatttcagagtttcaaatcgcacgagtgctaaggaaatgtgggacactcttcgattaacacatgaaggaactacagatgttaaaagatctaggataaatgcactaactcatgagtatgaatta

SEQ ID NO: 193197 - DNA, 430 bp, Glycine max
tatatatgtccacatcttctagtacaacgtccttgcagtgtatctatggaacatcaacaaaataatattgatgagatgctcaaataatgtcaagaactccaaaatgaaaaccattattattattcttactactactactattactttttttccattttgaatcccaaattcggtagtattacttttttttccattttgaatcccaaattcggttcactttaaaaaagtctattgatgtaatgtaaaaatgtttatgaaccaaaagtccaaaacataattgagagaacagtaaaatcttgtagagaaaaaatggagcaagagaagggactaaaaagaattaaaaacttacatctttccgtgcacagaacacacgataagggcggaaaatttctttggttttgtcatcagggtcatgacaaacaagtgcact

SEQ ID NO: 193198 - DNA, 293 bp, Glycine max
  unsure (1)..(293): unsure at all n locations
agcttagggaagatggtgtatacttgatgtttctgggtaatgncatttatctgttgtgtggacccagcacatttgcacgaagttgcaatcaatttactcgcaaacttcttaggcggcttgaagaatttgacgtatgtaagaattgaagtggatgagtctaatattcctgctacggattttgggtaagtttattactattattttttgtggggggaggaggaaggggcatgaatngtaaatccaagggttgcaattagctcggttttgtttcaattcagctgatgtatttattt

SEQ ID NO: 193199 - DNA, 420 bp, Glycine max
  unsure (1)..(420): unsure at all n locations
nttgtggaacaggtgagtggttatgtaatcaaagttctattatccgatagaggtggcgaattcacatcaaaagaatttaatgaattctgtgaaaaacatgggatttgtcgccttctaacggttcctagatctccacaacaaaatggggtagcagagagaaaaaatacaactattattaatatgactagatgtatgttgaaggctaaaaatatgccaaaggaattttgggccgaagctgttgcatgtgccgtttatttgtccaatcgctccccaacaaagaatgtcaaagatcaaacaccacaagaagcatggagtggagtgaagccaagagttgatcatttgagagtatttgggagcattgcatatgctcatgtacccgaccaacgaagaatcangcttgatgatcagagtgagaaacat

SEQ ID NO: 193200 - DNA, 262 bp, Glycine max
  unsure (1)..(262): unsure at all n locations
agctntagcattggaaaatgttctgcatccttataactatatagggtagggctaggttatcaaactgctggaaacggagtgcggtaatttagtttttatcatcctgtaattgtaatgttgttcggttaggctaagttcaacaagagacatctgagaatgaagtttaatttgaattaggccaaactcgcgagacatcggtgtttggtatttgtgccttcagcataaaacacaaaaataatttcaagtatagaaaaaatctaat

SEQ ID NO: 193201 - DNA, 341 bp, Glycine max
tgacatcaatgcttaacgaccatggatagaaacttaatgacttgctttttaataatagaggtttttgaccaaattgaaccccaaggacaacaattgcttcaaggacaaagacaaggaagaagttgttggacaattggatcaacaaatgacctatagtagggttcttgactagatcgaaccctgtggacaacgatattaaatagcagaccacacaacagattaatagaaggacaggagacaatggagctgcacaacaaagggttaagagagacaaatgaggagggaataacctcaaacaccttgcaagcatggtagaaactccaaacccaaactaaacaaac

SEQ ID NO: 193202 - DNA, 312 bp, Glycine max
  unsure (1)..(312): unsure at all n locations
agctnttgactttgttaaaatatgactaattatgatcttctggacctttgtgttgtaggacactggtttacctcatataagagacaagaacactatttttttcatgcccaaacaatctcccgttggacggggaatataagatctttgatttttattttttttctaaagaaagtttcctaacatacaaattttgatgttttaaaatagaaagctatcaggcacttaatatctctttattctaatgacattctcggcccctgttgcatattgggaatatgttttaactgagcaagaacccaagaggcactactt

SEQ ID NO: 193203 - DNA, 317 bp, Glycine max
  unsure (1)..(317): unsure at all n locations
cggaaagttgtgtgtcggtcngactgaacttggctacttctttaagtgtacatatagcttaaagattgtaagggagtaataaagtgccatgttcctagcgtatgtatcttaacgattgtaagggagtaatggagtgtccatactgcattgcatacatatacaacctgtgtatatctccttgtcctgctctacctttcttaccagagaggaggtttagtcttgacaaatgacagtggaaggtaagcaattgtaatcttttcagttggtgacgtgttagtaaaaaattgtnttggtatcataagccgtgacttgtgact

SEQ ID NO: 193204 - DNA, 263 bp, Glycine max
agcttgttaaatgaacatgtatgataatgcaatgacttatgcaaataaaatgcatgaatatgataaatgataaatgataaatgcaggaatgatatgtccattatgattccatgaagagatgcatgatgcgatcaaagaacaagccaaagtgagttttttatgtgccccctaatctaggaacctaatggaaaggatctacaagttcccttttagtgacaattcccaagggtggtttcatgtaactttattggcttttagatata

SEQ ID NO: 193205 - DNA, 168 bp, Glycine max
  unsure (1)..(168): unsure at all n locations
acacacatcttcttggctaaatttacatacatgcatactcaaaacattttggggtaccacaaaatgcacatgtgcacatcttggtatttctaatacctatacatacacaaacttcatgatgaatcttgactatctacacaataaggggctacatntcatgctcttttc

SEQ ID NO: 193206 - DNA, 444 bp, Glycine max
  unsure (1)..(444): unsure at all n locations
agctggatgttaatagtttcttttaggattacgactccagttgttacgnggcaacatgttattatcaatttgagtttaatttaaggcttctcctctctttgggatgttttagtgcgttttgggcaaacaatttgagccattggagacattctggtccagatgcacctgattgagggcgatggtgccaaagtcaaatgtagaatatgtaaccaaaaatctgcctaattttccaaattacatgaagatcgtttcttccttacgaatcaaattatgaaggtattcaatattcatgttttggtgagttcctgaccaaaacaattatcaaggtattagtgagtagtacgaaaatcgaatttcaaatgagagaaaatatagcattgaaatatattcgttcggtgatctataaaaatataataaatagacattggtagggtaaaaagtata

SEQ ID NO: 193207 - DNA, 435 bp, Glycine max
  unsure (1)..(435): unsure at all n locations
cttgggatgctatgatnccgcctatgtttgtccattgaattttcttctctcataaactcgaatcatgagaatgaatagttntgttgtctaatgttgttaattcatatttgattcattagtagtttattatgtcataaatcttagtgcatcaattgtattttgccctactgaattgcttgatgccttaattntatccttgttttattgtacttactttctttccataataatatttcttatataaaatagtccttatattntgattgcacgtgatttctttgagggggttttgtatttaccccaattgtcatgatatgctttttatttcttccttccttttgcagnttaataattctttacattattgtatatgaggcaactgtagcacattgaagctttaccctctaccatgctttcacatgttcatgtntctta

SEQ ID NO: 193208 - DNA, 292 bp, Glycine max
  unsure (1)..(292): unsure at all n locations
cgcgtttaatagtggacggacatatatgattctctgngttatgtgtacgcgatccggaacaaagatagaattatgcggcttgaagatgaagcaaggctagcacgatcgaatagcatccctctatctttattgcttatacaagaatgggtcaagtgtgtgttcacttcttataatcattcttagaactcatgaagagtgtggagattaccccgtcttactcactgtaacattatttctacgagtcatatttctttagcgagttatccccatccgaagctctcatattttatga

SEQ ID NO: 193209 - DNA, 266 bp, Glycine max
  unsure (1)..(266): unsure at all n locations
agctntagccttaggttgttccatgttgctcatgttgntgctccccttatctctaacataaaagtacaagcaaggctctcaaggttcttactcaatatcatccttaaacactctttgagcctctctgatcctttctttcatagccctcttaccccttgaccacgttacaagcccaacaaagcccatatggatcaaggaatgactaattttgcttttgagtttggaatttggaatggaactcacacacgcttgtgacttgaaaaaaa

SEQ ID NO: 193210 - DNA, 261 bp, Glycine max
  unsure (1)..(261): unsure at all n locations
cttcaatgagtataggatgaatgatgggctctatgatagggccatggcacgtataatggttggtgtattctctaaagatgtcgggttgcaaatttatgccaggtggatcaaagagagattttttgtgagatagtcgttgttcaattttgcaaacagtggccaaatgtgaagctgaaatattcgaaacccgtgagttatttgacgcttgcttcttcangcactttgaggtgtacaaaaagatctatcatatatatcatgtgt

SEQ ID NO: 193211 - DNA, 279 bp, Glycine max
agcttctccacttaatattcatatttgaatataattattattaaacttgatatatatcaatatccttaatttattaattattctacttatattccatgagctaaattcttctatattgcctcctatgcttaatttttgttttctaaataaaatattgttcaggaataattaaagttcatgttgatatatgatggaatgttttgcttgtttgtgcagcgccgtaaaacgtctgtgatactggatgcatcgaagtacatacgtggtttaaagcagaagttg

SEQ ID NO: 193212 - DNA, 445 bp, Glycine max
  unsure (1)..(445): unsure at all n locations
tgctcagctagacccctgtgcacttccactatttcttgactactcaatcccagtatcccaccaagctgatntagaagaagatactcagaatcatccttcttagtagtgatctgagcaccgaaccgaacccttgtcacttcaccagttagacaataaagcaagtatgtcttgtaaagatcagtcctatccctttcaggaagatcatctttcagagtaatttctgtctgaccaggttttcccaacttttccgtaagttctttgttcggtcttattttcttgagtgtctgaagtgattcccattcttcgtcgtcagtttgtgtaatgtcctctttcacaggttcttcagttgaaatatcagctgactcccctntaatgtcctccaccacattagttacaactaaggtgttgaaggctatcatcttcttcagttctttcgcagactctg

SEQ ID NO: 193213 - DNA, 272 bp, Glycine max
taccgcacggcaaaatcataaccaatgaattttggtaaccattgttgttgttctagagactgcaatgtttgctccaacaattcttaaggcttttctgatcagtttctaataatgaacttatggcctaacaaataatgcccgaatttggccatggcttcaatcatagcatagaattccctagtataagtagattgcttctgcattctatgggacaacttcttagagaaataagcaataggatgttgagattgactcagtattgctctaatacc

SEQ ID NO: 193214 - DNA, 456 bp, Glycine max
  unsure (1)..(456): unsure at all n locations
agccggtgctgagaggaacgaggataatggctactttttagtgcgtgagctcgagttaaaggtgggcacactgggatggaatgcttgtacctgacttgggaaagtgggggagtaattttcgccatcgcccaattgccacctattaccacatatgacgggtgccccataattcaataagcttgatgtgagaaagcgtggaagagtcagtcttcctacttttatttgttgaccacacagtggtacctggagatatgtcgcggngtcaggagaccttgtggacgtcaggtggggtgctattgcccaaaaccaagcttggctaatcgagacccaacccagacatagtcagtcagtgagaacctgtgacgtacctaaacaggcgagctcctggcagtcaaccaataaaagaacaaagtccacgaagcaaggaggcttgtgtggcgcgtggccaactatgta

SEQ ID NO: 193215 - DNA, 326 bp, Glycine max
  unsure (1)..(326): unsure at all n locations
agctggttcaccacggaaacaaggaagttcttagataattagnttctcgcgagattcagactctgcagagaagaacattgagtgaaactcaaaggcaacgaaccagaaagattgttctccgagagatcaagttcaactagagttttgcaaaggcttccaagctcactcgggatttcgccggaaaatatgttgtgtgcgagaaacagagacttcaaactcttcaaattcagaagaatttccgacggaatctccatcatgagctcattgtgagaaagatctacaacctcaagattgttgcgttacccaacccgcccggaactctttga

SEQ ID NO: 193216 - DNA, 313 bp, Glycine max
  unsure (1)..(313): unsure at all n locations
tataagtctctctaactntcatgaacaagttgtggtctgtacaacctggatcatggacaaaattgagcctaaagttgtagactctggtttgctcggaaagcttgatatgcgagcggatatttgtaactacatgttccttgccacatcattttagatgatctcaatggatgtggaaatataagagaaagacatcatccttcatgaataattcatgggctaactatgcttacatcttggaagacatcgattacactataaaaagattttcagtgatctattataacacagctgcaatgatttgaacattgcttat

SEQ ID NO: 193217 - DNA, 297 bp, Glycine max
  unsure (1)..(297): unsure at all n locations
agcttctagtcgtccatagacctcctcattgttacggtccancaaacattgcatctgtgcattcatcgcatccagtaacagacgttgagcttcgtccaactgatgatactcgtcaccaccaccacctgctccagccataattcaacaggaaaaaaaaagtgtgcaataaaaattattaaggtttcaggacctcacaacactctactcacgtgtttaactcttagatggtagtacactcgtgtttgatgctctcaataggcttttgtgtaatgtattccctcttgccttttaccactc

SEQ ID NO: 193218 - DNA, 398 bp, Glycine max
  unsure (1)..(398): unsure at all n locations
ngcctcanagaggtccaggaaggacaatgcagccgaatgatctagttccgctcctgagtatgacagtcaccgctttaggagcgctgtacaccagcagcgcttcgaggccatcaagggatggtcgtttctccgggagtgacgcgtccagctcagggacgacgaatatactgatttccaggaggaaataaggcgccggcggtgggcatcactggttactcccatggccaagtttgatccagaaatagtccttgagttntatgccaatgcttggccaacagaggagggtgtgcgtgacatgagatcctgtgtaaggggtcagtggatcccgttngatgccgacgctttcggcaactcctatgatatccagtggtgttggaagagggccangaatgtgagta

SEQ ID NO: 193219 - DNA, 405 bp, Glycine max
agcttgaagcaacatgctcgcccaggcgagctggttgcttcctccaaaagattcctgatgggcccagataggcccagggctgaagaacactccccaaattgatcagttcacccctattttgagttttttttggcttatttccttccaaaacattgcgaaaccttacagatcgcacgacaattggctttaagcagctcaatgttaccggaaaaaatctgcatgtcgacaaataattatacccggatgaagttagggtatgacagatgtgtaacaccctgatatatatctatatattattagtaattatgtgtgatgtttgattatatttgttgcgttatttttatccataattattttcaaggaggttaatctagttaataaaggggtgtgggtagataaggatct

SEQ ID NO: 193220 - DNA, 431 bp, Glycine max
ttcttctacatcacctataaccaccattagccaccatgaagtgccgttgtcattttttgaaactccacttcgagaggaacccatcgatcgaagtggaaccgtccgacttggctcgcggtttcggtagagagcgaagccctaatctgacctttcattttccttcaaggtaatcatggttctacgcttgtttcttgttagtttcatcttacctttgcatcatttctgagtttggaaaccgctattgcatgttttacgcttcctctgaaaaaccctagagcaaagagattttgtaaaacattatttcttcatgaaatgggtgttattttcgtgacctacactgaaccccggtcacattggcgtgatcgaaaattcaaaatgatgtccctttgtaatacccgaaatgccctcagccctttcatgtagtgacgtgg

SEQ ID NO: 193221 - DNA, 355 bp, Glycine max
  unsure (1)..(355): unsure at all n locations
agcttcaggtgcaaatttagttaatgatattggttattannaatttgagcttttgagggaacatcctcctaagggaaattgtgcagaaagttagagcaatattactgcctttgtagagggtggataacgataggagaatttggtcgagaaatcgtttaggagattnttgagtggctagtgcttatcataaattgaatgacaacttggaggttattaacgataatctttggaatcaaatctgcaatttgcagggtgctcgtacttttatgtgactcgtcatgtaaaaattaatatcttagaacaacgagatagatatgttaaactctataataattatttataatttaagaataaa

SEQ ID NO: 193222 - DNA, 343 bp, Glycine max
tgtatcatgttcaaattaagtccatatgtaacagctatatcatctatgcctttaaagaaagaaaattataaaagggaaacataatcaataccatattacattaggagattaaattttgatttgtaacagtaccacatgggaattgcatacctggatctatgattcccgttggaatagaaattaagaatattaaggaaaatgcaaatgtgatagaagacaacatatctaagcggaagcacaaccattccatggcaccaccaatattgaactttgggcgagaatacccatcaatcaggttcatatttgttttctgaaatcttgactgctgataaaacttctaatg

SEQ ID NO: 193223 - DNA, 292 bp, Glycine max
agcttcttagtttcagatgatgcagatggttttgtagctacctcatgcactcctctaatgactatggcatcatttctggcgctaaactgctgggagttggaggccatcttctcaattaaatttctggcttcagcaggagtcatgtctccaagggctccaccactggcagcatctatcatacttctctccatattactgagtccttcataaaaatattggagaagaagctgttctgaaatctgatggtgggggcaactggcacataatttcttatatctctccagtactcata

SEQ ID NO: 193224 - DNA, 305 bp, Glycine max
  unsure (1)..(305): unsure at all n locations
tctgaatttctgctgaaagaagagagagaattnggctcttataataaaatgattatctctttcctttgtctaaaagcaatgccacatgtctcatttgagtggagcaaaaagggcccaactctttccctttgagggactttatactccgccactaagagaggaaaatttccacctttgaatgctcaaaacatgtctcagtttgcgtgccgcttatctagattcaattcctcgcatttctctgcactcatacaggcccgtcttctaaagacgcactatatatatatatgtatatcagaacgctcaca

SEQ ID NO: 193225 - DNA, 292 bp, Glycine max
  unsure (1)..(292): unsure at all n locations
agcttatgcagagcttagaagtattttctctataataatacaaaaaattaattatttacacaaataatagaactgaaaaatcatttacatgaatgatacaaattaatgttcatgttaagaaatcgattcctgagtaatcgatttcttaacgtgaacattttttttgtcttagtttagaaatcggtttctcggtaactaatttctaaattgaggttttttttaaacgcatgtnttgatatcgattccccaaaattcataacgtgtggttttaattttttttgaatcaacccta

SEQ ID NO: 193226 - DNA, 349 bp, Glycine max
tattcaaattcaccattgattagtaatacttataataaattaatagaagtagagacattctaggtcaaagaaattgaatgctaactaggagagtttcaaatgggattctcctccattagatcttcattgcctcatctggcagatgctctgaacctgtttttttttttagcaggaattaactcttgtctttgttctttccttacagttgtaccctaaaaaacaagtaaaatgctaactaatactcttaaaacatgattttcaatgattttattagaaagaataatcatatactttcccattattttcaatgtaatccttataaaaataactctctatttaaagatttctt

SEQ ID NO: 193227 - DNA, 344 bp, Glycine max
agcttcaatgtttctgtgctatcatcaatatcttcaatcatatcaaaacttggaaacatgaccaacaacaaaactttaatgaataagcatcataaggaatgcaaaaaatatgatcgcaaaatgcgagctcaaatacaataatagtaacaaatcttcttcattcaacatgtcatatggactagggaagaaaaaaaattcatttaacaatcaagttcacactaaacattatagaacaacaaaagcccaacaacagagcaactacaaatattttaaactgaagcttaacatcccaatgcttaagctctatcatttaaaacacaggccaatggaatggacaatgaaaa

SEQ ID NO: 193228 - DNA, 348 bp, Glycine max
ggcttgtggggcttctatggaggctggatcttagagcttcaatggggtcctttaatggtgattttccaccatggagatgcagcggaagacaaaggaaaataggtgagaggaggcgccatccattaaggaataagccatggaagaaggagcttcaccaccaagatgagccttggataagaagcttggagaggatgcttcaatggaggaaaagaaagagggagagaaagagagaggggggagcacgaaattgaaggaataaaagaggtatagaagtggaactttgaagtatgtctcacaagactctcattcatcaaagttacaacaagtgttacacatgcttctatttat

SEQ ID NO: 193229 - DNA, 357 bp, Glycine max
  unsure (1)..(357): unsure at all n locations
agcnttgagcaaatggaaatgacaataactttatacacggatgtccggttgagtcccgtaatatatcgagacgctcaaaatttatatccgaagctctgagaaaattgaattgacaataactttatacacggatgtccggttgagtcctgtaatatatcgagacgctccaaattgaaaacggaaactcttataaaattcaaacgacaataactctttactcggatgcccgatagagtgtcgtaatatatcgagggatgctccaaattgataacgaaagctcgtatatattcaaacgacaataactatttactcggatgtctgatagagtcccgtaatatatcgagacgctcaaatttt

SEQ ID NO: 193230 - DNA, 455 bp, Glycine max
  unsure (1)..(455): unsure at all n locations
ctttgttntcaatttcgaccatctcgatatattaccggatcatccggacttccgtgtataaacttattgtcaattcaattttctccgagctttggatcaaaattttgagcgtattgatatattacgggactcattcagacatccgagtaaaaaattattgtcgttagaatttgatacgagcttccgttttcaatttggagcatctctcgctaaattgcgacagtctgtcgggcatccaagaaaaaatttattgtcgtttcatatttctaagagtttccgttttcaatttggagcgtctcgatatattacgggactcaaccggacatccgtgtataaagttattgtcatttcaatntgctcagagcttctagtctcaatattgagcgtctcaatatattaccccattcaatcggacatgcgagtaaaaaagttattgtcgtagaatttcctacgag

SEQ ID NO: 193231 - DNA, 255 bp, Glycine max
agcttgtaattgaataccttaatgataacctactatcctgtgtcacaattcttaaaacataaccaagaacaatttaacatattacaacacctcataatccattataacatgttatcaaatacaattttaagcataaaaaatcaactttgttcatacaactataagtacacaaagaatacaaaaatattaatgctatgtcctattctattacttttattaataaaaaataattacttttaaatcatataaataata

SEQ ID NO: 193232 - DNA, 306 bp, Glycine max
  unsure (1)..(306): unsure at all n locations
ntggaggagtgtatttcttctagatgaattcgancaggagttatgctttctacttacattnttgtattgggcattgagaggctttttcttcttatttctatagctatggaccaacgagtgtagcgtcatattcatcttagtagacatggccctcctataacatatttagcctttgcatatgatgttattctatttgtgaaggctatcctagagcatgtccatgtgatgaagaatattctaaatctattttgcaagagctccacgtagaaattaagcttatagaaatctcgcatggtatttttaaat

SEQ ID NO: 193233 - DNA, 291 bp, Glycine max
  unsure (1)..(291): unsure at all n locations
agcttggattacttctattttggtttgaaatttcacactatgcaaattttggcttttcattttgcttttgctgttatagtagaaactctttaaattaatactcggtaaattaataaactctctaaaataaatttatccggtcccgacttgagccaatgtaaaaaattaaaaaactcaataaaataataagataataatttttcgtgagatccctttataattttcgatctcaagaaaatcataaattaataatttatagaaactgaanaaaatatattacactctattgaa

SEQ ID NO: 193234 - DNA, 266 bp, Glycine max
  unsure (1)..(266): unsure at all n locations
ntaccacanagaatgagttagttgatttgtgtcttggttcttcaaagcttcttctatatatcattcatctccaagtatctgttgtctcataacgatttgattttttgctctaatcttcgtttgaagtcttgagttagttggtgcatttcatgcttgcattaaatgcacatccattcttcatgcaagttccatactaataggatagcgtgccttanagtcacttctttcatcataacaagtctgcaacaataaagcacgtcttttga

SEQ ID NO: 193235 - DNA, 338 bp, Glycine max
  unsure (1)..(338): unsure at all n locations
agcttgcatgatttacatctccctctttctcaagcaaattcttcttgatatcatcaaaagcttcatgatttacattctccccctttttgatgatgacaaccacctgtaggttaggagcaacaacaaagaaaatatctatttgcatatagtttactcccccttggttttacaatgattgcttatatgagacaattgaagatttcatatttttcatatataaaaagttgtctcataaaaacaatagataattnttcttactattntatcttttatctttctctccccctttgtcaacatcaaaaacaaatcatgaatagaaaggagaaagatgttccact

SEQ ID NO: 193236 - DNA, 274 bp, Glycine max
  unsure (1)..(274): unsure at all n locations
tctaaactntatacaagaatgaagctttgataccacttgttagacaagtggcctcagatattttaagaaaggggggggggggtgaattaagatatcacaatcttttcctaattaaaaattctattttgattttaacccaaatcccaagattcctttcaaaatgaacccctaaataattatgcaaattaatcttactgaatagaaacaataagcaataagcaataaacaataaaagagtttaagagaagaaagattgcaaactcagatttatact

SEQ ID NO: 193237 - DNA, 257 bp, Glycine max
  unsure (1)..(257): unsure at all n locations
agcttagatttttattctctattataaggattttcccggtcattaggtaattngatggggcaattttcttaggttctttgtgttagttatagttacaaagagaagagtgtggtaaaggatgaccggggctgacgaatgagagcaagagagttttgaaattgaaaatgtttgctttttatccatataaaatttttagtatgtgtttaatccctttaaaatatttagtaagtcttttgtcccttgtaaattgaaatata

SEQ ID NO: 193238 - DNA, 467 bp, Glycine max
  unsure (1)..(467): unsure at all n locations
acaccactgtcgttgtgaacaatggatccatttggaaaaataaaatctaatgtggagttcacaactgtctgactgcttgtctctcccaagaatgtcatagttttttgtaagagttgggttacgactgaaacttgtggttttttacagtattaggctgtgtcatatatatagatgagttttaatatcagtgctgcatttctttaagattaaaaatacgcatgcacatgctttttgtatgtgttgtcaactacaccaatgacgtgacattctttagcttgcatcagatctgcatgtgtagtcatgttgtgcaaagtcctttcacgcgctttatgttaatgcagacaacaatntatcatacacattntttcacaatgtgttgtcaactcagactactatatcatacatgttnttttagaaattaagtaaaaatttgtgtagacgtaacaatatacaaaacacataaatgt

SEQ ID NO: 193239 - DNA, 270 bp, Glycine max
  unsure (1)..(270): unsure at all n locations
gaaaaatttctcgaaaatttaacactttgtaataaattaacgttgggctatagtgtagtaatctctatgtaatagagtactcatcaactaatgttaggttacctcgaatatttgattatttaaacgtttttttatttaataataataattattatttacttaaacatgctgtctgtcaattcattttttgcaaattaaattcaagaacttttaaattaagcataanaaataatctttaatatccaaaatagttttccatgcttaactact

SEQ ID NO: 193240 - DNA, 472 bp, Glycine max
  unsure (1)..(472): unsure at all n locations
tgacagaatntacacatcgtttgctttaatctaaacttcttcggatttagttacttaaccaataatttaattaaaatataatgatagtgtataggcttttctatattgtcttttaataatagatttgataacattgtcgggttttctaatacttattttaaaaaccatatctagaatgatttatgattaattaacaatataaaaaaacctacagttatagtttacgaaagttaaactctaaaatcaaaagaaaggaaaaatattatgctactatttagtacgaagagtttaagttatatacatggtcactgttattcaacaaaaacatcacaaatcataatgatcaggtcaaaccgtcaaagttctagacttctagcgacctggcttccagtgataataatcaatacaactaaaatttccgtcattccattcacttaacgacgaacgaaaatcaaacgcccattactcacat

SEQ ID NO: 193241 - DNA, 327 bp, Glycine max
agcttctatataagctgaaccattttatcttttaacacttgttgagttttattcagaaaattagagtttatctcttttatcttagtgagagtgattctcctaaattcgtgattcaagaacaccctggctgtatcaaaggactttcacaacctttgtgtgttgccctcgctggaaagagtgattctttccttcctatcatctccacccttgttctttcaaaccacaattccagaaaatccacctctgcccaaaattatctcgtgaccataactcccattttacacactcaaattaagtgattcttgagcctaaattgaatttaaaacg

SEQ ID NO: 193242 - DNA, 432 bp, Glycine max
tctgttatgaatctcgagtgtctcgatatactacgggacacaatcggacatccttgttaaaagttattgacatttgaatttgctcatagcattcgttgtcaattacgagcgtctagatatattaaaggattcattcggacatccgagtaaaaagttattatctttttattttgctcagagcttctgttttcaatttcgagcatctcgatatattacaggactcaatcggatatccgagtcaaaagttattgtcgtttggatttgctacgagcttccggtttcaattacgagcgtctcaatatgctacgggacacaatcggacatccgagtaaaaagttattgtcgtgtgaatttactcagagcttccgtcgtcaattacgagcgtctcgatatattacacgattcatttggacatccgagtaaaaagtcatt

SEQ ID NO: 193243 - DNA, 418 bp, Glycine max
agcttatgccaccgtcttatcataatgatatcctcaaaataacatggaagccaagccaaacaaattgtgtcataagtgtgtgccctgcattttctatggaaaactctatctctctctcaggtggcagaccggatatagcctcagaaaacacttcaggaaactctctgacaacagggaggtcacacataaaaacctttgtctctatttccaggctagacaagatcatgtatacttgagtatcttcctttaaagatgtcacaacttggttgacagagataaacatcatatccttactcactctagaatcatcaaacaccacacttttatcaaaatagctcaacaagacatgtgtggaagataaccagtccataccaagaataacatcaaactgactcaaagggcaacaaatcaaatcaat

SEQ ID NO: 193244 - DNA, 426 bp, Glycine max
  unsure (1)..(426): unsure at all n locations
ctagatcagtcgtctagaaatttcgatggattttggctttttagattnttntctcgtaatgttctcgntgacatctttttggctagtgtctgcctttttatagactttagtgagagattcattatgggatcaatgttgattccttgaaaagaccattctctcacaccgggagataaggctgcgtggcatgctttgattggggaggaaatgagcaacaatgcaaacaactgcatgtgcttcatgtacttgatgaaagtgacccatgaggaatattctttgtaaaccttctattctcttctattttatcttttccttatattcaaatgttaacaattcacataaagagagacaaacttaaaatcaaagagagagaatatgtgcacttcccttttcgactatcacgacctttttggattatgttgatca

SEQ ID NO: 193245 - DNA, 307 bp, Glycine max
  unsure (1)..(307): unsure at all n locations
agctntacagcagattatagttatgaccctctaacctagaattaaaataacttaatgccattaacctagggaattaaaaaaaacttaatggctgagtgtaactgaaattgtggcaaccaaaagttacccccaacagccaacaagtcagccaccatttggtctcccaaaaggctgatgcctaagttgccaattgggcccttattacaacttgaactaaacctaactaaagcccttttaattgattaacccaaaacattattttggtcaaccaactttacgagggatgggtcattatttaaaacaactt

SEQ ID NO: 193246 - DNA, 405 bp, Glycine max
  unsure (1)..(405): unsure at all n locations
tggtactattattgatgctagtatctatgaagagaaagtccattataaaacttgggaaagatctaacagactcagcctaatgttgatgagaatgactgttgcaaacagtattaagacaactctccctaaaatcgaaagtgttaaaaagtttatgtgattagtgggagagtgctctcaaacaactgataagtctgttgctgggacattaatgagtacattgaccaccatgaagtttgatggttcacgtactatgtatgaacatgtcattgagatgacaaacattgcagcaagacttaagaccttgggaatataatgactgtgaatgagaactntcttgttcagtttattacaaactcattaccgtctgagtttggcccttctanatgaactataataccatgaaag

SEQ ID NO: 193247 - DNA, 371 bp, Glycine max
gatcctctaagcaccgcggctgcagctaagcagtacattgcatcgctttttggatttatttcaacgaaatcctttatgttatgggggcagattccaacaaagaaagcatatgtgttagtagattgtggggcttctctcagcttcatatccaggaggatgacacaacagctgtagttaaaggtagatcccattgggtgaaagtaggagtcatctgccgttgctattctcttagagtgtgtttggatggaggaattttaaaatctgagaaatttaaattctaagatttcaatatttcaataaaattcttctatttcaaaatttgtgttggataaaaaagttaaatttgagggtaaaaaatgatggacaaaaaa

SEQ ID NO: 193248 - DNA, 365 bp, Glycine max
  unsure (1)..(365): unsure at all n locations
ngccgatgatttataaccaaccctgcagaaatttattcaaattaggagaaaccatccncttccaaatatcgtttatttgaacaaattatgaattaattcaaaacattatccgcaactaaagacaaaaacatgaatgaggatttctgaaatttctgccgtctcaatccaaacagtttgcaaggtacctacgccactcgtttcaaaagttgaagagcgaccaagcattgttcactacaagtgtgatagcgatgattaacgacaaaaacatgaatgattacagatgtctatcaaaatttacattaaaacataagaaacacaaaacttgtttttgctttacaaaaaagtaaagcacgtcaattggtctg

SEQ ID NO: 193249 - DNA, 289 bp, Glycine max
  unsure (1)..(289): unsure at all n locations
agcttgtggagaaaatgcaacttttacccttcttcaattccgagaattngattatgagaagttcactcagactcccttgcgtgtggtatggtttcttttatacttgcctttcacctcctttgtatttagatgaaattgtttcaggtttagttgtttatatttttcatttgcactttgtactggatgagattgctgaagataaaattcctcccaaaagactacaaaattgtctcccagtatatattattttgagatttcaacgtcattatgcattccatccatttatatg

SEQ ID NO: 193250 - DNA, 336 bp, Glycine max
  unsure (1)..(336): unsure at all n locations
ggttaattctatgaatgaatatnttcactctttcccctttacttctatgcaacacgtaacaaggctagttgttacagttactactaatagtgttgcatatagaaactgaatttaggacataataactaatacgtgccaagttctttccatctgtatagattattctataggtgtgacaacaacaagaattgttgcatttgaacatgttagttgctgagactagggacttttcagagacaatattttcataaatatactggttcttctattatgcatcctttaaacatgtcagcttgttagttacaggacattctgtatttgatagaaaaagaaata

SEQ ID NO: 193251 - DNA, 328 bp, Glycine max
  unsure (1)..(328): unsure at all n locations
agcttgttaaanagtcttatatgtctgatattccggcctatatatatatattactttttggtaccaatttatacttatattattttttgggtacaattaatttttttatgaaaccaacaaactttgattacacgttactgctccataacttccattcctataatcaagtaagactttaattataatttaggtatgagtcatgtgcccctttatattactcattatttttattggctttcctattctgattaacgtttccttttcattaactttcctattacgtttttctatcccaaaagcaaccaatataaaaagcttttaaaatgct

SEQ ID NO: 193252 - DNA, 350 bp, Glycine max
  unsure (1)..(350): unsure at all n locations
ntataagcacgggtctgggagacgaatgtcaagtggtcgcgatatacgaagatgatgttccgagtacattggatttggtacgaccatgccctcctgatttccagctgggaaattggcgagtggaggaacgccccgacatttacgcagcgagcataatgtaaacctttacggttttaaaagctctatagttgggcctaggctttagagtttttcttttggttaaggctttgtgtattttgttttttaaatttataatacaaagatctttcttcatttgttcctacgtctctacccattctcatccatttgcatgtntacttctttatttctgaaacggcagatccgatgac

SEQ ID NO: 193253 - DNA, 416 bp, Glycine max
  unsure (1)..(416): unsure at all n locations
agctngngggtatgnnggcatttctgcattgtttccgcattngggnnnctctccgattgaaaaaaatgggtcactttacactaaatttgtttgctttcacttctcaccaatctgatgcattattggattatttttgctatttcaagtttgcttctcctaatgtgtatgagtggtttcggaattcattgtaaaggaatgtgtaatgggtctttatgaagaaaatcttttcttttttttgggtaataagtcatagacgcttttcaagcttatgcttattacagtcttattgactttaacacagggaagtcttcctttcctgttggtaagttccaacaacatacgtgttccttccattattgcaattttatgacttccctatcattacataaatattgatcatgtttgatttatttgct

SEQ ID NO: 193254 - DNA, 422 bp, Glycine max
ctgggaaggacaagtctaccaatgtgatggaacaaatgcttgtcaaattcattacaaaacattcaactattattatttaacatttcaggacaaaagattgtgtggtggttgtgcatccattctcaagtctatctaccaagttatttgatgaaattcaagatagagttgttagagatcgacttggcttttttttcaatcaattgtttcttcactatttagaccacaacacaattctcttttggttataatgtttcctagtgttttttattgattgtatatgatttctatagtgtattttatacaggccttaatagtattttgattcccaatcagtataattttgtacacagtgtgtacttgagttgcactacgttggttctccttaatgcactgcaatggttctataaaatgataggtttata

SEQ ID NO: 193255 - DNA, 212 bp, Glycine max
  unsure (1)..(212): unsure at all n locations
agcttattgatttctaggcgtttggnttttttatcgnntnttttttctcttttntattctggtttctttatgaaaatatttgtcatttttcaatttttaagatttaaaaaatgtttgtcctgacttcttatttttcctatttttttaaatgaaaatattaaaaatacgttttgtttaatcaatttccataaaataataatatagcatttatg

SEQ ID NO: 193256 - DNA, 310 bp, Glycine max
  unsure (1)..(310): unsure at all n locations
tagggatccaacgagtttctcagtcccttgtactattgacaacttacaaattaatagagctttatgtgatttgggtgctagcattaatctgatgccttattttgtctataagaagttggggttataagaaccccaacccactaacatttctctttttctagcagacatgacttttacttattcacgaggaatagtggaaaatttgctggcaaaagtaggaaaatttatttttccatttgattttgtgattctanatatggaggaggatgaagaaatctaaattattttggggcaacccttcctctacaca

SEQ ID NO: 193257 - DNA, 269 bp, Glycine max
  unsure (1)..(269): unsure at all n locations
agcttgttctaagtgtcatgggtgcttgtttgaatcacaaatccaagagctggaggttntgtgagtcacaccactgttgcctgcaacatcgaaacggtgacgaatgggtggctcatgatatttttncnatggtggtgcatttgcgttatgggggcagagtggatcttgatacagggaatgggagaatgagggaaggataaaaatgtgaatgaatgaccgaaaaagtaaaaatttaaaagaagaatctcaaccctatcattaaaaattat

SEQ ID NO: 193258 - DNA, 412 bp, Glycine max
  unsure (1)..(412): unsure at all n locations
ggctntccacttctttccaagggattgatagattatgatatgcccacccaccaatgaagagctgtgagtacaacgatattcaaattgagaattgagactttgctgactaaataaattggcatgatgcactaatgataatgatcaatagttgtttgacatacattaactagaatatagcctgaaactgggtaacaaactattttccattcaagaacttacatgaacatttcctgtcaaatttatttatcctgctcagttagttttttaatatttatcatgctcggtttgttgtgttgaattggtatcatttgctgtacttcaaaaacttaaatgcttaatcacgttttatgatccatgcngtataatactatttatctttntcaactatagtggcttttatcaagcaaaaatg

SEQ ID NO: 193259 - DNA, 338 bp, Glycine max
  unsure (1)..(338): unsure at all n locations
tacaataaacccaanattgtacttgttaaatgtattttctgacccaattcacagcaaataaacattttattctactttcaagcagttttaatcacaataaacaatgaataattgattttttgttaacaactatcaacaaatgaattcaatgttcaaataacataggaaatgtcaaaaatgttaaaccaaagtaaactaagctaaacttaatgtccctaaatcctagctctgagctctaactcggagaaaatactgtgcccactggattcgaagcgcctttaatctctctggctccaatggtctaggatcgttaaaatactgcatcatgaaataaatga

SEQ ID NO: 193260 - DNA, 463 bp, Glycine max
  unsure (1)..(463): unsure at all n locations
tctaaactntatacaagaatgaagctctgataccacttgttatacaagtggcctcagatatcttaagaagggggggttgaattaagatattacaaattatttccccaattaaaattctttttcactttctattcaagttacaaattcccttaacaatgaacttcttaaatattgattcaaatagaaaaatctgaatataaatataaaacaataataaataaaagagtttaagggaagagaaagtgcaaactcggatttatactggtttggccacacccttgtgcccacgtccagtccccaagcaacctgcttgagagttccactatcttgtaaaatccttttacaagttctgaacacacaaggacaatccttcctttgtgttcagaattcttttacaacaacagaccctcggtctcttaatcccttagagaattagaaagagtagaagaatgaatctctcttg

SEQ ID NO: 193261 - DNA, 367 bp, Glycine max
gaaaacaactaatagcttaacatacgtcatgcatatgaaggctaacacattaaaacttgaatatcccgaaattaaattcttagctcggatcagcacacgggaagatgaagtatctagccacatgtaacttagaaaagaagatattgaatatgactaaaagcctgagttgatatataacatttgactcaacctttttcgttatgttttaaaaacaagacaatcaccccacattaacgagatattaaacagttgtctttacaaaaaaaatctcaaacacccaaactttcaaaaattcataacacaacttatgctaaaaaaaataactaaaaaaatccaccaacacccccacaacacattcctaaaatac

SEQ ID NO: 193262 - DNA, 455 bp, Glycine max
  unsure (1)..(455): unsure at all n locations
acacanacaggatgtttcaaactcatgagtcatgacttcctagttatattatatttttcaaacttaaataaagcatttccagatagcacataagattatagctgcatcgctaatgatagataaaaataaacaaagtgatagatatccattagtttgttcattagttaggaaaattggttacagaaataaggcatgttgcccaaaaaaataagaggggagggaagagagatcatcttgtcatttgttttgggcattgggaggtgcagaccctcgaagttccacaagtcaggtaattntctttatgtaattctgatcaagtttctatcaactagtatcagagctctgatcttggagctgcgtgcaaattgttcgtaaaatgatgccaagaattgatgggaaagaacttaatgagggctgctcaaattacacagtagtttggaacattggagtatgtg

SEQ ID NO: 193263 - DNA, 333 bp, Glycine max
  unsure (1)..(333): unsure at all n locations
agcttgaagtaggaaccagttcgagagctctagatgagtttgtattgaacgngagatcctagcaaaaggcgaaggagacatcctcaccacttgttattttgccatccttcatattgtacttctctctggagaaaagaacgcttcctggtatggaaagctaaatcctctgtgggatcttcctgtacgtacttaatgaaatatattttatctatttagcgaagtntggtgttctctggctatctgcttttactccagtagcctttaccttgatcactagatgcatgcttgttaaggcattcaccagggaaactggctgacttaaagccctgaaaa

SEQ ID NO: 193264 - DNA, 457 bp, Glycine max
  unsure (1)..(457): unsure at all n locations
tgcaatggaagacattgtatatatgttgatgaatnttccattcactaacacatatttgtttaatttgtacgctcaaatctattagcagatgtgttcaatttgaaatatgaaattgctattttacatcttttatttggcattatataaccttgtccagcacatcacaattttttctttgatttctcttcgccatagattagacctattttatatagttctactttgctgtagttaaaatcaagattaaagttgcgtaagccatcaatgaaattaaaaattgcaactgaaatatcgaacacatgattttagcaaagcagtgatagctacaaaaatggagtgataacattcaaagcaaacacattccaaataaggaaatacgatgtcaggatagaaactntgattaatttaaagagcacctcgagtgagaatgaaaactgaaactaataattaacacaat

SEQ ID NO: 193265 - DNA, 416 bp, Glycine max
  unsure (1)..(416): unsure at all n locations
agcttgtgcttaaagatagcttagtctcttcttttatttttggttgaaaaccaaattgattcttatcaagaaagctattcctttgtggtgaatcctcctttaacttatcaattctctgtggatcatgacatcattctgttcatcttcttcatcttatccatattttctgtttttctattcttgagttcttggaaggttaacaatggtgattcttgaatttacactcggaacgtccgaaccaagcatccatgggttggattgcatcatatttcgattttttttaagatggtaacttctggctnttttattatattatattcctctttcatccttgaaatattaataaaagtccctattattccttttaaataaaacaatttattattaattggttgttactcattctctactatata

SEQ ID NO: 193266 - DNA, 452 bp, Glycine max
  unsure (1)..(452): unsure at all n locations
tactcagcttctcaggaagttntctcanagaagcttctcaaggaagttntctcaagaaagcttctcaaggaagctacctagtctataaatagaagcatgtgtaacacttgttgtaactttgatgaatgaaagtcttatgagacacactttaaagttccacttctctccctcttttattccttcaatttcgtgctccccccttctctctttcttttcctccattaaagcatcctcttcaagcttcttatccaaggcaattcttggtggtgaagctccttcttccttggcttattccctagtggatggtgcctcccctctcctcttctcctttgccttccgctgcatctccatggtgtaaaatcaccattgaaggacctcattgaagctcanagatccagcctncatagaagctccacaagcaagcttccatcatatactntaagtaaataaat

SEQ ID NO: 193267 - DNA, 471 bp, Glycine max
  unsure (1)..(471): unsure at all n locations
agcacctgagctgcgctcacatcgaccacttcgggtgctgngtctttttcacatggacnngagggggcctatgcaagttgaaagcctcggaggaaagaggtatgcctatgttgttgtggatgatttctccacatttacctgggtcaactttatcagagagaaatcagacacctttgaagtattcaaagagttgagtctaagacttcaaagagaaaaagactgtgtcatcaagagaattaggagtgaccatggcagagagtttgaaaacagcaagtttactgaattctgcacatctgaaggcatcactcatgagttctctgcagccatcacaccacaacaaaatggcatatttgaaaggaaaaacaggactttgcaagaagctgctagggtcatgcttcatgccaaagaacttccctataatttctgggctgaagccatgaacacagcatgctattccacaacagagtccac

SEQ ID NO: 193268 - DNA, 475 bp, Glycine max
  unsure (1)..(475): unsure at all n locations
taagtcttggacagcccaattgtttcttacacttgttttagcgggccacgtantgttgacctttattctcttaggggtcatgggaaccccttgatcacaatttaaaaaattaagagaagtgaagcaatagaacatacctttttctgtattttcatgttgattattcctaccaaaaagtatgacaaacctaaggtgtcccatatgagtgcctaagtttgtattgaaactaaaaataagaaaaaacctacctaatgagtccctatgtacacaaatcatgaagatgttgggtgcacgagtgattttacaaaagagtgttgcaccacccataacattcatcacaccacctattttagggatttggtgcctaataatacctatactgggcaccaacaaagcacaaggatttaatgtgttgcgaaccaaaccctcattcaacaactactttacttgaggattaaactcaagcctaagagat

SEQ ID NO: 193269 - DNA, 292 bp, Glycine max
  unsure (1)..(292): unsure at all n locations
agctntgaggatntttacatttagcaatctataaaataaaggaggaatttatatctctaggtaacaccccatgtgcatggaattgctttaactacttcaataagtctccctttatcaactcccaaaattccttaagaaaaaagaaaactgaatccatccgagccaagactcttagtattaccacaatcctaaattgtatttttcacctttttttctttgaatttcaaagaagcatgatattagcttctctagatatattgtggaaccccacaccatcaagcttaggtctatt

SEQ ID NO: 193270 - DNA, 440 bp, Glycine max
  unsure (1)..(440): unsure at all n locations
tgtaggctacatttacaaccatgcattggctntgaacatcttgangaaattcacacaaaaaactgaattagtgagacatggagttacaagatttgctaccactttcttaactntgcaaagattgcataagcaaaaggccaatcttagaaggatgtttacttcaaatgaatggttgaagtctaaggcagctaaagagcccaaggggaagcaagcaacagatgttgttcttatgccatcattttggaatgatgttgattatgctttaaaggctatggggcctcttgtagggtgttaaggttggtggataatgaaaaaaaaaaacctgcaatgggtttcatttatgaagcaatggatagggccaaagaagcaattcanagagctttcaataacaatgaagggaagtataaggatatccntgcaatcattgataaaagatggga

SEQ ID NO: 193271 - DNA, 309 bp, Glycine max
agcttgtgcttaaagtttccaatatgaggtttattgtctctaaaatctttcaagcatgtgctttaagttttctatgtgtaccccaaaaatcttgtggaaattggtcaaagggaaggaaaacatagacacagagacttttacatgcatggacacaaactttcaagcatatactcaacacacacgcactcacgctttcaagcatgttttcaaagattccaatatgaggagtattgcccctaaactctcttgaggaagttgctgaaagggaagaaagaaaacgcacacaatttgaaacatgtgctcaaagtt

SEQ ID NO: 193272 - DNA, 427 bp, Glycine max
  unsure (1)..(427): unsure at all n locations
tgtcattagtatcaaactttctcccacaaaccttacaacgataagggtgatttggcttgatgacacccttattctctaaacgatacaacaggtccttctctttcctactctcccggacaccttgagggacatggctaaaagtgtggctatttgcataagccaccatataacgaacaacaccaaaggaagatgcagctattctcagcttattggcaacttcataaggtgggattgaattgggtggtttattgtccaagtcccagaaaagccccaccctgtttgtcaatttctgatttttaccccgttctgacccagaatgacaatgtctcaaggtaccgtatgtntgccaacatgtagcttccagtgagaanaagaagatgctacngaaattaaggatttgcaatggggtctctgctcttctataaat

SEQ ID NO: 193273 - DNA, 294 bp, Glycine max
agcttggaaaaatactgagctcctcccaattcatccagcaattcgtcaattgtaggaattgggaatcggtcacggattgtcacggcgttaagagccctgtaatcaacgcaaaatcgccacgaaccatcttgcttacgaacgaggagaactggtgatgagaaggggcttgtgcttggcctgataagtcccttttgtagcatatcattgacctgctgctctatctccttcttctggtaatggggatatctgtaggggcgcacatttacaggactggtgtggggaagaagatggata

SEQ ID NO: 193274 - DNA, 342 bp, Glycine max
tctatttaactgagcttgagagagttcgggaagagaaatcaactgctgagagaaaggtaattctatgttataattgaaattaaaccaatttacagttatctgttcaatattgaaatccccaacctagttaccctagaattattgtacattggtagattctatattatgtttatcgcttaccaacttttgtaccctacttctgattctgctgcgttttgcaggccatttcaaatgaggacttgtacaaaagatcacaagagtataatatgagtctgcaacagtacaatagtcgccttcagtcggatcttgaaataactaatgaggcacataaacgaatggaga

SEQ ID NO: 193275 - DNA, 304 bp, Glycine max
  unsure (1)..(304): unsure at all n locations
agctntaatggagagagagagactaacatttctccatccttgncccattcgcattaatgcagagaaactggccatgtctccatccatctttggaattgccaaagaaggcatcaccagactttgtgtagaatcgcccccaccattagccaccagtgtgaaaataaaaccaaccctgcataatcaatatccgcaattaccatacaaatcactgataggattttgtctaatttactggcaaagaatattgcgcaatccatatatcatataccatactgggctttcaaaatttatatcaactatatga

SEQ ID NO: 193276 - DNA, 403 bp, Glycine max
  unsure (1)..(403): unsure at all n locations
tatntaatatgtgtatttattaagtatgttattggagtttattatgattgttttcaatttaattcttattgaagtgtatatatatatatatatatatatatatatatatatatatataaaatgtgaactcctttttgattgatttattaactgggattatcatctcattataagtgttatttttagagttcgataaagaagtttttgactttgaggaaacttgaagacataattttcttagatatatttattttagtttggttaatactttaaaataagacgcgattactttcgttatatttttagcattcaattagtttagatgcctatgttttaaggataaatatntttttatgtaaagacttatntgatttatcttattatatacgaatctgtattgcaa

SEQ ID NO: 193277 - DNA, 403 bp, Glycine max
agcttgtctcagcgtttatgcgagacggttactaacatgctagctatcatcgccaagtaccaagaagagttaggtctagccacggcccacgagcatagaatcacggacgagtatgctcaagtatacacggaaaaaaaggctagaggaagggtgatcgactctttacaccaagaggcaaccatgtggatggatcggtttgctcttaccttgaacgggagtcaagaacttccccgcttgttagccaaggccaaggcgatggcagacacctactccgcccccgaagagattcatgggcttctcggctattgtcagcatatgatagacttaatggcccacataattagaaatcgttaggaaacttgtatggtctctcagaccttgactagatacgactttctttttg

SEQ ID NO: 193278 - DNA, 464 bp, Glycine max
  unsure (1)..(464): unsure at all n locations
tcaacatcagaccacttccagtgttctggaactacttcttatggacttgatgtgtgcctatgcaagttgaaagccttggaggaaagaggtatgcctatgttgttgtggatgatttctccagatttacctgngtcaactttatcagagaaaaatcagacacctttgaagtattcaaggagttgagtctaagacttcaaagagaaaaagactgtgtgatcaagagaatcaggagtgaccatggcagagagtttgaaaacagcaagtttactgaatactgcacatctgaaggcatcactcatgagttctctgcagccattacaccacagcaaaatggcatagttgataggaaaaacaggactttgcaagaggctgctanggtcatgcttcatgccannagaacttcctataatctctgggctgaagccatgaacacagcatgctatatccacaacagagtcacactt

SEQ ID NO: 193279 - DNA, 239 bp, Glycine max
  unsure (1)..(239): unsure at all n locations
cacctgangctgcaactgccgaatctaaaataacggtattatttcaccattcggctggtagttatgtctgatactttacagtgatcctaaatcaaatgtcaaccacaaaaatcccaatacacatcataattcataaatataaacatgaaacaaataaattctatataaaacaccaaaagaaaggtcgattaacacgtgcagaagtatatgaaagcattaatttcttcggcaactaaaac

SEQ ID NO: 193280 - DNA, 440 bp, Glycine max
  unsure (1)..(440): unsure at all n locations
taagaactattataaaaagttaataactagacacttattttattactattctcaatattaattaagatagaaatatataaaaattatttcattcgttttaaatttaaaataatattacagttataatatcatcattttaaagattataggatctattataacttaaaataaaatatatttaatttgtgtttaaagataataatatattcttaataataattataataattctatttaaatttataaaaatatgaattattatgattaaattagaatagaataaaatttaagtttaattctaaactcttagcagaataatcttttataatccctgtgccgaannatatttataataagagaagactatgaanaataacgtaatctagagagtgaacaaaaattataatttacttttacaatgaattctcaactatatatga

SEQ ID NO: 193281 - DNA, 314 bp, Glycine max
  unsure (1)..(314): unsure at all n locations
agcttgtcaactcgcacaaacaaactntgtcccacttgcctgtgagtcctagtgtcttccatatttccatgccaaaaaacccgtaacaagaaagttcactgcaagcttgaaccaattgactattcgaagttgagctaagaacaacatagatccataagtatagttcacttattggacaattttatacgatattaaatatattacctgtaagttaactacacctccagacagagataaaaaaataatataaaaaggtacaagttaaccactagaatatattcagcttaaaactcgagacttaaaaacagaaagac

SEQ ID NO: 193282 - DNA, 360 bp, Glycine max
tgcatgatttactattctcccctttctcaagcaaattcttcttgacatcatcaaaatcttcatgatttacattctccccctttctcaagcaaattcttcttgacatcatcaaaatcttcatgatttacattctcccccttttttatgatgacaatcacttgtaggttaggagcagcaacaaagaaaatatctatttgcatatagtttactcccccttggttttacaatgatttttatatgagacaattgaagatttccaacttttcatatataaaaagttgtctcataaagaatagaataattttccttactattttaatctttatttttctctccccctttgtccacatcaaaacaatc

SEQ ID NO: 193283 - DNA, 337 bp, Glycine max
  unsure (1)..(337): unsure at all n locations
agcttcttgatatattatgtggcagaatctgtactttgtttgaaaagttatgaccatttgaatttctcgagagctntggttgttcaatttcgagtgtctcgatatattatgcacctgaatcggacttccgtgtgacaagttatgaccatttgaatctcacgagagcattcgttgttcaattccgagcatctcgatatattatgcgcctgaatcggacttccgtgtgacaagttatgaccatttgagtttctcaagagctttcgatgttcaatttcgagcttctcgattattatgcgcctgaatcggactttcgtgtgacaagctatgaccatttgaa

SEQ ID NO: 193284 - DNA, 410 bp, Glycine max
actcagcttctcgatatattatgcgcctgaatcagactgtcgtttcttatagttatgacgatattatatttctccactgtattccgtgtgacaagttatgaccatttgaatttctcgatagcattcgttgctcaatttcgagcgtctcgatatattatgcgcctgaatcggacttccgtgtgacaagttatgaccatttgaatttctcgagggtttccgttgttcaatttcaagcttctcgatatattatgcgcctgaatcagacttccgtgtcacaagttatgaacatatgaatttctccactgtattccgtgtgacatgtgatgaccatcgtaatttctcgatcgcatactgcgctcacttgtgagcgattcgatatattatgcgcttgaaacggacttccgtgtgac

SEQ ID NO: 193285 - DNA, 270 bp, Glycine max
attaaagataatatttttttatgatattttggtccggagtactattaattagtgttataaataaactacatacaaaatttctatttgaaaatatgttttataattgttttagtaaaactaaaaataacaaattgttagattatatatttagttattaaaatttttaatattttatctttaaaaataatttacatgttttataaaatttctggttataaataaaaagtgcattcttatatgacatattttgctcccactcctatgataggg

SEQ ID NO: 193286 - DNA, 439 bp, Glycine max
  unsure (1)..(439): unsure at all n locations
attccaacgacgacgttaacgtgggcttncccattatctactctntttgtgatttagggcacgccattgttggccctcttggcaagctattcgatgatgtcatgatcgtgttttctcattgcgggttctgcgtcagctaccttattttcatttccaccacgttggcctatctcgccggtgatgatgacacctcatcagcatcatggtcctccttgttttggggtttcgccacgccaaaggtgttgtttctgtggggatgttttccctatcaattaaggctgaatgctatcccaacattgacccatttggctcctttgagcatttttgctgattctgttgacattgtagccaagagtgtggtgatggtggatgatgtctctgtgttcatgaagaatacgcctcctttgaaagccttgggggctggtccgtgtttctctat

SEQ ID NO: 193287 - DNA, 383 bp, Glycine max
  unsure (1)..(383): unsure at all n locations
agcttgattacaacaagtattttntcctgcttctcctgactacaatagtattctcaagggcacttttagcgcacccttagactccccctgaatctaagacacccaagtatcttcatcataagcatacttctcgcctttgtacctacgaccatatttggccataggacttctattgtaccttaatatattctcaaggcatttagaccctncaacaaattgggctaatgtttactttaaagtatgaatccccttatgaaattttacaacatcttgaggttgacccttaaaacatcattctttaaagcttgtcattaaaacattacaactttttgtgatttacactctaccataaacatgttactctttttaatcgaataatattg

SEQ ID NO: 193288 - DNA, 393 bp, Glycine max
  unsure (1)..(393): unsure at all n locations
tgagatgaggaagtgtanaagggtgaaacttcctgctttttattgtgaccacagagtggtacctgtagatatgtggcgggggtcaagagaccttggggacgtcaggtggggtgctattgcccaaaaccaagcttgaccaatcccgacccaacccgggcatagtcagtcagtgagaacctgtgatgtacctaaacaggcgagctcctggcagtcaacagataaaaggaacaaagaccacaaagcaaggaggcttgtgtggtggctggccagctgtgaatcttgtgtgatatatgggttatggcctctggtaatcgattaccaaggggggtaatcgattacaaggcttaaaaatgaagacaggaggctaagatggtctctggtaatcgattacca

SEQ ID NO: 193289 - DNA, 346 bp, Glycine max
  unsure (1)..(346): unsure at all n locations
agcttgaagacaatgaaactcactaatttatttaagctaatattcactcaatttgctcaagtttctttcgtctaatggattgacaatgttacaacacttgttcgttttgtctcataatattctcttgtaattcaactttttcttttatacacgaacatcttcaagctttatatagacttcggagcttcgatccattgagagatctcaactagccattgtctaataactttggcacttgacacgaggtcgctactgtgcagagagaaagaatgggaccaaaaatgctctctacaacatatctttagaaagtacagtttgtcagtgtcacctagtgctcanagctgac

SEQ ID NO: 193290 - DNA, 467 bp, Glycine max
  unsure (1)..(467): unsure at all n locations
gcttgaagaggaagctatcttgcgaagcattggatgagattttgagtgattatgaggtttctagaggtggaggagacttccccactacctgttattctgtaatctttcactttctcttctctttgttgtaaaagaagtctccctgctatggagagctaaatcctcaattggttcttcctatggagtacttgatgtaaatacttttatatctatctgatgatattttatgtgttctctatactatcaatacttcatgttagtatgtttttgccttgatcacgtagatgcatgctgagttagggtcactcaacattgngaaatggtttgatccttagaacttgataggacggggttagtttatcgtattgtcacgagggatcggcgtacacgaacctagatgttggtatgtatgtcttaatgtgcgtctggtcacgtgtagtccaacaagaaggatctgangatgacac

SEQ ID NO: 193291 - DNA, 376 bp, Glycine max
  unsure (1)..(376): unsure at all n locations
agcttgttaaagaactgaggaaaaatcaagtacaagcttgttctcacatcgntcgcgtgtatgatatccactccacaaggtttgaagtagaggagagcttcaaccctataacgcaacgtggcggacaaaagtgggcagttaacttgaatggtcatcattgtcaatgcagataatattctgcgtttcactatccatgttcacacattattgcagcttgtggttacgtgagcatgaactactatcaatatatagatgttgtttatacaaacgagcacatcttaaaagcttactccgtacaatggtggcctcttgtgaatgaagcggctatttctccttctgatgacgcatggacacttattcctgaaccaactacaat

SEQ ID NO: 193292 - DNA, 474 bp, Glycine max
  unsure (1)..(474): unsure at all n locations
aagactgatcttgnaaatgcggtatgataatggttgttctttgtgatttattttgagctgtgaagagaggaatctccgcacgttaattaaagtgtatatataagatgcttatggtttcgtttcattgttttattgaaatgatgttactttcttgttgatcctgtcgtgcagaattctaagcttaagaagacgcaggagtatgtacatgcattagaagaaaaattgcagaatgcgttaaacgaaaacgcgaagctcaaggtcaagcacaaggaagataagaaaatgtggaagggattggagtctaagttctcttctactaagactntatgtgatcaacttacagagactttgcagcagctggctggtttggttcaagacggtatgaatattcaacttccctctgatctctatctatcttctaggtgtcatcgctctagatttcttttaactagccatctcgtttatctcgctgaa

SEQ ID NO: 193293 - DNA, 333 bp, Glycine max
  unsure (1)..(333): unsure at all n locations
acccggatcttaagcacctgagctgcagcttgagtatcgatacactgatttgttatccattaccaatgataatttttgaaaaagttttttcaaaaactgagtaacacatggatttttctcaaaacctgtttaccaaatagtttttgactttttcaaattggttttaaggttttctaaaagtcataactcttctaatggttttcttgaccacacatgaagaatctataaaagccaggttttggttngcattcaatcattcatttcaatcaatcattctacacatttattctttccaattcattctttacacaaacaatttttcacattgattct

SEQ ID NO: 193294 - DNA, 451 bp, Glycine max
  unsure (1)..(451): unsure at all n locations
taagagcctcatccacaccctcatagtgctccacatgggtctcatcatccgngcattctccaaggtcaaagccgtaatagtcgaaatcctcaagggaaagaaaaaccaatccaacattaacttcctccaccaccacaagaagcaaaagatgaccaagaagatcatctttggctccttcaggctccactataactggtgctcctcaaaatcttctcatgttatccctgtcccctctcgggtctttgaagggttgccaaaagctagtgacacccatcacgatgaacaatatttatatgaggattgccatgatgatgatttacaacttgctgggtacttgcagtggcttgaagagaaggttcatgatgataaaaagggttctggaaatgagatgaacgagattgantcagtggctgaactgtcatagcggattgcacgagaagtcaagttggaa

SEQ ID NO: 193295 - DNA, 296 bp, Glycine max
agcttagaagaatgaaaatcatcatggaagtatattttttaatgggctgattgacgattgaagaaggcttgtcccaaagaactcaagtaggaatgtgttgttcataagaggacaaggaactggtgattgggacagtatctggtacctgaaagattgcctgcctacgagatctagaggtgttgtttgtccttatagttgtgttttgtgtaatgaagaaataaaaaatgtatggcatgtgtttttaacttgctccaaaagtgtggagatctggcagtcaataaatttttggccgatca

SEQ ID NO: 193296 - DNA, 433 bp, Glycine max
  unsure (1)..(433): unsure at all n locations
aagactgtatattgatttctttagtttgcacactatgtgttcctttcccttaattgaaaaaaccattggttggtccatataaacattctcttctaaatctccattaagaaaggccgntttcacatccatctgatgtagctccaagtcataatggactactaatgccatgataatcctgaaggaatcttttggtgagaccgattgaaacgtctctttataatcaatgtcatatttttgagtaaatcccttagcaacaagtttagccttgtaacgttcaaggttgccatgagagtcacgtttagtcttgaaaacctacttacaaccaactctcttacaaccctttggtaattctacaaggctcanacaccattatgttccatggagattatctcttctttcatgcattaaccacttctcaaattatcacacttac

SEQ ID NO: 193297 - DNA, 281 bp, Glycine max
  unsure (1)..(281): unsure at all n locations
agcttcatgatgatgaaccatgataatntgatgatgccaaaagcccaagtgattgattcaagacttcaagatcaagcatcaagaatctaatccaagattcaagattcaagagaagaaatcaagaagcaacaagtcaagacttcatataggataagtattaaaagaatttttcaaaaaccaaatagcacagttttgttttacaaaagaattttctcaaattntttaagttaccagagtgatcactctttggtaatcgattaccagttatcagtaatcaatta

SEQ ID NO: 193298 - DNA, 395 bp, Glycine max
  unsure (1)..(395): unsure at all n locations
ngcacacaagttggttgttgttgttattggtttgattacatgagaacctctcatttgtgtttagcttgtattattggttttgatgaaatccctttgctacaagtcaaacaattatacttgttgatagtgccattaaggtttttcttcaccctaaacacctatttacaaccaattggatccctagatggaggcagttcagtaagagtccatgtaccatttttcatcaaagcatcatgctcagtcctccttgttgcaaaccaagtaggattggaaagagcaatttatgttaacttgtgctcagaataagctagaagaagagtaggatgaagtctaggattgacacacaccagtttagctctttngcacattgaacaagatcattttgagaagtagta

SEQ ID NO: 193299 - DNA, 358 bp, Glycine max
agcttcacaaccttggactatggtgtaggctacaaccttggcccatctccaggaagaaaagataaaagactcccatcaaccctttcgacgatgatcactaatgctttctacttcaggtccgccccctcctcgggttcccccttcgtcacccaaacctggtctcttgccgacaccaccaaaacatacatttgtcccattcaaacgactatcatcagaagacctcaccctgcaccgggataagggtctgtgttttaactatgatgagaaattcagccgcggtaacaagtgcacctccaaactcttcctcctcattgccaacgacaatgacaattctcctcatgatttgctcatctatgca

SEQ ID NO: 193300 - DNA, 462 bp, Glycine max
  unsure (1)..(462): unsure at all n locations
tctaatatctatttctagactaaaatccaattattaattttttgcctttaatgagttgaccattattctttntaaacgttagcttaaaaacttaagagcttaaccatgcttaggtatcatacggtaacatctcattttctaccatttcaataatctaaaacactactcatcacacaagaaagcaataataatgtctactcatcacacacaaggaaaattgaaatgttacaataatgcattaaataaattgaatatcatataatataaaattttcttaatcaatttaaaatgtaataaatcaatttggtctataattctttnttaatcacatacatcatttaaattataattggtttcaaatagaacaattgatcacttaatagtattatgatcaattaatgaaataggaaccattaaaatgaattaatntgaatggataatactatnntaataatttggatg

SEQ ID NO: 193301 - DNA, 375 bp, Glycine max
agcttcaaggagagatgatggtgtctgtttgtatggtaactcacgcagaagaagctcttcctgaggcttggcattcatatgcatcaaaaactagtggtgaaaacattgctcacactcgttccaaggtatatatttctcccacgctcttggaccttagagttaatgtgattcaagcccaggatttgttgctaaaaaagagatatgatttgttgctaaaaaatagtaatattggtaatgactcgggaattgttaactcgttggcaagtgtaccacatcgtcacaagtagtaaagttttcggaagtccgaatgttgaattcacaaggactttgtcttgtcttatattaatgcaatatccatttaaagcatgagataag

SEQ ID NO: 193302 - DNA, 469 bp, Glycine max
  unsure (1)..(469): unsure at all n locations
actaagcttgagctcttgcatgcatggcttaggacaggtttttattcaactaaaatgatattcaaatttgttctactcttatttttgaagtctgtgttatcaaaaacaagttattttatcttgtactaacatgttatataaatttcattaattattttaatttatttatttggtaaataactgtttagtttatgcatgtttgaattagcttttttaattaaaaaaacatagcagaaatatatgaaaaagcttttaacagaaaagtgtttttgaatacagtataaattaatgcacatatttgcgtgcacttttgatttagttntacatatgtaaattgtgtaaacatgagtaaaanataaaaacgaacaatgtcatttaaatttatttttatcatgttacgataattgattttagagagctagaagaccaatttanaacaaatgggtaaatgtagttatnttcagtttaa

SEQ ID NO: 193303 - DNA, 284 bp, Glycine max
agcttgtaacatgtaaatactacattccctatttcacattaccatgagtgaaatttctgctggtggatctggaatctgtaactgaattcccacaagggtatccttctcagaaaaaccttgataacttcagaagaagtcttaattataaaccatgagcaggaataagcatgtaaacatcaagtacacaaaaaatatttccacatatggtccaaaatttgccagctgagtaagccagaaaaaaagaagtccaatgttgaccattttcatacttagattgatgatag

SEQ ID NO: 193304 - DNA, 393 bp, Glycine max
  unsure (1)..(393): unsure at all n locations
tcacagaaccctgtgtgagtgtgagcgtcagctacaactcatcgcaatgggttacataacttcgtgggatgaattcgtggagcgatcggttcagttgttccgtgccgatcctgattctgtatgttcttctcttctgcatttttacatttctcatttctcatttctcatttttctaaccattttgtcttttaatttctctatggttttgtcactaactcaattctgtttccttattttatttaattntatgcacactcccaaattctttatcgtatcttcgttttttcacacctgaaatagacgcggtatttgatgaagtaccggcattgtgagggcaagttggtactcaaggtcaccgataatcgacaggtactaattaatgggtgtggtggt

SEQ ID NO: 193305 - DNA, 343 bp, Glycine max
agcttctagtatttataggcattcattgtttctaaacgaataaatttcttcactaaatgcacgtactccttcatactgtaaaatcactcttgagagctttcgtgtagaccacttcaacagaaaatcgcttactttaagtcaaagtaggtgtctcacaagcaaaacacgtcttttgatggtatttgacatcttctagatcttgggcttcatttattcttcataggtttcatttattcttcatattagaatgttttttgaaaaatgaatcccatacacaacaataaatgaagtcttaaatgtcaatcattaatattgcatgagatcttgaccttcactaactatc

SEQ ID NO: 193306 - DNA, 313 bp, Glycine max
  unsure (1)..(313): unsure at all n locations
ntgactggagtcatcaagagattatttatatgtgaacatggcatgagtttcaataattatcatcatcaatcatctttgaatcatctatcttttaatctttacatcatctctcaatatctttcaatcaatctttcaacactttctacagaactttctaattcatttctcttcatctttctaaaagttttttatcaacactttctcttccaagaaaagttctttgttcaaaaacttgtgctatccaactttttcattctcttctccctttgccaaaagaatgaaggactaactgcctgaattcttttgtgtctct

SEQ ID NO: 193307 - DNA, 440 bp, Glycine max
  unsure (1)..(440): unsure at all n locations
agcttgcatgcattcgcatcttgtcatcctgtgaatcggaggatgaataaagagtcattttgagtgatggtcaataccacaccatattgagacaagggtaagtgaaggtaatgcaggcgttttgtggtattgtttcaaattttttgcatgatgccacttcctttgttcaaagcttaggggcaggtacgagtaggtgctaggcccatgatcaatcaatcatcatccccgtccagctcaagacgttaaagaaacgctcctaggaggtagcctagtatctctaattttgttctttaaaatttttgctttatancttgttggtttcttgaattatatcttgaattcactctaagttgtgtgcaaccataggatgttaggaaaatatatacataaccttgaacaaacacattntttgcanatgcttgggtgatcatgtgtgatgc

SEQ ID NO: 193308 - DNA, 473 bp, Glycine max
  unsure (1)..(473): unsure at all n locations
taagtatgattntacatganatcatgtgatttacaaaatttatcaatcaatntattaaaataattatccatacaaaagtaagttgactcgatttcaaaatcatgtgaattgattaacaatttctaactgacttttaattgttaggaaacatgataaaataaaatgataataataataataaaagctaccaaaatagaccgaaataacttaaacactggattgattgtcgaaaagtttaggaggcataatcataaattcaaaaaaaaattaaggaaaaaaaacatattttcttctttntattttataatatgtgttgcataagtttttatcaaattaattcattctttcaagttaattgttccatcaaatacgaattntaattnttcaattagtttaatcaataattaattnttttaataaatattaaacgtcgtgaaatattaataggttatcattaaaacaatactttatta

SEQ ID NO: 193309 - DNA, 406 bp, Glycine max
  unsure (1)..(406): unsure at all n locations
atccattccagggctcatggagatcctnntnatcattaccttctgaagagaaagaagtgatcatcaagtcttaaaagtggattgaaagagtatcaaagatatctttgaggatataacagtgacaaggcgtagtctagaagaacaaatcatatagaaaaatcttcagctaatcatgtaaagacattgtgagtgcattaatagaacaataaatggatgaccatttcacttgcagtgtatcatcaaatactatagtgtatctatattagtctaactcacaccaaggtttaaaatactttgtagtatctacaaactatnttcatgccggaagaaaactctccatttgaaaaagcagaatttgttgcctcatcatatgaaaccttctgcanaaacattccgaggagacata

SEQ ID NO: 193310 - DNA, 442 bp, Glycine max
  unsure (1)..(442): unsure at all n locations
atcttgacaaacaaataacattgtgaattntttaatatatataccagnnataattgtatatatactcggttttttaatatgagtacgttaacaaattatacctagatattatcttaaaataaaccaataatataacttattaacacacttaaaatacaccaataatatacctagatattctaattaatatacaattagagttatattattattattattaaatactccaatatttctacgataaaagcaaatgcactttgataatgaaaaattacctttcttataaaatatgatttttctatgagtctagcatactatgattaatatataacatttcttaattcataaatatcaaactggtcaaataagtttataacaattcagtgctcagctgattaagttacaccataaatgaatactttttctgcatcaaatcttagca

SEQ ID NO: 193311 - DNA, 286 bp, Glycine max
agcttgcggaccatgtggatgacgaacctattatattttaaccctttttattaacctagattttaggctgggcccatttagtctgcggacttcacgaacttaattcgcaaaggccacaaacatatttgtatccgctttagttgaaggttagccaaaaagaccagaccattcttccattcccattagctaacgctaacctaatttgggggaggttcatttttcttcttctttgagaacacatagttatcatcgccccttctcctaccttccagaaaaagaattcatt

SEQ ID NO: 193312 - DNA, 386 bp, Glycine max
agcttatgaaagttgtgcactggtagtattttttattatagcatctagcatctggcagcttctagcatgaacatgtggtgtatttattatttaccatattttgcattgtggtgaacaggaggaacaaaaaggtgtatgcctggacagttgatgatgcacaatccatgcaaaagatgttgtttgaacatgttgatgctattgttacgagcaacccaactgttcttcaacgcctaatgcaagatatcaaaacacaatgtcttgaagaaggttattcattaccacgctaaaatttgtttcaagaattttagagatgccttctatgttgtgattattaaaactctaatcctttgtgtacctccattcttctctttggtgaaattgatact

SEQ ID NO: 193313 - DNA, 453 bp, Glycine max
  unsure (1)..(453): unsure at all n locations
gctctatgatcttctcttctattctagagatgtatatcatattttatcactcattcttgtatacaaatgncggaactccaaacatagcttgaacttgattcttggtagtgccttcataaaagagtttgcatcttgggcttctctcttgtagtactcgagtttgattttcttagttgcctttgcttctttgaggattcttcatagcatttaggatcaatcatagttgtgttgcaagattcataaatatccagcaaagatcttactcgacttggagtagactctgatgaagaatcttgttgttgtagaggtgacaaaagcatacttgcttcttttgctacttcttgaacctcttcttgatattgttgcactaaaacatgaatattgctctttgcaacattcnttgcttcccaactctaagaataactttcatcaacttcaacatcttgactaatg

SEQ ID NO: 193314 - DNA, 390 bp, Glycine max
  unsure (1)..(390): unsure at all n locations
agcttcattgacaacatgagagagctctttctcttccatccaagagttttcaaaatgaaacctcttagctttacgagtttgataatgttggctcagcttcaatagaatagggaaatgatctaacctacaagagataaggttagataaacaacaatttgggaaagtatcagcttgaagttgccaaagctcagtcaagcttttccaggatttcaatgggtgaacccttgtcttttacccatgtataagaatagccctccaaggtaaatatcattcaaaccaaaatcaaacactacttctctganacctgttatgagataattcgggtgagagttttgacccttcttttcatcataggagaggatgttattacagtcttccatggtacaccat

SEQ ID NO: 193315 - DNA, 392 bp, Glycine max
gtcaagactacctcatagaagatacgatagatttgattgagggactgttctccacagaatccttgaggtggattctgaggattctgctttgattaaaacgcatctctcggtgtggtggttcagtggcaagcaacgacagcttgtggtggccaccagtggttgtgggtggtagaggaggagtttcaaggatgttttggacggagttttgagagagaagggtgtgaaatcatgtttttcccactgaaaaatgtatttataatatgcagatcttgcttagcaatctcatctcattaagcgggagtacacttttggcgctaaacgtgacttttcccgcttagcccaataccttttgtgctaagcacgacaattcgcgctcggcgcaattacttctc

SEQ ID NO: 193316 - DNA, 325 bp, Glycine max
agcttgtagggttaaagtctcactattgtctcgtgctcatgcaacaattgttagccgtggctatacgagatatcttgccaaacaaagtcaggttagcgataactcgcctgtgctttttcttccatgctatatgtagcaaagtcattgatccaatcaagtttgatgagttggaaaatgaggccgcaattatactgtgtcagttggagatgtattttccccctgctttctttgacatcatgattcacttgattgtgcatctggtaagagaaatcaaatgtcgtggtcctgtttatctacgggggatgtacccgattgagcgatacat

SEQ ID NO: 193317 - DNA, 395 bp, Glycine max
  unsure (1)..(395): unsure at all n locations
ctccgcttgaaagataaatncctaatgttgtacttatttaatttttntaatcgagggagaaattttttagaataattcaaatttaaaaataattgagatgatgaaaattcaaggagatttttttaggaattcgttatgtttcaaatctttaggattttatctagatttttgtttttatttattttagggatttgtttcttttttttaaaaaaaaagattaggaattcgttatgtgagaatgaaattccacaacagtgtgatccaaatttttcaaaatgtgagatttgtaccttctggactactaatggcattntattaggagagatgacatcacaaggatataagtatgtttgtttaaattanggatgccaggtgtacaanggagtatacttggt

SEQ ID NO: 193318 - DNA, 423 bp, Glycine max
  unsure (1)..(423): unsure at all n locations
gcttncatatacgtgtctaattactcaaactatgatagattgcgacagnttcatttcagggtccacgcgccaaaaaatgattttcttaaccatcactcttagcatgaggagataaaatattccacttaaattcgctgctgagagatcaaatcaatttaatttactttctttcaaccttatcctctcgtgcattatcatcaccaagcattataatcatatcactttggacgacacaaatatcttttcacaagtggttagtggttaattttgattcatatatccttcaattctgacagctagaatatatttcgattcacccgtgaagaatatgaaagaattagctacgtgtcaatgcatgcttacgcatgttgacgtctttacacacaccacacacacaatacatgggaaagttgatgtttaatc

SEQ ID NO: 193319 - DNA, 456 bp, Glycine max
  unsure (1)..(456): unsure at all n locations
tgacaatcactcattgaagttgggatatactcagcttcttatgatgatagagccattatagattccttcttcgaacatcgagagattgatgcttttccacacataaaaacataacatgcaatacttttttgatcaaatttttcaccacactaatttgaatcatagtacccaagcaatttaacttctaagttgtcactacctttagaaaacagaattccatagtccaaagtgcgtttcacatagcgcactattctcttggttgctaataagtgaggcacttttggtgtctccataaatctacttattaatccaacactaaatcttaattcaggtctggtgttgcacagatatctgatggatctaatgatttgtctgaagtagggaggatnntataatccaacactaaatcttaaaagtagtttctttattgattactcanatgcacatacattcact

SEQ ID NO: 193320 - DNA, 407 bp, Glycine max
  unsure (1)..(407): unsure at all n locations
agcttttaagggcagaggaccttaaattatcttaaggtgtggatatggggcctactgagagtgagaacgtgtagccctctaatgagggcgtgcagcctgtggcgtccccaaaataatgactggtttaatagtaatgatttaattaacaaaaaccatggntaaattttttttcttctttttctttttcatttctttctcttttcaccataacaaggtttagaaggaaaatcctcactatagagtcctgaatggccagttcacaactctattcggagtcatttctttcttaccattcataatctctaaactattttgcttgttcaaaaggaagaatgtaccagccattactttatgtcttcacgtgaaaataaaagaataaaatacggtcgataaactcttttacaaat

SEQ ID NO: 193321 - DNA, 385 bp, Glycine max
  unsure (1)..(385): unsure at all n locations
tgcagccattagaagagaatgagtatgtgaatggaagttttattganaatgttagttagtttgtcagattgattgtgaaggaatgcattaactgtatcccgatgagagtgtgatccttaaatattgagagaaatgaatatcatttagtattgatttttcatgaatctctgaagtatggactggatgcatgaaattgaggatgatgaaggccacgtttgattgtgataaccacttagccaaaaagttgaccatgtgtttgaatgatttatcccttgcacccagtttgagctgaatgaattattgattgattgaaccctgagcctatacagtgctatctcctactaccatgacttangttgtaggagagcatcatccatatgaagtg

SEQ ID NO: 193322 - DNA, 372 bp, Glycine max
  unsure (1)..(372): unsure at all n locations
agctntgatttcctttgttccggaaacctttcttttctcatgtgcacccaaacccaatctccgggttcgaagacaaccttctttctccctttgttggcttgtttagcatagcttttatttttcctctcaatttgatctttgactctctcatgaagcttcttcacatagtccgcctttgcttgaccttctttatgcttaaaaacagaaacattaggcataagcaaaagatcaagaggagttagtgggttaaaaccataaacaacttcaaaaggagaacaattagtggtgctatgaacagctctattgtaagcaaattcaacatggggtaaacaagcttcccaagtttttaagttcttcctccaaactgtccta

SEQ ID NO: 193323 - DNA, 424 bp, Glycine max
  unsure (1)..(424): unsure at all n locations
tgccacccagctcgcccaggcgagcatggttgcttccttcnataacaacagccttctggagggcccaagggcctggttgttatttgcacccccatttttactaagtacaccccctgcctttttttggtgattcttttttcgtaatgttacggaaacttacgaatttcgtaacgatacttgttttctttccgtaatgttacggaaccttgtggattacataatcatcccccttttgacttacgaaatgttacaaaacctcactaattgtgcaacgatgctcccatttgatttccggtgtgtcacggaaccttacggattgtgcatcaatattttcttttgttttccggcacatcccggaatttcacaaattgcctaatgatgggtgccaagcaccttacaaggaccaaacanaagtcacatgtca

SEQ ID NO: 193324 - DNA, 373 bp, Glycine max
  unsure (1)..(373): unsure at all n locations
agcttgttngcagtatgaacttctacatctcattnggcacacaaagcagcctcattcgngcaacaaatcactattgtcggagctctgtcacgcacatcacactgatttttcatgttaattcttctcttcccttctacaacaccaaaaacttggtcttcttttagctaacaacttcttcactacaagaaatattggaaatattgaagaaccctttataaaagacattggttttttaaagccaaaaatggagaacgatggtgtataaagattatgacatggagtcgagatgagaacaaaagaagaagaagaacattgttnacatttgaagtagtactatactacatattggtatttaatgtgggaagaaactatt

SEQ ID NO: 193325 - DNA, 395 bp, Glycine max
  unsure (1)..(395): unsure at all n locations
ntgcaattgtgataaataatggctctatttgnnatcttttaaannannngacgccncaccggggcgcnagnggggngcaaaaaaaanncaacncgaagcagaaatagnttctcatttgtatgcaaatgttgcttcaatntgaattccagtaatatcaatatatatgtaccaaatgaactcattctattgaagaagggatttattnttttattaatttttattcctctcattgaaatgtgaaggagaaagctccatatgaagccaaggctgcgaaaaggaaagctgagtatgaaaaacttatcaaagcttatgataaanagcangtcagtaacctgttgccagttttctgttgtgtgtggcactttgaatggcttgcgttatatactttattttct

SEQ ID NO: 193326 - DNA, 289 bp, Glycine max
  unsure (1)..(289): unsure at all n locations
agctttataatgagtaattgtgccaatgcaccctgaatatacatcttatcatccctctcacacctctaattatttccaccgcacaaaatctgcactataaagtccatcacctcctcttgtattcaccaaatagactattagacccagaggtccaagactgaccctaatcacactttataattattnttttttcgtgttggcatatttcctttttctaaactctttgttctctttttgtttggggagatcaatgagccagaaaacaaaatcacattcatgggccctcttt

SEQ ID NO: 193327 - DNA, 420 bp, Glycine max
  unsure (1)..(420): unsure at all n locations
tccaacaagtggtatcagagcacattatcttcaagtatgtgctccttaaacctccactatttttcagctttactttctcctccattgttgattcttcgattctctccatgtatctcctcacgtgtcttgtgctgaatgttgttaacataattttttagaagttccaccaattaagcttgctatagaagctagatttgattttctatggttcaaattccttgttcttgttcttgaaccatgaatagtgttgagtttaagttcctttgagttttatattggtcaattttttggctgaaacctaaaccataaaattcttagaaaaacattaaagtagaagaaaacctcaaaaatctagaatgacatattcacctatcgtagntntgtcataaaagtcatgtctagtcatgaaacttgtcacgt

SEQ ID NO: 193328 - DNA, 354 bp, Glycine max
  unsure (1)..(354): unsure at all n locations
agcttgtatgttattctataaggtaagattataaacatgttgagatcaaagttataaataactagtgctactataatgtagtgtacaagacatgacattctatggaatgatgatgcaatgggacatctaacgaaatttatagttccatgaaaaggactctntggggcaaaagatctctttactatttaataataataatgacgacgatgatgatgatggtggtgatgacgacataataataataacaagcttgcaaagcatctgtgaggtagcatggatgcttactagaaggccaatgtgcgaggatgctgactttgtttcaaaaattttatacatgtanatagatgatccatg

SEQ ID NO: 193329 - DNA, 351 bp, Glycine max
ttgatggtgttgagaagaactcatatgtttgtcatcctcgaaaaggcggagaatgagaatgtatgtatacatgattctgatgatgcccaagaagaatcaaacaaggctgcttcaaatgataatgcatttgctttaagaataaatcgagagtgcttctaccaacaaagccttgtttccagattcactatagaccaagccttgccttatgacaaagtgctttcaagacatgcaaggctctggtaatcgattactatgaagtgtaagcgattaccagaagacacggttgagaaatatctgctgaaaaatgttttgaatatgaatcctcaacatgtaatcgattaccatatgtct

SEQ ID NO: 193330 - DNA, 232 bp, Glycine max
  unsure (1)..(232): unsure at all n locations
gacagatcctgtgtcccgttgtaaagagcgattattgggatgtatgtcatgtctatgaaggcttanacattataatttgtatattctcgaaattaattcttagtttggattagttcacgggacgaagaggtggcttgtctcatgtaagatacacaaaaataactcgtatatgactatcagcgtgacatgatatctaacattcgattcaaccctttttggatggtttgtaaaa

SEQ ID NO: 193331 - DNA, 453 bp, Glycine max
  unsure (1)..(453): unsure at all n locations
gcaagcttatgccaagaggagatgatcctttcttattctggccaagatcaatgacaatgtctacaaaattgatttgctggacgagtatggtataagtcctacttttaatgtggctgatctatctctttttggtgcaggtgatgatttagttgatttgagggcaaacttttttcaagaaggagggaatgatgagttcatcaaagactatgcccaagcctagaaggaagcttaagacttaatacaaggcatgggaaggcccatgacaggagcaagagctaaaaagaccaagttgctttacattatatagtggctaatatgagggtaatccaattgcatgaggggacccaatatctagaggcctgcatgcgtgggttgctactcacatatatngcttgcttggagtgagaatatgacgccattattgactaagcatctaataaataataatattat

SEQ ID NO: 193332 - DNA, 470 bp, Glycine max
  unsure (1)..(470): unsure at all n locations
tgtaagtatatattggtataattcgcctgttccattaggcttttaatgtccttagaggttacttcctcgttgacatcttttgtcttgaatggaattgccatgacaggtttattgttactgtctttgatatttggtagttgatgttgtgttgtgggaggtaattccgattggattaactcaccatccttcacttgccagtttgttatgacatttgttgttggatcacctatgatgtcttgtttccaagggtaatctatatcctttctgatggcataagcatgaaaccaatcaaagaaaaggacattcaatttgactctttcaacaaatttatagaacttgtcttggatttgttttctgtttgttcccttgtaatgttggaaaaaccatctcctttgaggttcattctccggagaatagaaatctctcctaagggtntccttatcaatgctaaagttgtcaaataacatcat

SEQ ID NO: 193333 - DNA, 465 bp, Glycine max
  unsure (1)..(465): unsure at all n locations
agctnggcacgttggaaatggatntgggaatgaggattatatnaaatggcatttttccaaagctacacggactacaaggctcaaaacacataagtgattaatgccctcgggaaacagaatcgtcgcgcacaccccagacgtcttctcaaagatcccaacggtcaaatcatggaaaagtgttctacgaagctgcagacaaaatctcgagaagatccaacggttaatgaaggctaggaaaattttttaccgagacaacttcatgtaacttccttgagaagcttcattaagcggcttcctcgagaagcttcctcgtgggcttctttgagaagctttcttgagaggcttctttgagaagttagaattttatctacccaaacctctctattaactaaattcacctctttataaataacaacggataanataacacaacanattaaatcaaatatcaattataattactaa

SEQ ID NO: 193334 - DNA, 462 bp, Glycine max
tctaatatagttgcatgtctctggcacaccttggaagctgaaacctggatgcattcaaatttcacttgattaaaacagctagctctactatatatatatatatatatatatatatatatatatcaaaattcacaacatacatagagtttgtaatatagtaacatttttatgctcgatttgtttttctttttgtttttcatgaatttaactaagatatgcaagatcctacaaatgctggacatgtttgcaaataagaaaaagtcagaagggtttcaaatattaacaaaatgtcaatttaacttgaagaaaaaagtatttcaaaagttccaagacaacattcattatgggaactatcgatatctcactactttttatcctaattaagaatatctagggaagaatatgttggggaagtgctaaaacttaactaccacttggattatcacaatggcaaaatcagct

SEQ ID NO: 193335 - DNA, 402 bp, Glycine max
  unsure (1)..(402): unsure at all n locations
gagctgcctaattaacttgaaattgagagaaaatgattattaaacacacaaaatgaaaatactaagtatttattacctatacttaacagaaaatacttataacactacaaaataaccataaattgggagagtttgatacaatttatataagttttatacaaaaaagttagtcgttttcatcgactaacaggtacctgcaattacacttcgacgctcaagttagtggcgtatctctatgaaggtgcaagtaataattaggttaataatagaatgaatactnttaatgcatgctagctatatatataggtattacttgggggcctttggggcgtaatatatgtggataaatacaaggagaatcttaagagataaagatgttattctatctcttatttcccttat

SEQ ID NO: 193336 - DNA, 356 bp, Glycine max
  unsure (1)..(356): unsure at all n locations
aagtttattctgttttcttgaccaaaggtcctgcaatatatactggggtcacgggccttgtggacgtcacgtggngtgctattgcccaaaaccaagcttgaccaatcccgacccaacccgagcatagtcagtcagtgagaacctgtgatgtacctaaacaggcgagctccgggcagtcaacagataaaaggaacaaagaccacacagcaaggaagcttgtgtggtggctggccagctgtgaatcttatgtgatatgggttatggcctctggtaatcgattaccaagggtgggtaatcaattacaaggcttaaaaatgaagacaagacgctaagatggtctctgataatctgatacc

SEQ ID NO: 193337 - DNA, 324 bp, Glycine max
agcttgagggttaaagtctctctattgtcacgtgctcatgcaacaattgttagccgtggctatacgagatatcttgccaaacaaagtcaggttagcgataactcgcctgtgctttttcttccatgctatatgtagcaaagtcattgatccagtcaagtttgatgagttggaaaatgaggccgcaattatactgtgtcagttggagatgtattttccccctgctttctttgacatcatgattcacttgattgtgcatctggtaagagaaatcaaatgtcgtggtcctggttatctacggtggatgtacccgaatgagcgatacat

SEQ ID NO: 193338 - DNA, 446 bp, Glycine max
  unsure (1)..(446): unsure at all n locations
ntgagaagataaaatgtcctaatgaggtacttatttaataattctaattgagggagaaattttttagaataattcaaatttaaaaataattgagatgatgaaaattcaaggagatttttttaggaattcgttatgtttcaaatctttaggattttatctagatttttgtttttatttattttagggatttgtttcttttttttaaaaaaaaagattaggaattcgttatgtgagaatgaaattccacaacagtgtgatccaaatttttcaaaatgtgagatttgtaccttctggactactaatggcattntattangagagatgacatcacaaggatataagtatgtttggttaaattanggatgcaaggtgtacaacggagtatacttggtgttgcaaggtcagaaaaaatgaagacnatcttgctacttggaaatgtgacactc

SEQ ID NO: 193339 - DNA, 325 bp, Glycine max
agcttgtaatcgattaaactgatatgagacatttctctgcaagcttcaaacacttgtgttattggttacaatcagtctgtaatcgattaaaacagaagagttttaactatagaggaaattttctaactttagaacttttcttctaactccaacatgatgatgcatgatacacatatgaaatgatagagacaaagatgcaacacacaatacaataatcaatacaaatgtcattcaagagagttgggcatgtaaaagacaatttcttcaagctcttctttaagctttaaggctaagtcttcatgttgcttcccctatctctaacatg

SEQ ID NO: 193340 - DNA, 424 bp, Glycine max
  unsure (1)..(424): unsure at all n locations
tcttatccaaggcaattcttggtgttgaagctccttcttccttggcttattccctagtggatggtgcctcccctctcctcttctcctttgccttccgccgcatctccatggtgtaaaatcaccattgaaggacctcattgaagctcaaagatccagcctccatggaagctccacaagcaagcttccatcaagtggtaatcaaagcacaagagcttcaagtaggtgctccttaaacctccattaattgttttgctttaccttttcttgcattggtgnttcttcatttttctccatgtatctcctcacatgtcttgtgataaattntgttaacatgattctttagagtttccaccgattaaacttgctataaaagctagatntgattttctatggttcaaaattcttgttctttgtcttgaccatg

SEQ ID NO: 193341 - DNA, 390 bp, Glycine max
  unsure (1)..(390): unsure at all n locations
agctngagactntaattgatttatagcattttatgtnnaattnatttggactaatgaatgttggtgttataatatatagttattgaaacaagaaaggattattttctatttgtaccaaaaaaaaaataaaggattatttcttatttattttttcaaaccaaatgcttcaaattatacatcataaagtatgcagccacgtgacaaattatatttgcacgtttttgtactatttctgagatcggaattcccacgccatattaaatttctctttttgttatcattaccttcaaaccatcctttatgagaagaacaatggaaaggcttggagtagcaacataatcttccaccacttggacatgatactngtataaaatagcagctgccaccatc

SEQ ID NO: 193342 - DNA, 454 bp, Glycine max
  unsure (1)..(454): unsure at all n locations
tgcttgtctaaatgtaanagtataagtaagcaataaatttatcacaaacaaactacacaaagatggcaaagaagcttaccattggtactttttcattaatcctaacgcgggctctagctattacaatgtcaaccttgtgtgtatttaattaactggcaccgttgaatctgaaatttcttattggacttgttcacatgactttgacatatgcacccctcttgtgtgtgtgggtgtatatattcaagtagatcacttcatcccatctcatgcattgaaagtctcaaaaacacatatatattactcaccctcgatcgatctgaaatggggaactacatttcttgcactctatcaacagcangaagcangaagctgcattggagaggcataaaggtgatattttcgagtggcgagaatgagaagttggaagaacgagttatagcaacagaactgatgc

SEQ ID NO: 193343 - DNA, 396 bp, Glycine max
  unsure (1)..(396): unsure at all n locations
agcntttcattgaaaacgtgacactcaaatgtctcttttaagagtaccatatccttacttggtttgagtgcattaaaaagcatgtaagagacccatagacaaatgctcgtagtcttaactgctactcaagtatttcacatccattcttccttacaaaatcactattacaacaacaataaagtcttatcgtcctagatgtgatcggctacatagattacacgacatcattcgacatggttaaaaaccaaaattttagagatatttccgaaaaaaaagagggttgtgttaggcctttcggcagctaatgtaaaactcattgttattcttatcatggattataaaatcactactcgtcaatcaatatgcactggtcaattagactttgtactcctttct

SEQ ID NO: 193344 - DNA, 429 bp, Glycine max
tactctgcacaatggtggcctctagggaatgaagcggctattcctccttctattgatgcatggacacttatccctgacccaaccacaattcgtgcaaaaggtcggcaaaaatcaacaaggataaggaatgagatggattgggtcgaaccgtctgagcaccgaataaaatgcagtagatgtggagccgaagggcataacaagcgtcgttgtccaatgcaatctgagcgtgtgagttgttcaaatcattgatatatgtatgttagccgagtgacttatattcgtttaagttctcttcaatgtattgaatttgaggggttgaatacacttgttacttacaaacattactctatttggtttgtgtacattagctatatgtgggttcaatgaattcgttactcaaaacacatgatacaccctacactaaaccct

SEQ ID NO: 193345 - DNA, 402 bp, Glycine max
  unsure (1)..(402): unsure at all n locations
agctaaactttttgaccatgtatttacagggaaaaaggctttgagttcagcaagtcatcgtaaaattgatgatgatgatgataacttagacgagtttcttgaggggatgttttcgtgatcctagctaatttgattgtggtaacaaaaggattcatcaaaagagttaagaaaaactcctattgagttcttgtatttgagatactctaaaattgaactaagctaaaataaacatgtagtatttaacttaaacttatcatattttttatattaaattctcaaattaagtaatgccacatgatatcttntttacatttacaacaacaagttgatatgagatctatttagaacaagttgcagaatttcaagaaaacatttacaaacatatatatttgatatgagatc

SEQ ID NO: 193346 - DNA, 434 bp, Glycine max
  unsure (1)..(434): unsure at all n locations
tggatttccttttagtanggaatctatccttcctaagatggagccaaacccagtcaccctcattaagaactagctcttttcttcctctattgcctttagttgaatacacctttgtttggttctctatttggttcttaaccctctcatgcatcttctttacaaattctgacctagattccctttctttatgtataaaagaagtgtccagtgggaggggaatgaggtctaacggtgttaggggattgaacccatagacaacctcaaaaggggactgcttggtggttctatgaacccccctgttgtaggaaaattctacatgaggaagatactcatcccaagacttatggttgcctttcagaagagcccttatnagggtggataaagacctattcactacctctgnttgcccatncagttgtggatgacaagtggta

SEQ ID NO: 193347 - DNA, 259 bp, Glycine max
  unsure (1)..(259): unsure at all n locations
agcttgcacaacaagtaactaaatattnttttgggtacaaaatgaagtaacaaactaactaaattccactaatatatacaattactactcaaaaggaagggatgggccttgattaggcccctctaatctacctagttaaactaattacacaaagaaaaacccaaatcacaacccaattattcaagtgcaaaggttttgacttccatgcccacattgacccatgaaatggcagaattggcccaaacatatttgttacaaa

SEQ ID NO: 193348 - DNA, 277 bp, Glycine max
  unsure (1)..(277): unsure at all n locations
ntgagccaaaatcccaacttaccatataaccttgacccatggtgagaatgtcaatccttgcccacgaaagaaagctaaaaaagaaagaaaaattcccaattgaagagtgagagaaagcgaaaaaaagaaagaaaattcccgatcaaggatcgaaagaaaacagaagaaatatgcagaaaggtctttgggccagacaatatctgaacaaaccagaattgtcaccaggtaaacgaaaaataggaaaccacgacctagagtggtcctctccctttgattg

SEQ ID NO: 193349 - DNA, 411 bp, Glycine max
agcttgaagatatgatattaatcattactattatatagacttttaatatagatcatgtagaacttaacatcaattattaaccgatattttgaaaccaccgacgttaaaagtattaatgttaacatcgggttttgaaaactaatgttcaactaaactataccacatcagcttttctaacaaatcgatgtcaaataatgagaaataacaaaaaaatataaaatatgtcaaaaccaatatctttttttagaaaaatcgatgttatggctgactaggaacatcagttttttctatgaattgatgttgtgaattaactacaacattggttttctttttctaaaaactgatgtctttgctaaaaacaacatcattctttagaaacacatcggagaattaatattaaaacagtgatta

SEQ ID NO: 193350 - DNA, 428 bp, Glycine max
  unsure (1)..(428): unsure at all n locations
tgagacttatcatataacattatctagttggtctttgttatgcatggactattatgatggacccagtttctaacgcgaatcttatggccaagtgggggtggacactattgaacccatatcatttaaagatgaatggttgaaaattatgttcgccgagatatatgtatgcaccatcacatatcaaatttttaacctttctattggggtccctcatggttgaacttattgtatagctacatacatccctanggtcccactctctctccaatgaagttgaatagtgggtcattctggggaaggagctcttgatgagatatacctaagtgcttaaaagatgtctagaatgggatgtcacctaaactcccttggtcaataagtgtttctctcactatacagatggagaattctatgcttatcccaatcggaca

SEQ ID NO: 193351 - DNA, 360 bp, Glycine max
  unsure (1)..(360): unsure at all n locations
ttcagatgatgcagatggagttgtatctacctcatgcactcctctaatgactatggcatcatttctggcgctaaactgctgagagttggaggccatcttctcaattaaatttctggcttcagcaggagtcatgtctccaaaggctccaccactggcagcatctatcatacttctctccatattactgagtccttcataaaaatattggagaagaagctgttctgaaatctgatggtgggggcaactggcacatagtttcttaaatctctcccagtactnatacaggctctctccactgagttgtctaatacctgagatatccttcctgatggctgtggtcctggaagcanggaaattttt

SEQ ID NO: 193352 - DNA, 288 bp, Glycine max
  unsure (1)..(288): unsure at all n locations
accctttatacaaccttcatcatctcccgaggcaacagtngactcagtcaagtttatcaatctatttatcgcagccctgcatcacaacaaaaaccacanactaattctaaagcaatgaagatacttgtgaatctactgtaacccaaatcatgacataagtgtaatcgcaggaaattngatcactcatgagcatcatcaagacgagcanntgttgannnacctccacatctgtagccagtattaagcaatccggagaacctgtcaagatcgctgaaacgcaagcatagc

SEQ ID NO: 193353 - DNA, 399 bp, Glycine max
  unsure (1)..(399): unsure at all n locations
caccctttaaagtaaaaaaagaatcacttgataaanaagaactacgtaggtcgtgatttctcatcccaaaattgaggaatacgtatgagcaaagggaaacacccttgtcgaccacaaaaaaggggaaaaatataaaaagggtataaaaggatataaggacataaaaaggaacgtaaaaatcaaagtcatgtttgcacattcgattaaaggctgccgtcccttgnggcggacgtgtggggtgctaataccttccccgtgcgtaaatacaactcccgaacctttcacttaaaagttcgtagatcgcgtcttttnnngctttccgacgttttcctcaaataaacgttggtggcgactccgcgcgtattcctttcgtggaacacgcatcccgcgagtctcgcg

SEQ ID NO: 193354 - DNA, 499 bp, Glycine max
  unsure (1)..(499): unsure at all n locations
atccttgagtcacctgcggctgcaagctaagaattttgtttgttacatgcatnttcttcccaacctgtcagaaaatgagttttttttatgaggttaattcaacacanaatcgatttgtaaagttagtattacttttcacttatatcaattataacactatntttattctatgaaattttgatattttccattttttaactttntcatttggattccagatccatttttctagctctagctaaaatagaaagacgacataatttctacgaatagtaaaaatcgaaacaccaccaactttgaataaatttgattcactntagttaaaaaaagtgagcagggttacagcgaagcatactgtaaggaagagcatgatggcactacgtacactagagaatccagaaagccagaggcgttgatcccttnnnnnattccctacacaagtacaaaagctgggtatcccttggtttgctataaccggaaatacgttcccttagcctta

SEQ ID NO: 193355 - DNA, 348 bp, Glycine max
  unsure (1)..(348): unsure at all n locations
attctgacgcaaacataatatgcataatagctaatagcaaaacataaagagaaagagaagattcagcacatgcatttgatattgatataccccaaactcagggatacatccaacccttactctcccaatgatattntgactaatcaacacaacaaccaaccaccactaccttacaacaacaacctcaataggtgtacgatgaaacaaagcttcacccaaacatttatagcaacaacaacacctccatcaccattacaacacacacggttgtggctaggagataaattgtctaaaccacaacattacaccctgggtcatgggagagacaaaccaagtatctttcacctc

SEQ ID NO: 193356 - DNA, 484 bp, Glycine max
  unsure (1)..(484): unsure at all n locations
agcttgcttgtggagcttctatggatgctggatctttgagcttcaatgaggtccttcaatggtggattttcaccatggagatgcagcggaaggcaaaggagaagaggataggggaggcaccatccactatggaataagccaaggaagaaggagcttcaccaccaagaattgccttggataagaagcttgaagaggatgctttaatggaggaaaagaaagagagaaggggggagcgcgaaattgaaggaataaaagaaggaaagaagtggaactttgaagtgtatctcataagactttcattcatcacagttccaacaagtgttacacatgcttctatttatagactaggtagcttccttgagaagttntcttaagaaaacttccttgagaagcttctttgagaaacttccttgagaagctagagtttagctacacacacccatctaanaactaagctcacctccttgagaagcttcttgagaag

SEQ ID NO: 193357 - DNA, 342 bp, Glycine max
  unsure (1)..(342): unsure at all n locations
caccacatgacatgcattgcataacttcactgcaccagggtgacaccaaaatagatcatgtacaacaacttcatccttcaatctatgccaatgaatatatagatcacgttcaagaagcttcattagatattgcatttcagtatcacttcctctgattgaagaacgatatgcacttcttgcattgtaaatttgtttgattgtggtgcaaccgttggcattgtgctctntcaacgttagtatgatgnnnnttgagnanaccatngantttgtgatatnnagaataatattnttctcatccttagttaatcgcctagtgtatggatgtccaactaaagacttgac

SEQ ID NO: 193358 - DNA, 511 bp, Glycine max
  unsure (1)..(511): unsure at all n locations
atcctcanagtcacctgcngcatgcaagctngccttatattaaaagcgtttgttgcctcttacaaacagggacactataattctttccacgatacacaatgattgcaaatccctttctcactctctctactgccactaatattccaccactttctgcctctaaggtcagagctatctgatggacttcttccaggcttccattacatattatcttcacaagttcccgatacttccaatgaagatgcatattttcaaccgttccatcaaaaacccctcgtctacctgaagaataaagaggacttatcanganaaggtgttgttgtcaagtattttaaatagctctaaaggtttcattccaaaaaaagactaatcaactatctatggttgtgaacatcaaaaatcattttcaagaatcacctagnannnaaacggcttcatcatcaagccaatcctccgcagcatgtatntctcttctttactaataccctctntatctatntcttggtcttgg

SEQ ID NO: 193359 - DNA, 440 bp, Glycine max
  unsure (1)..(440): unsure at all n locations
agctagccgccacggagttttccgactatgctcttgtgtggnggaacaagctacataaggagagagcaaganatgaagagccaatggttgatacatggacggagatgaaaaagatcatgaggaagcggtatgtgccggctagttactcaagggacttgaaattcaagctccaaaaactaacccaaggcaacaagggggttgaggagtatttcaaggaaatggatgtgctcatgattcaagcaaatattgaagaagatgaggaggtaactatggctcgatttcttaatggtttgactaatgatatccgtgatattgttgagctgcaggagtttgttgaaatggatgatntgcttcacaaagcaatccaagtggagcaacaatttaaaaggaaggagtggctaagaggagttttaccaactttggttctttagttgaaagac

SEQ ID NO: 193360 - DNA, 438 bp, Glycine max
  unsure (1)..(438): unsure at all n locations
caagctttatgttatatgatatgactcttcacatttgaatntgaatttcaatgttcaaaggcattggtaatcgattaccaaaaacattgtaatcgattacagctttttgaaattaattggaacgttgtaaattcaatttgataactttttcaaaacaattttgctactagtaattgattacaacaatctgtaatcgattaccagagagtaaaaactctctggtaaacatgttttgagaaaaantcatgtgctactcaattttgagaaaaaanaacnnnncatacttatcttgattaagccttctcttgattcatgaatcttgagtcttgaatcttgatctaaattcttgagatcttgaaccngaatcttgattcttgactttaannnnnctcttaagtcttgaatcttcttgattttatcttgaactctgaatgtcat

SEQ ID NO: 193361 - DNA, 436 bp, Glycine max
  unsure (1)..(436): unsure at all n locations
gcttctcaaggattctacctagtctataaatagaagcatgtgtaacacttgtggtaactttgatgaatgagagtcttgtgagacacaactcanagttcaacttctctccctttttcttccttcaatttcatgctccccctctatctttctctccctctttctttacctccattgaagcatcctctccaagcttctaatccaaggctcatcttggtggtgaagctccttcttccatggcttattccctagtggatgacgcttcctctcacctcttctcctttgtcttccgctgcatctccatggtggaaaatcaccattaaaggacctcattgaagttcanagatccatcctccatagaatccccacaagcaagcttccattagtggtaatcagagcacaaaagcttcaagtaggtgcttcttanacctccattaat

SEQ ID NO: 193362 - DNA, 423 bp, Glycine max
  unsure (1)..(423): unsure at all n locations
attctagggctagccacatggttgaccacgatgtcaagaaaccattacgtgacatccattggtactagcatagggcttgtccctccatgtagaaagacgcgacagtgagacgttcattgtccgacacgcattggtagtcaaagaattgtgagattntccaagtagatcctggtcgtcgaacctcgggacatctaatttcatatgtggccggtgaggtagggaaaagggtggtgttagtgttgggggtgatgttagggaaggcagagtggttaacacaacaagtcgctctanaatagagtcaatnttgctattcatgatggactgagcttgggatacggaaccgagaaatgtggctaaaatgtctagccttgtgtgaaggcagtaatagccttttcaaggcgttcaatggttgcttatcgagtg

SEQ ID NO: 193363 - DNA, 343 bp, Glycine max
  unsure (1)..(343): unsure at all n locations
accattggaacaccttaagcagataagacaacactctctgatctgtcagtgaggggttggcttcgatgactactggatttttccttcttcatgttagcatagtacaatgacagcatccttctctgcattaattccgaatatttggtgaaaattgaatcattgagtatataatatgatgttatatcatggaaagtcaaatgcaataagccaaaacttttattcagcaaaatgataggacaatgaatacttgtagcaaaaacacggagaccgcttgctaatttgaacattaacctctntctttgttatgaaaccaaatctgaaagtagcaaaattgattaaaaat

SEQ ID NO: 193364 - DNA, 448 bp, Glycine max
  unsure (1)..(448): unsure at all n locations
agctttactaaattgttaagagaatgaggagtataagagaaacttaacagaaagtcaaagcggaaattaaatgcacagcggaaaggtaaagtgtagggaagaaggaaaaaaacacacaagagtttttatactggttcggcaacaacccgtgcctacatccagtccccaagcgacctacggtccttgagatttctttcaaccttgtaaaaatccttttacaagcgaagatccacaagggatgtaccctcccttgttctctttgaacctagtggatgtaccctcctgtcttaccctaatttcgtccggagacctttgctagatgacatgcgacctttctttggtcctcgtgaggagctttgtacccatcattaggcaatttgtgaaaatccaggacatgccgaanannnaaaaaatatagatgcacaatccgtaaagtttcgtgacacac

SEQ ID NO: 193365 - DNA, 474 bp, Glycine max
  unsure (1)..(474): unsure at all n locations
agcttctatatgagctgaaccatnntatcaatatatcatattgttgagtntatncagaanattagagtttatctcttttatcttagtgagagtgattcttctaaattcttgagtgattcaagaacaccctggttgtatcagaggactntcacaacctttgtgtgttgccctcgccggaaagagagattctttccttcctttcatcttcaaccttgttctttcaaaccacaattccagaaaatcgacttctgcccagaattatctcgtggccataactcctcgtttacgcactcaaattaagtgattcttgagcctaaattgaatttcaagacgagacctttcacctcgttttggaatcacctcatttggagccctgtagcttgagttgttgccatttngtatttctcgcccgccaccacttaacctacgttttctcatctcattattcncatttatgccaagaaccactctatt

SEQ ID NO: 193366 - DNA, 483 bp, Glycine max
  unsure (1)..(483): unsure at all n locations
agcttgttaatgcagagagttgttcactcaatgtgcaacaaagattatatccgaaacaatagtattttaatcttgtgaacctaccacatggctttcatttatgattcctgaacctaccaaggaaatagctaggactaaaaaagcatatgagcatgcagtgttttagtgtttgcacatggtagctttagaacaatatgctgaaaacaagctntgtaggctccaataattttcacccgtgaaggttgcacatgcatcaatagtataaaagtaaattggtgcgtaagaagcatgcacatgctactcacagttggtatatcatgaagcatgcttataggtacatgaaatgatatatgagaccgtgaaatgttgtcattcacagtacctatctcgtgaaggtatntnagaagcatgcttatacggtcgtttatggtgaaatgatntatgataccatggaatcttgccagaaataaagtagtcaataat

SEQ ID NO: 193367 - DNA, 425 bp, Glycine max
  unsure (1)..(425): unsure at all n locations
aagcagaaggatgcgataaaaatactaagaatatgttgaaagtgtgcatagaagaggtgaatgctggaaataaacctcacaaccacttcactaagcttggttgggcaaatattgcagaaaaattcaataaggcaacaaatttgagatatgaatataaaaaattaagaaataggtgggattctttgaaaaaagaatgacaattatgggctaagcttattgtgaaggacataagtcttggctgggatggggagaagaaaaccattgcagctagtgatgaatggtgggaagccaaaattcatgtatgtattattcaacgaaaatagagcttttatgcacgccaatcttntnngtttttatncttatgtgtgattcttgactctgcggccaaaattgcagttgcagaatagttttataaacttgcgtct

SEQ ID NO: 193368 - DNA, 464 bp, Glycine max
  unsure (1)..(464): unsure at all n locations
agcaagcttgagctaatatgttctatagacactctttgtttctgaacttcttctttcacggcaaagtacttcaattccatatgcttagcacccgtagagtacttgtcgttcttaaaaaagaatattgttgcggagttatcacaatacattttcagcggcctagcaatactgtcgacaattccaagccctgaaataaagtttcgcagccaattagcctgaattgtagcctcaaaacatgctacaaattcatcttccatggtggatgcagcaacaactgattgttttgcactcttccatgatattgctcctccggctaagagaaatacaaagccaagagtggtatttcttgtatccacacatccagcaaagtctgagtctgaatatccaatcacctctangtgatagacctcttatatgtaagcatgtggtcttttgttccctgtaagtatctcaaaactttcttt

SEQ ID NO: 193369 - DNA, 370 bp, Glycine max
  unsure (1)..(370): unsure at all n locations
agctttaaacgggtaatgggcattttcttatgaagagcgacattcgttgatgtgtaatcgattacaccttaatggtaatcgattaccagcgactgatttcgaaaaatacatttccaaatgtcacaattcttcaagtgatttgtttctgaagaattttttaaaaagtcacaacttttttttaagtgactggttttaaagaaattgccaagagtcacaagctttgacttgagtcatcaagagattataaatacgtgaccatggcatgaatctcaacaattatnaatnntttttgaatcatctatctttcaatctttttcaacatcatctctcatccatctttgaatatcttntcaatcatttctctttatct

SEQ ID NO: 193370 - DNA, 455 bp, Glycine max
  unsure (1)..(455): unsure at all n locations
agcttacactaattccctcatgctcattattgttctatcttgggatttcacttccaggactaacactcccaacaatgtaatgacgtaaaaatctcacttggtacagcagagacatctatatgttatttccttattcctattcacaaaaaaagagagagaaagagatgggaggatcaaaggaggaacatgcaaacctgacacaattgcatcatccatgaaaaagctatgtcagtgtagcattccctatcaactaattatgggcagttaaaaatgtataatcctctttgtcttanggcataactcgattgcagtgaagggagctcagacaaagatttcaactgcttgtagagtgtaactttaactgaacaattggaaaacttttgaggtggcagtgtccaaaattgtaccacttaaattaccttttaacaactataatccatacatcaggattaact

SEQ ID NO: 193371 - DNA, 416 bp, Glycine max
  unsure (1)..(416): unsure at all n locations
tcgaaacctgctgcaccacatgctcctcaagcacatctagcagaatatgaagaagtgatagctgttgtggtagtggaggcaaacatggtcgacaacaaggtggactggattctagataccggtgcttctaaacacttatgcgccaacaaagagctcttctaccagattgaggatgctgatgacggacaatgcgttttcatgggaaattcagctacagctggagtgcttggtaaaagaaagattctctttaaacttacttctggaaaaacattatctttgagtgatgtcttgtatgttccctctctgcgtaggaacctaatttctggtagttgtctaaatagaactncctaccaatcggctnttgaagctgacacagtattataactataaatgatgaacgctatggtattaagttc

SEQ ID NO: 193372 - DNA, 387 bp, Glycine max
  unsure (1)..(387): unsure at all n locations
gcaagctagtttcgctttttagaggtggacgacaaatctcacatattttctttgttttcaatctactgctctttggtgagacttcttgtgattagatgaatntcttcctcatgtgtttgaagattttctgtgactatttagggtagtggtcagaaatcagaaagctaaattgtgtatctccaagaatatgcaacctactctgcctaattctatctgtgatctagttggattcttttattgctgacttaagaaagtatttgagggtacctttactccactccaaggtaaccaaaaatacttaccagtatatcatccaagctactcgcaacaaattatcctcttggagagcaaactctttataatttgtatgtagggtgaccctggctc

SEQ ID NO: 193373 - DNA, 292 bp, Glycine max
acttaaataatcgacttgcaccttcaaattataaaatggaattcaccacggggtaccagtgggccataagtaataaatcactgtaatcggaccaatagagaacgtcctaatcaggagaatccccatcccctgtacctggaaaaataaatgtgtgttcgtttaaatcttaaaccattcattatcttttaagtcttctttatcaatatcactttttccgttgtttactagaagaaaacaagatgttattatgtttaatttacaaaatatgtttttaacagttgagatctacaca

SEQ ID NO: 193374 - DNA, 483 bp, Glycine max
  unsure (1)..(483): unsure at all n locations
agcttatagctgacttattatccacagaaagcttctctctatcactctccttgttttntaattcctgaataatgagccaaccagacagcttggcaagcactcattgcagctgcaacatactcagcttcacatgttgataaagccactatggattgcttcttagaacaccacgatattggtgctgcaccatacatgaatatgtaacctgtagtactctntctgtcatctctgtctcctccccaatctgcatcagtatatcccactaattcctctgagttgctgttatctttatttggaaatagaattccagtattgatggtcccttttatgaaccttagaatcctcttagcagctaggagatgaggaattctgggtcttttcgtatatctacttattannncnnncaccattccacatcatgtcttgaatgacacaagtatctgagagaacccaacaatctgtttgaactcagtttcatcaact

SEQ ID NO: 193375 - DNA, 477 bp, Glycine max
  unsure (1)..(477): unsure at all n locations
tgcaagcttgtcagcatatgtgtgatagagtgttttattgttattttgnncgacctacagcattccacattcgtagatgtgtgattctatgactcttagcagttcaatatgctacagttttacttgttcttgtgatcgtcttgcattatcatgctacaatttgtaacttgcttaaacaactgtttcagcctttcagttaagatcaggatgttttcattgcaggtgcagagacaaaacgagaaagctacatggtgctttgattctgctatggaacattgaggcaanagctaggatctaaaaccctgtgactgtgacgctatattctcttgctagcacctttgcagtgagagtgatgtctnttataccacggtgattcggagaacggagaatatgctctttgngnnncgagatcacataccctccaaccgtctaacttagttctcctttcttcttcccttcattccaatctggtaccta

SEQ ID NO: 193376 - DNA, 372 bp, Glycine max
  unsure (1)..(372): unsure at all n locations
gcttagggtgctcattgactccagatngcttgtttatattttcataaatctgtatggtganctgcagaagaacatagaccacagactctngcagcaggtgtagatttctgattcatggcaagctgagttactaagttgaccaaggcatcaagttttccttcaagctttttaattttagtaaaagaagatgaatctgtggccaattcatgcactcctctaagaacaatagcatcatttcttgcactgaattgttgggagttggaagccattttctcaatcaaattcctagccttaataggggtcatatcaccaagagctccaccatagaaagcatcaatcatactcctctccatgttgctaagtccctcattg

SEQ ID NO: 193377 - DNA, 454 bp, Glycine max
  unsure (1)..(454): unsure at all n locations
agctntggaataacatgaaatggaaatttggccttcttccagtactgagaagaaaaaaaaaattgcatgatgatgggattgaaagaaagaaaaaagataacattatgggagaataatttcacatcgtaattgtttccatccaagtagtaacagcatcacaaatacatgcctcagtcattattggagcaatttctttttccatacactctcttactttcttcctaatggcttgctcctctgctgtcaataagttgtccaattgaaaataatctgaagctggtacttttaaacatcaagacagataaaaatgaaagtgaattcctgaagcatatcttgtttaactcanaatattaaacaaatatatatatctgcttgccaagtaatgcacatgttacttgtancattcctacataatcaaagaaatttcttaccacaaggaggaaacgttgatgct

SEQ ID NO: 193378 - DNA, 462 bp, Glycine max
  unsure (1)..(462): unsure at all n locations
agctntagcctntaagctattcaccatgttgctccccttatctctattaccacctgcacatatggccaacacacgacccgaactcaagagagagacacccccataaaattccaaccctactctaacgaccaccatgacggataatgatccactttgacaactccaagcccgcatcacagaaatagaagaacgccatggggaagaactcaaaaaaccgaaggccaatcacgacgaattggaggtcgcatcagaagtccccaaggagacgagcactctattcacatgattgacgaacatacccagggagagtcgcagccctgagaaactagcaataccatggacgatgacaacaactntcatgcacactgacacggtagatgactcgatgacttacttncactgacaaatcatgaaggtcgacctatctctatggtggaaaccactcaacctggagtggtatga

SEQ ID NO: 193379 - DNA, 456 bp, Glycine max
  unsure (1)..(456): unsure at all n locations
agcttgtgtgtagcaagctcacacattttatattgcagactccccacatttaaattcttaaacaaggaaggaaatatcacttctgcaacttgaaataaaggatgtcccatctggaaatggtatagtcgaattttctctttgctagtcatggaggattcagagatgagagagtggctcctggtacgcatgttaagatcctttatgtagtacaggccattccattctttagcatatccaatcattctccctgagttcttgtcctgtaatatacaataattgctataaaaaacaacattacatgagagatcttttgtgagtttttgtctacaaatcacattggtggacaacttangaacatgaatgacattttttaatgttatggatgcgcttatttggacccctcttcgcctgctacagctataagggttccatctgctatggaaatcatactttttc

SEQ ID NO: 193380 - DNA, 458 bp, Glycine max
  unsure (1)..(458): unsure at all n locations
agctgtgccaaatagagaaagcccatttacgtcactgaatccttgtagaatggcgcgtatcaacttgaagacatggcaggaagggtcatcactaggacttggattgcaacttgatgtgatcctcactaggagcggatcgcttgatacaggtcacagagtttggatgacgccacttccagagagggaaaataagtcagggtagatgccacaaggattaccttgataagtctgagattggttcaacaaggaacccagagggaagctctcacaaaatatttgcaaaatgccacaagtccccttctattgaaaacgagttcaatacatatagtgtatttgaggtgcagctggaaaggcaccaattttatttaatttataattaaaaataaaaatagaannaaacggcatcagccttcaaattagtttgggtattagcaacaattaagaaatgtggactacct

SEQ ID NO: 193381 - DNA, 445 bp, Glycine max
  unsure (1)..(445): unsure at all n locations
agcttggtggcgtaaaatcagaatttttgtggttatgtnggaagaagaagaagaatttatttcatttgccacaccaaaatacaagagtatgatcccctatttatactagaatagagtgactactcacataattgcttattcaagaatactgaatgctcacataattgcttattcaagactttgtaacttataactttacaactttcatctttcacaatttaaggctcataaaacttattattatttttctaattaatatctaacatcctcccttaattggaaaaattcttctgcacaccaagtcttgctctgtgtctctcaacctctccttttgcattcttcttgattttgaacancccattgactccaatggcttcatgaccttagggaagagctcgaaaccccaagagtcgttcttctcaatggctnntgattcttcttccat

SEQ ID NO: 193382 - DNA, 469 bp, Glycine max
  unsure (1)..(469): unsure at all n locations
agctntgcaacttatatctcttccgcaagcttttctctngccaaactccaggaggataagttggaggaccattgccgcccttaccgacctcgtcacacacccatcaccaccactccactaccacacccacctctcttaccttcaccacccaacctggcctccaccccttcccattccaaaccccaagttaaacatctaaccccagaagaaatggcccgcaaacgcgaacaaggcctatgctataactgtgacgacaaataagggcccaaccatcgttgtcgcgctcatttctttttgttgattgccgacaatcctagcaccactatcccactcgaaacctatgttaccaaaccacctatcccaccttcttttgacccaacccatggccctaaagtttcaacaccctttccggtaccactacccctgaagcccttcaccggtacgggtctattcaccatcattgactaac

SEQ ID NO: 193383 - DNA, 473 bp, Glycine max
  unsure (1)..(473): unsure at all n locations
agctttcaacatatgtcttcacaaataatcattatacagcagaaaactaacaaaactacccctcatatctcccagaaccccatacccacgaaaatcaagagggaaagaagtccacccaaacctgaaatttcaaagtcccactcgtagccacgcacttcacgactccaaaaatgctctcctttcacgatttggggcagaaatggtggccaaaggttgaagctttgcttgaagcttcaatggagaatgaagaagaagaaagctacgtgagagagggagagaaaaggcttctgaatttctgctttggctgagtgaggagagagaaaagctttntggttntaaaataaaaagaggtttccctttcttccaattatttattcaagctctgccacatgccctatttgatcggagcaaaagggcccactttctctttttgactgtgacccatactcagtcacaaaagtgagaaaaatctg

SEQ ID NO: 193384 - DNA, 403 bp, Glycine max
  unsure (1)..(403): unsure at all n locations
ggatagtgattacacttagatttttgtgttttttnttctaatcaatattttggaagaaaatttagatctaaagggttcaacacaaagaatatatgacntaaaaatgatagaacctaaaatcaacaaaaaacatgattcaatagtagatctataaaatttgaaccatagaaatgcaagaacaagtgtagatctaagatttaattggtttacttttttgaatctactctaaacagcaccaaaccacaagacaatggaagatatcatggagaataagatgaaaaaaaggaattaagtgaattgccgacaaaaagatgaggaagcaaagacatccctaatgaaagtctgatccattgagaagctcatggactgcagctagacttttataatggatcttactttgaaa

SEQ ID NO: 193385 - DNA, 258 bp, Glycine max
  unsure (1)..(258): unsure at all n locations
cgagagctttcgtggtcaatgtcgagcatctcgacatattatgcgctcgaatcggacatccgtgtgaaaagttatgaccatttgagtttctcgagagcttctgtggttcaattccgagtatctagacctattatgtgcccgaatctgaccttcgtgtgaaaagttatgaccatntgaatttctcgagagcttcgttgtcatttccagcctctcgacatattatgcgcccgacatcggaatnnggtggaaaagtatgac

SEQ ID NO: 193386 - DNA, 473 bp, Glycine max
  unsure (1)..(473): unsure at all n locations
gatcttagcactgagctcagctgaaagtgattgatatgctgcctctgtaaaagaagaattagcttattgtaagcattgaatcatgtaaatttagtccttttacagtaatgtttttgctggttctggtagaagatgttgactntccttgagcaagtatcttgtttgatattggaatatattttcagagttcttcatttgtatcctgatacttcatagggttatcgtggacaactaacttaggttcataatgttgtagataacagtttctaaagatgacactgtcattcttgacggagcaggtgacaagaaagcacttgaggaaagatgcgagcaggtttgagttgatttatagatttggttntcccatggtattctatttccaccctangatctgtaangttaatgatgcacctgacttgtttggatgaattntataaacagatangtctgaattgaaacacacctcagatatg

SEQ ID NO: 193387 - DNA, 485 bp, Glycine max
  unsure (1)..(485): unsure at all n locations
agcttncttctctctatctggcccttacttagtatctttctctttgacatgtagggaacatgaagaaaacaattgtcaatttttgtntcaaatagtactctgacaactggatactacccttcatgacaattgactaagtctctaaagagcaggtgagcctaatatgccatctgcctcacaataattttccatccaagggcattnttggaaaccccccaaaaaatagaatcaccaccccaccaatcaccattgtatataaagaggccttcctcatacaccanaccacaccatctcacagaacctctgtcaccaaccctccctagtgtcatttcacttcctttcctttaaacactatggattatcaacttaaaaaccaaaatatagcaaccatgactcacaacctannactctctactatctagttaagcttactcaattattcgtgtcagtatccgtgtggtccttcatcttctcaccttcttcct

SEQ ID NO: 193388 - DNA, 452 bp, Glycine max
  unsure (1)..(452): unsure at all n locations
agcttcgccatcgaccaaggccttgtttttgtttctgcctctgnttccggctccagcgtcagctccagtggctcctacgatgatcaccctcagattaatgcctccaggtttctaattattatttgttactcatcaattaacttaagattcaattcaattcgattggatttgattcgtttaatttaccctattttttttatttaatttaattaaaattaggttctccggttattaccttaatcatttgatcacataaagtgacttctactccggttcctgagactctctctctctctctctctctctctctctctggctggctatcgcaaacatcattgcatactttacttgatttatgagtntnccnttttagttttggtcagaccccnnnnnnnnnncccgcactgcctcctgttactaccttttttcaacacgattgattggttcacttt

SEQ ID NO: 193389 - DNA, 360 bp, Glycine max
agctgttagtgctgccccacagagcccctcggaacttggtccggtcgtgctcttctctacgagccctcttggtctcttgttccaaggccttggcagtagctatatttgtatctcttagttcggcattctcctttcggattttaagagctgctgatttgaacctttctttgactgtttgggcttgctcgagttctgccctaaaggcctgcacctcttcgtcttcctccagtgcctcaacttcctcccttttagcggttcaaaaaacacaggagccaatctaaaccttggatgtgggctttcaaccaccttcggtagccaccgataggcccattgttactgcccctgagttctttatccttc

SEQ ID NO: 193390 - DNA, 466 bp, Glycine max
  unsure (1)..(466): unsure at all n locations
gctttaattaaggaagagcttgtttatgttttaatanagtttggcttttacatgcccaactcccttgagtggcatttgtattggttgttatcttggttgctccatcatagtacatttgatattngtattgcatcatgcatcatcatggtttgtgtgaaaaaagtttataagttagaaaagtttctttagagacaaaaattctctattttaatcgattacttgtagaagcaaatgactttggtgtcttgatgatgatcatgatgatttgatgcaaatgatgcaaatgggctcttcaagtttaaattcaagactatgattcaagaatacaagccacaacatcaagatgatcactattatnttaggaagggaattcttaattgatatancacaaggtttcccaactcatgcatgttaaacagtgtttttcaagagaattactctctggtaatcgattactagaggatgt

SEQ ID NO: 193391 - DNA, 469 bp, Glycine max
  unsure (1)..(469): unsure at all n locations
agcttgagatgaggaagtgtagaagggtgaaacttcctgctnttattcgttgaccacagagtggtacctggagatatgtcgcgggggtcaggagaccttgtggacatcaggtggggtgctattgcccaaaaccaagcttgaccaatcccgacccaacctggacatagtcagtcagtgagaacctgttatgtacctaagcaagcgagctcctaacagtcaacagataaaaggaacaaagaccacaaagcaaggaggcttgtgtggtggctggccagttgtgaatcttgtgtgatatatgggttatggcctctggtaatcgattaccaagggtgggtaatcgattacaaggcttaaaaatgaagacaggagactaagatggtctctggtaatngattaccacgcgtgtcatcgattaccaggctttgaaacanagcaggaactaggggagctttataatcgataccaactc

SEQ ID NO: 193392 - DNA, 392 bp, Glycine max
  unsure (1)..(392): unsure at all n locations
agctctattgtgtcttgtagtgagaaaacaaatattattatagctttagagactccgctcgctaagttttattttgatgatgccatgtatgggtgaatgcacaaacatgtaagataccactacttcctatgcgcaataagataattacagagataattaatgctgaaatagttatttatattcaagagaattacaaagaaaattaatgctcaatatatttacaagagaacaattaagataccactactttctatgatgcattgaacttagctataacaagtatntaggcaactttgaaaaataaatattgaagntcttactccctccggtctcatatataagagacaaaaacgattcacgctaactaagaaagntagctaaccacatgcaat

SEQ ID NO: 193393 - DNA, 469 bp, Glycine max
  unsure (1)..(469): unsure at all n locations
agctntannaattgaattntaacgtttagaatctgctggtaatcgattaccatatatgtgtaatcgattacatagtgcaaattttgaattcaaattttaatagctgttgtaaatcgtttttggccactggtaatcgattacatcctctggtaatcgattaccagagagtaaatctgttgaaaaacctttttaacttagatttcttggccaaaccttttgcgacttcaattggaatttccttcctatttaatatacccttcctaagactctagagactgtcttgatcattcatcttgaatatctttgtcttgaataaatctttgagaagcatgtgattcaagtaatcctttggcatcatcaaaacattcagcttgatcctttgnntacatctccctcttcttgatgatgacaatacctgaaatcaaaccaagctatatacaagatgatagtacgttcacacaacccttac

SEQ ID NO: 193394 - DNA, 408 bp, Glycine max
  unsure (1)..(408): unsure at all n locations
aatggtgccagtgaagtattctggcaacttccaccacaagttatgttgcaaagaccgacttctcctccctctgatggcagtgttcccaggctggtaagcttttgaattgattactgcaatcagctgctctgggatgcctataagccacatttgacacaagttttgggaatacatcttatctggagaaaggaagcatacgaagaggcgattgttttctgccaaatatataacgcaattaaggaggttgcggtaaatntggattcttggtcaaaggcctatgaagatatcacattgtcctacctttttatgatgaataatcactgtcatttctgcnnntcacgcgcactgcgcttcgaaatatgatgggagattctttggtaaagccacgagcatataagactatatgct

SEQ ID NO: 193395 - DNA, 473 bp, Glycine max
  unsure (1)..(473): unsure at all n locations
agcttggataggatatgagccagtggaagagagtttttctgactttgatgaatgtatgttgtattgataatcggacagataggaatgaggatgggtctcgtgagttgaccggcgaggagaaagaagttgatgggagattggcgattcatttgaggaaggaggagacgtggttgatggtgagtgaaagaaaggctcgttgaatggaggattacanacatggctactgagtgaatttggtaaaggtgatgaaagggatgtggtctcaaagggaacataaggtgtgttgnnnggtatggaaagtgagggtggttaatttactaagtcactgatggaatcattacgaagaggacgtgattgttggtttggattgataagagtgatgtgaattgttaaactagttcnnnccatcacatctctagaaggacaatctcttttgattaaatncaaatcacatatccttgtgcattaaaaaa

SEQ ID NO: 193396 - DNA, 384 bp, Glycine max
  unsure (1)..(384): unsure at all n locations
aatccagtttttactgttcatgcacactgttcacgtagcaataaaattcatnttctgcaatntcgttttctgcttcaatctgcaattntgttttatgcttccaattgaaatttcattttctactgattaatggaaggctaagtctccaacattgttttctcttgaagatcaagcacagctctctttgagggttttttatcactattgaattctgatcagtttttcctcttcnaccaatgctctgtatntgttgctattaatccatgcatgcttagtgcttgattaattgtctctacacttaatttacgttcatgaaaacctggtgtatgtgctgcttaatcgcataatgacagccttatgttatatttcgcttagaaattaatt

SEQ ID NO: 193397 - DNA, 411 bp, Glycine max
  unsure (1)..(411): unsure at all n locations
tcatgagagggtggatcaaatggagaatagagatcataatgaagaagaaaggaggagaagagggaatgatggtgttcctatacaaaaccgaattgatggtattaaactcaacattcctccatttaaaggaaagaatgatccggaggcctacttggagtgggagatgaaaatagagcatgttttctcatgccacaactatgaggaggaccagaaggtgaagcttgccgccacggagtttttcgactatgctcttgtgtggtggaacaagctacacaaggagagagcacgaaatgaagagccaatggttgatacatggacggagatgaaaaagatcatgangaancggtntgtgccggtacctactcacgggacttgaaattcaagctccaaaaactaacccaaggcaacaag

SEQ ID NO: 193398 - DNA, 471 bp, Glycine max
  unsure (1)..(471): unsure at all n locations
gctttgtgggggggatccgacgttagttgggattcacaataagtctcgaattcagcaaggggaattctatgcctatggagtgaaaacagcttcaagttagaaaggaaggtcatagggcaaggcttcataatgctgatagggaaatggcaccaggagacacaaccaattcatatcattacagtatactcaccgtgtgatattcagcaaaaaagagtcctatgggaaaatattaaacagctgaaaattcataatcaaggggggctttggtgtatcctgngtgattntaataatatcagattggtgtcagaaagagtgggcaattgcattaggggttggggagaaagccacataaatgagtttaatgagtggattggagacttggaggtccacnaaataccatgggnggtaatcacttcactttggtttaagccgaatggtaccgctaggagtaagttggacagattcctggtg

SEQ ID NO: 193399 - DNA, 405 bp, Glycine max
  unsure (1)..(405): unsure at all n locations
agcttcccaccaatggtatttgaagtttaatgataccattattttctttacatttaaagaaaatactgtttatcggtgcatgtatcggaaggtcagtgagagtaaggctattttctaattatgtatattgatgatatcttgcgtgaagctaacgatcttggtcttcttcatgagactaagaaatttctctctaaaaactttgaagtgaaagatatgggtgaggtaagctatgtgatagggatagaaatattccataatagatcacaaggattgttatgcttatcttataaaggatatatcgataaagtactatagagattctagatgganaggtgtttaacatcacctattctaatttagaaatgagacanagctagtcttccacaatgtcctanaaatgatgtg

SEQ ID NO: 193400 - DNA, 462 bp, Glycine max
  unsure (1)..(462): unsure at all n locations
agctggaatccaatacgttcagcatgcttttatgtatagtgctagtgtataatagcgttgtactggtgtcacataaattccaatcttttcaatatatttagcagcactgctctaataaaaaagatagtatactaattagtctataatatgagttaagaaaaatttaatatattagaaaattaaataaacttaagagttaagaatacatctatgtgtataaccacctgcaaagtcggtggagaatttcagcttaattggtattgaggcattgtgtcaagtatcagtttttgatacaacctctaagaaactcgaggttgcactcgaccagcaagatcacattgcatctaagggattcagctataacagaaatctcttaagagtttagactatgtgtnttataccaggtatcgctctcaaggaacagttgcaacctgataaatggcaactgaattggcatatata

SEQ ID NO: 193401 - DNA, 388 bp, Glycine max
  unsure (1)..(388): unsure at all n locations
agcttcagctttgtccccaaagcttcatgtagactctttcaaaatctcgaagtgaaccttggatccctgtcagatacaatactagaaggaattccatgcaaccttactacttccttgatgtacaactccacgagtttctccattctatacttcatattcactgngataaaatgagcagatttggtgagtcgatcaactatgacccacacagcatcatgtccacgactagtcttgggcaaactagatacaaaatccatagatatgctctcccatttccattccggaatctccaatggcttcaattctcccgatggtcgctggtgttcagccttagccttttgacatgtcaaacatnctgctacatattcaactacatctttcttcatgc

SEQ ID NO: 193402 - DNA, 476 bp, Glycine max
  unsure (1)..(476): unsure at all n locations
agcttccaacaagtggtatcagagctctttagcttattgtggtgctccttanacctccactatttttcagctttactttctcctccattgttgtttcttcgtttctctccatgtatctcctcacgtgtcttgtgctgaatgttgttaacataattttttagaagttccaccaattaagcttgctatagaagctagatttgattttctatggttcaaattccttgttcttgttcttgaaccatgaattgtgttgagtttaggttcctttgagtattatattgtcaatttttttggctgaaacctacaccataaaattcttagaaaaacattaaagtagaagaaaacctcaaaaatctagaatgacatattcacctattgtagttttgtcataaaagtnactctagtcatgacactcgtcacgtaagattccttatgttgtgttgaaatttatttttcttgtttcttcgtctaactca

SEQ ID NO: 193403 - DNA, 381 bp, Glycine max
  unsure (1)..(381): unsure at all n locations
agcttgtaaggttaaagtctcgcgattgtcaagttgcncttcaacaatngnnnagccgggctatacgagacatcttgccaaacaaagtcaggttagccataactcgcctgtgctttttcttccatgttatatgtagcaaagtcattgatcctgtcaagtttgatgagctggaaaatgaggccgcaattatattgtgtcagttggagatgtattttccccttgctttctttgacatcatgattcacttgattgagcatctggttagagaaatcaaatgttgtggtcctatttatctacggtggatgtacccagttgagcgatacatgaagatcttacaagggtatacaaagaatctatatcatccagaactatctattgttg

SEQ ID NO: 193404 - DNA, 419 bp, Glycine max
  unsure (1)..(419): unsure at all n locations
agcttaatgtatagcttgtattattgagntattattgacagcngataatacttggtgaaattaatgaatttggtggtttgccaagaactaaacatagtctcgtagttgagaggaaccaatataaatcttttgtgtcttattctatttattctttttatgttatttgaactaacttaggttttgaatttgatctttacttttgaaaaactctattaattttacaaaagatctaaaactgtcgtctaatctatcttgagaaaaattgttattttattttcttaagtgttacttcatcatacgataactntgttattttagagaaaaaaaagttttaaatttaataaaaaaacacaatttaaccctatttcttngtaatattgccttnnnactccctcagcatgaaaacttcattcattgag

SEQ ID NO: 193405 - DNA, 462 bp, Glycine max
  unsure (1)..(462): unsure at all n locations
agctagtaggattatggtgtttccatcacatgtggtactaggtggcggtcgggcgatggtgcacaacaagctttcctcatccacaatgcgcgcataaacccaccatcccctgttgcccacctccaactgagctcacgtactcccacgtagcccatatcctcgtttctctcaacaccgggtccccatcaatcctctcaagcttccacaacatccaagcaaaacaacattcaaacagcacaagctatcacagccaagcaaaacagagcaaaggcagaaaactctgctcaacacatcaaccaaaatcacagcttttctcacttaaagaccacagtaacaattcctttgatccaattcgttaaccgttggatcgactccaaaatnttactggaagctatagtgcataagcctacanntttgaccgtgggatctactagcaaacatccagaactcattctgtactac

SEQ ID NO: 193406 - DNA, 431 bp, Glycine max
  unsure (1)..(431): unsure at all n locations
aacagccttctggaggaatcttctggagggcccaagtgggcctggttgctatttgcacccncatttttactaagtacaccccctctgctttttttgtgattcttttntcgtaaagntacggaaacttacgaatttcgtaacgatacttgttttctttctgtaatgttacggaaccttgcggattgcataatcatcccctttttgacttacggaatgttacgtaacctcactaattgtgcaacgatgcttaacattgatttccggtgtgtcacggaaccttacgaattgtgcatcaatattttcttttgttttttggcacgtcccggaatttcacaaatagcctaatgctgggtgcaagcaccttacaaagaccaaacaaaagtcgcatgtcatcaagcaaaggtccccggacgaaatatggtatgacaact

SEQ ID NO: 193407 - DNA, 319 bp, Glycine max
  unsure (1)..(319): unsure at all n locations
gaagtgtcctctggaagcgcatcttttttcatgtccctaatctcctcgaacatcggggttgaaagcttcagccctcgggccaagttgcagtactgcttcttcaccggaggcttgtactcggagatgctggctatctcattcaccaatttgatcaccttgctcatgttcttaccctccatgctcacagatcccgctatacaccaccgctnnannnngattgttggagatccaagtcacggcgggtcatattcgttcgctcgtctcagacactgcagttttaagagaaggatagatagatacatagagagaaacgcataat

SEQ ID NO: 193408 - DNA, 438 bp, Glycine max
  unsure (1)..(438): unsure at all n locations
tgcagctcatccttgactatatggataatatattttactaagtgtcccattngtctaaccaaataccaatatattaaaaaatttttaagagatttattgaaaaatttttaaaagaggattattttaaccaaacaacacattactcaaaaaaattaattttaaaattaaaaaataataatgatattaccaataattttaattttaaatttaaagtttttttatttttaactgtaattntaattttaatggtccctatgttagccctctccaggagctcaactagatagtngtgaaaattaaataaataaatccaacaaatagttaattctttaactcgtgcttagcttatantttatgtgattcannatgttccaacttntataacttaattgctcatgaacgtgtaagccagaaatcaaattagtgctctttaaatct

SEQ ID NO: 193409 - DNA, 367 bp, Glycine max
  unsure (1)..(367): unsure at all n locations
acctgangctgcagctaataccctacatgaataaagccactctcttgtttttccagcgttcagaaaagacagctggctgaataagtaatgctctattgaatgaaaacaaaaagctggttatagtgatcacttgcaaataaaattacagatggaggagttctattaatacacttcttcaaacacagcctcttttattggttaaaactttgttgaaactacaaaattaggagtgctaggacccacgaaattgccattcccctanattttaagaaataagagaaagtgagatggcacgaccgngnnggatagcgngannncactctttcgattacagatgacatatctatatatatgtatatatatatat

SEQ ID NO: 193410 - DNA, 363 bp, Glycine max
  unsure (1)..(363): unsure at all n locations
agcnnttgcagagaagagagtnatattctttttatggttcaacgcctcacacgatcttctttgcttttatcggttaacatgaaccgctcaaaagcataaaatcaacccataactttactgctttcgtaagaactacgtaagtctgatttcctcattgcaactgaggatacgtatgagcgagggaaacacccttgtcgaccacaaaaagataaaaaatacaaaaggcgttaaaagacataataccatcaaaaagggaaaataacacatattgtagacatgatntngcatattggattaaaggctatcgcccgttgtgacggactcgtgaggagctaatacctttcctgtgcttaaatcatctgc

SEQ ID NO: 193411 - DNA, 465 bp, Glycine max
  unsure (1)..(465): unsure at all n locations
tgcaagctntggaatatgacaaacaagggttaatggtttatttattccattatgcatncagactggtatagtacccatgccaactgtcttacaaggagcattgttacccaccaaaacattaccaccagatttcttctcataagtcacgaaccagttgtgatgtgggctcatatgataagaataacctgagtataatacccattggtcagaataatgttgttattgatcaacaactaagactaccaaatcattttctgatgaagaatcactttgaacaacgactgcnacataatctttcttgattttcttaagacaatgtttcttccaatggtcaggttttttgcagtacttatagatacccnttggatcaaatntgcccttcttgaattctnaggctttctnnntttctgccctcttgcagaactggttactgatatattaaaggcaaagacttcatcaccattt

SEQ ID NO: 193412 - DNA, 479 bp, Glycine max
  unsure (1)..(479): unsure at all n locations
agcttggaaggatgcttcaatggatgttnttattttatagagaaagagagaggggggagcacgaaattgaaggaataaaagagggagagaagtggaactttgaagtatgtctcacaagactctcattcatcaaagttacaacaagtgttacacatgcttctatttatagactaggtagcttccttgagaagctttcttgagaaaacttccttgagaagcttctttgagaaaacttccttgagaagctagagcttanctacacacacccctttcataactccccccnnccccgtgagaagcttccttaagaagattcctaaagaagctagagcttatcttcacatacctctcctatagctaagctcaactccttgagaagagaaantatgaacttttnnnnccccccctataatagcgaagctcaccccatgacananaacatgaaaatactaaanaaaagtccttactacaaagactac

SEQ ID NO: 193413 - DNA, 353 bp, Glycine max
  unsure (1)..(353): unsure at all n locations
agctngagaggatagatggagacctcttgttgttatatacnangatatgggctacgcggtagtacgtgagctcacttggaggtgggcaacaagggatggtgggtttatgcgcgcattgtggatgtggaaagcttgttgtgcaccatctcccgaccgccacctagtaccacatgagatgggtaccccataatcctacaagcttgagatgaagaagtgttgaagggtgaaacttcctgcttttattgttgaccacagagtggtacctggagatatgtcgccggggncangagaccttggggacgtcatgtgggggtgttttgcccacaatcaagcttgaccaatccngacccaac

SEQ ID NO: 193414 - DNA, 388 bp, Glycine max
  unsure (1)..(388): unsure at all n locations
agcttntgtcatcaccttagatatcgtcaataatannttgaatcaatcttganncatcatgaagcttgcttctacaactgtatcacccaaaggagagcatcaatatacattgatcattatctgaataaatcatatgtatgacatgtattttatgtctcaaaacacttatgtgaatgttattatgcaatacatgttcccaattcactgaattcttatgtatcatttgtgccaattttaatgggcttaacttctctgactggaatgagtaagtccaattacacctcagtgttttggatcttgatcttgttatattgaaacagaagtctgttactattactgatgctagtagcaatgaagagaaagtcattataaagcttgagaaagatct

SEQ ID NO: 193415 - DNA, 462 bp, Glycine max
  unsure (1)..(462): unsure at all n locations
agctntagncgtgatgacgatatcctcttattctagttctatgagatctaaatntacctgcaatgctttgttgttttcggcctgtacgaagttctatcttcttagtgatatttctcccacttataccgggaccataacatccatcccgtataccggccaaaaaggtgtctcttgngttggaaatccgggagtaaaccaatgtgcccataagatttcaaggagctcctcagcccatctttccaatggcattgtgtagccatttctttagttncaccaaaattacttggtcgtttgtttaaaggtgttctacgagcgtcactcgtgcttgatgtcgaggcttgcaataaactcgttcatatttcaatctgggaattgaaacaattatngtacaacaacacatggtgtgccgaagcgagtgatgatattcttccaaatgaacttttgcaaattctttacattaat

SEQ ID NO: 193416 - DNA, 372 bp, Glycine max
  unsure (1)..(372): unsure at all n locations
gctttgtcctgaaaactggtcccagaatacacagggagtgaagattgctgaaaaccctatccttgcaaaaagtcctagggaagtagacacggagatggacaagaaaatccgcagtattgtgagtagcattttgaaagacgcctctgttcctgaagctgatgaagatgtcccaacatcttccaccccgaatgtttctgtgcctgatgttgagaaagatgttccaacatcctccactccaaatgctgaagtccttccttcacccagngaagaggaatcaacagaagaagaggatcaagcctcagaggagacccctgcaccaagggcaccagaacctgctccaggtgacctcattgacctagaagaagttgaatc

SEQ ID NO: 193417 - DNA, 405 bp, Glycine max
  unsure (1)..(405): unsure at all n locations
agatatcaatctcacataatgaaagattataatatagtgattcatccgatgtaacatccttttgtatgcatgacattgactaaataaaaatctctatacctatgtngaatatganaacgatcaaaactaaaccaatttgcaaaaggaaatgacaccaacaaaactaattaacgagtcttatgttgcactgctcatctccacttgtactattggtgccattagtgtttgaatgtgaactccccatgacagatgttatagctgccacaagagcttcagtgaaattgnggtatatatgctgtgatagcagcagtggctgcatttaatgtgttancanatgataagttgtgtccattccctgagactcatgcaagccagcaagtcaaaagaaatcatngagtaactata

SEQ ID NO: 193418 - DNA, 433 bp, Glycine max
  unsure (1)..(433): unsure at all n locations
agaangagacacacatcanatagaaccattcagattcttgtnagtcctccggcgacaaggcagcacaaagccggcgagtcggcggatttgtctctccgacggacaatgattcataaagttctctaagttgctgacttctttggagagaagcctcctcagcactcacctccattggttgcaccgtcttccgtgtcttaattgctccattgtagtaaccatcaccccaaaccagaatcctaaatcaatataacatataattatatgaccttaaaatttaatttgntacaagtgtcactctcacactcataggcatacatgtgtcggttacagaaactaattaggaaacattaattnnacagtaattacataatgaatcattatcatatgagacaacttgtgtgataaagtgaactaataactactaaacgtacac

SEQ ID NO: 193419 - DNA, 275 bp, Glycine max
  unsure (1)..(275): unsure at all n locations
gattattgtattattatcacatcgtttgctgtagtatgtacaatntttattgttttgacatattttttttagttcatgttgtggttgaattactttctatttgcattcatcatctgtnnnaacnncacacacctagtagcgataacgatctctttaattgattcataaagcaaacatcaacactgatagaacaaacttttcttaaaaanaggaacgtataatttttataannnnnaacatgactacacagatctatcacacatcagagcaatgat

SEQ ID NO: 193420 - DNA, 463 bp, Glycine max
  unsure (1)..(463): unsure at all n locations
gcttatttcaatcaataaccttggcttggcttttttttcttatttcttaaaagggactcttatatttcctttaccaattgctttctcctcttttcgtttcattctacatggctcaagctgcaggcacaacgaccaaatgcaatgtaatcatattgtatttttctcttaaagggcatgttattggagtggataagaacttctatatattgtgcaaatatagtaatgcaatttaacttggtttcttacgcgtgtactttttgttcgtttatcttcatttctaccttcttcattnttttaagaaaatcgttcttgaaattgagatcataaaaagttcattggtaaatattntcatgtgttnttaaagaattatttaaaaaatatcacacaaaagctaaattgattntataatcattttaaatctatagtaccattcatccaagaaaataattcttataccatgtca

SEQ ID NO: 193421 - DNA, 403 bp, Glycine max
  unsure (1)..(403): unsure at all n locations
acctgcggcatcaagcttggaaccacaatatatatgggaccctattgttttgttgaagcaacccgcatcaacatcctgtcactaagataggaaaccaaaggggtgtacatactctacaacccctgccgcatctcaacactctgttcaaaccaccacttacaacaagaaagcgatagactcactttaccatgaatttttgaacacaaagtgcggagggcaacgaaaggctggccattctaacaaatcaatgaacttgttcaaaatttgcttgctcgggaagcaaagcacaaatattgcttctgtatcactcagtccatcacttctttctgaataatccatgcaaaaatatatccanntgaccacacccgcactgtcctcaaggtgcacgcacacttgaccacct

SEQ ID NO: 193422 - DNA, 420 bp, Glycine max
  unsure (1)..(420): unsure at all n locations
acttangctattcatcttttcattctcttctccctttgccaaaaagaattcgccaaggactaaccgcctgaattctttttgtgtctctcttctctcttttccaaaagaaggaaggactaaccgcctaaattcttttgtgtctccctgctcccttgtcaaagaattcaaaacaacacagtctgagaattcttttgattcttcccattccctaatacaaaagcattcaaaggtttaaccacctgagaattcttttgtatcccattcacaaagtttcaaaggtgtaacagcctgagatctttgtcttacacattggaaggtacatcctttgtggcacaagtagagggtacatctacttgggttnnacgacatcaaagacggtacatctcttgtgaatcagntctagtggagggtacatccact

SEQ ID NO: 193423 - DNA, 482 bp, Glycine max
  unsure (1)..(482): unsure at all n locations
gctttcctctggttgctctactatggttccatatctttagagagaagaataagggattgaagcctattcagtgtctccgtacgaggaatgtttctctcaccacaaacattattntgcaaatctcaatggtagggatgtgcagaaattattntcgaaccaggtgtttaaatttacaacgatccaacggttaatgagtctgagattgtagttntaatgagacatatttgggtgtatgctagaaaaaagagagttctatgagagggacatttctttcaccacaaacattatatcacaaatcccaatgacaggattatgaaacaatgagttccaaacctggtgttcaaatttcacaatgatcaagcggttggggagtctgggattgtagttttactatggcaacttgggtgtatgctggaaaaatagagttatatgagagaganaattctctcaccacaacattatatcacaaatcccaatgatgg

SEQ ID NO: 193424 - DNA, 473 bp, Glycine max
  unsure (1)..(473): unsure at all n locations
gctntanaggttgggcaacaacatttatttatantttttcagcacataccctaagttcgagacattcaagatgatggtcatntctaacaattcataatccatatcacaataagtaattaattgcaagctcgacgatggaagtgtgtcactttaaaaagtgagcatgcacaataagtggaatcaaaggataaaatacgcctaaataacatcatcaattaaaaaattccataaaaaacatcacgataaaaatactaagagataaaaatctaatattgtctgacaaacttttgcttacatctattacaacatctcaacaaatatgtattcatcatcctaaataaaatcacaattttcttcagaaaattgagaccatccttgccaanacacgaattctganntcgcgacgatccttcatttagataaacttgaaaaactcttcaattcaagttttctagacaaatttagacagcttc

SEQ ID NO: 193425 - DNA, 280 bp, Glycine max
  unsure (1)..(280): unsure at all n locations
cattacgaaacncaggattgaagaatcatagactcaaagaaagagagtagaaactacatttgcagtaatctgatcatgtctgcatagatgggactaacacaagaaaaataactatcatagacatcaagaaacacattgtcaccatacaacgtttcactctccagcttaactaagccaaaagaagggggaaatacagcacttaaaaccactcatcacatcacaattcttatggcaaacnantattcactttaagacgatttttctttctttgcacatcatc

SEQ ID NO: 193426 - DNA, 450 bp, Glycine max
  unsure (1)..(450): unsure at all n locations
agcttgcataatcttgtccatgtaatngnntgttttntatccctttcttttcagctagtgtgaatatacaaagaataatataattggacatccaaaatgacatttaatacaaagtgagagagacagaaaaaaaaaattataagttcggtggatagatagataggtagtatattctgatagatagatagaaaggtaatataatctgatggatagaaagagagatagagaaaaataagaaatattgatgtaatggttaaaataagaatctgcgtaagngatcctaagtaagaatgaaattaanatagttccatcttaaataatttatttatagaaattagataattatcttattttaaaacttatcattcacatttaatgtatcattnnnnnnattcttatatcattcatgtgtaaaantaacaatttatatttgnntgagtaaaagtaata

SEQ ID NO: 193427 - DNA, 368 bp, Glycine max
  unsure (1)..(368): unsure at all n locations
agcttcgnccgcataagtctctcataaccgttttaaggtccaacgccttanacggtcctctgtgcttttatcggttaacgtggaccgttcaaaagcataaaatcaacacataactttaccgcttttgcaagaactacgtaggtttgatttcctcatcgcaattgaggatacgtaggagcgagggaaacacccttgtcgacaacaaaaagataaaaaatacaaaaaacataaaaagcataaaaacacaaaaagacataaaaagggaaaataaaacattntgaagtcatatttgcacacttgattaaaggttgtcgtcccttgtgacggacgcgtggggtgctaataccttccccgtgcgtaaaaacaac

SEQ ID NO: 193428 - DNA, 427 bp, Glycine max
  unsure (1)..(427): unsure at all n locations
agctttatcttctctttcttttatatgcatggtnntttgtgcatgtcacatcaattatcatattgcctaatggattggtgttgctctcaacaggtttggatcctgtgcaacgattgtggtaaaacttctcacgttcagttccattttgtggctcaaaagtgtccgaactgcaaatcctacaatacacgacaaacatgaggctgagcaagtggccacgattattcattggtttcgtcaaaagccttcacttgagttctcttgatgttgttgtgattcgtgaaggctgtgaaaatgcatgtgtgtccatagggtacgtggatgtgcacgtgggaaatttgaattggagtgcacgatgagccacattcaaagggatagaaataatggtcttcttcttatatgttgatctcgaagtgggtagtgtaaattg

SEQ ID NO: 193429 - DNA, 401 bp, Glycine max
  unsure (1)..(401): unsure at all n locations
tattaaaaactatgtggatgtgattctcgtacttggtttcctatagactacactcgtatgatgcaaattagaggcagtggagttcttatatcacccttgacttatgtttttgatgaagaaaccccaagatgacgtcaactcctatctgaacttgggttgatcaatccatggagtcatttgtggatgtttcatttttcatttactgccaaagtagatgagcattacctntatggtgaaagctgcaagaaacaagtacaccaaaatggaggacatnagataactgaaatggcattttagctcattattcatagaagaactcctatctccacatcgctttataaatgaaattttagtagcaagctagtatcttccttttctcctcttcataacaatagcttctt

SEQ ID NO: 193430 - DNA, 471 bp, Glycine max
  unsure (1)..(471): unsure at all n locations
ctttctcggaggcaagctccttttttcatggcttattccctagaggatgacgcctcctctcacantttctcctttatctttcgctgcatctccatggtggaaaatcaccattgaaggacctcattgaagttcaaagatctagcctccatagaagctccacaagtaagcttccatcaaaaaggaacaagctaggtttcctcacacacaagtatgaactatttactatagaggaaggagaagacatacaatgtatgtctagtagcttccaaaccatattaaacaagctaagatctctaggttgaaattttgataattatgatcatattgataaaatcttgagaaagttgtctagaaaatggagaccgcatgtaacagctttaagagccctnaaaatcatgacaccatgtcccttgaagagctccttggaactcttaagttcatgaacaagaacttcagaaagatgaaagactt

SEQ ID NO: 193431 - DNA, 397 bp, Glycine max
  unsure (1)..(397): unsure at all n locations
agcttaccttatcttctacaataaggaganaatcatccttatattcctcctaacnaagttaacccaaccagctttcatgataaaggaagtgttcatttctcttgcgagctngattccctaagctctaggggaatttgattggcaaatctctcccccaagctattgtgtgcacttttttggacacggtagtaccacttccaaacaaatttcgcaggctntatcaatatcattacaaatatattaaaaaaaaaatacttcaaattcaattcgaatcatatcacanataacaatacgcacaacctacgtgttctctacgtcatgttcttgaatgtacaaatcgaaaagtgtaatcagacaaatgagcagttcaacatatccaaatattcctgataataaa

SEQ ID NO: 193432 - DNA, 416 bp, Glycine max
  unsure (1)..(416): unsure at all n locations
tatgtgggttggcgtatangttcatagtttaaatggggttggatggtaaacgagtggttaaagtttgtgaagtatggttcataggttgggtaaagtttcttttagccttaggtttagaatccttgactttggattcaattaacttggctaatttgatggtttgtgaaatggtagttgggttttggatggcgagttccctacgaattccatggtttagacctgaaataaaatagtttaagatttcctcttgtggtaatctcacnaatctgatgcatnatttttcaaattgagcttgataatctacaacagagccatactgtcataacttacacaatccaacttgatggttagtgtncaggagggtccaaaacaaattntcagtgtatatataaaggaatctcagtctaaaaattgac

SEQ ID NO: 193433 - DNA, 361 bp, Glycine max
  unsure (1)..(361): unsure at all n locations
agcttgcctaattatcttgatattgagaganattgtattttacacacacaaaatgaaaatactaagtatttattacctatacttaacagaaaatacttataacactacaaaataaccataaattgcgagagtttgatacaatttatataagttttatacaaaaaagttagtcgttttcatcgactaacaggtacctgcaattacacttcgacgctcaagttagtggcgtatctctatgaaggtgcaagtaataattatgttaataatactatgaatncttttaatgcatgctagctatatatatacngtatantngtgggcctttggggcgtaatatatgtggataaatacaaggagaatc

SEQ ID NO: 193434 - DNA, 477 bp, Glycine max
  unsure (1)..(477): unsure at all n locations
agctntagccaaaccgcttagcgacactcttattcttggctaagcgcgactcagtgtcgccaagcgcaattccttacggccataactaaggtccatgaagctaagcgccagtcatggcagctaagctgaattccttgcggcaatgtgagcgctaagagaggccttatcagctaagcgcatgctcctctgtacttaagatgcatcattttagctaagccagccatagcctggcttagcgagagttacaacttttcggatctgcaaacctcgctaagtggttcgnnccnnncncnaagccaagcctctgttaaaaaanaaaaaactgattctgaatttgaaacgtcggctaancgcgcaggtccactaagcgagcctagttgagaaaccaaangnntnnnnnnccacttagagcagcggtccactaagcgaaagtgtcataaactgctgaagtgagtgtaacagcagttacactcacac

SEQ ID NO: 193435 - DNA, 414 bp, Glycine max
  unsure (1)..(414): unsure at all n locations
agcttgcacaacaagtttctaaanatggttttgttctttatgaaatatctaactaactaactaactaaatgcactaatatatacaatgactagtcagaaggaagggatgagacttgattaggcccatctaatctacctaattcaactaattacacaaagcaaatcccaaatttgcagcccaatcattcaagtgcagattttctaacttccaaggccaatttaaccctctaaatggaagatttggccattgcttttatgtgacaaaattgaagctctttttcttagctttcgagggactaatcacactctccatttggagttctgtagtgttctatgggccctgcacaaagcagataggtcaagtaaacacaaaatccgaaaataagcaacaattatcaattagctcatttattt

SEQ ID NO: 193436 - DNA, 466 bp, Glycine max
  unsure (1)..(466): unsure at all n locations
gcttatttgagaagaaaagaagaagcatgattctttgagaaattcttcaagatgtaactgaaggagaaggaagaaagtcaaggaaatgagagaagtcaacgaggtcgaggcagaggtcgaggacagcttgggctgatcaactctgtgaagggtgtttacttggcaaacaaattagaacgagttttccaaagtagtcaaactcaagagctaagaagacactcgagctaacacgtgctggcgtctgtgggccaatcaagccaagctcactaggtaaaaataactatgtcctccttttcattgatgatttttcaagagaaacatgggtctatttcttaaataananatcaaaagtctctttcgccttcaagaagttcaaagctatattggagaaataangtgctgagagaacaaagtcataatgactgaccgaggaggagaattcacttccaaagagttcatgagttta

SEQ ID NO: 193437 - DNA, 476 bp, Glycine max
  unsure (1)..(476): unsure at all n locations
agcttcatcttcttcaccacacaactacttcttttttacacctttactacactngccattactcttaactcttcctatctttgaggagcctgaaatggcagaagaagaacatcctataaggacacttggagactatattgcacatgttgtgcaaaggcacttcatattggaatgtgttattttggctattaaaggttatagtgtcaatctataattaagattgctcccatcaattggtcttagcacatctctcaatntcatgtaaaaaaagttaatggaccggattgngtaatgctcaccactacttactaatatattcacacaaaanaaccactacttattaatattngaaaatgtgtaactatacantttcattcaatattngtacttttangtnnntacttacactcagtaaacaaaaatacactaattagaanattgattatcattgattatacattaatatcatcatatat

SEQ ID NO: 193438 - DNA, 405 bp, Glycine max
caagcttgagattgtttctgggttaaagatcaatttttcttcaagagccagttggggctgttggccaatctgcggtttggtgcaactctgctgctacctacctcaattgtgctttattgcagctccccttctgctatctgggaattccagtgggtgctaatcctagaaagagggcagtttgggatcctgtcataaggaagttcgaggctaaactgagcaagtggaatcagagacatatttctatggctggaaggatcacactcatcaatgctgtcctaacagcattacctcttttcttcttgtcttttttcagggccccatcagctataattcataagatttctaccatccaaagacaattcctttgtgggggaaaaccatatggaaggaaactgcttggatgtc

SEQ ID NO: 193439 - DNA, 383 bp, Glycine max
  unsure (1)..(383): unsure at all n locations
agctntgactngagtcatctatatattataaatatgtgaccatggcatgaatntaanagtaatctatcttttaatcttttctcaacatcattcaattctttctacagaatctttctaatttatttctcttcatctttctaatagtttttgttcaaacactttctcttccaagaaaagttctttgttcaaaaacttgttgtattcatattttccattcacttctccctttgctaaaagaacgaaggactaatcgcctaaattcttttgtgtctctcttntnccttacaaaagattcaaacgactaaccgcctgagaattcttttgattcttcccttccccttaagcaaaagatttcacaggattaaccgtctgagatatctttt

SEQ ID NO: 193440 - DNA, 405 bp, Glycine max
  unsure (1)..(405): unsure at all n locations
catatgcatctctattgaactgtttaagttggagcatcttttcctcccatggtgaatgataagtgcttttgttgcacccatcattaggtaccttatcattaagccacctctaaatatcttntttaaagttttcgtatatatgtctaaggtagaatctatgttcgttaattcctaccataccttgcaatgattggcaaaatccttgtatgaaaaacaaatgtcaaatataatatgaaaagactatggcaagtacaagactagaaaattttcaagagtataatttaataccttatgttggtcagattatataacccaagaattgttactagagtgccatatgtcctcaaatagttaaattcaaaactaggtccatgtatccttggtctcaatctccacaacaacaaa

SEQ ID NO: 193441 - DNA, 400 bp, Glycine max
taattaaaaatatgatattcaaaatatatatatatatatatatattagaaaaccatatcttataaccacctcttaaaaagtcacctaataacaaaatatcatttgaaattggagctgagacacaaatttgacctcaaaattataattatgtgacaacctctacaatacacataagaatgagaaagaacagacaataaaataaaatgacaacatcataagaaaaaaatataaatttatttaacatgatttcatcctttaggtctacattcacctaattggttttgttaacatgttggaattctcatgcttatatatataactatgtttaatatggttggatctttatctatactgcattcacatacatatgttttgtaacatgttggattcctcatgccta

SEQ ID NO: 193442 - DNA, 146 bp, Glycine max
tttttacccactcctcaccgttggtttcttatagggaaaaacaacataacttaacccgccgtcaggtattcctatttgaccagataccaatctaaacgaagacacgcgaggcggtggccccataaacgcggagatccttgcgttat

SEQ ID NO: 193443 - DNA, 371 bp, Glycine max
tagggaagtagacacggagatggacaagaaaatccgcagtattgtgagtagcattttgaaagaagcctctgtgcctgaagctaatggagatgttccaacatcttccaccccgaatgtttctgtgcctgatgttgagaaagatgttccaacatcttccgttccaaatgctgaagccgtcccttcacccagtgaagaggaatcaacgggagaagatgatcaagccgcagaggagacccctgcaccaagggcaccagaacctgctccaggtgacctcattgacctggaagaagtcgaatctgatgaagaacccattgccaacaggttggcacctggcattgcagaaagacttcaaacagaaagggaaaaccccc

SEQ ID NO: 193444 - DNA, 397 bp, Glycine max
tcgtcccggatccttaagtcacctgagctgcagctttgagaaatcaaatggtcatgaactttcacacggatgttagattaaggcgcttctcatatagagacgcacgaaaatgaacaacggttgctctcgagaaattcaaaaggtcatcacttttcacactgagggctgattcaggcttataatatattgatatgctccaaattaaagatcggaagctctcgagatattcaaatggccataacttttcacacggatgtccgtttcgggcgcataatatgtcgagaggctcgaaattgaacaacggaagctctagagaaatccaaatggtcataacttttcacaccgatgtccgattccggaccccttgataacattacacgggcatatcttctcccac

SEQ ID NO: 193445 - DNA, 389 bp, Glycine max
  unsure (1)..(389): unsure at all n locations
ggacatccgtgtgaaaagatatgaccgttngaatttctcaagagcttccgctgttcaatttccaacctctcgacatatgatgcacccgaatcggacatccgtgtgagaagttatgatcatttgaatatctccagagtttccgatgtataatttcgagcgtatcgatatattataaccctgaatcggacctccgtctgaaaagttatgaccatttggatttgaccagagctttcgctgatcaatttcgaatgtcactgtatgtgatgcgcctcaattggacattccagataaatgttatgaccatatgaatntctccagagctttcgttgttcaattctgagcggttcgatatgtgatttgcctgaatcggacatccggtgaaaagtatg

SEQ ID NO: 193446 - DNA, 438 bp, Glycine max
  unsure (1)..(438): unsure at all n locations
acctgcngcatgcaagctnttagctcgtccttaagatcatgcctttgacccatgatgattttttncacctctncggagcttgagctcactattgctgccctattaagcccctcaaaactttgctttggtcgagttattcctttccggccttcttggtttatcatttcaaggcttcagcgggggccatattgacggcccttagttcattatactcttttaaactttgatggctatggacttgaacttcttttcgactacccgggctctttcaagctctgcctttagggcttgtacctcatcacttgcttccgaagctttaacctcatcatctctcacagtctttagattagggagccaatccaatccttgtgttcggactctcaaccacttatgatagccgccgatgatcccattactgcttcccctaagctctctgtc

SEQ ID NO: 193447 - DNA, 451 bp, Glycine max
gaagattcctaaagaagctagagcttagctacacatacctctctaatagcttttctcatctccttgagacgagaagctagagcttagctacacaccctctataatagctaagctcaccccatgacaaaaaaaacatgaaaatacaaaaaaaaaagtccttactacaaagactactcaaaatgccccgaaaacaaggctaaaaccctatactattagaatggccaaaatacaaggcccaaacgaagaaaaaacctattctaatatttacaaagataagcgggtcatgcttagcccatgggctcgaaatctaccctaaggctcatgagaaccttagggccttcccttggatctctagcccaatctacttggatctctagcccaatctacttggagtcttctacccaatgcccttgcgggataagattgcatattccctccaccttggaaggat

SEQ ID NO: 193448 - DNA, 377 bp, Glycine max
gaccttaatcctaataccacagccgacctttttacgagatctctacttaaccctttggctaaatgatcggccaaattatgctgagttctcacaaactccactgatatcacaccatgcgtgattaacttccgaaccatgttgtgtctaacacccaagtgtctagactttccattatacacttgactatatgccttagccaatgttgcctgactatcacacctgatagacatgggaggtatatgtttgggccacaattggatcttatagaatatatttcttatcccctcacgtttttaccagctgctgttaaggctcaaatcagaatccatgttcgatttgcatgccgtctgttctggatgccaaaaatagcactcctc

SEQ ID NO: 193449 - DNA, 415 bp, Glycine max
  unsure (1)..(415): unsure at all n locations
catggctttgatgtcagctgtgaagcaaggtatttttgtagtacaagcagcaggaaatactggaccatcaccaacaagcatgttctccttcagtccatggatctatacntgtggtgctgcctctcatgatcgggtttatagcaacgccatatttcttggaaataatgtgaccatacctggagttggtcttgcatgtaagtttctgtttctctattcctggttaatgatataagaatttattttactctaactcactggagggggtaatgttatggacttcaatgattggatttcctccttgggttgcccaagtagtgaagagcttcaatgacgccgtggtgtcaanntttcattaacaatagaattagtggaaaaacaatgttggtcaaaaacaagatatattggtcaaaagtgg

SEQ ID NO: 193450 - DNA, 368 bp, Glycine max
  unsure (1)..(368): unsure at all n locations
ccttaggcacttctctctctttcaaatttgcttaggaaaattatttccgtgaagaaaatccaagccgaggcgcttccgtaacgtttccgtgagtaattacgcgaagattctcgaccgttcttcaagactcgtcgntcgttcttcgttttcttcagtcttcaacgggtaagtacctcaaaccaagcttttcaattcattatatgtacccgtggtggtccacattgnngttcatgntatttcatttactttttatacccccttctgacgtgcttaagccatttatttaagtcgtttctcgcctaatctaaaaataaaaataaattccaccgatcgtttgaattgtgacatccgttaaatttggttaaaat

SEQ ID NO: 193451 - DNA, 454 bp, Glycine max
tactaagcttggtcccaacgctttgttaagctctctcaaaatctagatgtatatctatgatctctatcagacactatgctagatggcacaccatgtaatctgacaatttcactaatatacagggagatcaacttctccaaagaaaatatgatattaatgggaattaagtgagcagacttagtcagcctgtcaacaataacccagataaaatctaaacctcttgtggttctaggtagtcttaccacataatccatggaaatactgtcccacttccactagggtatctctaaaggttgtaacttccctgaaggtctctgatgttctatcttagccttctgaaagactatgcatgcatagacaaactcactaacctctctctttatgttgggccaccaaaacatcgtcttaaaatctgatacatctggagcacaggaggatgtcaaatactctatgt

SEQ ID NO: 193452 - DNA, 398 bp, Glycine max
  unsure (1)..(398): unsure at all n locations
agcttgagtttgaggaatgttgtaaggcnaatctttctgtctttattcgtagaccacaaaacggtacctggagatatgtaccgggggtcaagagaccttggggacgtcaagtggggtgctattgcccaaaaccaagcttgaccaatcccgacccaacccgggcatattcggtcagtgagaacctgtgatgtacctaaatatgcgagctcctggcagtctacagataaaaggaacaaagaccacaaagcaaggaggcttgtagtggctggccagctgtgaactttgattaatatgtgggttatggcctctggtaattgattaccaacggtgggtaatcgattacaacgctcaaaaatgatgacaggacgctaagatggtctctggtaattcaataccac

SEQ ID NO: 193453 - DNA, 304 bp, Glycine max
tgactcacatgagacatgacacgttttgtatgctgtcaacattatttcttacaaataactaccataaggcataaacctagttaaactacccatcatatcttccaaacacccaatacccacgaaatcatgtgagagagaagtctacccaaacctgaaatttgaagtcccacatcgtagaggtgcgcttcacaacttcgaaaatggctttcttatgcaatttggagcataaatggtgagcaaagattgtagctttgatggaggctataatggagaggaagaagaatggaaaagcaacgtgagagtg

SEQ ID NO: 193454 - DNA, 432 bp, Glycine max
gctttaagacactagtacttggccaactgtggttgtatctccaagaaatcaccatggctggtcttaaacccatatttacagaacaaaattggggcatggggctcaatacacattaaaaacaggttctaaatatgtattagactaacaacgacatccaattagacaaagagagacttggtgctctaagaatcatattcgcatgcaaaatgaaaatttttggattaagaaaatcctcaccctttcccacctatcattactcttcaaaacccaaaattatccaagctcttccctcttccttagagaaatacatgaagaaaggatgaatgaagattattcctgcaccccaatggagaatctatgagcttcacaaatcactcttttaaatatcaaaatacaaggaatgttaaataatactacctacaacctaatggg

SEQ ID NO: 193455 - DNA, 358 bp, Glycine max
  unsure (1)..(358): unsure at all n locations
tcttactcctttaacattctangacagcttgaactctagaattanatttttcattaaggccttgataccatttccaccccttatgtgttgagataatatgaccaacatattctatttgtggatatgtaaaggaatattgtaccttatatgctacaaattgttgttgtgtcaaaagcataaaacttcatatcaatgatgaacatggcacagtcaagttggacaatagacctatatattgtcaaagaaaactaaccaatgcttctgtaaaatgacttatatattgaattcatggtggattggacgctcgaggtacaaatggcatggcaattgtgaaaaaataaaacccaagtccccaagt

SEQ ID NO: 193456 - DNA, 257 bp, Glycine max
acatttcggagatgtttatggttgagggtggaggggttaaggcttatggtttatggtcttgtactcatatgttaattcgaatagtaaatattgaatttgaacataaacatacatgttgcgtaacatttgcgtatcatggttagaaccacaacgttatgtcgtgccttacgtagggttatatgcacagccctgtggagagaggatcgtcctgattcatatgatgttccccaacggcgaaggcctacagtattttcacg

SEQ ID NO: 193457 - DNA, 400 bp, Glycine max
  unsure (1)..(400): unsure at all n locations
ctagctattaagaatggttataagtagactgaatatgtatttttgttattgcacgtgtcacgaattggaacaatgtttctcaaatgttgtggagacacaaattcatgtcggagacagtatccaacactaatagaagagctgtgccgtcattttttctctgcccgatcttaggaagtcaaccaccaacttcgatctacggaggaggagaatttactatagtatataaagggtgtctccaacataacggttcttctgattatatggacgcattctttggatcacaacatgcagccaaaactcgcaggtttcagccatagcgctcatggagcacgttgtattgtcaagccaaaaccacgttagagctatatgcttttgganggaaatttttaatttgaggtac

SEQ ID NO: 193458 - DNA, 411 bp, Glycine max
agcttgaagaagtttgccttttaatggccaactctctcgagtgacatttgtattgggtggtgtattatgcgttgcaacttagtcgccatcatttcatatatgcatcatgcatcatgatgtaggagtaaggagaaagtttctaaagttagaaattttcttcagtagttcaaagtcttttgtttaaccgattacaagctgatcgtaattcattacataagttggttgaaggttgcaaagacgcgtttcatatcagtttaatcgattacaagcttatagtaatcgattacacaatcgtttttgagacaatgattgatttttttaggagtctatgttttaattgattaccaatagatataatcgattactgctctttaaaaagtgtatcagaagtgattaagaacactttaatcg

SEQ ID NO: 193459 - DNA, 453 bp, Glycine max
  unsure (1)..(453): unsure at all n locations
ntgacacctgcaatacacatgataataaaaatcctctacatttttatgtatataagggcaacttagaaggaaaaacatgaaattcaaataaccggaaaagtttgggtggtaagggaaagggaacaaaggaaaaacaagagcatcaaaattctaaataggcatttatgaacatactaatgacattgttctaaatctaaattatagaaagttgtcagataaaagataaatgcatttatgagcattgcattctacctgcatagaccattaagtctagtaagcatggtttctcctcctagaaacataactctgacttgaaaacctggaaacatgtactaaatatcagaattgatgaattcaggaatactcataacaaattgtcagtaagagtggcctctntagaaacaaaaaagaataaagaaactangaatgtaaggtaacttgattatggaaaat

SEQ ID NO: 193460 - DNA, 320 bp, Glycine max
  unsure (1)..(320): unsure at all n locations
cagtatgaaaaatagtagttgaatgctcaaaattagaatgttcagaatcaccagcaacagaatactcaaaatgctcaaaatgctcgaaatgcacagaatgatcaggatgcacactatgcctaaataatctatganaggttctatctatttcaggatcaaagggttgtaaatcacctggattgcccctagtcatgcactatatgtagcaaatcatgtatctctacacaagcacctaataagggggtaaaactacaactatacttgaacgatatccaaatgagcttgaattttgtgagcaacaccataaaatcattgaaaga

SEQ ID NO: 193461 - DNA, 96 bp, Glycine max
aaaaagcttaaggtgcttaaggtattcaattacttaaaggcttgcactaataaacagttgtgttcaccttacatttacaatatactacattaattt

SEQ ID NO: 193462 - DNA, 353 bp, Glycine max
  unsure (1)..(353): unsure at all n locations
cactgatccgttgtggcaagtgcaccngatttttcaattagtataaaacggtaagaaccgagtatcaaactctcggggaacttgtgttacttggtaaagctacttcagtgaatatatgtctagtatgagaagagatgtgtggactatgcacaaatatgacaactaactattataaggggaaatcacgtgagtaatgatgcgtaaagacaagtagacaacacattggtcttcctaataggtgcctgatgttaaaatgatattctctacttaacaatgctcatgtgttctatggtgtctcctgaaatgctaaaccccgaatcctgatgatagtctagcctaatcctgatcatgca

SEQ ID NO: 193463 - DNA, 433 bp, Glycine max
  unsure (1)..(433): unsure at all n locations
agcttatgcgcatatttccttacgaacgttcacttgcacaagacattttttntaactataaaaaatgcacccatatacaatcaaggcagcttcgtcacctaaattatttacctgtacttccaaagtgtatttgttacttacatcacacacatctccttggctaaatttacatacatgcatactcaaagcattttggggtaccaaaaattgcacatgtgcacatcttggtatttctaatacctatacatacacaaacttcatgatgaatcttgactatctacacaataaggtgctacatttcatgcgcttttcatgtgtttgctacctaaaaccgcatgcaaattcaaatatattttcctttgctgacttaaattgtattcaaataaaaggtatatatatattttctctggaaagtaatctctttacataacat

SEQ ID NO: 193464 - DNA, 427 bp, Glycine max
  unsure (1)..(427): unsure at all n locations
ctatgcacggaaatgtaattatgaatatgagatgcccgaagaaacaccatttcctagtttaccattctttangtaccatgttcaattattttgtttttaagtgaaacgggtttatgatcccaacatggttggctcctaacacatgaaactaagaatgtagtgtgaagtttcacgcttcccccttctttgtttttggtttgtagaggaaaacgcaaggatgagcaaacatgaaaacaaatggtatgcaattttgcagatcaaaaagtttgttgaacgcatatgcatgatgatgccatgactcatgcaaaatgtgaggctggaatatgataacggacaaatgcaggatatgttcattatgatgttatgaagagatgcttatgcgatgcatgatatgaatgcattttacggacacgagagccccggaaat

SEQ ID NO: 193465 - DNA, 351 bp, Glycine max
gctttgaaagggttgtgtttaccttctcgctaagtcaatccttttgcttagcgagcgtccgctaagcgcaacactcattggctaagtgcaaggaagaatctggaagaagataagctatgcatgttcgctaagcgcaccggttcatcccactaaccgcaccgctttagtccatccgctaagcgagaaaggcacgcactaagccgaaattcactaatgtgcgctaagtggtccagaattgtgcttagcgcacgagcatgaacaacgccacctatttacgcctgaaatcaaattttgtgaagggagtttgggctgagagctgatagtttgcatgtctagtgattctagagagag

SEQ ID NO: 193466 - DNA, 420 bp, Glycine max
  unsure (1)..(420): unsure at all n locations
cacaaattggaactatccaagccttaagtaacataatcactactcttgatttctaggttgaaattctggttgctgtcagttctagcacactgtcttcttaactctgttatggcttgaatgctttgagttttgagctgaaattttaactggataaaatatatatttgaaaaaaaaacaatggaaaaagaattaaaaaaacgaaaaagaaatgagtgagaaaaggtgataaagattaatgttaaaatacacgtccagaacataaaaaanaaaaagaagaaaaaaaataaagagtgtatgcttgattttcttgaaaattgttcattggtttgagttgtattacaagcctatttgacttcttggacttgttcatctnttagatgtgttaccaaattgacataactataaattttctttgagtct

SEQ ID NO: 193467 - DNA, 350 bp, Glycine max
  unsure (1)..(350): unsure at all n locations
gcagcttatgatgatgaatcgaggtgatccacgtggttttgacgatgtccccgatgatgacaaanagcccgtagaaatgatttcacgattgggccttcacagttcaggatcaagattaatttcacgtttcatgagaagaattcaagaagattcaagaatcacgagagagttgatttcaagattctagagaagatgaattccagattcctgagaagatatccagatgacttcacaagggatgtcttgcaaagatttttcatcaaacacacctagctcagttttcgttattcaaacagagtgttttctcacaaattttctaagctaccagagcttttactctatggtaattc

SEQ ID NO: 193468 - DNA, 404 bp, Glycine max
actcggggtggttaacaaatatttatacatctcatcattgtttataatggttaaccattttcatctatggatgtttttttattgttatgtatgtagattatgtactttttgtaccttgtatttataaaatgcttatttgtaagattaaaaaaatgtgtcccaacactaattcaaatcttttttgtctttttttctattggaaattctttcataattaaagttggttcacattcaagtaaacatacaaattcaaatacataggaaattatggagcactttccaagggtttggaattggtttatatgaccttgagacttacacactccacttatgaaagtgaagaatgtgagtacaagcagctttgtgaatgtaactcatttattgacatccaccgctcactcact

SEQ ID NO: 193469 - DNA, 454 bp, Glycine max
  unsure (1)..(454): unsure at all n locations
tctacagaaggttcattcctaatttctctacaatngcatcatctctcaatgagctagtgaagaagaatgtggcatttacctgcggtgaaaaacaagagcaagcctttgctttgctcaaagaaaagcttactaaggcacctgttctagctcttcctgacttttctaaaacttttgagctagaatgtgatgcctctagagtgggagttggatctgtatttgtagaagcaaatgcctttggtgttttggaattgatgatcacttgatttctaagctttttctaagcctttctacaccccatttttctccccctttggcaacatcaaaaagccaaagaacttgggaatcaaaccagatataaaatgaagtggaaacagatcaatatcaaagtataaggcataaccaatcaaactcacaaataagacataaccaaaccaaaatccaaacaatttaaaat

SEQ ID NO: 193470 - DNA, 409 bp, Glycine max
  unsure (1)..(409): unsure at all n locations
agcttattcaggatatgggatgtcactctgcatatgtttgggaatggaagcttgaatggagaagacacctttttgacaatgaggtgcaagcggcagccagtttcttggatgatatctcgcacggtcatattgatcgttggacatcaaactgctgggtttggaaaccaaaacctaatggccagttntctacaaggagcgcatactatatgctactagaaagagcagcagatcagactgtgggtgaggctntagaggacctatgacagctcaaaatccctttaaaaccaacaacatttgcttggcgattgatcaaagatagaatcccaactaaagggaatttgtggagaagacagctggagaaaggctttgcccacacctacaactattggtctggaatttatcacaacat

SEQ ID NO: 193471 - DNA, 386 bp, Glycine max
  unsure (1)..(386): unsure at all n locations
tattctactagggactntagacaacatgcatttcatatttttcttttcatattcatacagattgttcacattcatggtagcaacacgcctagagggtaacttcacatcaggatgcaaatattgtaataactctttaaaccttctatgttcaataaaagagaatggaagatcatgctcaataatcatcatacatataccacactttgatctantttcatatttcttaatctcccaacatgatcgagaataatatttccaacatcactattagaacgcgtcttcaaatatacatcacatttccccatacgacgttgtaagggtgaagtcacattcttattgtcaccacccacataatctttcaaacaatatttgcatggtggcgtggt

SEQ ID NO: 193472 - DNA, 405 bp, Glycine max
ctgagctgcagctaatggcctaaacgctctcagaagacttgtttctaatctggttccatttaattgagtaaattgaatgattggatattattcaactctattacccacttcattcttatgtactaaaacaaaattcttatatatgtgaacagtcataactcatttagctctgacactatcttggtccacgcggcgaagcgaactgttactctcactctttctttaccaccaatcacttctcttagttcactctaattttttcttcattcctctacaagcggcttcaaagtgaaacttttttctctctctctatccaaacaacaaaatttagaaatccatttttcttaaccgccgatataatagacttgcccgaaaccatacttctgccattccttaactataaaa

SEQ ID NO: 193473 - DNA, 333 bp, Glycine max
cgtgtaccttttttatctacctcccttacaacagaaaggacgccgagaagtgcctgtatctggatcgctgcaacagcaatctggacgacataagaagagaagcgcagaccatgagcctaattgagcaccccaacgttgtgagggctatctgctccttcgacgtggagcggagtctgtgggttgtgatgggattcatggcgcatggctcctgcctgcacctcatgaaggctgcgtatcccgagggatttaaagaggccgccatcggatctattcttaaggagactctcaaggcgttggagtatcttcatcgacacggacacattcaccgcgacg

SEQ ID NO: 193474 - DNA, 408 bp, Glycine max
  unsure (1)..(408): unsure at all n locations
agctagaanggtgtaacccaccatntttcatattataacaccggtaatgtgtctactatcattgggaaaatctctttctcctgttatgggggcgcttcctgagccttcacgtctctccatctttgggtgtattctttgaaagatccacgcttctttctgcacatgttctatagttgcatcctatctgaagccatatcaaaattgtactgacactgcctaatgaaggcaaccattangtccttccaagaatggactcgggaagggtccaagttagcgtaccaggtaacagctaccacagtaagactttcttggaagaaatgtattagtaagtcctcatcttttgcgtatgccctcatcttccgacaatacatctttagatggttcttggggcaagtagtcccttgtact

SEQ ID NO: 193475 - DNA, 463 bp, Glycine max
  unsure (1)..(463): unsure at all n locations
tatgcgcatatttccttacgaacgttctcttgcacaagacattcttttttctttaanaatgcacccatatacaatcaaggcagcttcgttacctagattatttacatgtacttccaaggtgtatttgttacttacatcacacacatctccttggctaaatttacatacatgcatactcaaagcattttggggtaccaaaaattgcacatgtgcacatcttggtatttctaatacctatacatacacaaacttcatgatgaatattgactatctacacaataaagtgctacatttcatgctcttctcaagtttttgctacctaaagccgcatgcaaattcaagtatatattcctttgctgactaaaantgtattaaaaggtatatattctttttgtagtgcaacatatttatatatattatttttgtgagacatattgactaaccacaaatatacgtacataca

SEQ ID NO: 193476 - DNA, 372 bp, Glycine max
  unsure (1)..(372): unsure at all n locations
agcttcttttggactntgtacaggcaactaactcctctntcaaaatcatgctatgtgctcgcgactggtccctttctttccttcgcaacttgagttcactattgctaccccatagagctccgcgaaatttgttccggccatactcttccttgcgagccctcttggtctctcgttcaaaggctcttgcggtaattgcattctcttcccgtaacccggcacactccttccgaacgtgtgtagcagccaacatgaacttctccttggcgagatttgcctttcctaactcgcttatgagagcttggacttcctcgtcctcttccggtgcttcaaaattcccttcgctgacgactnttaacttggcgagccaatcta

SEQ ID NO: 193477 - DNA, 410 bp, Glycine max
  unsure (1)..(410): unsure at all n locations
tatgctgcaaacatttacaacagacctcctcaacctcagcttctatatcaaccacagcagaacaattatgacctctccagcaacagatacaatcccggatggaggaatcaccctaatctcagatggtctagccctcaacaacaacaacagcagcctgctccttcctttcaaaatgatgctggcctaagcaagccatacattcctccaccaatccaacaacagcaacagccccagaaacaacaaacagttgaggctcctccgcaaccttccctcgaagaacttgtgaggcanatgactatgcagaacatgtagtttcaacaagagaacagagcctccattcagagcttaactcgccagatgggacaatnggctacacaattaaatcaacaacagtcccagaattctgacaa

SEQ ID NO: 193478 - DNA, 324 bp, Glycine max
  unsure (1)..(324): unsure at all n locations
gttactgatcatgtatggtttggttggtcaagataaaaggatgccccacattatttccatgacacaaatgcaaaaatgatgatttggaaacttcatgctaaactggtcatgcatgcacctatgtggacactcaagtgtcaaatttntatggtcatgtgatgctaaggctcacgattcattttctctatgttaaattaacccaatgtttccaaaatatgttcatttatcaatttgtgcattcatccgagtccatttcgggcgtccggggaaatttacaagattcacccttctagggtagacacattnttcaaaaattgggtatta

SEQ ID NO: 193479 - DNA, 394 bp, Glycine max
tgctaagcaagatctacttattataaatacattctttaacattattaacacaaatttcacctatctttctctctctctctaaacttcgtccaaaaaccctagaaactcctcttccactatccacgaccaccggtggccaccacaagccgtcgttgtgttccgctagatcatcgcatggagaggaacacttcaatcagagtggaatcctcaaaatccacctcaaggattaggtagaaaaacaagctttcaacccttttctttcgtagtttctctgaggtaaccttaacgtctatgcctttcccctagttagtttaagcttctcttagtatctcatattttttgcgtaccttaataggatgtttttagacttcacttgaaaacccttaaaactgag

SEQ ID NO: 193480 - DNA, 401 bp, Glycine max
  unsure (1)..(401): unsure at all n locations
agcttgggctgtgctagagagaaaaacaaatgtctcaagtgaacaacaggccatttcttaggttaaatagggtgttgaggagtcaaattttgattccgtggaattttatgtgttaatcccatttgagcacagttaaattgatgttatagacttgtgtgaagtgaagagttgctccaaatttacttcattcccaatttcactttctcaaacctttgaaaatccattaaattgaggggttttggatacctaaattttgtgttgctttggtctgaagctcgtccttggtttagacatgattggtacatgatctgngacttgtatgattcaatttgtgcaaaattggatgaaagcaagagtggcttcgaaatctgcaccttatgcagaattttgctgtggaaatg

SEQ ID NO: 193481 - DNA, 394 bp, Glycine max
  unsure (1)..(394): unsure at all n locations
ntcttgagaaaacttccttgaganacttctttgagaaagctttcttgttaagctagagcttagctgcacacacccctctaataactaagctcacctccttgagaagcttccttgagaagattcctaaagaagctagagcttagctacacacaccccctataatagctaagctcacccccatgccaaaatacatgaaaatatataaaaaaaaagtccctaatacaaagactactcaaaatgccctgaaatacaaggctaaaaccctatactactagaatggccaaaatacaaggcctaanagaaggaanaatctattctaatatttacaaagaagagaggacctaaccttggtccatgggctcagaaatctaccctgggattcatgagaacccca

SEQ ID NO: 193482 - DNA, 394 bp, Glycine max
  unsure (1)..(394): unsure at all n locations
aagcatgtgataatttcatatagattactagcatattaaaaaatgataattgtgacaagcaatatttcaatcaaaagttgaataaatagtgcttacaataggaaggccttcatcatcaagaataaacaaactgcagcacatagctggtgtgctaaaagcagctaatgactgagcctgtagtagtgatccgcanacaaatccacccccaatttctgtaccaccacaatattcaatgataggcttgtagagagctctccccatcagccaaaggtattcatccacattagatgcttcaccagtggagccaaagcaactatatcattcanaatgaatagttccaatcacatactgcagaatcatanatgacatccacattcatgcattaccaccttat

SEQ ID NO: 193483 - DNA, 435 bp, Glycine max
  unsure (1)..(435): unsure at all n locations
gcttttcctctggtntctctggtagggtttccaagcgttagagagtttaaatttctccatctatttattttactctgcaaatcacaaaggtggagatgtgaggaaatgcatttcaaacttggtgtctaaatttcccgatgatccaacggttaacgagtccaggatcgtaggtttactgggttaggtttgggtgtatgcaggaaaaataaaaagctatgtgagagggacattccactcaccaaagacattatttcaaaaatcccaatgatggatacgtgaaaaaatatgtaccaaacatggtgttcaaatttcataatgatccaatggttaacaagttcggaatcattgttttactgtgatagatatgagtgtatgagggaaaaagaaagggttttgggagaggaagaagagaaaactacaattgtaggaagaaga

SEQ ID NO: 193484 - DNA, 393 bp, Glycine max
  unsure (1)..(393): unsure at all n locations
tttatctaatattttactagncatattggcttctctaacattccttcttggtgatgacaaaattacaatgcaaaactctctgcttttggcttggcaaagatggaccatctggtgataagagccatgtctctacaagggttatgggcacatatggctattgttgcttctgaatatatggccacacgtacctcaagtttgggagtacttagcttatgaacactttatttgtgcatacaaacttctatacatatcctgccttctaaatattgtgcaccaccatataattaataccgaaaataaagaccctaatattctttttaaccatggggagctttttactcattttttccttattacagcactgatacatttatctactagccatttacttta

SEQ ID NO: 193485 - DNA, 471 bp, Glycine max
ttataatgcacaccttccatctacatcttagtatcactctaacacctgcaatattcctttttcatgaaatctacactataaagtgcatcatctcctcttgttgtcaccaaataggttattagacccagaggtccaagaccgactttgtccacactttataattattttttatcttgtttgtatctttttgtgtatgctagatccatgagccaagaaacataaccccattcatggacctccattgcagatctactcagatggaattcgttgaccatgtctcatatttctttgccctctcttttatgctttgccgtatcgtttgttctcaccatggtcaataaacatcttcaacgaccatgatttctttgattaactatataaggtaaaatatctacctcttttcgttatgtgtaataactcatttattaataacacatacatgattaatttgtatcgtcactaaaagacatg

SEQ ID NO: 193486 - DNA, 433 bp, Glycine max
  unsure (1)..(433): unsure at all n locations
agcttgaaccanaaccggtgagagtgtgaacttaaactgtgagtgaacgactagttgtgagtaataatctttgcatcaatctctgaaatttagaatgaaatgtataaatgaggacatgattgtacatgcacaagccttttgaccaaaaagcttaccttgaatgataattatatcctttgcaccctttttgagctgaatgatattgtcaaaaatttgaaccctgaacttaattaattatctctagataccttgtttagattctcagagagcatacggttcaaggcaaatttacctcaaatttgggggagtggaactaattgtggtgcaaagaaagagataatacatcagtacacacaacacatatgatgtgtgttaaaataagaaagaagagataagtgtgctaatgtaacaaggtctaaagaatatgaaagtg

SEQ ID NO: 193487 - DNA, 465 bp, Glycine max
  unsure (1)..(465): unsure at all n locations
tacatggttcacccaaaagcgntctttaatatgtgagtatgantttctggttgtgttggtgatgtcatcatgggctaataacatctctgatctgataggtgacttgacctgtttatcccttcaggtcctggtcggattggttcaaagtttaaaacactacctaaaagtgtaagacggtgacaaattgatccgtgaaagataaaaaaaattaaaantttgttttaaacatgtaaaaaatgtgccaaattcgtccaaccattaaatctcttccattaattaactcaaatgtgcgtgcccgcttgacatatgtggattcaattgtcataaaaaagaacaccatgtttgctacttacttggtggaactatggtcaacagaatgttcgactaatttgtgaatttcgaanaatggtaaattttttaattagtctctcagttaacaatttgttttatttaatctttaactta

SEQ ID NO: 193488 - DNA, 418 bp, Glycine max
  unsure (1)..(418): unsure at all n locations
agcttcatgtacaaccattgtgatgtaacttgcatgacaagnttatccttctctggtcagagtaaattgtctgcaatcaaaatgattatgatgttgtattctttgattgctctaaaacattgtgctttgtcatcgaaggtcatgccaacctcgagtataccgactgggggttatacattgtgttactgatgaacaaaatggtgtcgatcaatgtagtgtggtaggtggccaaagttcaagtctactggacacctaagttgctgatattgcaacggaggtgatggaggtgtcattggtctaccaacaccctcgttaatcgtttggtcatcgtttggtgattgatgtgatcaaagaactgttgatcctcattctcactaaaatcatccatgtttttatcatgaaattcgataatgggatc

SEQ ID NO: 193489 - DNA, 466 bp, Glycine max
  unsure (1)..(466): unsure at all n locations
ctccgcttccataagacttgatggaagctggcttgtggagcttctatggaggctggagtcttgatcttcaatgataatggtggntttccaccatggagatgcagtggaagacaaaggagaagaggtgagaggaggcgtcatccattatggaataagccatggaagaaggagcttcaccactaagatgagccttggataagaagcttggagaggatgcttcaatggaggaaaagaaagagggagagaaagagagaggggggagcacgaaattgaaggaagaaaaagggagagaagttgaactttgaggcaagacacctttttactggatagatcaccaagtntaatcttataaatatttccttgtctcttagcataaaagagtgaagagttatccttgttttggacgatacacatatccttattaaaggtgacattgtatccactgtcacataattgacttatgctt

SEQ ID NO: 193490 - DNA, 399 bp, Glycine max
agcttcagcatcactctacaagagggactgctctatccttctcatattcttaaaatattcttgtatctggagatgcaaacgcccaagttaataatttaatattaataatcattccatgcacaaatcatggcaacgaacacaactactttgtagaattagcttaccttttatattggtcgatatgaaaccatttcagctacatttaataatataaataacttaataattgaactgaaaatgtcttttatctacgtaatgtattttggctttctatcatgaaccttttcagtctagctgtgtattattattcattttcaataggattatgctatttatattggttaaataaagagataagcataaatatgggtgcaaatatgggtgggtagctataatcaa

SEQ ID NO: 193491 - DNA, 407 bp, Glycine max
  unsure (1)..(407): unsure at all n locations
ttgaaaacgctcatgcatacttatacacatgcatattttttatcttatggagcaggatcttcttaggcaatggtgaaataccgagccaaatccaagaacaaagacgaatcgaggtaagcggtaacgcggccacaatttgctgcgcaatgtcatttcctgctttcaggtacttanggacaggcacgagtagaggctaggcccaggatcggcggatcgtcgtcccatgtccagctccggacaagtgagaagcactattaggaggcagtctagtatcctttaaattcctagctattattggtgttgtgtctttaaggtgatggtcggatgcctaatttaccctaggggttcaagtaagcgaacgccgacccatagagagcgtgtacctttgtttttcttaaaaaaaatgc

SEQ ID NO: 193492 - DNA, 392 bp, Glycine max
gttctgaacattattttgaagttttattcttcaaagcaagatgtcataccctaatttcgttcggggaccattgtttgatggcatgtaacctttgtttgaccgctttgatgtacctggcacccttggttgcacaatacgtgaagttttgagacctgccggaaatcaaaaggaaacatttgtacgcaatccgtgaaattccgtaacatgccgaaaatcaaaaggaagtattggtacccaatccgtgagtttccgtaacattccgaaagctaaaaaaggaggtattacatgacccgtaaaggtccataaccttacggaaagaaaacaagtatttgtacgaaaatcgtaaagtttcgtaacgttatggaaaaagaaacaccacaaaagctaagggg

SEQ ID NO: 193493 - DNA, 455 bp, Glycine max
  unsure (1)..(455): unsure at all n locations
tctagccaaatgggacttaccttgattaattccttngatagctcttttgtaccttgnttccctttccttggtttgaagctcactacaagccttaagtgaaaaaccatgatattaccatatccttaaggaattttggagctttggaattgttttgggaataagtgtggggggtttttgtttcattggacaacttgttttgttggctatgcttcatgatgtattttgggccatacttgatgtacattgtatattggttaaatgttggacatgctgaatgaaatgttgtttctcaaaggccaaagagttaaaaaaaaaaaaaaaaaattcgaaaaaaattcgaaaaaaaaaagaaaaagaaaagcaataaagttgagtgaataagatcttaaatggcacaagaatgatgaaactcttggttctactcttcatggttaaatnttatctttacctcttta

SEQ ID NO: 193494 - DNA, 439 bp, Glycine max
  unsure (1)..(439): unsure at all n locations
ctaagcttaagacttttcaagctgtcttatgtccgaaatttttacgtctctatgggtgagaaggntatatagctcctatctagctctcttgagttttctttttttttttttggagatgttgttctccttacaaggaccttgcattttcttagcatctagagttggctaaacatcctgctaggttgaaccttttccataggaaggtcatcactgacttaaattcggcatcttgtatttctcacaaggtttggagttttcattgtgaacacagctcacgtaatttatcaatagtccttccctcttattggtggccattattattgactctacgcaaatgttgtgacatttaatggtgtagagcttgtncatgatgtgtaataataacatgtttggttggcaaagagcttccaaatcaccttaaaaatggaacactatgtat

SEQ ID NO: 193495 - DNA, 292 bp, Glycine max
tcatataaaaatgctagcaaaagcaaataaatcagtaacagcaaccgcaacacagttacatacacctccaaaatgtttacctagcagacataatcgcaattgaaaaccacagttcataacattagccacccccaacaaaacagtctaactctgcccgcatcacaatagaaagccccaacacatcaagttatccaccccaaacaaaacaaaacaatttatttatttattcttgggttaatggtgtttttagtcctcgaaaaatgggttatcttaagttttaaactacgtttgg

SEQ ID NO: 193496 - DNA, 417 bp, Glycine max
ggatccttaagcactgggctgcactggagagctcatggagaaagattttggagaaataaagaggggggcatgaattgaagaataaaagggagagaagttgaactttgagttgtgtcttacaagactctcattcatcagagttacaacaagtgtacacatgctctatttatagacagggagctttcttgaaagctctcttgagaaaacttccttgaaagcttctttgagaaaacttccttgagaagctagagcttagctacacacacccctctcataactaagctcacctccttgagaagcttccttaagaagattcctagagaagctagagcctagctacacatacctctcaaatagctaagctcagctccttgagatgagaagctagaaattagctacacatcccctatatagcta

SEQ ID NO: 193497 - DNA, 466 bp, Glycine max
  unsure (1)..(466): unsure at all n locations
ctcaagctntacctanagcgtgatataactcaatattagtgtgcgccaccttattcgtttctgtgctntatacaaaacaaatagaattggtggttgattgcacaatgattaattctcaatcattttacagacgagtatacaatctcagcccttaatcttttctcttaagatgttttaagagcttttaaagaactttacataaatatattgaaagttttttttacagaaagaaagcgaataagagcgcgttagttcctcgttcatgtcttcaaaacttctaatatttataagtcttttcagtaagtgtttgtagtctctaagcgaatagatttcttcacttgagctcgcatctaaagattgtgggtggtggagcatttaatgctttcatttaaatgcangtactcctttatgtttngacatcactcttgtgagctttcatgtcgaacacttcaatagaaaatcactt

SEQ ID NO: 193498 - DNA, 296 bp, Glycine max
  unsure (1)..(296): unsure at all n locations
tctccttggataagtatgtactcttgtaggaaggtcaaatttctacgctatttgggagagtgcaacatgagaaaccatttctctcttgaaattgntgtttacgtaagagtcttcccatctgtctttctttccttgtaaagcacagccaaatggaggggagtagagtttagggtcctaaatgaattgtaagtccaactaaaatgcaaattacatttgacacatcacacttatagaattacagatagacaacaacatttattaacttaattgagagtctaactcaaacatctgctatt

SEQ ID NO: 193499 - DNA, 471 bp, Glycine max
  unsure (1)..(471): unsure at all n locations
gtgtatatactcttgctctncctcttattctacactagcacagtataacttttattggggcacattcgtggacttgtatttcctttttggaattgcgtataaacccttgccaatgagtgttggatgtgaaagctactgagagtagcttctagatggatccatgttgaggctgagtgaatgtgtnatanaanagataacagagaacagaaaggggagaagaattagtttcattaacctaatgaatcaatagttagaacagctaactaactctaactgactcagtaactaactcttaatcaacatttaactaactaagctaacctagctcaggtgataaactaccaaggactgcagtagtaatactgcatgtcctttacaatactccaataatgtgaaacccaacgcacagaaaatattccanatttgcgaccagcacacatgggatgcctgcatgtttatagcatgtgcatg

SEQ ID NO: 193500 - DNA, 390 bp, Glycine max
  unsure (1)..(390): unsure at all n locations
gcttatttatatatgattgatatgaaccattgatattagattttggcaaatatttttattcaatggtgtggtgcaaactcatgctgtaactccttcgatccataacatcagaagtttgtcttcctcctgtatgaatgtttccttcacccacatcttaagggaagggaacaagattgcagattggcttgctaagtttggggcttcctcaagtgattcgttcaagttgtggaatgtgggtcctccttgtctaggcagatgcactatgaaccttgtatcccaggggtagctgatttntttccttctggcgcttttgtttgcttatttcccattcacttaaaaaaactcaatcaacttcatagcaagttgttcatgtctgccatttgtatatct

SEQ ID NO: 193501 - DNA, 463 bp, Glycine max
  unsure (1)..(463): unsure at all n locations
ctataaaactaagcttgtattgaagctgtatatttttacacggtgtttaagttattatagttntccaccctagtctntatcctaaaacaaaagttaactcaatttaagttggaccaaccgtttgagcttatggtcattgagcccatctacatatgctcctaccatacgttcaatgtcaattacaaaaatatagtgaaaagttaattaagcatattataatttattttaatgttgttgtaattgaagagtatgagtatttgtattttaatttatatttaaatctttaaatgaataccactgaatatatagatcaattaatacgagaaattccagtttaataagtgacttcgaattataaatctaaaatatagtcacttacaattatacttgaaaaaagttttatcgtgcatgaaatcttctcgtttgagtataattttctcaagatactatatttctacaagtg

SEQ ID NO: 193502 - DNA, 406 bp, Glycine max
agcttattggatatggggcacccgtcatatattttctaggtggcgatcgggcgacggcacaaattaactctcccatttccacaagccaagcataagcacaccatccccagttgcccacctttaaattttagctcacgtgcacatacatagccttctgctcgttcctctcaagaccgggtccccatcaaccctccaagctttcacaaaaaccaaaatattcaattctatttttcatgagactaccttacacaatgaaaaacagagtggaggtagaatctttgcacgagattcattctaattccacagagtttttcctaccctcatacctaacaaaatcctcttcttcccattcctcaccattgataccttgaaatttactggatgtctatacaaatctaattgaccg

SEQ ID NO: 193503 - DNA, 359 bp, Glycine max
  unsure (1)..(359): unsure at all n locations
ctcaagctnggcttctaaaccaatataactatcctttntcaacatgttattttattggttggctatggggctatatctccgcacaaaccttctataatagcctaccaatcccaaaaaccctttcaactgtttgggggtctgaggaagtggccagttcctcactgcttccactttagtagggctagtagagactccctctcccgtgataaaatgtcctaagtattctactaaagtaactccaaagtagcacttagattttttagccaacaaggcatttgctctcatggtagacaagaagggttgtaaatgatgcaagtgatccttcatgctctttgctgtaatcagaatgtcgtcaaaaa

SEQ ID NO: 193504 - DNA, 424 bp, Glycine max
gcagcttccccaatggcttgtccgaagaaagtatgaaaaggttgcagcagtgtaaggattgcaccaatcagattctaaaagctgctggtgcaattaatacttttgttcttgctgaaatggaaattcccggtgcctacattgagtccttgcccaaggtaagtaatgatgctttgcgctgcaaaaaggaaataaaaaagctcctggccataatttttgtttagttataatgtatgagtatcatgctactaatggtcagaaagacatcaattataaattctaatcatgcatctgtgagtggcccaacactactatatttgtcaaatcaaatgtctagtttgagtacccaaatcatagttcaagtaaaatattggcaggaattcaataatctcttgaaggtagttggaatattgattctaaaaatatg

SEQ ID NO: 193505 - DNA, 448 bp, Glycine max
aaatcattagtgcttattacaaacaaaagttatcttttattattcacgtgtgaatgttaaatttgacgttttctgcatgattacaagtctatgttcaatttaacttctaacagaattgacggttatgataatgttcacttcagaggaaataaattaagaatagaagattatacaaatcaaagggataataataatgccttatccgtcacattcctcaaatcaaagggcatgattattctaaaccacaacgttgagcgtggtaatgtttgaactttatgctagaaaacaatttggtctttgagaaaatgtttgattttgatttagagatggtgggtgcatcatcgatgacaatacctagtgctccaccgtggatggtgatcatgtgataaacaaccttatgacggtgagatgcgcaaacacaacgacaaagtttccttcacattttgag

SEQ ID NO: 193506 - DNA, 449 bp, Glycine max
acctgcacgcatgcaagcttaacatgtacgcggatggtggagaacatgtgctctcctattttcgccattcgatttgactatatcaaactgtttcccgactatggcaaccggtatgaaaaaagtctgcctatctttgacagattgaactaatttgttgaacgggacttgatgcaatatattgagtcagttaagcttttgagaaacttgattcataaaacaaaaatatgtcaatgtccgtcactctcatttttaattctcataaacatagaattctcaagtcgaggtgcgtgtgtgaaaagcagacggcaaaactctaggagaaagttaggagatctcttctacattaattcttatgggagacaagtttctttagacaatccaacttgcagatgtgattaaacacctaatatgaacctatcgttcaacagatctattatttaaattgtgag

SEQ ID NO: 193507 - DNA, 372 bp, Glycine max
  unsure (1)..(372): unsure at all n locations
gatgcagaataaacaattttataatgtgaatggtagtttcttgcataactttgggtttggttgagtatcatagttctatagagtgttactaatattntgtagtgaaaaattaagatttatcttacattatacaatatataataataataaactaaaaaataaataaaaatttgtatactcaaatgtgggaatgaaaaaaaatatttaaaagtgtatccagctaaaatcaatctttgtcatcaactttntaataataaatgtctaaagaacaaacattctttttactttttcatctaaaattaggcttatttgactatttttttaatatatttctaatacactctcctctcaaatatgatattatgaatttag

SEQ ID NO: 193508 - DNA, 387 bp, Glycine max
  unsure (1)..(387): unsure at all n locations
agctngtagaatacaccgcaattcttgngtcgtatgctaacttactcgcatatctactctataatgcaanggtagccataatcccagcaaagattcctaacctccatttcccaagataaactcaaagcaacatgtgcttatcatggaggagctccggngcattccattgagcattgaatgaccttgaaacataacgtgcaaagtctaattgatgcacgctggctgatattccaagtggaggatcgctcgtgaaatctgatgtcatcaagtgatactatgtatgatgcttcgcggaaattngaaggttctcgttagatgtctacaatgactcattaggattttacgcttatgccattatttgtaacaacactcacaatgcttatatat

SEQ ID NO: 193509 - DNA, 422 bp, Glycine max
  unsure (1)..(422): unsure at all n locations
cttctacttatgtggcagggcgggcttccttcactttcttgtcttttactctaactangaccattgttctttcttcccgcgaagctccttttcatgtctgcctgagtgggcttatagcctaaaccatacttcccacgattaccttgggtatttatcagtctagttatgccgccgttgttttttcctaaacccatcccgggctcataaccgttccccaacataactcgggccatcattaccgctgcatcggacagactangctgcccaaagagggagtccacggaggaaatgctgaccacctcaaaagactggaaagcagtttctaacgattcttctgcggctttcacataaggcatggaggatgggcagcttaccaagatatcttcctcgcctgacacgatgaccaagtgcccctctactac

SEQ ID NO: 193510 - DNA, 441 bp, Glycine max
  unsure (1)..(441): unsure at all n locations
agcttgcaagcaccaacaagaccggacacctctttactatcatccatgaaacactccaagcaccaacaatagatatcaacgaggtcatggcaggggtataaaaggaaccaaactggatgaaagaagggtaattactacattatccttgacggggaactctttaagagaggtttgacaacacccttactcaagtgtttggacagctagtaagcatactatgtcatgcgagagttgcatgaggggatctatgaccttaacataggggggcactccctatcaaccgaggtagtacgtgctggctactattggctgacacttaaggctaacaccctcaatttcatgaagaagtgcacaaagtgttagcaatttgctgacatttcgcacgtacnctatgacaacctccacaacttaagctctcctttggccttttgcatgtgtggg

SEQ ID NO: 193511 - DNA, 394 bp, Glycine max
  unsure (1)..(394): unsure at all n locations
atcacatctatgaggcctatctcttctttctccaccagaatgcaaatagtagaccatttaacaatacaaatcttttgttggtctagatcagcaacacaaatgaagtttttaatccatctatcaacaagcttgagcaaactattaggtcaagcataaatgcgaaatgaataaaagaacataccattaatgatggagtttacccattggaccctccccataatagatcacaaggatcctttctaagaaagaattttacttttgattttgtccgcaagaggtccacaagaggagtgcatttgcaaagaaaagaaaggttgagagtactttgatgggtagagagtagctacctgtactcatgtacaaggatgtntattttactaacgatcttaactct

SEQ ID NO: 193512 - DNA, 388 bp, Glycine max
caatgcacaaattctaaaataattatatgaacactgtggtcaatttcaattatgatgattaatttttaaaattatatataaaaacctaaaaagcaagagaaagagaaaatacaaaatcaatatctctctctaaatttttccttactttatttcatcaattcatattaattagaaaattgctcgatttatagggttcacgctcaacacaatagcatatcaatttcacaacaattggtatgtcaaacatatataattcactgtaataattataaggataaaatgaaaattgcaaaacaccccaaaactcattccaattgatatttctaaggatccctacacatgttctcactaatcctcaattgtgaataactcatcccttacctctgag

SEQ ID NO: 193513 - DNA, 428 bp, Glycine max
  unsure (1)..(428): unsure at all n locations
tgtagaggctacaacaagaaagtggttctagagaataaaacagtttatatagataaattggccatggtaaacaatgacactatcataagtgtgctgctctattccacaatattggttttggttttcatgagtgtccaacagcatcatcattgtattactttgctnttaacagaggccagacagctgcttctgcaattaagttgacatttgaaaataaaatcatgtaatgtaattcatgcccctctattcatgtgaatacttaaatacacgcatgctttgtttgcaaatcaccgggtagagggttgattatgtagttgatcaaaggctctggataatattattttggactgtaaaattactacaaatttctagaatattcttaaatataatatgtatgacaatggtagaatatccctaaactatagtga

SEQ ID NO: 193514 - DNA, 235 bp, Glycine max
cggcttttttgatatccttttaaccatattttggctctaattccagtcaaattttagaagcaaattgggaacttcaaggaaaaagaacctttgtggttaggtctgggggatactgactatatgacaaatacaacatggctccatacacaatcttcgaagagagggaactaaactgttgggaccttctgagaccagtatatgtcgtacgatttgccacttcgtaaagacaatctac

SEQ ID NO: 193515 - DNA, 441 bp, Glycine max
actaagctgagttgcttaagaggcttggtggggaatgatgagtatatatctcacaccacacaatcctttgattcctttatcaaggggcacttcattgttattatatctaaagcattaaacaagtgtcacgcattcatgctttataatttggaatttatgtgttcagtttttcattgagtttcatagaagatggagaaactagctgataatggtgttaatagaactcaactagttatgttatgttcaccaacatatcaaatgaaagacctcaatttatatatgcttttgatatatcttgattgatctgtgatgattatatgctcgtcatctatatgaacttaataatctctgtcaattggacaagaaaatgtttttgatttgttctataattatggtggtgcaagcaagaataaaggtgcacaaaatccttcaagtgtacct

SEQ ID NO: 193516 - DNA, 444 bp, Glycine max
taaagaaaagacaacttctaccatggaagaacataccaagctgtttactattaatatttgttatcaacttctttttctttgatcataggtgaattaattgatatgcttctttatggtagaaaccacctaaataaaaatgtaattttttttagaaattatagttaactcttaaaaaatatacaaagtgatttactgaagtacgcgttcatttgaaacatttgaacaaaaaatcaaacaatactggttagatattattattcatctttctgtcttttgaaagaaggaacaagttttctacacttgacattttgttggcattattttacaaattaattagtgattgaaacattttatatatctttacttatcgtttatgtcacaaaattatcaatttaaaaacttctctaatcggtgcaaggggaataaagtatttgctagattaca

SEQ ID NO: 193517 - DNA, 271 bp, Glycine max
  unsure (1)..(271): unsure at all n locations
ttcctcgcatgcgccgcttgcaatgaagttgcagaataataattgagatatcatcctgttgattacttaatcggttatatctaaaataaattatttggataaattatatctatccacaatgtgtgtaacacaaggaacaagtaatttggatcctctttaactatatgtagagggttttatccctaaccatgtgaatagaaccccacatgtgaagagaaaangttctctctgaatgatattttccccctttaatgaataacatcattaatat

SEQ ID NO: 193518 - DNA, 405 bp, Glycine max
  unsure (1)..(405): unsure at all n locations
gctttacacctaatttatatcctaaaaaatttctatcacaaactacttacatacatttgaagtacaccctaccaaattttgttggttcactcctatttatttatatgcatattggaaagctaattacatcctgcacatatttgcattcaaaaagggcattccacactatcatacattcatttaagaaaacaattactcatactctgctaggaatatcatgctccttatatttacctatgtatacacactattgcaaggtgttttccacgctacctctatgtaaagtatcaaacatggggcagcccanattcgagcaaaaactctcacaagcaaatcctaattntcatgtgtttctaattctaaaaccaaattntggattcctagccataagcaatgtttcttgca

SEQ ID NO: 193519 - DNA, 377 bp, Glycine max
  unsure (1)..(377): unsure at all n locations
cgttcatatactgctggtaatctattaccatatgtgtgtaatcgattacacagtgcaaattttgaattcaaattttaatagctgttgtaaatcagttttggccactggtaatcgattacatcctctggtaatcgattaccagagagtaaatttgttgaaaaagactttttaacttaaatttcttgaccaaaccttttgctacttcaattggaattctcttcctatttaatataccctttctaagactctagagactgtcttgatcatccatcttgaatatctttaatttctttgtcttgaataaagctntgagacgcattaaaaacttttgcatcatcaaaacattcagcttgatcctttgtctacaattatgttct

SEQ ID NO: 193520 - DNA, 440 bp, Glycine max
agcttccttctcatgcatgtaactcataaaccacactaatcaactttacacttcaaacattaatgttaaccacttcgtgccaccaccaccacgtcgtaagtgtcattactatcgatattgtcatcactattgtcactaccattgtcgccattgcctctacaacaactagtggtatcaataattgtgtcattgctacccacattattactattgtcattgttatcaccaacacataaaaacactcttaaaataattctaatacaatatgaaacttttaatataaatttatttgaaactaatcatattctaaaaattgatttaaattgtcttaaaccaaaactgaaaaatgatctattattttaaaaaatttaaaactcaaaactaagaataccccaaactaaacctaaggaagtaggtttaaaattattatctctgaaaat

SEQ ID NO: 193521 - DNA, 475 bp, Glycine max
  unsure (1)..(475): unsure at all n locations
ctttaaatacatgactnttccactttcatcaacacttcatctcttcaatacttactngagaaacttctgagtttgacggattttcagtgaagggttgagcacactagaggctgtccttcttgttcctactctattacttccaactccattaggtatgtttatatgccctttttcctttgttttcttcttctactttctcttagaatgtctttttttggttctgactgggataagtctccagttgtctgccgaaaatccatgtttgcgaaagagttttaggcatatgggaagagttagaatcgtcctctgactcttctatttctcttcctttttctgacgaggaaacttcccagaacttgatgaagggaccagacgtaacttctggttttaaagtcattgctagcaacacttccaatgatgacgttaaagtcatctctattgagtctgatgacgaagaaactgaagaggatgtttt

SEQ ID NO: 193522 - DNA, 379 bp, Glycine max
  unsure (1)..(379): unsure at all n locations
cttaatcaacaagtctccttcacacactttggcattatccatctaagatgatcatcattattcaatattttaaccaaatcaatcactagtctaaaattgataaaaaaaaaattctttatgcaagatcttgagagtaagttatatgaatagaattaaatgttatctaataaatgattcacttaacatagaagactttaagagagacaatgtaattcttaaaactctaaactttaagctaagccaaatataatattagattacaaaaataaaacacttcgatcgactttattaacgtagtgaaattatagagatcaacacaataatatagtntatttccgttgtgttaatttgtcaaatctcaaatgctacattgatttac

SEQ ID NO: 193523 - DNA, 380 bp, Glycine max
tggcaacatagttgacacagaagggatatctcctctagatatattcataatatcatctgcaaaagccaaatgagatagctgaatacttgcacagttgggatgaaatttaaaattggcatcatccttaaggctgctcatatctctggaaaagtactccaaacaaagcacaaacagataaggggagagaggatccccttgtctaagaccccgctgccctttgaagtgaccataaatggatccattgactgccacactaaaggaagtggaagaaacacattccatgatccaagtacagaactgggctgggaagccaatggacttaagcatccaatctaagaattcccaggaaatggaatcataagctttatgccagtcaattt

SEQ ID NO: 193524 - DNA, 341 bp, Glycine max
tataatatgtctcttgagtaaagatatcacatattattttcttatcgctgataaaaaaatattattttcttattctcactgactatattttccggatctgtctctatcaactctttaaaaaagtgacactgttaaagtctcaccttaagttgaatagaaaatttaatgtgacactcaatcacttggacattgattcttgattcttaaatggagattgaacaccatgtttgctataaatcctatcttagtaatcgaacacatggatgagcgctccatcaacaatatgcaaggtgttcttccactacttaactgatgcttcggagctgtactttaatcgcata

SEQ ID NO: 193525 - DNA, 402 bp, Glycine max
tatcataaccatgtatgagtggattataatgtacctcatgaatagggttgcaactcttagagataaattgaaaaattacagaggtgaagtgatgcctaagcccctataaaggtcggattatgaggttgaaaagtctgggaattgggtagctgcttggggaggagatggtgattttgaagtcacacatatgcattatggtaaacaaatagagttgttcatctaacttataaggattggttggcataccgtgcagacatgcagtggctgccatacaattcaaaaattttaaggttgtggattatgtgaataattattattcaagggatacatatggtgtatgttatggacacaacgtggcatcaaataatggtatggatatatggctagttacagagtttgatg

SEQ ID NO: 193526 - DNA, 330 bp, Glycine max
cgataactcgcctgtgctttttcttccatgctatatgtagcaaagtcattgatccagtcaagtttgatgagttggaaaataaggccgcaattatattgtgccagttggagatgtattttccccctgctttctttgacatcatgattcacttgattgtgcatctggtcagagaaatcaaatgttgtggtcctgtttatctacggtggatgtacccggttgagcgatacatgaagatcttaaaagggtatacaaagaatctatatcgtccaaaagcatctatttgtgagaggtacattgcagaagaagccattgaatttgttcagaatactt

SEQ ID NO: 193527 - DNA, 329 bp, Glycine max
aaaatggtgccggaaattgtaatcaattatgttttatattgaagaccattatacttaagctctataccgcctttcttttatgttgcatcaatttcctatgtttcttttacttatttccttttaaatcctggtcttgtgaactgttcaactatatcacccctctttcggtataataagatgaaatgatagggttaaaaaattttataaaaggtaacaaccaattctttcaaaaattagcgataaaattatcatcaagatgaaaattaattattttaaattaaatagtcacaatagcggctacatctacattaaataaacaatattaaaat

SEQ ID NO: 193528 - DNA, 388 bp, Glycine max
tgatgcgctccatgagaggttggatcaaatggagaatagagatcataatgaagaaaaaaggatgagaaaagggaatgatggtgttcctaaacaaaaccgaattgatggtattaaactcaacattcctccatttaaaggaaagaatgatccggaggcctacttggagtgggagatgaaaatagagcatgttttctcatgcaacaactatgaggaggaccacaaagtgaagcttgccaccacggagttttccgactatggtcttgtgtggtggaacaagctacaaaaggagagagcaagatatgaagagccaatggttgatacatggacggagatgaaaaagatcatgacgaagcggtatgtgccggctatttactcaattgactttaaa

SEQ ID NO: 193529 - DNA, 403 bp, Glycine max
  unsure (1)..(403): unsure at all n locations
ggcagaggcagaaaactctgcccaacacanaccaatatcacaacttttctcacttaaataccccagtaacattctcttcgttccaattcgttaaccattggatcgactcgaaaattttactggaagtctctagcacataagtctacattgtgaccgttgggatctgctagaaaacatccagaacccaatctgtactactctntccacaaccagcaaatacacaacattttatgcacaaagccaaaattctgctgcacatatttgacagcaaaattctgcataaagtgcagattntcgaaatcacatttgccctcatccaatttttcccaaattgaatcctacaagtcctaaatcatgtatcaatcatgtctaaaccatggacaaagcttagaccataagcact

SEQ ID NO: 193530 - DNA, 429 bp, Glycine max
agcttcttagtttagatgatgcaaatgggtttgtatctacctcattcactcctctaatgactatggcatcatttctggcactaaactgctgggaataggaggccatcttctcaattaaatttctggcttcagcaagagtcatgtctccaaaggcttcaccactggcagcatctatcatacttctctccatattactgagtccttcataaaaatattggagaagaagctgttctgaaatctgatggtgggggcaactggcacatagtttcttaaatctctcccagtactcatacaggctctcttcactgagttgtctaatacctgagatatccttcctgatggctgtggtcctggaagcagggaagattctttctaagaatactctcttaagtcatcccagctcgtgatggccttggacaaagaatacag

SEQ ID NO: 193531 - DNA, 366 bp, Glycine max
cgtggcttcattgatgactcagtacatgtatgtcacgagtctattggcatataatatcgaatcttttccacgtaagctggttgtacaaagtttgtttgttcatacaggcagtgtaattgggggagattatgtttgctccgcaaggtagccagagccagccagtttttcattaaacaggcatgatagtcttcaactgcaaaaaagtagtgcggagaactagccagaattgtgcctgccatcaaattcggtgacgcattacgggattccactacacattcataggctgttagggagggttgtgcaagtgaagaacgcctatggcattcattaaaagaagacagactttcacgggtttgcatggatgtc

SEQ ID NO: 193532 - DNA, 334 bp, Glycine max
agcttgccacccagctcgcccaagtgagccagttatttgcacccttctgtttactaaatacacccccttgctcttttttggtgtttctttttccgttatgttacgaaactctacgaatttcgtaacgatacttgttttctttctgtaatgttacagaaccttacggatcacataatcatccccttttttggcttctgggatgttacggagcttacggattgcgcactaacactttcttttgacttctggcatgtcacggaactttacgggttgtgcaacaatgctttcttttgacttccggcatgtcacagaacttcacgaattacctaacgat

SEQ ID NO: 193533 - DNA, 411 bp, Glycine max
  unsure (1)..(411): unsure at all n locations
ctacacctgannaagaggatganataggngcacacaagtgagttcttccngattatgacggagccaacaaaaattttcatgcagatggaccttcctctagtaattttgacttgcagcagccttctgtccctcttccatttccacctagagcaattccaaacaaaaagatggaagaagtggataaggagatcttgaatacctctgctagatggcatcaagcatattccaagatatgccaagtttctaaaggagttgtgcacccacaaaaggaagctcaaaggcaatggaaggattagcatgggcagaaatgatctatacagtggcttagtgcacacggtagtcgcttagcctcgatgttcataatgaatatgaacattcagcaacctaattgaactcacttagcgcatgtat

SEQ ID NO: 193534 - DNA, 438 bp, Glycine max
  unsure (1)..(438): unsure at all n locations
gggatcctcttagtcacctgcnggctgcaagcttggcaangantatttgttttctcatatgctacaccgcctgccgattgccagggaaagtggagttgaacacacggcaaaaccagaagaatatgtacctatggctcacggatatatttttcataattggcggtcctaaaagacgtaatttttgaacgaaagtcaaagatcatttagcttctttgcttcaggcaaagtattcattggaagtntcaattacagaatgaatgtactacgcaagatagagctcaagaacagaacagtgcatcagaggctccactggagcttgatagaccatcaattgttggagaaaactgacagacagacaagtttttcttatttctagaaggacagaccttatgcttatggcactactctagtctgaatttgaggtttctattatatttc

SEQ ID NO: 193535 - DNA, 379 bp, Glycine max
  unsure (1)..(379): unsure at all n locations
agaaagactatcactgttgtatgtgtagtcctaatgttaaaagtctacaagcgtacgtactntatctggtccaagtttgagtgaaccaatatgacgttggttccttccttattgcttcttgtttaactatgttattgtatgcttaaaagttatttttgaaaagtataactctgatatttgatcaaaagaatttaataaaacagttttattattcagaaacactaagcaagaaaagttaaaaccataattttttataaaacataatctgagatattgagagtaggttctgaatcagtaaaacgcacgaaatatttactttaaaaattttaatttattccagtacttgtgaggaaaaggtttactcctattagtcctatga

SEQ ID NO: 193536 - DNA, 301 bp, Glycine max
gaaccgcacaacaaacggcatgtatcctcttgaatccaggactgtcatcatcaaaagggggagattgtggaagcaatgacttccaaactattttgatgatgccaaagaatcaatagttaagcaaattccacagaatctagattcaagtttcaagaatcaagattcatgacctaatattcacagaatgaggagaataccccctcaagataagtacttaaaagggttttcacaacattgagtagcacaagaatttttccaaaatcttttaccaaagagtttcactcgcttgtaatcgattacc

SEQ ID NO: 193537 - DNA, 443 bp, Glycine max
  unsure (1)..(443): unsure at all n locations
tccatcanagnncgncnnntntttnatttttataaatgcaatgagcaatgctaccaatgaaaagcatggatgtatgcgaatgatgcatggttgatgtattgcgaaattttatgcaggacatggggttgagtcaatntagattttcaacatggtccatgacatctttgtcaaggtgaaactagaagtaacaaggacatcaacagtcctaaatgtgtttggcagtagacgaagcaacgatgtaacccgattcatcttttgccccaatttcgcaagatggttacttccatacttcaacttgacttgatgaacctttttcatanaagcatgagcttggttcaaccccataacccaaggaatgacaatttcgataccaatacttcgacatcattcatagagatgaatgaactcggcatacttatgctatgcatggaaatgaattatga

SEQ ID NO: 193538 - DNA, 397 bp, Glycine max
  unsure (1)..(397): unsure at all n locations
tggatccagcaaatacatttattacatagacccattcgggacatcatatagctaagaataccccaggaaaccgcatcatatgctctctcaaaatccactttgaacaacatacaaggttattgccccctttttgcttcctccaccacctcatttgcaacaataacactgtgtagcagctgtctgccttctatgaaggcagattgtctctcgtcaatgatgtttggcaaaattttcttcaacctgcttgataagagcttggccacaatcttgtatatgcatccaataagcgagataggtctgaactcatttagtgtttggggatccgaaaccttatgaattaacgtgatgaatgatgcgttgtcttctatanggaaaatcccacttgcgtggaattcat

SEQ ID NO: 193539 - DNA, 275 bp, Glycine max
  unsure (1)..(275): unsure at all n locations
actcacttgagctcttggaagncactttgtggggacgtttttctgttttaaaatacaggagcacggttgttgcaaagagcctcatatatgggcataatggaactggctaagcaaaatatgaaccgggataaattatgtctcgaacctttgtaaggtctccttgcttgaacctttaactggatgagtgcggcataacgtattgatcacatggatttgaagatggatgatgatcaataagcgtgaatttcgggtgagttatttgacattccctgtgg

SEQ ID NO: 193540 - DNA, 324 bp, Glycine max
gagatattgctcaatactctacacgagaagaaaggcgacgacacagtgcgatttccaccatctgaaaagccttcccgtcttgaacaggatctcaattctctaccttatgaagactatgactctgatgtcaacggacaatgagacatatgttgaaagctcaccgcgttcaccagtcattgctcatagttctcgtgcagacataacctatatagcaagtttgttctgcaacctctgtactacaaggacatgttcaatcatttggcgagacctatctgttacaatatctacaacgttttgactgtctagaccgtatttgttgtaact

SEQ ID NO: 193541 - DNA, 380 bp, Glycine max
  unsure (1)..(380): unsure at all n locations
tagatattaatnnagncagcgggcaaccacattatgcaattctaaaggtatttttggggaaaaaatgttttctttctaaatttaatatttttccaaaaataaattcaattaaacacaaattaaatataaattctcatacacgagtgagaaataacattcatgttcttgttcccctctttatttatattgcgtaactatgacttaaccgcacatgcaacagataaggaagagcaacggcatgccttcacttttaataatgcttggatttagaagggaaaataaagtgagaaatattcctgttttggacgggtggacggtttacctgtgaaaggaaattcgacacacaaaaataaatacgaaatataatgatttttgtatta

SEQ ID NO: 193542 - DNA, 375 bp, Glycine max
  unsure (1)..(375): unsure at all n locations
ctgagacgcatttgatcttttggcatcatcaaaacatcggcttgattctatgtctacaatctccccctctttgatgatgacaatccctgagatcaagacaaactatatacaagatgatagcacgttcacacaacccttactccccctatctttcggcatgtatgcttaactttacttaatgataaattactaattgatttctgacccaagctctctcaagttctctcccnctttggcaacatcaaaaagaactaagcaatacaaaaaaaatccataccaagcccaacattaaaccaaaagagatccacacattgtcataaccaaccaaagcaaagtcctgaaatataataatagtgcaagagtacgataactagt

SEQ ID NO: 193543 - DNA, 383 bp, Glycine max
  unsure (1)..(383): unsure at all n locations
caagagtcttcacaaataactatcttgattcagaattctaacaaaactacccatcatatctcccaaaaccccatacccacgataatcaaaggagaaagaagtccacccaaacctgaaatttcgaagtcccactcgtagacacgcacttcacgaccccgaaaatgctctcctttcacgatttggggcagaaatgatggccaaaggttgaagctttgtgtggagcttcaatggtgaatgaagaagaagaaagctacgtgagagagggagagaaaaggcttctgaacttctttcttttggctgagtgaggagagagaaaagctttttggttttaaataaaggggttttctctttttttttttatnttatttaagcaatgccacatg

SEQ ID NO: 193544 - DNA, 433 bp, Glycine max
  unsure (1)..(433): unsure at all n locations
attatgtggangggcgggcttcttgacgttctggtnnattactctagctttgaccaccgctcttccttcccgcgatgcttctcttcatatctgcctgagtgggcttatagcctaaaccatacttcccacgatttcctttggcatttatcaggctagttatgccgccgttgtctatgcctaaacccattccgggttcgtaaccgttccccaacataactcgggccatcattactgctgcatcggacaggcaagcttgcccagagaaggagtccacagaggaaatgcttaccacctcataagactggaaagcggtttctaatgactcctctgcggcctccacataaggcatagaggacgggcagctcactaagatgtcttcctcgcctgacacgatgaccanatgccccttcactacgaatataacttttggtgg

SEQ ID NO: 193545 - DNA, 377 bp, Glycine max
caactacaagaactagaagacaaatcaatctcacgaacaaggaatgccacccacctaaaagttttatggttagccaaacctacaactctaatacccaatatttgtactcttcccgctactcaaagtcttttgtcccataaatagaaaatctaggaatttggctaggaggtgttttaacgaggcatatcaagggtaacgaagggaatatgtactcaactaaatacattgcataaaattctacatcccttccttttcacattgctcttatcaagacaagagcatccataatcgtactcctaacgctcttaaaccccaaggccgccttgggagcccttctttagcatatgactcagtgatgccaccacacagtgatatgt

SEQ ID NO: 193546 - DNA, 403 bp, Glycine max
  unsure (1)..(403): unsure at all n locations
tctcttcatgcattcccttgcaacgnttgaacaattcatcaccgtccaacctgtngtgcaacaacttgatcaatacatatccaaccttagaagacaattggtggtttgacttcacaacttcagcaaaggtgacaatatcactcgctactcttgggcgctccactctctaaactgtgcgagcaataagccttcatttggcgacctatgcctcctacgaagccaccttgcttagagcctcttggtgctgttgtccattctttatcaagatcgccaaacttctctgaacgaaaacacttgcaaaatcatggcatgctggacctgagctgatcaaatcaaatatttatgaaaggctaacacaaagccaccagaagcttctggtatgctataccctatccacatagga

SEQ ID NO: 193547 - DNA, 441 bp, Glycine max
  unsure (1)..(441): unsure at all n locations
gctggntatctccttcttcactacatcaagaatcactgggntgagtcttctcttgggctgtcttactggtttaactccatcctttaaatttattcgatgcatacatgtggatgggctaataccaggaatgttcgccaaggtccaacctatagccttcttatgcttcttgagaacaaacaacaacttctcctcttgctcatcagtaagggaggcaaatataatcactgtaaaactttngctatcatccaagtaagcgtattctaaatttgatggcagaggcttcaattctggtgtggtcggctggatagtggtaaaaagagatggtttctcatcctgtacctcataaagaaagtcagaggtatgtgtacttcctgaaacatngttagtcctatctgactctataaaatcaatctcataaggaaaacaccaccaccagacatg

SEQ ID NO: 193548 - DNA, 394 bp, Glycine max
ttgttcgattccttctttgtgcagatgcttgttggatttcccctacggatgctttttgttccactttttctttgttcaaatatattcaagggaaatctggtttgccggaaagcgcaccggatcatcaagtatttaaaaattaaaacggatgaatttgagtatcgaacacagggaactaatgttagcctgaattaagttcagaaatgaaacattgttaagagaacatgtatgattgataatttcaaatagaatttaaactaacttttatgctaaaaactataaaagtcaaagtaagtaaaaatgacaacagaagatagaaatgttgggtgtttataacaaacaagcttatgcatataattatatttctctaatcaatcatgctcttgtgttctat

SEQ ID NO: 193549 - DNA, 409 bp, Glycine max
  unsure (1)..(409): unsure at all n locations
agctntgagaagngatcatggatgtgaatttcaaaatgaagacttttaatccttttgtgaaaaaaatggcattaatcataacttttcagctccaagaactccccaacaaagactttgcttaacaaaaaccttttctctaaataatttttggcagatgccattggcactgcttgttacatactcaatagagtgattataaggcctacctttaaattaacacctgtcgcaacctacccttcggcgggagggcgacgcgagactcgcgggatgcgtgttccacgaaaggaatacgcgcggagtcgccaccaacgtttatttgaggaaaacgtccgaaaaaccgganaagacgtgatctacgaactttntagtgaaaggttcggggagtgtatttacgcacggggaatgtatt

SEQ ID NO: 193550 - DNA, 422 bp, Glycine max
  unsure (1)..(422): unsure at all n locations
ggaatctntccttcctaagatggtgtctaacccagtccctttcattaagaactagctcctttcttcctctattgcccttagttgaatacacctttgtttggttctctatttgggtcttaaccctctcatgcaacttctttacaaactctgacctagattccccttctttatgtataaaagaagtgtcaagtgggaggggaatgaggtctaagggtgttaagggattgaacccatagacaacctcaaaaggcgattgcttggtggttctatgaacccccctattgtatgcaaattctacatgaggaagatactcatcccaagacttatggttgccttttataagagcccttaaaagagtggataaagacctattcactacctctgtttgcccatcagtntgtggatgacaactggtagagaaa

SEQ ID NO: 193551 - DNA, 114 bp, Glycine max
aaaaagtttaatattttataaaactttaataagttatatatatgaaaaaataacttaaaatagaatttgagacatatatgtaaatttggagagtgaaaataaaacaaataatta

SEQ ID NO: 193552 - DNA, 380 bp, Glycine max
  unsure (1)..(380): unsure at all n locations
agagggcctatatatatgtgcgtctaagccagaaagatacttgcaacagaacttcattgtcaaatgatctctcaacaatctcttgggcaaacacttgcanatctatttgaagttctttcatgaacttcaaattgtattatccactctaaaggagagaaattcttcgttcttctcataaagtcaattggtatcaagagactggttgtctcttgagagtttcttgaacacaacggaaaggaattccttgcgtgtcagaaattgtaaacagcatctttacaaagatagtggacaatcttaagtgggttgcttgaggactggacatggccataaggaaggggccgaccaatataaatcgagttcgcatctctctactccctcat

SEQ ID NO: 193553 - DNA, 281 bp, Glycine max
ggattagtgaaccgtctaaccaaacctggttgtatcctcctgaattcagggattgtcatcatccaaagggggagaatgtggaaacaatgacttcccagattattttgatgatgcccaagaatcaaaagttaagccaatttcaaagattccagaatcaagtttcaagaattcaagattccagactccagattcaaagaatgaggagaaaacccaatccagataagtactaaaaaggtttttcaaaacattgagtaccaccgaattattcacaaaatctttta

SEQ ID NO: 193554 - DNA, 385 bp, Glycine max
  unsure (1)..(385): unsure at all n locations
aatgcaaccaatganaagcatggatgtatgcgaatgatgcatggttgatgtattgcgaatatttatgcaggacatggggttgagtcaatttagattttcaacatggtccatgacatctttgtcaaggtgaaactagaagtaacaaggacatcaacagtcctaaatgtgtttggcagtatacgaagcaacgatgtaacccgattcatcttttgccccaatttcgcaagatggttacttccatacttcaacttgacttgatgaaccttttttcataaaacatgagcttggttcaaccccataacccaaggaatgacaatntcgatcaccaatacttcgacatcatttcatagagatgaatgactccggcatacttatgctatgcatg

SEQ ID NO: 193555 - DNA, 379 bp, Glycine max
agcttaataaatctatatatggtttaaaacattcttctcgtcagtggtaccttaagtttcatgggaataattcttcatttggttctgatgaaaaccccatggatcaatgcatataccacaaaggttagtgggaggaaaacatgctttcttgttctatatgtagatgatattttactcgcagccaatgattcgggtttgctacatgaggtgaaacaatttctctctaagaattttgacatgaaggatatgggtgatgcatcttatgtcatcggcattaagattcatagagatagatctcgaggtattttgggtctatcacaggaaacctatattaacaaaattctagagagatttcggatgaaagaatgttcaccaagtg

SEQ ID NO: 193556 - DNA, 464 bp, Glycine max
  unsure (1)..(464): unsure at all n locations
taggttaaaagaggaataaanataagttaaatgaaaagaggtttattatatttaaaanataaatactttaataaagaaaaagaacgtatataataattttttaaaatttgtaacattttactcttgttggcagattcagttatatttttttttattgtattttctttcttataatactttaatagaaggtttatatttaccctgaactatataatcgttcatattagacaatatctaacacttgataattaatattgtttactacataacttaactcacaattaaaaatatagaataagaaacataaaaatcaaactaaaatcaatgaaaaaaaagactaagttaagtatgaaaaaaatagtatgacacactttttgtgaaaaaatagtatgacacactctntgaaaaaaaaaatagagaatttaaaaaaatcaatatttcttcgtttattataattgtatgta

SEQ ID NO: 193557 - DNA, 369 bp, Glycine max
  unsure (1)..(369): unsure at all n locations
tgcttgcccagagaaagtattctctttgaaatgcnttaccacctcgaaagactggaaagcggtttctaatgactcctctgtggcctccacataaggcatagaggatgggcagctcaccaagatgtcttcctcgcctgatacgatgaccaaatgccctttcactacgaatttcaacttttggtggagtgtagagggaacaactcccactgagtggatccacggacgtcccaacagacagctgtagagggggttaatatccattatttggaaggtaacttggcatgtgtgaaggcctatctgtactgggaggtcgatctctcccctaacgtctcggcgggtgccgtcgaaggcaccaaccaccattgaact

SEQ ID NO: 193558 - DNA, 379 bp, Glycine max
  unsure (1)..(379): unsure at all n locations
ntccgctagcatagggatcgcagatgttacattcattcaaatgcaagacgaagaccctgctgcagcccttcgactcctgctgaacaccagtcaagccaacacctcaagtgaaaagaaccctggtgcttcgtcctcatctgatgctgatataacctctacagtacgccaagaatgcctgcttttgaagttatcaatggaatacgcacgggcagacgtacttaaatccattgaagagaatacttctgctgcttttgggcacctgaactttttgaagaaattgcataacccccttacttctgatgagattctgggcgaagttatacanatcgagtgcattatcgatcaatttgcaaatactgtgcagaaaaaacgcgaaaat

SEQ ID NO: 193559 - DNA, 308 bp, Glycine max
ggaccttaagcacgcagctgcaccggtgcatgggcttgtactgctggaacttttggaactgaatctttgactcaatgaggcctcaagatattttaccaggaaagcgccaaataaggaaagaatgaaagggcgaatcattaaaatagccaggagaagagttctcccaaaagtccttgataaaactggaagaagttcaggagaaatacgagagagagaagaagaaaaagaaggcgacccaatgaagagaaaagggaaaaatgacttgagtgtgctacagacttatcataagtacacaggtacactgttta

SEQ ID NO: 193560 - DNA, 392 bp, Glycine max
  unsure (1)..(392): unsure at all n locations
tagtgctcgattaattgtctcttctcttaatttacgttcattcttaatgatcatttatgagtaattggtgtatgtgttgcttaatcacataacgaatgtcttatgttaaatttctcttaataatttaatttacggttggattaagtggttaaactgataaaggataaattctcgcaacctacgataagagacttgcttgtgaatcatggggaagcaatgcattttaattctaatattttctangtcaattttactcgttgtgtaatttacaaaagcaaacaccccccccccccaatttgttgccatttcctactatctgttatgaacaattgatttatcatcgctcattgtgacacgacctangatcactttctaattactacattttaatg

SEQ ID NO: 193561 - DNA, 308 bp, Glycine max
  unsure (1)..(308): unsure at all n locations
ntaggagaagaccataaaactaaggtagttcctatacaaaatataattgangaaacttcgccaagaatccccattgaaaaacctttattcaaacctttaaagttagtgagaaggctaaaagaaaaattacggaacttagaaaaactaaatccttaattgaaggcgtaggtgacaaccatagtgaattactaaacaagaatggtagtttacttaaagtcattccagatacccnccaagcctcggaaaatacttccaaaatggtaacaagaagtacctccaaattaatcaatgttattaatgaagatagt

SEQ ID NO: 193562 - DNA, 444 bp, Glycine max
agcttctacttatgtggcagggcgggcttccttcactttcttgttttaacgcgagctctgaccactgtttttccttcccgcgatgcttcttttcatgttcgcctgagtgggcttatagcctaaaccatacttcccacgatttccttgggtttttatcaggctagttatgccgccattgtctttgcctaaacccatcccgggttcataaccgttccccaacataactcgggccatcattaccgccgcatcggacaggcaaggttgcccaaagagggagtccacggaggaaatgctgaccacctcaaaagactggaaagcggtttctaacgattcttctgcggcttccacataaggcatggaggatgggcagcttaccaagatatcttcctcgcctgacacgatgaccaagtgtccctccactacgaacttcagcttttggtggag

SEQ ID NO: 193563 - DNA, 451 bp, Glycine max
  unsure (1)..(451): unsure at all n locations
tgtgtctagtgtcgacggcagactcgcangctttgtcgtacctncttcactctgaccgntatgcggtaagtaccaatattgttttcaactgccattgtttgttgttcgtgttgtcctcgataaactaggtttcattcatgcatgtctggtgtttatgatattatcaatttgttgacatttggagtttgtgtttgtttaaatcctaaatttacttagttgtaaggagaaatccctttcatcgtttccaagcttagtgcagaaaattgttcgtcttgtatggcggcagtagattctttaatctccctctggcactggtatgtggattgtggagcatcattcctagttttaacatgttgatattcttttgagtttttcttgcgttgcccagtgaggcgatgagcagcagtaacagcagcttcagcaactgctgctgangcaatgaccactgtta

SEQ ID NO: 193564 - DNA, 435 bp, Glycine max
tgcagctgaaatatactaaaatggtactttttatttgagcttatattttactgaattttctaagcatctggaaaaaaattatacaaaaagaaacaagtgatttggataaaattaaaaaatactaaaaatcacacaagttggcagaaaaatcagtatccaggaaaaaaaagtgaaagggaagtgtgcttgttcttttggttcaaaatatattctataattggtgcctatgttatatcaatcttagttctgaaatttcatttaaaaattactgtgaaaacaagttccaaagctagaggtttgttgagtctttttttttatagtatttttactttactctagagccattctaagtttctctttgagtcattgctttaattgttgagtaatccttgaaaaattgtcttgttaaaactcattggtttacctttcatttca

SEQ ID NO: 193565 - DNA, 320 bp, Glycine max
  unsure (1)..(320): unsure at all n locations
gaaatgcaccaacaactttntatccgcagaatacgcccccatctttcggcaatacatccgaagatgcccttttggacatgtcgtccctttatacttatcaaaatctggaactctgaactagggagggatgacgatgtcaggtaccagacataagtccgctaaatccgagaacgggtaattgccgaggccctctaccgctcttagcctctcttcaagtgaatcaatctttcccttatcttctgcgaagggaacggattcttttacnggtgcgggtgaagatgggacatggcgcgactatgttggttggggtaattcatggg

SEQ ID NO: 193566 - DNA, 360 bp, Glycine max
  unsure (1)..(360): unsure at all n locations
tgcaagcttctcgaggaagcctcttaatgaagcttctcaggaagctatatgaagctgtctcggtaaaaacgttgcccagccttcgttaaccgttggatcttctcgaaatttggtctgcagcttcacagaacaagtgtccacaatatgaccatggggatctttgagaaattgtcggaagtgtgcgcaaagtttccgtttccgagagcattgctcacttgtgcgtnttgagccttgtagtccaagtagctttggaaaaatgccatttcttctccttctttcttccaaaaccatttccaacgttccaagatctttctccatcacccacagccaccattagccaccatgaaccgccattgttct

SEQ ID NO: 193567 - DNA, 401 bp, Glycine max
  unsure (1)..(401): unsure at all n locations
gcttctggcggcagcacactcccttttccctataaataagggatgtggatgtttcanatatgttcattacccctacgctatgcatttcggctatattgggtataaaacacgtctccgtgaagaagaataaagtcgaagtgcttccgtaatccttccgagacgtttccgtgagcaaatctgtgaagattttcctccgttcttcaccattcttcgaccgatcttcgttcgttcttcgttcttcaactggtaactgttcgaatccgagactttcaattcatttcttgttatgtttgctttcatcttcatctcgttcactttcgagtttcttttcttacattgttaacgggctttaaccatttatttaagccattatctcatctaataaatgataaaatgaattt

SEQ ID NO: 193568 - DNA, 174 bp, Glycine max
  unsure (1)..(174): unsure at all n locations
catcctcaatactttaattatgagatcttcatttggaaaattttttcctanagatgcaagatgaattactatgtgtgtgaacctcttttgcatgtcttgtatactttcatttgcattcatcctaaataggtcatattcatgatttaatgtgtctatcctagatcttttacatct

SEQ ID NO: 193569 - DNA, 447 bp, Glycine max
  unsure (1)..(447): unsure at all n locations
atatagacttcaaagcttcgattcattgagagatctcaactatgcattgtcaaatattttttacgcttgacacgaggtcgctactatgcagagagagaaagtggggaccacaaacactttctgtaatatatctttagagaagtacaatttgttagtgtcatctagttcttagagctgactttcaacatacaaatcgaaaaaatgattacatcataagacaaaaggaactaataatatcaagacaagacaatttgaatcttccttttggtgcgttatggcatgagtttcttactgaacctatatacgttacttntcaatgattgtttttagacttgacgatcgagatattgtttcattgcttctgtattgcgagtcaagcgctataacacttgttttcttaacgctgaacgctgaagcatatctttcaatcactgatactttgtttat

SEQ ID NO: 193570 - DNA, 313 bp, Glycine max
ttgatcacagggtgattgataaactctcgactccatttatataacttgggaaatttctcaatggtgagcaactccaaccctgcaatctcttgcaatatggcaacccaatacccaatgaaattggcagcaatgtctaccaatcctatgctctctcctccaaaaaatttcttgtctttcagtgcttcctgcaggattttcaatgcttccaaggcttccttcactgctttctcacgtccattctcatcactccagcaagcattccatatagcaggcaagatctaaaaccaaaaaagacaacttaaaactctaccct

SEQ ID NO: 193571 - DNA, 439 bp, Glycine max
  unsure (1)..(439): unsure at all n locations
taagtacaatgacaatgtctctattggcacaatttatatatggctatatacacgatagntttaattacaaacgaacaaatgaaatgagtatgccatgacaggttttataccagtctacaaatgaacaaagactcatacacaagatgaaaatgtattttgcactaataatccacaccataattgcatttattcatttacaagttatagtcataggctagcacaaggtagcagttaacttgaaacttgtgagtcatccacaatatatagagtaataatatgccatagcatacagacaactgccactaaatgaaaaactaacactggtaagttcatgaaataatacagcttccaccttcatactcatcagactaaggtggaagcaagtgatgaaaaacagtgagcatcacttttcttccatatgagtgaaccctattggtaa

SEQ ID NO: 193572 - DNA, 318 bp, Glycine max
  unsure (1)..(318): unsure at all n locations
tcaaaaaatgcgaaaaatgatgacccaaggctgcaaactcgtaaaatccgtgggtatggcttttgaaaggggggaaaagaagtttttgaatgcaaaaacgtccccccctttcgtcacttttatattttggtgcagaggtggctcgcccangcgagctaacctgcacccccttttntttttttttttttttttttttgaggggaacatttaaacatgcccctcccttctcatggattagcatctcgcctaacttgaacttacttaggttagaattaggcgttgattacttattttattattggtatcattttttttctt

SEQ ID NO: 193573 - DNA, 166 bp, Glycine max
ataagcagcacttcttggacctgaaatgctactaccgaatcaccaacaagtgaaggtgattcgagagaagataatagccttccatgataggcagaagagccattatgatagaaggagaaagccactttactttcatgaaggagaaccacgtgttttgaaggattct

SEQ ID NO: 193574 - DNA, 374 bp, Glycine max
  unsure (1)..(374): unsure at all n locations
atggcttattccctagtggatggcgccacctcttacctctactcctttgtcttccgctgcatctccatggtggaaaatcaccatntaaggacctcattgaagctcaaagatccagcctccatagaagctccacaagcaagtttccatcaagtggtaatcagagcacaagagcttcaagtaggtgctccttaaacctccattaagtttttgctttaccttctcttccattgttgtttcttcattttttctccatgtaactcctcacatgtcttgtgctaaatgttgttaacatgattctntaaattttccaccaattaaacttgctatagaagctagatntgattttctatggttcaaatttcttgttcttgttc

SEQ ID NO: 193575 - DNA, 392 bp, Glycine max
  unsure (1)..(392): unsure at all n locations
ntataagcgcgggtctgggagactaatgtcaagtggtcgctatatacgatgatgatgttccgagtacattggatttggtacgaccatgccctcctgatttccagctaggaaattggcgagtggaggaacgccccggcatttacgcaacgagcataatgtaaacctttacggttttaaaagctctatagttgggcctaggctttagagtatttccttttgttaaggctttgtgtcttttgtttttgaatttataatacaaggatttttcttcatctgttcctaagtctctacccattctcattcatttgcatgtttacttctttatttctgaaacggcagatccgatgacgagtccctggaggtactaatacctgggacccgcttattaactt

SEQ ID NO: 193576 - DNA, 434 bp, Glycine max
  unsure (1)..(434): unsure at all n locations
agctntataaattgaattattatgttcaatatttgctggtaatcgattaccatatatgtgtaatcgattacacagtgcaaattttgaattcaaattttaatagctgttgtaaataatttttggccactggtaatcgattacatcctctggtaatcgattaccagagaataaatctcttgaaaaagactttttaatttaaatttcttggccaaaccttttgctacttcaattaggaattcccttcctatttaatatacccttcctaagactctagagactatcttgatcatccatcttgaatatctttaatttctttgtcttgaataaagctttgagaagcatgtgattctttggcatcatcaaaacattcagcttgatcctttgtctgcaatcttccnccttttgatgatgacaatcccttgaatcaagacaag

SEQ ID NO: 193577 - DNA, 442 bp, Glycine max
  unsure (1)..(442): unsure at all n locations
tatgcgcatatgtccttacgaacgtttactagcacaagacattctatttactaagaaaaaatgcacccatatacaatcaaggcagcttcgntatctagattatttacatgtacttccaaggtgtatctgttacttacatcacacacatctccttggctaaatttacatacatgcatactcaaagcatattggggtaccaaaaattgcacatgtgcacatcttggtatttctaatacctatacaaacttcatgttgaatcttgactatctacacaataaggtgctacatttcatgctcttttcaagattttgctaccttaagtcgcatgcaaattcaagtatatttttctttgcttgactaaattgtatcaaattaaaaggatatttttttggaatgtatgtccttactaacatgcacatattatatttttttttgtgaaatt

SEQ ID NO: 193578 - DNA, 321 bp, Glycine max
  unsure (1)..(321): unsure at all n locations
agcttctcaaggaagctacctagtctataaaaataattatgtataacaccngntgcaactntgatgaatgaaagtcttgtgagacacaactcaaagttccacttctctccctcttttcttccttcaatttcatgctcccccctttctatttctctccctctttcttttcctccattgaagcatcatgtccaagctttttatccaaggctcatcttggtggcgaagctccttcttccttggcttattcccttgtggatgatgtctcctctctcctcttctcctttgccttccactgcatctccatggtggaaaatcaccatt

SEQ ID NO: 193579 - DNA, 451 bp, Glycine max
  unsure (1)..(451): unsure at all n locations
ttcaagactcaagagtcaagaatcatgagacgacataatcaatattgttttaaanagttttttcaaaaactgagtagcacatggatttttctcaaaacatgtttaccaaaaagtttttactctctggtaatcgattaccagattgttgtaatcgattaccagtaagcaaaatggtttccaaaaagttttcaactgaatttacaacgttccaattgattcaaaaagctgtaatcgattaatatgttttggtaatcgattaccagcgcctttgaatgttgaaattcaaatttaaatatgaagagtcacatcctttcacataaaagctttgtgtaatcgattacactaagttggtaatcgattaccaataattggttctaagtaaatcaaaagatgtaactcttcacatggtttttgacttttcaaatggtttaagttttctacagtcatactc

SEQ ID NO: 193580 - DNA, 300 bp, Glycine max
ctttgttgagggtttatcaccatctgttgttgaaaaaaggccccccttatttatagcggctgtcaattctcttgggattgcaccacctatggacttgtttaatttaaaagattagatttttacggggaattcttgcttgggttgcctctgctgacacagatgtgcatttcccatggtggtgtgtaattctattttaattaggataaggcacccccctggtgttatggtgacattcatttctacttttgaaccactgaggctttcttttatgggccccttttctataaaaaaccacctgat

SEQ ID NO: 193581 - DNA, 408 bp, Glycine max
  unsure (1)..(408): unsure at all n locations
tgctgtaatttaaaactatatttagtagctgtatattntattattaatcattcttgggcactaacctaaaataagtattaaaaaaatatcttttcttagatacactttcttgtgcagtaacctaaaatacatattaaaaaaataaacatgtttattctaaaaaatgtcaatgacgattaatttgaaaactggatggtggttactctttaattntatcttcacatcataaatttttttataatccaagtatactttaaccaaatntaaaattgtataaacccttggccctcaaggatgaatactattttaaataaaanaacgcaagaaaacaaaagcacaaatgggacttaaagtgcaccttgaatctgttcagttacaaatgccaagtttacctttactaatactaac

SEQ ID NO: 193582 - DNA, 366 bp, Glycine max
cgggatccttaatcacctgcggcatgcaagcttatacacaagctaatttatcttaaattctattttccttggtaatttttctcctacaagtgcttattaagaaatttattcaaaccagtcaaaggcgcttagcactccaatacaaaaaccgaatagatagaccgaaagacagttctaccttgacataaaggacgccgtcaatgatgatggtgacattgtccttggtgatagcactctggtcgggaatgcttatagcctcttccttgagcgaatgcacataagcgattctatcaacgaagggaatcaaaaaatggattccggagggaagagtcttgacgtacttcccgaatcgctcaatcacaaacg

SEQ ID NO: 193583 - DNA, 362 bp, Glycine max
  unsure (1)..(362): unsure at all n locations
ggcatgtacatacacatatatatatacaccttcttgtccaacctcgtttggaatttgtcgtgcctcttgttcagctcttttccttttcctagctgcaagttttcttttatttgaagctgtccttattaatattgggcctaccagaagtgccttccttttccagttatttcttttcttttagttntatgtgaattaataattaagcagtcagtaattggctttgcaattgcatattaagtagattaatttgggttcagaatcaggataaaagggttttgtaactttagcaaacaattctgtcatctgacctaatattcatttgattcatttgacagaatctggatatatatatatatataatt

SEQ ID NO: 193584 - DNA, 324 bp, Glycine max
gagtggttttatcaacattttgttagatgaaataaaggcccaaacttatgttaaagtggctgccaattctcttgggatttgcaccacctatggactttgtttaatttgaaaaattaagattaataagtggaattctggcttggggtgcctcttgctgacagaagttggcattttcacatgtttgtgtctaattctagtttaattaggataataacccatcaatgttgtattgtgatcatttatttctcacttttgaacaacttgatgcattctattatggctaccatttctataaaaaacgacctgattgagttaatactttaa

SEQ ID NO: 193585 - DNA, 244 bp, Glycine max
  unsure (1)..(244): unsure at all n locations
tcagaccacagcaactcttaatctatgtatctaatatccctcattttagcggattctcaaggtttgagaagtgaaaatgagatggggtaattntggagcaaactctcatctcacacaagtctataacattaatctaaactcgctcaaactggttttacgacgaaaactctaccgaattaaaatttgactcctcaacacccaatttaccctagaaatggctcttgccctcactttggtcattcat

SEQ ID NO: 193586 - DNA, 229 bp, Glycine max
tccattgccttcctcgcccagtattatgatcagccgttgaggtgcttcacctttggggacttccaactattacctatggtagaagaatttgaagagattctatgatgccctctagggggaaggaaaccatacctcttcttacggtgctatccctcatatagctccaatttcaagatagtccaaatttcgcgcacgaattacaccacatgacgcaagtcgaacatggggt

SEQ ID NO: 193587 - DNA, 202 bp, Glycine max
gattggagcattctaccaaaacaacgtgaccctaactagtcttcctatgattttacctagtgagtgacctaacttaccaatgtgtggtttgctttgtcatgtactcctttggaccccacgatgtttttatctaacatggtaccacattgcatatacgattgagtcttaatattattgctgcataatgattgtgtatgaatga

SEQ ID NO: 193588 - DNA, 286 bp, Glycine max
ggttcttgcgattttcaccaccaatgcgaatctcgatttttcatgatttgggagtcccctgcaggctcatttggcgcaagaagaatgatgtccatagatagtgttttcaaggtgcattcccaggcatgcttggggaatctatcaaggactttggacaccatccgtaggtatagggtccttaagccaactcttgatgaagggttcaaaggtcaaccagtgaccccagacttgcaatatctcttcaaacgactccagctgatgcatggttgaatgagttgaagaaagg

SEQ ID NO: 193589 - DNA, 225 bp, Glycine max
tatttgacgaaaagaaagctcggtgagctcttgcatgcttccaatagtggaacgaagtggttcacaaagtatgtttccaaagaggcgaatagacttcaaaatgacccagttacctatggaagacgggattggttcacagagactatcctcaaacattgcgatgtgacaacgtaatggagtttcctcacattattaggaacgacaccagatagatagttgccataa

SEQ ID NO: 193590 - DNA, 320 bp, Glycine max
  unsure (1)..(320): unsure at all n locations
tccaactatcaagagaanaaggccttccttcaagtcagccaaaccaatcgtcctcaacgtgctcatgttctgtattgcacaagacattttataaagatcattataaaaagtaatacgacatgggaaagtatataatgactttgggatagacaaaagattgaagctataatcaggaacacaaaaaacattatggataatgaaatctggagtgaattttatgctgcctgaaatgtgggattggacagtggatccattgggtaaatgaatatttactggtgcaattgtagaatatgtataaaaacaatctaacgaacaagtta

SEQ ID NO: 193591 - DNA, 439 bp, Glycine max
  unsure (1)..(439): unsure at all n locations
tttatcatatctgacaacttctctttttctgaaaggtttgtactaataggtttagaatcagccattccaaacctcataagtatcttctaaatgtaatccttttgagacaaaaatagccttttctgagttctgtccctatagatctccattcctaagattttctttgcagcccctagatctttcatatcaaattcaccactcaggaggatcttcagattttgtatatcacacatgctttttgctgcaataggcatgtcatctacatagagtagaagataaatcattgatccatcctccaccgtgttgtgataaacacaacaatcatagagacttctcttgaatccttggctggtgagtaaagtgtcaaacctcatgtaccattgccttggagagtgttcanaccatacaaggacctctgcagttgacaaacatacctttc

SEQ ID NO: 193592 - DNA, 433 bp, Glycine max
  unsure (1)..(433): unsure at all n locations
agcttctggtgggacatcttgacttgctttccaatctgacattcatcacagattctgccttcttctattttcagaatgggaatgcctctaacagcacttttgtcaaagattttcttcatgcctcttaagtgcagatgtccaaacctttgatgccatattctgacttcatcttctttggaggatagacatttggaggagtagctggtttcttggggtgtccatangtaacaattgtcctttgatctgctgcccttcattagaacttcactcttctcatttgtcaccaagcattctgactttgtgaagtttacattgaatccttcatcacacagctgactgatgctaatcaagtttgcagtcagtcccttcaccaacaggactttgtncagactangaangtcatcatggactaactttcccattccaatgatca

SEQ ID NO: 193593 - DNA, 443 bp, Glycine max
  unsure (1)..(443): unsure at all n locations
gtctttacatgtctaactctcttgagtgacattngtattgattattgaattatgtgttatatattagtctctattgtttcgtatgtacatcactattcatcatgttggagtaagaaggaactttctaaagttagaaaatttctttagtatttaaaactctctgttttaatcgattacaagcatgatcctaatcaattacaccagtatttgtagctttaatcgattacagacaattataactattttctctataaataggtacattgttttctcacttcagtgcggaaaatataagagtgaacttagtatgagctgaagtaagtgatataaatagagaagataaagtgcttatatatagtgtgactcacaatttcaaaactttgattatgaagatcatagtgtgaacagcgagttatgaatatttttggagtcaataagacact

SEQ ID NO: 193594 - DNA, 74 bp, Glycine max
agcttgtctgcctgaacttgtttacaaacaaaatgatagtctagtgagatgtgtttcatccgcgagtgtagtac

SEQ ID NO: 193595 - DNA, 391 bp, Glycine max
  unsure (1)..(391): unsure at all n locations
tattaaacctaaggtccaaccttggtgagtctcatatgtntacaaaacacaaggctagtccttggtaagcctcgacgcaactttatatgcttgtcaaaacccagggaaaacacatccctagtccaaggctcattaaacccaaggttcacccttggtgagcccttctttngctaagttccatctccacgagaactcaaggtacacaaggtctacccttgacagtattttctattcctaacttttatttgtgcacgaatatcaaaaacccaaggtctgcccttggtaccaaaaccccaaggttctccctcgataccaaaaacccaaggtctacccttggacacactattacaaacccaggtcaccctgttggtttgctacacacagcaactat

SEQ ID NO: 193596 - DNA, 416 bp, Glycine max
  unsure (1)..(416): unsure at all n locations
acaacaaatgccactctactccaagtttttaaaggatatgttaacaaggaaacacaagtatattcaccaggaaaacattggtgtggaaggaaattgtaatgctgtgattcaaaagatccttccacctaagcataaagaccctgggagcgtaaccattccttgatcaattggagaagtcattgtgggaaaggctcttattgatttgggagagttggagatcatgcacactaagatgactttacaacttgctgaccgctccattaccagaccatatggagtaattgaagatgtgttggtcagagtaaaacattctatctttctgggcatacttgtggtaatggatatctgtcaagataatgacattctcgtaatattgcgaaagctgcatagtttatatggngagaaagaagttggag

SEQ ID NO: 193597 - DNA, 384 bp, Glycine max
  unsure (1)..(384): unsure at all n locations
taaagtatgcgcgagtcattcatccctatgagatggtgttgtagtattggcgaccagaattgccattccttggattatagggttgaaccaagctcatgctcttacaaaaaggttcatcaagtcaagttgaaatatggaagtaaccgtcttgcaaaattggggcaaaagatgaatcgagtcacatcactacttcgtctactgccaaacatatttaggattattgatgtcctcgttacttccagtttcaccttgacaaagatgtcatggaccatattgaaaatctaaattgattcaaccccatatcttgcgtaaaaattcgcaatacttcaattgtacatcattcgcatgcatccatgctttcattggntgcatgctcgtgcattc

SEQ ID NO: 193598 - DNA, 358 bp, Glycine max
taccttagtgagagtgtttctagcatttacaacaactaagaattggtgtttacaacaactagatgttaacaatgttgtcctcaatggggatctatttgaagaagtttatatggacttgcctcaaggatacaaaaccattgctcctggtcttgtatgcaaactcattaaggtcttgtatggccttaggcaagcctcaaagcaatggttttgcaagttctcttctaccatattacaacaaggttttattcaatccaaagatgattattctcttttcacttatggctctagatcctcattagtagtgctcattgtatatgttgatgacaatatacttgttggcccaagttccttatatgtt

SEQ ID NO: 193599 - DNA, 423 bp, Glycine max
  unsure (1)..(423): unsure at all n locations
agcttgtgcaaatcaagtcactcccngcatttatctctagcatgcattggatgtnggtctcgtcctttgtcacgggaagccggaaggtccatatcaccttcttaattgtgcacatggggcactgtgcccccaaatgcgcaagtaagaagagataattttccgggctctcgtgtccgtaaaatgcattcatatcatgcaccacataagcatctcttcataacatcataatggacatatcctgcatttgtccgttatcatattccagcctcacattttgcatgagtcatggcatcatcatgcatatgcgttcaacaaactttttgatctgcaaaattgcataccatntgttttcatgtttgctcatccttgcgttntcctctacaaaacaaaaacaaaaagggggaagcgtgaacttacactaca

SEQ ID NO: 193600 - DNA, 303 bp, Glycine max
  unsure (1)..(303): unsure at all n locations
cttctggaggaatcatccggagggcgcaagtgggcctggttgctatttgcacccncatttttactaagtacaccccctgccttttttggtgattctttatctgtaaagttacggaaacttacgaatttcgtaacgatacttgttatctttccgtaatggtacggaaccttgcggattacataatcatcccctttttttgacttacggaatgttacgatacctcactaattgtgcaacaatgcttccatttgatttccggtgtgtcacagaaccatacggattgtgcatcaatattatcttttg

SEQ ID NO: 193601 - DNA, 426 bp, Glycine max
  unsure (1)..(426): unsure at all n locations
agctggcaaaatctataatgttaattgctntcaaagttcctctgtgaatgcatcacgttntggtaaaaaaaaataatttaactcattctttgccccctcccctagctcttttactttttgtcattgatctcaaagaccaggttttcaatgaggttatataattttttacatgggacaatgtcatgacagtgagtaagaaagaattgccaattcatttccttattatatttaattttctaatctcatgattttctcctacgtataacaccaatatcanattctctaggattcttgctcttccatgctttatggtgggaattaacataaccattntttgaaatttaatatttttctgtacgaatttatggtgacaactaacatttttgtttcatgattgacattggaaccagctgcggatacaatcaa

SEQ ID NO: 193602 - DNA, 427 bp, Glycine max
tcttcaaggaactagatagtggccctacaggagcatctaactttataaagtcgtcccgcaatctattcatagctagcagattttgcataattgaattgaagaagcaagtattcccaagattaatcatacctctaactacataaccagcttgtccatatgaatcatttgcaaacagagctcttgacttaatttctgaagtaatactgtcatccccaacggagacatcctcaatatccactgaagatttttcttgtgatcgtcctttcaacaatttcacaacatcagatagaagatgacacgattcatcagttttttcaaatttatcaacttgaacacgcatgttgcaaggaaaacaccaacacaattggggcttatcaaaatgaactaccacagggtgccgattttttctcgcatgctctaccacatg

SEQ ID NO: 193603 - DNA, 292 bp, Glycine max
atctttttccttctacgatgctcgggatctgaatgctttgaacgctgtgggttcaccctcttccccgtgctgggttcatccaccttcactgtcaagtcacaacgtaataataaataattgcgttaaaaattgcaaattgaattgcggaatgcaattgaagaggtaaaaagataagaactctgtgacacccttcacagaatcaatcgattaaccctggtggggttgcgcacccaacccaactcacagagagaggagagagacctttgaaaaggggtatttcagttaaaagtct

SEQ ID NO: 193604 - DNA, 313 bp, Glycine max
ataatgcagggtgttttatattagctaatttgattcattaagtacatttagtatatagttgtagctcgaataagattacctcgaaaacaaaaatagctaagttgattaatcattaagtacattgttgtttgagatgataaaagtgactaaatgatgcagtgagacaatgcaaggaggaacaccagtggaagaaacgggtgaggctcaaacagtccctagtggcaattctctcatcccaccatggatgctgcgctgcatgtctgactagttaggctgacatgattctgccaagtatgtgacatatgatattatg

SEQ ID NO: 193605 - DNA, 371 bp, Glycine max
  unsure (1)..(371): unsure at all n locations
agaaggggggagcacgaaattgaaggaataaaagaggaagagaagtggaactttgaagtgtgtctcataagactttcattcatcaaagttacaacaagtgttacacatgctnttatttatagactaaggagcttccttgagaagctttcttgagaagcttcttttgaaaaacttccttgagaagctagagcttagctacacacacccctctcataactaagctcacctccttgagaagattccttaagaagattcctaaagaagctagagcttagctacacatacctctctaatagctaaactcgccttcttgagatgaaaagctagagcttagctaacaccccctantatagctaagctaacccccatga

SEQ ID NO: 193606 - DNA, 248 bp, Glycine max
tctcgctaagccactcttctggcttagcgagcatccgctaagcgcaacactcctatgctatgggcaaggaagactctggaataaaatgagttgtatatgttcgctaagcgcaccgcttcatctcactaagtgcaccgcttcagttcatccgctaagcgagaaacgcgggctaagccgaaaatcactaacctgcgctaagcggtcaataagcgtgctaagcgcacgaacacgaacaaggccacttattt

SEQ ID NO: 193607 - DNA, 130 bp, Glycine max
cttaaactggggttatcctcttcccggctgggttattaccttactgcaagtccaacgtataaaaataattgggtaaaattcaaattaacgcggacgccttgaaaacgtaaaaataagaacttcgaacccc

SEQ ID NO: 193608 - DNA, 316 bp, Glycine max
gtgagcaacttcaaacaacaataactttgtactcgaatgtctgattgagacccgtaatatatctagatgctcgaaattgaataccgaagctctgagcaaattcaaacgacaataagtttttactcgtatgttcgattgagtcccgcaatatattgaaacgctcgaaattgaagaccgaatctctgaacaaattcaaacgacaataactttttactcggatgtctgactgagtcccgtaatatatcgagacgctcgaaatggaataccgaagctctgagataattcaaacgacataactttttactctgatgtctat

SEQ ID NO: 193609 - DNA, 336 bp, Glycine max
  unsure (1)..(336): unsure at all n locations
tcaagataanaaaaggtcgttacattgttagagagggcaacatctggatctacggtggcattatattcttcatggttctgaaacgagcacccctcaccttcttaagctctgactccaccatctctctcctccaacttccaaccccaacccttaccctagccccttatttgcatcctacctcctgcagaaacatccaaaaaatacaacaaacacaaaaataaacccttcagcttaacctccgaattagaacctccgtcccatcaaaattcactcccttttcatccattccccggaataaaaaccccccaaacaaatcactcccctagaattttaaaa

SEQ ID NO: 193610 - DNA, 434 bp, Glycine max
  unsure (1)..(434): unsure at all n locations
tgagctcngatgccattcattntacactgtggctgagctactgtatgccaattttactgatttacaaagagtctgaaactgtgttgttgttgtatgtgcgttagatgcagttattttattcttcatactataatatttgcgggcttcaatttatttgtatgttaactttgtctttcgtagtaggatgttggacacatttgtcattgttagccttcccaatgaataatattcgtattctaatgcagccagcgttgttagctctttgcaattttgatgcatttatgcccatatgtatgtttgcttgttccgtggattcaaagtcactctaagtcaacacaattgagattcaccagagttccaatgctgataccgtctgaaaccatgaatcattaatggttctactggtaaaaggaatttttatagtcccataaagt

SEQ ID NO: 193611 - DNA, 417 bp, Glycine max
  unsure (1)..(417): unsure at all n locations
ccgattagtngacctgcccgcgtgcaagctngatagcacgcagagagtagnggcgtcntttgtttccttcgncaatcgcggccgacaagcccgttgacacgcggagatttacatcttctttcacgctcacaagatctgtcatactgacttttgagtcacgctgaccggcggaaatacccgagaggctatacgtataaactttttgctgtctgtaagacgagaagcctgatagcacgcagagactaacgtcgtcttctgtgcccttcgtcaatcgcggccgacaagcccgttgacacgcggagatttacgtcatcttccgcgctcacaagatctgtcataatgacttttgagtcacgctgacgggcggaaatacccgagtggttatccgattaatttttgctttctgtaagacgaaag

SEQ ID NO: 193612 - DNA, 418 bp, Glycine max
  unsure (1)..(418): unsure at all n locations
tttcgtcttacagacagcaaacagtttatacgtataacatcttttgtatttccgcccgtcagcgtgactcanaagtaagtatgacagatcttgtgagcgcggaagatgactttaatctccgcgtgtaaacgggcttatcggccgcgatagacgaagggcgcagaagacgacgttagtctctgcgtgctatcaggcttttcgtcttacagacaacaaaaagtttatacggataaccactcggatatttctcgcccgtcagcgtgactcaaaagtcagtataacagatcttgtgagcgcggaagatgacgtaaatctccgcgtgtcaacgggcttgtcggccgcgattgacgaatggcgcagaagacgacagtagtctctgcgtgctatcagggctttttgcttacagaacacaaaagtt

SEQ ID NO: 193613 - DNA, 415 bp, Glycine max
  unsure (1)..(415): unsure at all n locations
agctntataacgaaggacaactagagcgattgtctactatcatctacttgaatgacccttgagaaggcctactgtctagctaaagacaataaactaagcgctgggatgtagagctccggaatagataccaggacaacatttagctccggaacattcttccggagaggaatgtagagctcgcacctgggatgtttaacgagttcctccaggagctccagaggcgcagatgggaccaggtgttggcctgattactagagaagaggattgatgttgctctggtgaaggagttttactccaacctatatgatccagaggatcgcagtccgaagttttgcagggttcgaggacaggtggtcagatttgatgttgagacgattaatgatttccttaacaccccggtcatcctggcagatgg

SEQ ID NO: 193614 - DNA, 402 bp, Glycine max
  unsure (1)..(402): unsure at all n locations
tanaatggacatgcaaatcatgcatggctgtgtcttgatctattatatgtcctctgccagctagctgaaaagggtcatgccagtattgttcgatcaatctttgattatccccttaaacactgtcctgaagttttgcttcttgggctggcacatattaatgtacaatttaatagattcgtatttgttggttctccacagcatcccattttatgtcttttcttgatatgaagtttgcattgttgttcttgcagactgcctacaacctcttgcagcaggaagtatctctgattgtttttctcatgaatgtaaaaagtggtgtatgcagtgggatgattctacacctttggcatgttaatcccaatctggtattgagagggtttgttgattctcaaaacaatgatg

SEQ ID NO: 193615 - DNA, 308 bp, Glycine max
agcttcgtcacaaggtcttgaatctgatctattgtgtgtcaattatgtgtactacaagaattgagacagatctaggcacagggttgtcagcttcctcagagtgattcatagtcaataagaattcaagaacatgctccttgatcactgtcctttcctgctgctgacctcttaaaggagagaaactctcaacactatgaatctcggaaagtagagattcacccacacgggagaagcctaacctgtgaacacgtcccaaggacacagtaattactgaatgctccgtaactctagcagcaatcctaaacgtg

SEQ ID NO: 193616 - DNA, 477 bp, Glycine max
  unsure (1)..(477): unsure at all n locations
ngacatgtaaggtgtctccaanaattataaatgcagctctagtctttgtcatttttacaattttctgtcatcaagggttattattaagcaggtatctgatgaatctgatattggagaatgggcatagcagggtccctgtcttttatgatcagcctacaaatattattggacttatcctggtatgcatgcagtctgttattttagtttaatccatcaataacagccattttgcattatgtgaaaacgttaatccgcaaatagttntgcatcaatttcattgagattcaacatgtcaactttcttccaagaggattattatttcttatgattgtacattacgtttgctgtaaccacttcttactttcagatcaagaatttattgacaattgatccagaagatgaagcacccgtgaaatgtgtgaccatacgcagaattccaaggtatntttgatatgttttccaagtttaatgaatact

SEQ ID NO: 193617 - DNA, 169 bp, Glycine max
aaaccaacagaggcgaagagacacctgcaagcaacagatcaagcaggatggagaacatccaagctgagagggcaagcctcccaacaacaacagcaaggcacccatctacaacgagcaggccaagaagcaaaaggactccccaacgcacgcagcgcagcaacaaaacaaa

SEQ ID NO: 193618 - DNA, 410 bp, Glycine max
taacttgtgggtcggaagaatccatgtgtgcatcatcttattggtgtataatgagaatgcatgtatacaagaattcgatgatgccaaataataatcaaacaaggctacttcaaaggataagcatttgcttcaagattaatactagattgttcaacaaataaagccttgattcaagatttcttcaagatcaaaccttgtctcataacacagtgctttcaagacattcaaggctctggtaatcgattactacgcaatgttatcgataatcagaagatacggttgacaaatagctgttgaaaaagatttttaattttcaccatgtaatcgattaccatatgtctgtaaacgattaccatccatgaaacttcacaacatcaaattctaaagtcatgacccttcaaattataact

SEQ ID NO: 193619 - DNA, 407 bp, Glycine max
  unsure (1)..(407): unsure at all n locations
agctttataattagtagtgaccatacctgtattattatgtcagngaaaactcacaagtgcatatctttgttctcatgtgaaacacactatttggtcctagctagcttttcccttaccattttctacctagcctttcagagatcacatgtagtgttcccttcatttcatttggtagcaatttgaaagatatcactctttgaaaatgagggtcctctgtttttttcactttttgctaacaattagcatacatacacgagctacaaacttagtcaactcaactaagattacgctatgcaaaagctgcaatgtgtctaatgtctatgctcgagccaaagcttcttattaaaaacttctgtaggtttatagatacaatacaatttacaaacgtttgtatagaataagttact

SEQ ID NO: 193620 - DNA, 423 bp, Glycine max
  unsure (1)..(423): unsure at all n locations
tgccacccagctcgaccaggcgagctagggtgctttctgtatattcaaccgacttctggacgaatattctggaacgcccaagtgggctggntgctatttgcacccacaattttactaaatacacccccttgctcttttttggtgattctttttctgtaacgttacgaaactttacaaatttcgtaacgatgcttgttttctttccgtaatgtcgcgaaaacttacggattacgtaatcatcccctctttacctttcggaacattatggaactttacggattgtgcactaacacttccttataatttccggcatgtcacggaacttcacggattgtgttacaatgctatcttttgacttcccgcatatcacggaacttcactaattgtctaatgatgggtgccaagtacctctaaatggtcaaa

SEQ ID NO: 193621 - DNA, 405 bp, Glycine max
agctttagccttaggttgttcaccatgtttttttcttatctctaacacattttgtgagataaaagaatagaatggtagggaacatgagtgtttccgtaactttttagacttaataaattctgttgtgagtcaaattgattttgactgaattttttttagcttttttgtaaatagattctgtgtgtgggacccaaacaaaaatattctatatttgcacgccaagagtaattgtatttttttcatcccaaaaattcaattcttctaaattcatttttaaaatatcattcttaaacacaaataaattttttaaccttaatttttccaaaaatcaattctttcaacattacttctaacacaattgagatcaaattcaccctttatttgcttcctcaaataataaattat

SEQ ID NO: 193622 - DNA, 474 bp, Glycine max
tataaaactaagcttcgaggctcagacaactctatcatgcttgctttatgatcattctctgaaatcaatcgttttgcctccaactataatggaaatgttggttgtccttgtggtctccggatgtttggtgtctctggaacaaaaggaatagcatcatcttcaatggtggagccttcaacaaggttgtggtcatgcataaggttctctttcatgcatggagttggcttaaaggtatctcaaaggaatttaattatacattcgttcagtggaacgtggatcctgcactttgtatttgctcatattggcatagaatggcatcccaaggtatccggattggactgtgttggatgggtgtatggtaaacatgagtgtgacaattggttggattttgtatctcttggctattctgcaattattggaccatatgcttctaaatgtgatctaaccaactctagaggtgacttaactcttgta

SEQ ID NO: 193623 - DNA, 370 bp, Glycine max
atacttaagccgaccgcggcatgcaatcttggaagatgctcaatggatttattatttaggcgagaaagaagagggggagcacgaaattgaatgaataaaagacggagagaagtggaactttgaagtctgtctcacaagactctcattcatgaaagttacaacaagtgttacacatgcttctatttatagactaggtagcttccttgagaagctctcttgagaaaacttccttgaaaagcttctatgagaaaacttccttgagaagctagagctaagctcacacacccctctcataacttaagctcaccttcttgagaagctttcttgaaaagattcttaaagaaacttgaagttagctccacacaccccc

SEQ ID NO: 193624 - DNA, 409 bp, Glycine max
  unsure (1)..(409): unsure at all n locations
ntcacttgaaattggtgaggagaagagaaagaatgatattatatataaccgaggtgcttccataacgcttctgtgagcgattctgtggaagttcttcgccgttcttcatcattcttcggtattcaaccgataagtttccgaatccaaagctttcaattcattcttattgtgttcgctttcattcttcatctcgtttactttcggtattattttcttccgcttttaacaagcattcaaccgcttaattaagtcgttatctcatttaataattgataaaatgaatttcaaccaataatttgtgttgtaatctcgtttaatcactgttaagataaaatccaaccgattgttcacgctggaacctcggttaaataaaaaaaaaagcacattataataaaataatcacaatatc

SEQ ID NO: 193625 - DNA, 403 bp, Glycine max
agcttcaacatcagaccacttacatttgttgtttctacttcacatggacttgatggggcctatgcaagttgaaagccttggaggaaacaggtatgcctatgttgttgtggatgatttctccagatttacctgggtcatctttatcagagaaaaatcagacacctctgaagcattcaaggaggtgagtctaagacttcaaagagaaaaagactgtgtcatcaatagaatcaggagtgaccatggcagagagcttgaaaacagcaggtttactgaattctgcacatctgaaagcatcactcatgagttctctgcagccatgacaccacaacgaaatggcatatttgagatgaaaaactgtacttgcaaaagctgttacggcatgcttcatccaataacttcctat

SEQ ID NO: 193626 - DNA, 455 bp, Glycine max
  unsure (1)..(455): unsure at all n locations
ctgaaggcanactggatgcgttggtcaacttggtaattcttctggccttgaatcacagatctgcacctgtcgcaagggtttgtggtttgtgctcctctgctgaccaccatacagacctttgcccttccatgcagcaacctgtagcaatagagcagcctgaagcttatgctgcaaatatatacaatagacctcctcaacctcagcagcaaaatcaaccacagcagaacaattatgacctttccagcaacagatacaaccctggatggaggaatcaccctaacctcagatggtctagccctcagcaacaacagcagcctgctccttccttccaaaatgctgctggcccaagcagaccatacattccttcaccagtccaacaacagcaacaaccncagatacagtcaacagttgatgcccctcacaaccttccctcgaagaactgtgaggaaatgact

SEQ ID NO: 193627 - DNA, 408 bp, Glycine max
agcttaaggggcaacttccttaatactatttcttagcattcttcattgagaccaattgtagcaaagttcgccaactttcctttatttgaaagaatttcttttaaatatttggtgtactttgacatttaagcaattgcttcaatgaaggggaaactaatacacacccttgtaagcatctcaacaaatttagcaaattgtcaatcctcactcttgtttttcaatcttcgagggaagggagcacttacttgaggaggtgtcaatacctctttctcaccctccttgttttccttttggctctcttcagtaagagcctttttttcttgtggtggagtggctttctcgttctgctttaactctgtcataagttgtccactcctgggacttcataacattcacttctccttggga

SEQ ID NO: 193628 - DNA, 412 bp, Glycine max
  unsure (1)..(412): unsure at all n locations
ggacactatgaaactcagctttaaggacatgtccatgaagataanatactttttgtacagaanaaattaccttctgtgaagatggcattcgatcaggttcatttcaccaattagtatcaggaaagaaatgtacacacacatgtttaaaatctatttagcaataacagcagtagtgtcgcgttgatatagaattcccctgtcttctacaagttgagtaacaaaatgagagaaaaaatgtaccagggataataataaattaataataataataataatatattgttaaaaaaatgtaccagggataataataagttaataataataatatattgctttatatattgtaattaataataaataaaaatattccttgcatatggatagccaaatttgcaaggaaattgtttaataa

SEQ ID NO: 193629 - DNA, 288 bp, Glycine max
tgcccccgacgcagaatatgtgtactgtgcgggctatatacacagactacaataccctcggaccctctcttctctggaatgacacccacagagaatgcctgcatggttatacacccaggggactagaacatgcttaccacatatgcctgggcgaatgtaaatatataactgccgattaagtattacctatcggattaaccctcagcggaatgcttacagaaccatgacctaatcagtttagccagccatgcaccagcttttaacctatcacagggaacaggaacatca

SEQ ID NO: 193630 - DNA, 377 bp, Glycine max
  unsure (1)..(377): unsure at all n locations
actcagcttggaacgacaatgctgtagagcctttatattntttatatnaccaactctgcaatccgcccttcactctctgttatatggctctcccatttttttattagtgccatggtcgattcttccactatatccacccaattatgtaggttataaacccaaaacaaaaacaaattaatacattatacatctatatgtgcataaccgactttcaatatctctgccacatgcatgaactttcaatctaattaagaattnggtcagaaaattatctaattaagaattatctataatatatgtaaattaattaatttactgccaataaattattaatccgactggtactgaactcgatcttcttaagaaaattgatgttc

SEQ ID NO: 193631 - DNA, 289 bp, Glycine max
  unsure (1)..(289): unsure at all n locations
tctccgaccggatctagcactgagcatcactgcattgtatatttttttcnaccctccattgccttctactgtgaagctaatcactgtcgacttccaatgacctaaaaatctcattgctatgtcatacaaatttggatcaaatcatgaactatgcccatccctgtttaatgggtggattgcaatttgtctgatgatatattatgtatatgtgaattactttgggcaatattactacttcaatcacaaataatactattactcttaattacatctaatatcttatcaatta

SEQ ID NO: 193632 - DNA, 419 bp, Glycine max
  unsure (1)..(419): unsure at all n locations
taatcgataattgtggcttatatttggattattgtgcttacttgacctatctgccttgtgcagggcctatatgacactgttgaactccaaatggagcatgtcagtagtcgctggaaagataataaaattatctctaattntgtcaaaaataatcttggaccaattctgccatttcgagggtcaaattgagcttataagtcaaaatctctgcacttgaataattgggcaaaatatggtctttgctatgtgtaattagtttaattaggtggattagatgagcctaatcaaggctcatcccttccttcttagtagtaattgtctatatcggtggaagtaagttggttagttagttagttacttcatggtgtgcagctttatgacaaaaactttctctcttttctctcaatggcttcatctct

SEQ ID NO: 193633 - DNA, 416 bp, Glycine max
agctttttgaggtccccttattgtgtgctgttttatcttcctgagacaatttttaccctagccctccctcaaattaggggcatatcatgactaaaacccttatgctctcttaaaccctaaaacaaggtaggaaatacttaaaataggcttaggggttttacaaagaaaatatgattatcattttcagctcaaataaggtgcaagggataaatttttatccaaggttgactttttggctaagtgactaaaaataagtgactaaaaataaggtgcaagggccttgatcatttccacctcatgtaattaatctaatagtctaagaatgatgcaaaatcaagaagttaaaaacaaatcttctctcacaaggtatgtaatcgattactagaagttgaacctatttttaacagctattagaa

SEQ ID NO: 193634 - DNA, 442 bp, Glycine max
  unsure (1)..(442): unsure at all n locations
tgccacccagctcgcccaggcgagcaaggtggcttcctccataagcaaccgccttctggaggaatcttctggagggcccaagtgggcctggtttctattttcacccccatttttactaaatacacccctgcccttttttttggtgattcttttttcgtaaagttacgaaaatttatgaatttcgtaacgatacttgttttctttccgtaatgttacggaaccttgcggattacataatcatcccttttttgacttacggaatgttacggaacctcactaattgtgcaacgatgcttccttttgacttccggtgtgtcacggaaccttacggattgtgcatcaatactttcttttgatttctggcacgtcacggaacttcacaaatggcctaatgatgggtgtcaagcacctcanaatgaccaaacacaagttgcatgccacc

SEQ ID NO: 193635 - DNA, 415 bp, Glycine max
agcttgtgtgaagagatagatagaaaaagactttataatttttttttgcaattgtctattcgttaagtgcagaccttgcgctaagcgcccagtcttcacgcgctaagcccgagcttgctcgcgctaagcgcagagacccctaattggttagctgaatagttcagctaagcgcatatcactgtgctaagcccaacatcttcactataattgaaacttaataagtgggcttagcgtggatgatgcgctaagcgcaatttcttctctggaaaaatttcattgttggcgcgctaagcacgctgtcttgtgctaagccctagatccattctggaatttgagctttcaagctgggctaagaggggtaggatgcgctaagcaccaatcttacctgttgcgctaagcctgaactactctctgt

SEQ ID NO: 193636 - DNA, 482 bp, Glycine max
  unsure (1)..(482): unsure at all n locations
atgttctgacatgacataaaacaggttatgataatgcttttatgcttttcctatacatcctgttggctatgcattggccaaaatagaaagtttatttatgagttcattttgaaatgattgaggcataaaatactttaacctttcaatattttaatttttaataatgtgtgctcttttaaatttctgatctttagctgcttccctactttgtttctgttaacaataagtgatttcaactgcaattttaggtgtgatgtctaccgtttgttagtatggtttatgctgcgtactgtactatgattgtatttctatcatggtgaacaaatatattgagttcttttgtaatgtagatagcttgccttcatttagaattttattntaccacantatttatgctgaaaactattatattgcagaccacaaaatattntcaggagaatggtgttcatgctgatgtgaaatatatcgatccaacttatatg

SEQ ID NO: 193637 - DNA, 397 bp, Glycine max
  unsure (1)..(397): unsure at all n locations
agcttactcgcttggttaagagataaaaattattgatgattatcattgtctaanatcactcaacatcatatcattaagatcttttaaaatttgtctaaattttaaaattactacaaaagtaaatctatctaattttttctgacaatttttcagtatcaatattggtcttgtatttatgttagaggattttagacaacaagaatcaaaatgattaagaaattgtaactataaaaatcaaaatagaatgctttaaactgaaggataaaaagattaaaaaaaatgtgtttttgaattagaaaaacagcaaaaatcgacaacaaactgaactaaaatcacagaaaaataaaacactaaaactaagattgaagataatctcttttaaaaagactaaaactac

SEQ ID NO: 193638 - DNA, 457 bp, Glycine max
  unsure (1)..(457): unsure at all n locations
tcttgacgtaatntatcaacaaaagctcttgttaacgtattgattaattctatggataaaattatggcgtaagccctctcatgattagaacttattgaacatttgattaagtcctttacctaaatgcacccttaatcattgacagggaaagctgaaggtgttctatttgaagatgaaggtgagggataccaattcacaaaaggcaattatttattaacacattatgtggctgaacttaaatcatcagttcttactgtgagtgtccataaaactgaagggtcatgggaaagacctaaacgccgactgcatattcaattattgctgggtggaggtgcaatgtgatgtgcttttctgtgagatgataccacagaatttgatactcgtgtcaataaactgagaanaccgcctgttgatccatacttactggaacttgatctaatatttatataattacgta

SEQ ID NO: 193639 - DNA, 418 bp, Glycine max
  unsure (1)..(418): unsure at all n locations
agctntgatggtgttgagaagaaatcacatgtttgtcatcatcaaaaaggcagagaatgtgaatgtatgtatacatgattttgatgatgtcaaaagaagaatcaaacaaggctcatcttgtttcaagattaatacaagattgtttcaacaaacaaagccttgattcaagatttcttcaagatcaagccttgcctcacaatgaaaggtttcaagtcattcaaggcacatgtaatcgattaccaatacatgtaatcgattacaaatggtttgaaagtgtgtaatcgattacacatcatatgtaatcgattaccaaagactctgaacgttaggaattctaaatttaaatgaagggttacaactgttcaagaaaaacaactgtgaaatcgattacactaattctgtaatcgattactagaga

SEQ ID NO: 193640 - DNA, 456 bp, Glycine max
  unsure (1)..(456): unsure at all n locations
aaatataactcccgaacttagaattttcagtttgaccgatttcctttggtttttccgatgttttccacaaataaacgttggtggcgactccgcgcatctttcctcctttggaaagtgcacccgtgagcctcgccctcgctcgcccgcgaagggcacgttgcgacagttggcgactccactggggactatttttgtgagttaggcctattttaaggaattgtggatttgtgaaacttcatgtgtgtatttgttgaactgtgtaaaatgtaaataattgttgtctatttcgcattctttacactgcattctaagcacccacgggtttgagtaaaaaaggggccctatacccgggttcatgggaatttaatgagtggaggtgaatctatcatcatgctacgtctncgacttgcttgataataatgaaacttcgtctagagctttctctctttataatct

SEQ ID NO: 193641 - DNA, 410 bp, Glycine max
agctttacagcagattttagtgaagaccctacttctctttatataacacaacttaatgccattaacctagggaattaaaaaacaaacttaatggctgtatgtaactgaaattgtggcaaccataagatacccccaacagccaacaattcatccaccatttggtctcccaaaaggctgatgcctaagttgccaattgggcccttattacaacttgaactaaacctaactaaagcccttatagttgattaacccaaaacatatttttggtcaaccaactggtactaaaattgaccaagaggagttgaaatataacacaagtgacattcaaagggaaattaattgcttgtgggctgtttggaacctcatcaagggctgagtttaattacttggcttttttaaacattttcatc

SEQ ID NO: 193642 - DNA, 425 bp, Glycine max
gctgacaatagagctgtttatattatctctcattgttctcactttgaaggtgtttatggttttaacccactaactcctcttgatcttttgcctacgcctaatgtttctgtttttaagcatatagaacgtcaagcaaaggcggacaatgtgaataagcttcatgagagtcaaatatcaaattgagaggaaaaatataagctatgctaaacaagccaacatatggagaaagaaggttgtcttctaaccccgagattgtgtttgtgtgcacatgataaaagataggtttctggaacaaaggacatcaaagcttcaaccaaggggagatggaccatttcagtgcttgaaagaatcaatgacaatgcttaccagttgagctgccggcgagataatgttagtccaccctcatgtctctgattatctctttt

SEQ ID NO: 193643 - DNA, 406 bp, Glycine max
agctttagtgccggagttggagacttgtttgtatacgtgaatcgtgcaattcactcacacaccacttatcttatttttccctcttttattaattgtttgtgtgttaaacattacgattttaacatcttctgagtttttatataataggtactaaaactagtaaattaatagtgttgggtggtatactatttttgtgtagagacataacattagacatggaagagagttgaagaactaaaaagtcacacttatgatgccaccctcgctcaacgctccccctctcccccgctttgcgccaaaagtcacatgggaagtcctgttgcacctgcatgtgcacttattgcatggtgcacgcttagcacgtgatcagttatccagctggactttttgagccgcacaaccttcc

SEQ ID NO: 193644 - DNA, 418 bp, Glycine max
  unsure (1)..(418): unsure at all n locations
tgctcctatgcaggctgatcatcagctgttttctttcttacttttaatgcacaaaaaaggacaaaatgtgatttatttaaagtttctgagctgagcactgcattggggttttgggtattcgtccgtacgagagaataatgatggaccagtgtaagatatttgcaaaagctggtgatggaggtaatggttgttctaccttgcgcaagggaagacctgatggtgtgttttctatacttatctttgttatgatgtacagccaagttttgaactgcagatgcaattgtgatgtgattacacaaattgcggtccaattcaaccgtagttgtggttgcaattatgtggtagagactttcacaatggcaatatctganatgtatatgtggctgaataccacacatttgaactatgtgtttagcat

SEQ ID NO: 193645 - DNA, 390 bp, Glycine max
  unsure (1)..(390): unsure at all n locations
agcttgaagcaaacaccaagatcaacttcttcttttcagacaagaggcacaagccagacaagctccagcctctctgatcgaggccatacccgaatcaaataaacattaaaatgtagtaactaggaagtgatcctaggtcatttcccaatgagcaatgatacaccaaatgttcaggacagatagtaggaaaatagtaacgaatgggggggggggggtggtttncttcgtaatacaatgctacgctatatccaatatcatcatatgaaatataaaaagatttgcgctcataaacagtctagctaatagcttttcaacattctacatttcacttttcttattacataagtttttccgtttaatataatcttagctctaactatctcatcattt

SEQ ID NO: 193646 - DNA, 428 bp, Glycine max
tcgcttatgcgaggtgctgtaatcgaagatcggtccattctcagtgttgtctaatacagagcatgatgatgggaggcagaacaacaaatgttgtatataagataagaagctgcaattcgtcctttgcaatcacagctttcctaagccaaatgaacaaacaaacaacgaaatttaaaaaatggagaaaaggtttaagaataacaatgtccaagcaaatgtttggacttattggaaaagaacatggtatggaagaatgaacatataataggggaatgaggtccatagcatcaacttcatatcagatgaaaagaagagagggacggtggaaatctaagccaaaaacgagaaagagaggaaatggatctaccatatttacatttcgtaatggattggagatattagaccttatattcatctaattatagagt

SEQ ID NO: 193647 - DNA, 403 bp, Glycine max
  unsure (1)..(403): unsure at all n locations
agcttgttggaagggacttcagcatggtcttcactaccatgagagggacaagaggctatcttgctcctgagtggatttcaggtgtggctatcactgccaaagctgatgtctacagctatggaatgatgctttttgagtttgtgtcgggtaggaggaactccgaggcatcggaagatggccaagtgagattctttcctaccattgctgcaaacatgatgcaccaaggagggaatgtgctaagccttttggaccctatgttggaggaaaatgctgacattgaagaggtcactagagtcatcaaagtagcttcatggtgtgtccaagatgatgaatctcatatgccttncatgggtcacgtggttcaaatccttgaagggttcttggatgtgactttgccttcaat

SEQ ID NO: 193648 - DNA, 289 bp, Glycine max
  unsure (1)..(289): unsure at all n locations
aatgggaattaattaagatatgggtaaacattaatattaaagaagccatgtataacaaaacaatgatttcttcatatataatcatatatattaaccagaacaagcaaggatgataaatatatgtatatataccacggagttgccatggctcgcacgtgtgtaaatcaatnttcatcaaggtacccttcagaacttcctcattagtgatctntctgtaaaggtaatgaaggaccaacttctcatcactcgtggtaaaccgaaaccctgtgggcagtgaagcaacaatgtc

SEQ ID NO: 193649 - DNA, 462 bp, Glycine max
tgcttctacagtgtaagtcgttggtttgatggatcaatctatctgcgcttctgagtatggactttcaagaccgttcaatcaaaaattactcgtgctacacattctgtgagggtgtcgtaaacgacgagtaaagcaaataaaaaagttcaaaaagaatacgaaaaaaaaaagcatttgattgactgtgttttcaagtaaaatatatacgttcatgtaacctcattttatcattccagaaagtgtgtcttttttagagagaagtgagttatcaagaataggagtcatttgacttaacctgtcaactgcaaaaatccttcaactatttctcgtccttgaaaaattcttattgcgagaatcaatcgcttctttcattcttccttgctacaagtttgtgaaaacaagacaacgattggtacctcaaaggcctacactggggccatgaaaggcaccatgcagaaacct

SEQ ID NO: 193650 - DNA, 409 bp, Glycine max
  unsure (1)..(409): unsure at all n locations
agcttgatagaccttccactacatcaactgttccaatcatcctctggctgcttatatcctaaatcaagcacgaattagaaaagaaggttaactagcaattcaatgaaaaaaccaattttgatatagagattaaattgaaattgaaagatggcaagtatagcacatcttctaagtgtaaaaactcatgagagaaattattgttggcagccaacaaagacataagtgcttgatactattgttgagtgattttaatgtcatggccattatcactagtctctgaacttgaaacattntcttcttccttaacagtgttattaactgaaactccttgaagtttatagaatttgtgactaggtggataactgtgcttcttatagcactcatccactgtatgaataatgataccata

SEQ ID NO: 193651 - DNA, 435 bp, Glycine max
  unsure (1)..(435): unsure at all n locations
tcaaagagtcatagataattcacaacattgatggataattgtcaaatatggcaattcaaagatatattaatgacacaaagtaaagcattagaattatcaccatctagaagataacctaagttgaatgcaacaagcatatgcagaatattaaaatagaaacacactttaaatgttcaggaaattgtacacatagcaactcaccatgatatgtagttttatactaataaatatataaatattcacgacaatattgataatcttttggatcaatgtaatgtttaagtagatgttagagatagggggagcaacatgaagactaaactntggagcttgaaaaaagttttattttttacatggcccaactcttgggtgacnattgtattgattggtgcatcttagtctctatcttttcatatgtacatcatgcatcatcat

SEQ ID NO: 193652 - DNA, 401 bp, Glycine max
agcttcttgtttgagagatcactatgtgttattatgggaaaatattggtagaaggggaaaactgataaccattggtatgagagatcacttgtgccaaaatcttcggtcatcaaattcctttcaatcagaggcacaggaggaaacttctagagggagtaaaggaattggagtatttaggtagttatagcttactatcaaatcctttcataaccttattcttgaattgaaggaccaatttatacttatgctcaaatttaataatgatacacgttgacgttgttcaatactcatatgcctactatccttctcaagaaaccaccactcacgtcagtagagacataataagacttgcttttgagtttcaaatatcctcttaactttaatattttgacaagtagttt

SEQ ID NO: 193653 - DNA, 432 bp, Glycine max
  unsure (1)..(432): unsure at all n locations
ntgatatcatgttacattatgagcttgatctctatccttacaaaattgactcttcaggtgagtaatgtcccccttatataatctatctcgacactatctcaaactgatgtgagacttcaacatcttcttttgcccagaactacccaccataattatgatgagttaagagtgaccgcaattaagacagttttccaaaacatatctatgtatgttttatggacatatgtaggatttgggaaaaatatatttcaattcatattcaaatcatgtaatctttcaattagatactttataaagatatgtattgctttatagtaattgttaaagcgtgcaagcaatgtctacaattattatttcaatatgtcatagcaatgatatgtttgaaacaattttactattgtatgttcgcaccacanatagaatgaatgttga

SEQ ID NO: 193654 - DNA, 409 bp, Glycine max
agcttataaggaacaatcattttctaaatgtgcttgtgcgaaaaatagtcaaatcaattttggtttaacaatttaacccccttctagtgatgaaccagttcttcaatgcaaatttcacatttgagatgtttaatatataagtgaaaagagatattattattatttgaaaacaaaatagtgcacaagatgtgacaaagttttgagatgttatgttctgcccttagcttaagatagttggtagagatcccacactaactcataatataaccaaaatagtttatataataaatagtgagcaaactctgggctcataactcaagctagattttcgagttaaattagatccacattttaattaagagttaataaatctcttaattttaagtacatgagagtcactataagtatg

SEQ ID NO: 193655 - DNA, 430 bp, Glycine max
  unsure (1)..(430): unsure at all n locations
ntactatgcaaggaataaccaaggagaatttcttcatctgacttagcatcaaattttcctaagttttcctttccattgtttaatacaaagcatntgcgaccaaaaacatgtagatgtgagatgtttgattttctaccattgaacaattcatatggagttttctttaagataggtctaattaaagccctattcatgatataatatgcagtattaacagcttcaacccaaaaatattttggaagaggagtatcattgaataaggttctagcaatttcttccaaagacctatttttcctttcaacaactccattttgttgaggggttctaggtgcaaaaaaattatgttcaataccatgcttttcacaanatatatcatattctttattttcanattcacccccttgatcactcctaatagatataatcttga

SEQ ID NO: 193656 - DNA, 406 bp, Glycine max
  unsure (1)..(406): unsure at all n locations
agctttgaatcaagttgtcttcatatggattgcttctttctctgtgntctatatttaaatctttaattaatgttaaatgaatttccatcatattatcaacagacaacaatctaatcatcttcgatgaaagaccgacgttatactctatagcaattctagcataggtcagcaatgtcaaataaacttacttgatgatatcttcaaatttttacagcagcaaaaaaagatgaatataaaagtcaaagtgaagagcaaattagaggaacagagaagtcaaagtggagagcaaaataccgaaacagagaagttgaagtggatagcaaaacagcgagtattaaagatcgaccatgaacttgtattttatagcaaagaatgagagagaaccactccctgtaaacataggttt

SEQ ID NO: 193657 - DNA, 471 bp, Glycine max
  unsure (1)..(471): unsure at all n locations
tctaatctggatttcttggattttcgagaagataccttttcttattaagatngtcaaataatagacagaaaaggttgtgttatcaactgaatataaagaagtcagttaaaatgaaaaaggttgttcagtagaatatgaaactaactgcgccataattcttaaataatataatattgagacttgagagaattcccagtgtggagaacgtataatggcttaatataaataaggttaagatgataacccaaattttgagaagtatgccagtggttcatcacgagcatgaccagcataaacaagtgaaccctctgtagcaagatgatgtcatcaaattactatacactgaacctcttggctgatgtatcgaacaaattacagtatgaccatcntgtgcanggntgtgagagtttcatgacttctcagctggaggcatcaagtctgaaacacaganacaactcatgacaaatatgt

SEQ ID NO: 193658 - DNA, 413 bp, Glycine max
agcttggttctaattcaatctttgtcttttattttgttgagaaattgtctgccaaagcgcctgatggtccaaccaagataaaaatactggccgcaattgccgaggagcataatatcaaatgggaacccaagtcacttggagaaaatgatgtaaagtcttctcaagactttttggtaggccttactagttgtggtttttctttggtttattttgatgcaaaatgtttgttggattatatttgtttgacattatatgtatatgtgaaggttgggccaagtacttctgaaaaggttgcttatgctgaaccttctcaaattcatgttccacctgctcatgatgaaaagggtccttccaatttacatgctccctcacaagttaaaccagtgcatcattcatctacaaattcatatgag

SEQ ID NO: 193659 - DNA, 470 bp, Glycine max
  unsure (1)..(470): unsure at all n locations
tatgatgttgttgctgctgttgctgccaagtggacaaatactatatatgcatttccaaggtcaacaatcaaattcaaaacacacatcttaatcatcgtgttgaacaatattcaaaaagtgagaagacagtttcatgcttgtgatttatcaaacactcacaaaagcttgcctagttattgagtctgactcatgcacaataccatgcagactcactcctttggattttcacatgccaagtgactcgtctgttttttttttctttcactactcacctttcctttccttttattattattattattattattattattattataagtcatacaaggtgantaaacgtttttttaatcctcccatataaaccttttagggagcatatacaaaatttagcttattatcaaagcaatttaattataaccttatatacttcttttaaagctttttaataannataactcaaaaactta

SEQ ID NO: 193660 - DNA, 416 bp, Glycine max
agctggtggggtaattgtctccgcactatttatttcagtgtgttaactaaaaactctattttttttctctgtaaatccaaaaaaactcttttttttaagtgaaattaaaaattgtaaatatataatcataaataagaaattcatttaaaaacgtcaaaatactaaaattatatatagcgccgttatttaacaacgatttgacaatcgacgattcctaaggatatactgaaacctgcggcaaacaactgaggcaaaccacgtgaaattaaggaatataattctcgaagaattaaggaatttctgctatgtagcagtagtaattaactagtttttttatgtataaaagtagtaattaactagtagttaagaagttgttctgtgagagattttgtattaatatataaataaatcgtatt

SEQ ID NO: 193661 - DNA, 477 bp, Glycine max
tgtaagaattgcaagatcatcttccttgacaactacgtgttatattatgtcgtcaatatgaagagataacaatttatagagtgatcgaagactttcaaatggatttccactgaatttattcatagagagatcgagatatcttaatgatgaaagttttccaaatgatctacgaagagaaccaccaattaagttgttggaaaaatctagctgcacaatatttttaaatgccccaatatgatctgtcagattgcctgaaagtcgtgaactctgaactgcaagtgttgtgagtccatgggaaatacaaggagcaagaatttctaaaagttcattaacctgttggttgagtttgagatatgataaatctatcacccttaagttgcagagattacccacagaagttggaatgtttccttcatgttgactatatgacaaataaagttcaacaagagaagtcaaattacccacagaagttggaat

SEQ ID NO: 193662 - DNA, 416 bp, Glycine max
  unsure (1)..(416): unsure at all n locations
agcttcaaccaagaggagatgggctatgtttatgttgtccaaaatcggtgatnattcatacaaatatatatcangtgagcttggtgttagcaatacctttaatgtgtctgatttgtctctttttaatgtaggtgaagaggattttaattcaaggttgaattcactcaaaaaaggataggatgataatgaatatggacattgaagcactacaaggacttggtagaccaatgacaaaggcaaatgccaagaaagcaacagaagccttaaaccaaatggtgacaactctcattgaagcagattcacatctagaatgattaaagcctaagttgatcaactacatacaattacataaggaataaagatggtggaatgatttgcataacaaggcctatgaagattctatgttttaataaata

SEQ ID NO: 193663 - DNA, 341 bp, Glycine max
tactaagcttcttgttatggcttaagttaagaaactgatgtgtttgtatgtatctcacaattcacttgttcgtgctcgtgctgccttgaaatatattgtgctagctttatctgggcatatggatgacatacttggaaaatataaggtacttaacttgctcccaatgagactaagaaatattgccttttcctctcctttcttctcttcatattgatacattgtgcctgagctaagaaatgcacagtttcagtgccaaattaatgtactatgtttatgaagaagcgcaattgaaatttcttgatacgtccttctctgtagtttactttatcttcccttttttc

SEQ ID NO: 193664 - DNA, 409 bp, Glycine max
  unsure (1)..(409): unsure at all n locations
agcttatgaaagtagcttattatctatctatattccttttgtgnnggntatttttcaataaaccttataaaataccaaatgagcaccaaaacacattacgtcagactatcaagaggtttaaggaatacctggatccatagagagctgcatcaacacgcagtggaatctgacagtggtcacgaacaattgatttaatgacctttctcaaccaaatcactttctttcttatgggaccttcgttttctcttcagatggggagaggggaaattgtttattgatttggtgtattggggaccataaccatgccttatattttaaacctattagggttcccattatcccctaatgggacanactgtgtttcgctcatgaagcccatatcaatttcctattggcagtctaatggact

SEQ ID NO: 193665 - DNA, 441 bp, Glycine max
  unsure (1)..(441): unsure at all n locations
taggagagtgatcttggaagagggtcacaaaagtagtcttagtatccacctangagtgactaagatgtaccatgacattaggaagatgttttggtggccgagtctgaagagagtagttaatgagtttgtccttgtgtgcctagtgtatcagaaagctaagatagagcaccagaagccttcggggaagttgcaacctttagagatacctgagtggaagtgggataacatctccatggatttcgtggtgggattacctaggacccccaaaggtttaaattccatttgggttattgtagacaggttgacgaaatctactcacttcatcccaattaacatcagatattccttaaagaggttgactagctcgtatgtcagtgagatagttagactacatggtggtccttctagcatagtttttgatagagaatccagatttacctc

SEQ ID NO: 193666 - DNA, 408 bp, Glycine max
agcttgatcctttaatcttgattcttgatttcatccttcttcttgaatcttgaagtgttcttcaacttttcctcttgagtcttgaattgttcttgattccttcttgaacatcttgaactcatcctttgattgaccattgagctttttgtcatcacctttgtaatcatattttgttatcatttttgttatcatcaaaacatctttgaatcattcttgattcaccatgaagctttgcttctacattacattatgtatgccttacgtactttggctttttgttgatgccaaagggggagagaaaataggtattaaatcaagaaataacataattaaataacttaatttcaagtgaagcttaaactcaaaaacaaggggggagaatatggagaattaagtgagtgatcgact

SEQ ID NO: 193667 - DNA, 449 bp, Glycine max
  unsure (1)..(449): unsure at all n locations
ctaagcttaagaatatggcctcataaactatgtgtttctgttggtattcaataaaagagctcctatntttaatggcgtgggttaccattattggaaaacccgcatgcaaatttttattgaggcaatagatttaaatatccgggaagccataaaaatagggccttacattcccactatggtggtaggaagtaaaaccatagaaaagcccagggaagaatggagtgaagaagaaaaaagattagtgcatgttggatttcccctgcggttactttttgttccactntttcttcgtacaaatatattcaagagaaatccggtttgtcggaaagcgcaccggatcgccaagtgtttaaaaattaaaacagatgaatccaagtatcgaactcanggaaactagtctaagatcgggttaaattcangaatagggcattgtngaaagaaacattgat

SEQ ID NO: 193668 - DNA, 430 bp, Glycine max
aagtcacctgcggcatgcaagcttgcttctacaatctgcccctttttgttgatgtctaccctgaaatcaagaaacacatagacacatgttttcctagtcgatctctcacttaattttccatattctccccctttgttttgtagtttatgcttcacttgaaattaagttaattacttacgcgagttcttgatttaatccctatttctctccccctttggcatcaacaaaaagccaaagtgcgtaataagtaaaaaaacatacatacactactaatcatacacaagacattcattaaagagtataaaccaatcatgttcaaatatataaaaaccacatagtcttataacataattcataataggtcaatcataccatgcaaataaaagaaatactaaattgctcagatgttataataatatagcccaataca

SEQ ID NO: 193669 - DNA, 439 bp, Glycine max
ctcagctgtccctatatgagttgagcagtgtgttgcttttatgtatgacaagagtgtaagcttgaactagaaatgttagtcaatgacagattgattagacaaaaaagcttgaaccataacccggtgagagtgtgatcttagattataagtgaacgactagcatggagcaatagtctttgtatcagtctctgaattctataatgaaatgcataagtttgaaagtgatgaaggccattgttctatatttaaactacttgaccataaagcttaccttgaattataattgtatcctttgcaccctttgtgagctgaattaaattgtcaaattgaaccctgagcttgaatgaatatctccatctaccttgcttaggtgctaggagagcatatggcttaaggaacattgtaccacatttgagggagttagttgtgatgtgaagtc

SEQ ID NO: 193670 - DNA, 410 bp, Glycine max
  unsure (1)..(410): unsure at all n locations
agctcgccatagggatggggatctttttttttatgaaactgnttgcgactatgttgttgtcaaatagcattaataaacccatagatgtgtggataaaagtctgacattggctttcagatgggattttgtttcagcagataaaaatgtcaaatattcaaggtaaatactgaatcaagtattgacaaatacgagtcatgttttactatttgtgtttgattacttattataatgagttatatgtatagatctgcaatttactgatcaagagttacaaaatttatctttgattcagattgagaaattattggaaaaatataaaaattctaaaggactttccatcgacaccctattcacaacattgtgtcacaacatcatttgggatataagttgatttatgcaaagtttgatta

SEQ ID NO: 193671 - DNA, 462 bp, Glycine max
  unsure (1)..(462): unsure at all n locations
ttagaaacatttctaagagaagaaataagatgtaanatantatatgaatttttccataatctaaaatgaatttttcattagtgaaccattagttaattgtaaatgtttttttgtataacttctctaaaatgagataatatctacaaactagttaatagttaaccaatggaaatctcattttaattcatggagaagtttatttcattttttctcttcttattttctttttttagaagtgtttctagagaaatttatccaaacaaatccattagaatcttgttaattaatgttctaaagcanttggttaagaaactaaaagaaaaaagtatttaatgtgaaaatcatagaagagcgtaataacaatcatggatagaataatttaagcatttaataaaagtatttttctcttttaatttttaactaatactccaagggtactggttaacatatgtcatcatacta

SEQ ID NO: 193672 - DNA, 346 bp, Glycine max
  unsure (1)..(346): unsure at all n locations
agcttnatgatgatgaagcaaggtgttttatttgttttgatgatgactaagatgatgaccaaaagtccaaagaatgatttcaagattgagtcaacaagtgcaagatcacgattaattccaagtctcatgagatgaaatcaagaagattcaagaatcaagagaagtttgatttcaagattcaagagaagatgaattcatgattcaagaaaagaaatcaagaagacttcacaagggaggtattgaaaagttttttcaaaaaacaaacataacacagactcgctctcaaaagagtgtttctcaaaattctctaagataccagagcttttactctttggtaatccgatac

SEQ ID NO: 193673 - DNA, 475 bp, Glycine max
  unsure (1)..(475): unsure at all n locations
tcattctacacttgaaaaagaggatgagataggtgcactttatatatagcttcctaacaaaaattgtcatgcaggtggaccttcttctagtaattttgacttaccacagccttctatccctcttccattcttacctagagcaattccaaaaaaaatatggaaaaagcggaaaaggagatcttggagaccttcaggaaagtagatatgaacatacctctgctagatgccatcaagcagattccaagatatgccaagtttataaaggagctatccacccacaaaagaaagctcataggcaatgagaggattagcatggacagaaatgtatcagcattgatagggaaatctattcctcacattcctgtgaaatgtangcacccacgtactttctgtataccttgcatatatggaacagtaaatttgagaataccatgctagatctaggagcattagttagtgtcatgcctctatccat

SEQ ID NO: 193674 - DNA, 373 bp, Glycine max
  unsure (1)..(373): unsure at all n locations
agccttagtgctcttaatttagaagctanatttgacattcccataatttcataatgtattccctgacatttcctttaccttgatacttcatggaaatcaagttctgaatgagagtacttgtttctgccttattgcctttttcaaagtgcttttcaatttcagcaaggaattctttggcactagttatatcatctgaaacagtaccccaaaagacctcaagaatgccacacttaatgatcataagactcgtgcgatttgagtgatcctacttctcatgagaagaatatttctcaatccttaatgcaaggtctatatccatgcagcccaaaacaatttgcatgttctctttcagtccttaatacccgaactgaat

SEQ ID NO: 193675 - DNA, 408 bp, Glycine max
  unsure (1)..(408): unsure at all n locations
agcttaaaaggaaaaatcatttcataatgtgcttgtgcgaaaaatagtcaaatcaattttggtttaacaatttaacccccttctagtgatgaaccagttcttcaatgcaaatttcacatttgagatgtttaatatataagtgaaaagagatattattattatttgaaaacaaaatagtgcacaagatgtgacaaagttttgagatgttatgttctgcccttagcttaagatagttgttagagatcccacactaactcataatataaccaaaatagtttatataataaatagtgagcaaactctggcctcataactcaagctagattntcgagttaaattagatccaaattttaattaagagttaataaatctcttaattttaagtacatgaagttcactataagtatg

SEQ ID NO: 193676 - DNA, 408 bp, Glycine max
  unsure (1)..(408): unsure at all n locations
ttagcatcaaatnttcctaagttntcctttccattgtttaatacaaagcatttgcgaccaaaaacatgtagatgtgagatgtttgattntctaccattgaacaattcatatggagttttctttaagataggtctaattaaagccctattcatgatataatatgcagtattaacagcttcaacccaaaaatattttggaagaggagtatcattgaataaggttctagcaatttcttccaaagacctatttttcctttcaacaactccattttgttgaggggttctaggtgcaaaannaattatgttcaataccatgctttcacaaaatatatcaaattctntatttcaaattcacccncttgatcactcctaatagatataatcttgagaaatttatatttgaataact

SEQ ID NO: 193677 - DNA, 405 bp, Glycine max
agcttaagatgtccttcattgtcttatttttatttgagcctgcaccagaacaaaatacatcaaatatgaaaaatatatttaacattatgatgtaagaacataatcttttcaatacacagaccttcgatatctcgatgaagtacttgatttacatgacaatagtgaagccccgtcaaaagctgtctcatgttacacttatgaagggaaacacatctcagacagcaattcaatgaacaactattatatatgaaataatacttggtattaacagtaattccttaatttggggaactgtgaatctcatcctaaggcagtcagcaagatcaggtaaatatggtccatgtattaaaagaccatatagatgccacctttatatttgttaccatctgcaatccccataacaag

SEQ ID NO: 193678 - DNA, 404 bp, Glycine max
ctggcacagcttaatgtaagcttttattctttttataccgatgtccaagatgttgagcgcgaggaataagattattattttgctacaacatgttattcgatgaggagtatttctaaatgttggttgattgataatggttgtactaaccacatgacatatgataagactctattcaaggatttgaagccaactaatgtctcaaaggtcagaattgggaatggtggctatatttcagtaaaaggaaaatgaattgttgcaatatcaacgtgtttaggtatcaaattaatatcatatgttctttatgtacctaacattgaccaatacttgcttagtgtaggtcaattgattaaaaatggatttaaagtgtcctttgaacatcaacactgctttatctatgacattgt

SEQ ID NO: 193679 - DNA, 238 bp, Glycine max
aaaaaggaggaggacgaaaagagggaaaaaaaaaaaagggaaaaagaagacaaaaaaacggaaagggaaaaacgaaataaaaaacagaaaaaagaagagaaaaaaccaagaggggaaggagacaaacggaaaaaaaaaacaaaggcaaaaacagcgaaaagagcgaaaaaggaaaaagtgaaaaaaaaaagaaaaagagggaggaagaaaaaaaagaaaaaagaaaaagggggaaaaa

SEQ ID NO: 193680 - DNA, 406 bp, Glycine max
  unsure (1)..(406): unsure at all n locations
agcttgtctcagcgtttatgcgagacagttactcaacatgctagctatcatcgccaagtaccaagaagagttaggtctagccacggcccacgagcataggatcgcggacgagtatgctcaagtatacgcagaaaaagaggctagaggaagggtaatcgactctttacaccaagaggcaaccatgtggatggatcagtttgctcttaccttgaacgggagtcaagaacttccccgcttgttagccaaggccaaggcgatggcggacacctgctccgcccccaaagagattcatgggcttctcggctattgtcagcatatgatagacttaatggcccacataattagaaatcgttaggaaactngtatggtctctcagaccttggctagatacgactntctttttgaa

SEQ ID NO: 193681 - DNA, 442 bp, Glycine max
  unsure (1)..(442): unsure at all n locations
ggtagaatggctagacatgatacatgtcagggtttggtttgtttcaaggataaaagggatgccccacattatttccatgacacaaatgcaaaaatgatgatttggaaactttatgcaaaactggtcatgcatgcacctatgcggacactcaagtgtcaaatttttatggtcatgtgatgctagggctcangattcatttcctctattttaatcaacccaatgtttccaaaatatgttcttttatcaatttgtgcattcatccgagtccatttcgggcgtccggtgaaatttcacagcattcacccttcaggtgtagacacattttccaaaaattggttatgatcaatgaatttttttcaaagaaaaagtgggaatcgtctcttttcaaaaagcatgtcgttttttagctagacaacctatanttttttctaccctctttctt

SEQ ID NO: 193682 - DNA, 409 bp, Glycine max
  unsure (1)..(409): unsure at all n locations
agctnctaccccttcttgcattgattctttttcagctcttcgacttcatcgctccaacttcttcgctcgaagcttcgtgaagacagagattggttagtcagttactaactttgttaggttaagcttattttaaccttgttttacgttaattggttcgtgtactgttgaagaaaggtcacgggttccatgtaatttcttttaatggtgttgtaatggtgttgtaaagatagttttttggctgaaatttagtttgctttcatctgaaagctgaaaaatagggtaattcggaaaggacataagaagtgttataaattattgtttaacaatcaagagagattgaagatactgtaatcctatttggagttgggaattttatgcttttgtgggatttaagaactctgttttgtac

SEQ ID NO: 193683 - DNA, 455 bp, Glycine max
  unsure (1)..(455): unsure at all n locations
tctacctttcctataagtatatatgtgatcttttctattgatttttgtccctttaaatgggatggggatattatttttaaaatatttttgtgcatttaaacatttatatattgttcgaaaaataattttgaacatttctataataacttgtataagttggtaaaatttactgtaatattttttattaatactgtaatatttattttctagaagtagaaccataactttctatggtaagttgagaaagccgccgaatctaacactatatgaatgaaaaaaaaacatttcatttcttttntctttaatattctatttacgttntaaaagaattaatagaaatnttttataaaaaaaatcaatatttatcatatntattaattaattttattaacttanagtgcgctgtgcacantttaaaagttatatcaacttgagtatatttagaattagatact

SEQ ID NO: 193684 - DNA, 188 bp, Glycine max
aaaaaaaaaacacggaaaaagagagagggaattttttttaaccaccgggaggaagggaaaaccacaaaggacggctgaaaaaaaacaaaaccgaagcagaaacagggcgcaacaaacaaaacagcgaaaaaaacacaataactgaaaaaacaacgcgagaaccataaaacaagaactagacaaaaaaa

SEQ ID NO: 193685 - DNA, 411 bp, Glycine max
  unsure (1)..(411): unsure at all n locations
agctntactcaaacagaataatccgaaattgtctaagaattgggtgttgaaaaagcataacaagactttctgtgattggtttaaagatacaatctttacaaatgagaatgcttcagaaacattaacaaatctagtagatgggcctaaaagaaatgttataacctggcaaggatacgacataaacaggtattcattttacacaaaagcacaagatgacaaaagtacaatgcagaacagcggggtcaccctaagggctgaatctcaacactttgcaagtgtcaatgacgtcaatccctgtgtagcttccatcccttacttttggttcattgatgaaatttgggagcttaactatgtgaaatttacggtatgtgttttcaaatgtaaatgggttgacagcaacaccggtgtgcg

SEQ ID NO: 193686 - DNA, 465 bp, Glycine max
  unsure (1)..(465): unsure at all n locations
gtagaatggctagacatgatacatgtcagggtttggttttgttcaangataaaagggatgccccacattatttccatgacacaaatgcaaaaatgatgatttggaaattttatgcaaaactggtcatgcatgcacctatgcggacactcaagtgtcaaatttttatggtcatgtgatgctagggttcaggattcatttcctctattttagtcaacccaatgtttccaaaatatgttcttttatcaatttgtgcattcctccgagtccatttcgggcgtccggggaaatttcacagcattcacccttcaggtgtagacacgtttttttcttcanaaatcggttatgaatcaatgaatgaattttttcaaagaaaagttggaaatcgtctcttttcaaaaagcatgtggtttttagctagacaacttattttctctttttcacccttttcttacttgctttcttctt

SEQ ID NO: 193687 - DNA, 407 bp, Glycine max
  unsure (1)..(407): unsure at all n locations
agctnntaaatttgaattaaaaacgttcataaactgctggtaatcgattaccatatatgtgtaatcgattacacagtgcaaattttgaattcaaattttaatagctgttgtaaaacagttttggccactggtaatcgattacatcctctggtaatcgattaccagagagtaaatttgttgaaaaagactttttaacttaaaattcttgaccaaaccttttgctacttcaattggaattcccttcctatttaatataccctttctaagactctagagactatcttgatcatccatcttgaatatctttaattcctttgtcttgaataaagctttgagatgcatgtgaaaactttggcattatcaaaacattcagcttgatcctttgtctacaaattttaagttccaat

SEQ ID NO: 193688 - DNA, 473 bp, Glycine max
  unsure (1)..(473): unsure at all n locations
ntanagcacagcaacacagaatctaggtgtccaaaacccttcaattcaatgggttttctaggtttgagaagtgaaatcgagaatgaggtaaatttggagcaaactctcacctcacacaagtccataacatcaatttaaacttgttcaaactggacttacgcctaaaatttcaccgaatcaaaatttgactcctcaacacccaaatttaccctagaaatggctctttgttctctttggtcattggtttttctctctagcgcagtccaagctttctcataagtcctaaatgacatttcaagctaagattaactcactctaacctctaaatactaccaattccagatttggccttccagccctcaanaattcactctttttccactcctaacaccacattctcactntctaaccctanggtagttctacccttcatctctagcagttttccataagcaattntagcacatgaacat

SEQ ID NO: 193689 - DNA, 400 bp, Glycine max
agcttctcattgtagaacatgtccatgctacgcggacataaattgtggcactctgccattgacagttgcaacagtgacagactctcaccgaagtcatagttctcgatggtgattagatcattctgaagctcctctagcttggcccgcatcagctgccatttaccggcaaagatgcaaattgaatgagagagagagagagagaaggcattgaaaagaatagcttcactgttctccggagacctgaagctcccgtgaatgctacttcatcactatcgtcaatgtttcctacgttgcagtgtttgatgtagaggagaaatagggacgtcagggagattatggttgtcaaaacgaacaccgcagtggtaagggatgtcctgaattaacacattcagctaattag

SEQ ID NO: 193690 - DNA, 419 bp, Glycine max
tacggaactatgaaactaagcttaaacaagaattcccaaatccagatcataaagggctttatcttgaagaacaaccaaaaacccacttcaattgattcatactatcaaggatcaattgttcatagacaacgaaaccctaacttggggaaactaagagaaaagggaaaaagagaaaagagatgactcataaaccaagaaggattggagaagacaagggaaagaacactcacctagaatgaggcacatgtggaagcaatgacttccaagattattttgatgatgccaaagaatcaagagttaagcaagttccaaagaatcaggagtcaaaaagcttcaagaatcaagtttcaaagaatcaagaatcaagaacaatcaagtttcaagaatcaagaatcaagaacaatcaagtttcaagaatc

SEQ ID NO: 193691 - DNA, 400 bp, Glycine max
agcttgggcgggttccattacaatttctatacttaaaagcaaaattagtcattccttgatctacatgggctttattgggcttgtaatatggtcaggggtaagagggctatgaaagaaaggatcaaatagactcaaagagtgtttgaaggttatattgagtaagaacctttagagtcttgcatgtacgtttgttcctttcaactcttgggttgagctctactccttttgtctttatacattaatatttattgcacttttgtgccttccttgtaaaatcgggagatcttttgtctctctttttcttcacttgcctttggcggattttattttcctttattatgttgcccaacttcatgcaattgttgtatgcattgctattcccgccgtctacaaagtttct

SEQ ID NO: 193692 - DNA, 452 bp, Glycine max
  unsure (1)..(452): unsure at all n locations
tatacatcatctaatgaagtcattgtttatcgatagaaattcaatataatagcggcgacaggaagttcttcacatacctttacagaatgtgtaaggagtctgtatgccattacaattgaattcactggctggcgagactcctctggggcttcttcgctatcatcacaatcttggtcggcatcttcatctaccttattctctgaactaatcagcaatgcgtgttataagcctttatcaagtgcattgtttacttctggacagatgaaaaagtgtcattttctattgcttgtattgacgctcatcagaatgataaaactcatatgacaagaaaatacatgcaactatgacaaagtaaagtgataataaaatcaaagacgattcttataaatatngatcggattgatatacagaggccattgaagccagaaatatcattattcgcacagtattat

SEQ ID NO: 193693 - DNA, 406 bp, Glycine max
agcttctgtagtaagagagaatcattttatgtatctcagcctttagataagttagatgagagaacttctattaaagtcaaagtacgtaagttgaattttttgatcatttacataagttgaatatcagttataggagaagtttaattcattttattttcttgatttcttttatcaaataggaaattttatccgaacagagtcttatagtacttagagttttacctcacgtagccatgtaataaaattttgcattgaagagttggttattgaggtgacgcaccataagcacataaagaactctatctaagtttgtttgggaagtgaattatatggttaggcataagcacgtgtatgtctacgagatggctggatgtgcatgctctacgagacatagaacaatgggctt

SEQ ID NO: 193694 - DNA, 241 bp, Glycine max
tatccgctccagcactatgatttgactatgcacccgaaatgaggtgtagaactaactattgtaagaactgatacattctcaaagcacctcacgacacattatatgactctcacattatactgagaggaacataatacctatgcacagagaaatgtgagaattctctgttgcaatgttggctcgctgggcatggactaaaacatatcttctcctacctaccaaaccttgacatagactcttt

SEQ ID NO: 193695 - DNA, 389 bp, Glycine max
agcttcaaacggtagtaacttgtattagaattattcgttttatgcccataatatgtcaaaacgctcgaaattgaaggacgaattcactggaaatctttaacaggggttttctcaactcatttttccaaaaaaatgcctctacgtagctcaaaaataggatttaagattaaaaaaataggatttggtcaatttgatctgcaaaatgtctggggaggtgctattgtgctgctctgctctgcttcttcctcgcgcattctcctctactggcgtttggctgcgtggtggtggcggtgatttaagatcaactcgattaacatgtagattttaaagttgtggatcaagttgatttgaggaggtggtgctatacgtttcaataaactgtataaaaa

SEQ ID NO: 193696 - DNA, 437 bp, Glycine max
  unsure (1)..(437): unsure at all n locations
tcgagataaagcggtgttggccccacgcgatccattgacatctaaaccctctccgcccttcaatcccaatcccaccattaaagcataacctccatttgtgcaacgaactccggccgagatcgctttccgacgagaaagaggactatgttacaattgtgacgagaagtggagcactaatcatcgttgtaaaggacgcgtcatgctcctcattgctgatgaacaaacctccaccactgaagaaagcatactcgagctcgaacagacaccagcttctgccattgatgacaaacccgagccctcaccagattcgacttgttcacatatcagccttcatgcgttgtcaggattaccatccacagacaccttttggctctatggcaccatcaagaacacgcagatcaccattgtgattgatatgcagngtacgcataacttcc

SEQ ID NO: 193697 - DNA, 411 bp, Glycine max
agcttctattcggaaaatcaagaagctcttcactcttatgtctttcatgttgggctcacaattttcttgcctaaccaatctagaaactcgctttcagattgttgttgataagctagtcttgtataaaaagataaaatgctacaatgccaaagaaatattgattgaagatgaagaagatgttgattatattcattttgttaaagctcgacctggtcgtttgttcaaacatgagcttgaagcactcaaacacaagttcgagctcccatccctaaatggatatgccattataaagttctatggactacaagcatgctcctctagattggaacctaaggagaaaccacctattgatgcttatcatcatgaaagtgagtgttttatcaaactctgaaccacttcttcttcactcaa

SEQ ID NO: 193698 - DNA, 407 bp, Glycine max
tgtgccgatcccacatggttggagcattctcgcacaatatctttatcctgactggtctccctatgattttacctagtaagagtgacttgacctaccagtgtgtggtctatcttgtcatgtactccttgatgtagctccatgtggagcttgtaggccttggatcttcttcatcagaggagtccttggcttctttaagattaatggcaacggaatggagaatgacgaaagatgattggagatgccactttaatgagaagatgagtcaagaacaagctcaccaccatagaaagccatgaataagagcttgaatgtaggagaagatgaactcaaaattttatgcctcacatgggttcgaaccttgatgtgtaattctcaaatgatcaaaagatccaaaaatgcacactcat

SEQ ID NO: 193699 - DNA, 382 bp, Glycine max
agctttaagcaacataaacactactcttgttttttgttgaaatcgctgaacctggcagcttggatatacgaacttgtgtaaattactgggaattggtcactccgtgttttgagatgaaatatttactgaattttctagacatctggaaaaaaattatgaaaaaagaaccaagcgatctggataaaaggaaaaaataagaaaaatcacacaagttggttgaaaaatcagtgtccaggaaaaaaaaaggtgaaagggaagcgcgcttgttgttttggctcacaatttgctctataattggcgcctattgtaacaccctgatatatatatctatatattattaataattatgtctgatgtttgattatttgttgcgctattttca

SEQ ID NO: 193700 - DNA, 335 bp, Glycine max
  unsure (1)..(335): unsure at all n locations
tatatctagcatatattctatcttgtatctggatttcacgaattaaattgtcatcatcaaaaagggggagattgtataaacaaagactctgactttcatgatgtgatgatgccatgtgatcatgcgcttctcaagtttaattcaagacaaaaatcctagaaattcaacatacatcatcaagaagatttctagtgatttatgaacggaattccaagttgaaacatcaagaggattcgccgatgaatctaagccaanatgttcctacaagagatttactctctggtaatcgatcaccagaagatgtaatcgattaccaatggccaaaacactttctg

SEQ ID NO: 193701 - DNA, 414 bp, Glycine max
cctgctgcatgaagcttactgattagtgggggcacatattattctcttctcgggtgaaaggttcaacacccaactagcacaaaacgtatgttcatcatcttcaacctttatcgggtggaacccaacccatacgcagactcggagggttttcattcatttggacaccatttatcacgattcaaaagccaaaatttaggagtatggaatatgattttacactgaatgccacatatttattgctaaggagcctattgatatgggtggtattctataggagatttttgctttatatacacaggaatgccaatgtgagtttgagataactgataatttaatactaagctatttttttttaaaagttattaccaaaatcatctcgtttaagacaaaaattttttaaaaaatctaaaataa

SEQ ID NO: 193702 - DNA, 452 bp, Glycine max
ctataatactagcttctaacagaatcacggtagcaataggagcgaggttgtttttgtggaaaccccaatataacggaagaactctagtttaagcaaaagggtattctctgcatcctcaagaagcaccaaatgttgtttcttctcaagttatgcaacctggattatgtcaaacccatagttgctgagcatatcaataacagcatctgggccatctgggtttttaaaattgaccctgttggagagttccttggcttttcatgggggcaccccacatgagttgatgaggtatgacacagtaaaggtgtcacctttgtggcggtttccatctgattcagaatcacaagagctggctgaagtgaatgaattgaagacaaaattgaagcagtgtgtctgagttgcaacagagaacccaatgcgatatgggtgctcttgtaccgcgtgaatgatgatga

SEQ ID NO: 193703 - DNA, 439 bp, Glycine max
ccgatacagtagagctgcacgcgtgcaagcttatataatcgctgttgaaatcgcaatattctgttttgggcttattttcataatctaaaaatcaaaacctagaaaactagcttttgtgaagctgaaaccagcttagttttttactatatttataatcatttcttaagttctaactaaaataaccttaattatttagtattgaataacataataacacgttctatttagtttattgtataaactataaatagttattattcttgtgattaatttttctggatgctgtcatgatacagtagtaacacacatttagatgatactccattggatacctttctgattttgccatgtgactttattatggtaatatctctttattttgggcacttctcttgtgaaggaataaggaagtgaaccttgatgtggaccacattattaa

SEQ ID NO: 193704 - DNA, 398 bp, Glycine max
  unsure (1)..(398): unsure at all n locations
tcacacttgacatgaaaactganaagggtggtgacaaatctatttattctcatgaatgacagacagacaagtgtgtatgtgtgtggcatataaagtatacaatttcttaactgggattttgtcttcataaagagagccaacgatgaagagctcattggaaaaagtattgattgttcataatgagttaataatgatgacgagcaaggaaaaagctactatatagtgtttcatagtgagccaaaagggaacaagtcctctaattccattgctggaagtgaatgaatgaatgcaagcgaaggatccttccctctctgctatctatttagtgaattggtgtatcattcattctcgtatattacattctttcttttgtgataatactgctgtcactcgtgctg

SEQ ID NO: 193705 - DNA, 413 bp, Glycine max
  unsure (1)..(413): unsure at all n locations
agctntaactttggaaagtgaacacatgttataagcaactatgttntcattaatatttatggcttaacgacacttacatgaacaaatgttaaaaacaaaaagtagatgattcacaagccgataccgatgatcctaacacttagcaaagtaaaaacaaaagaagacagcaaaaaacattgatccttagcatttcggtctgttacctccactatctccccattcaccacttccttgaagggccgatagctccaaaggcaacatcgttggccacaactttcacttgctccatcatggcattaaaatccggcacttcctccctaggtcttcaaccatatagtattgtgcttaaatattcacttttgcatgagcacccctaacactgctcctgaaagtcagtttgtaaagatccacat

SEQ ID NO: 193706 - DNA, 448 bp, Glycine max
  unsure (1)..(448): unsure at all n locations
ttctcacttgagaacattctcactctctgatttcttctttaccctaatctcatgaatgaagctatattntttccttaaagacaacttattctttctatcccttgagctngagactatttttttgaagtggtgagctctttttctttccattttatcctctccataaggtgaccatttggggttttgatttcaaaatatgagtttgtgttgttttgattgttgatttttgtggttatggtggaggtgttggtgtgtttatgaagaagctcattccttgggcatgaagggctcttctttctcctttntatctccaaatctcaaaaggcttggatcttcaataggtaaaggaaactataatttggtttgattaatgctttgattgtgtgatttgtacttggaatgatgatgtttatggattctgttatgtgtcggatttgatggaaaattg

SEQ ID NO: 193707 - DNA, 409 bp, Glycine max
  unsure (1)..(409): unsure at all n locations
agctnttctttntaaccaaaaagctgttttctctcttctcactcaaccaaagaaaatttcataaagctcttttctctccctcacgttgctttttctttcttcttcatcctccattgaaactccattaaagctccaacctttggtgtccatttctgctccaaatcacgaaaggaggacattttcggagtcgtgaagcgcatctctacgtgtgggacctcgaaatttcaggtttgggtggacttctttctctcttgattttcgtgggtattgggttttgggagatatgatgggtagtcttgctaggtttctacttcatgatggttatttgtgaagaaatctgttgaacttgccatgtttggatgagttaagcttacccattctgttttagggtttttatgatgatgcttgc

SEQ ID NO: 193708 - DNA, 477 bp, Glycine max
  unsure (1)..(477): unsure at all n locations
tgctcgcgctaagcgcanagacacctgagtcattggctgtatggttcatctaagcgcacatcactgtgctaagcccaacatcttcactgtaagttgcaccttaagcagtgggcttagtgtggatgatgcactaagcgccacttcctctctgtgaaatattnttatagctgcactaagtgcgccatcctgccctaagccccagattcattctataagttgagctttcaagctgggcttagtggggaaaggatgcgctaagcgccaacatcattctattttgaaatcattagaagtgcgcttagcgcatgtactggcactaagcttgaatcactctctgtaagttgaagcctggttgcacgctaagcctaacttcgtaggctaaatgcattttgcaggaccaatcatagctactgtcatcgctaagcgcgccttgctatgctaagcccangtatgcctctggaaacttgaatatagcta

SEQ ID NO: 193709 - DNA, 407 bp, Glycine max
agcttgaatgggccaagacatgtttgttaagtatgggataagtagctaaaaccctacatgaatagaggagcgatggggaataagtggaaatgaagcacaagtagtaaacccaaaccctctaatatcaacaaaatcaaccaaggcttcaatccaaatcaagtcctcaaaacaagacctcatttattcagcttcacttcttcttcttcttctttttctttttaacagtacgaatttgcagcagttgaaagtattttgaatttttaatgcaagaactaggcaatatatatataaatcaagcatggccaaaataaaacattaagcatggccaaaaatcatatcttccaatgaaacatacccccccccccccacacttattcccaaatacaatttaaagctccaaaattcct

SEQ ID NO: 193710 - DNA, 374 bp, Glycine max
  unsure (1)..(374): unsure at all n locations
aaaaccagcngaccaaaagaagaacaagacgggacatatttgtcttggctagaccaaatcaacgagaggtaagaccaaaagaatcatgatataacaaccccactgatgctaatcaccaaccgcaacatccatgcactacatgatcatggacaatttcactgcatcaaaatcaacaaaacactttatattttcaaaagacgccttacaaggatgcaaagaattggtgaatacttgaaccttaccaccactttcaacactcccactagacacatgagagaacctcttttgttcaaggatccccttctcaatgagaacacactcatcacacactgtatctctcttgatacacacaactatgctctctcttatcacac

SEQ ID NO: 193711 - DNA, 410 bp, Glycine max
  unsure (1)..(410): unsure at all n locations
agcttttaccaagggtcatggtaaagattatgcatggcagcagcataagcttcttggaatatatacaagtactcctcatctccaaataataaataagcctgaaaggtcgtacatggaaaacaaaatcagagaacttgatgtatatcaactaacaaagtaatgcccccaaaagaaaaaataacaaaaaaagaaaagaaaacgaattctagataaaaccatcctgcctagttaataacattcaaaaattggtcaatcaatagccactagatggctagataaattgggtatataaatgtccttgaattgaaaatatttttaaatatttcaacctataatttcattaagcaatttccctcaaaaagggtctttaactntaagaaccgcatgttttatatgttgtagaaccaatg

SEQ ID NO: 193712 - DNA, 472 bp, Glycine max
  unsure (1)..(472): unsure at all n locations
tgctgtgctctctcangagaagggctgtatgatggtcttggatggattgcccagcgagtaactggcaaagccccaacatgatgttgtgctgctggaaacctgngatgagattcatttttattgtgttgaatttatatgacaaaggacaaaactctatgtatcatttatacttcaaagagtcaagcaaagataatgtgtttgatttgctatgaagaaaaagattattcaataatctgattaacacatttttttatccttagatcaagtttattattcaagtaagatgaaagcataagaggagtgaattttaatcatatttgaatgattaagattagaattatttaaaacaattttgatcattcagatatagttgtctactnttttcgtcttattttcatgagatactctacatgtgagtgtcgtgtgtgtgtgtgttgatggaagttactttaatattagaaaatcattcatg

SEQ ID NO: 193713 - DNA, 391 bp, Glycine max
  unsure (1)..(391): unsure at all n locations
ttaagtcacctgcggctgcagctngcactaggaaatgtgaaaccatgtgtgttggaccttgtttgctgctaactcaatagtggagaattatccactcatttacaacaagactgtatcagcatgcgactcggtcaaactattaacccaagtagccgcataagggattgttatatgtgatgccttggattcagtttctgtcttaacccaaatagattctattactgcggctagtgtggatggggctgtgtttatctctgaggatccagaactaattgaaacaggacgtttgttcactccaagcattgtgatcagcccaagcgatgcaaaatcggtgatcaagtacgcaaaaagtgttcaaataccttttgcccagcataaatttcaacaaaca

SEQ ID NO: 193714 - DNA, 442 bp, Glycine max
  unsure (1)..(442): unsure at all n locations
acttcttaacacacttttatgtactgacatcacattgtttattcttgattctctactcgagaaaaaaaattaatattcatgtcactttaaccaacaaacattgataactcattgccgaattgtcttcaattttctaatgagtacatttattttttcatacctacacctaaactatgaatttgagattntatttaagagaaaagaatactcacggatgattaagaagtcataattttctttatttttaatattgttttctagtttttactcaactaatcttttaacacaaataaaagcttaattttagaccacataagttcacatacaaggcctacttatcaaatattatttntacaaccttttatcctatagaatataaataacgatttcaattaatataatactttcaggtaatatatttttgctcccatttttactgttt

SEQ ID NO: 193715 - DNA, 355 bp, Glycine max
  unsure (1)..(355): unsure at all n locations
agcttataataagaaagagaagtttttaactttcttatgccggacgancaagctcggaaggctattctgcccatggatagatagcgatcgagccttcgtcaaatggtccccaaattgcgaaggaccgtttaaaatatattagatctattcaaatggggcttatgaattataggaattaacccgtaataaacgtactttgaacatatatggtaagcttttgaaaaaatatataccaacactgctcgaacgtaatatcatcatagaataggaagaaataaaggaaacatataaatggcgataacagtaaattgccccgaaagggcatgtgtcaatattacatccaaacagtaaatct

SEQ ID NO: 193716 - DNA, 469 bp, Glycine max
acactgaagcgtaaccagcaaaagtacttatgtatttgttcaagctaaatacccgagtattattgatccatatcatccaaggcgaactcactactagagaatagacgtttaacatctgctattaactgatgttgaaactgtcaacgttaaaagtctcgacgttaacatacggctttgaaaatcgatgttaagtaaattacacaacatcgattctgtacaaaatcgatgtcatatcatagaatattaacaaaaaaataaaatatgaagataaccacatcattgtcttttaaaatcgatgttgtcagtctaaaacatcggcttttcagaaaatcgatgtttttttactcacaacatcaatttaccaaccgatgttatgatcaattgttcaggaaatcgatgttgtcagtagaaaacatgatgttccaaataatcgatgtagtttgtgtatatattaatatctatctacttt

SEQ ID NO: 193717 - DNA, 412 bp, Glycine max
agcttgaggatagagacttctcaaactatttatcttctctctcaaagaggctctctaactttctagctttctcactctaagaagtgaattcactcttgtcttggatggttaagaatgaaggctcctacccttatttatactactcctcctccacaatgaatggtggagattacttgtatcctagggtggagattaattctctagaatgctccacacattctaggagtctctacactcttctactcccttccatatccttccatactcttccataaggttccacacatatccagaatattctagaggtttccacaaacttccacaagcttctagagagttctacactactctagagttctttaggacgttctagaaaattctacacttttctagaaagctctagaattttcta

SEQ ID NO: 193718 - DNA, 463 bp, Glycine max
  unsure (1)..(463): unsure at all n locations
tcttgaatgggatcaatatattcattggcatagattaaaggatgaagatgtggtatgtgatatcttttagtgtcaccctgatgcagtgaagttatgcaatgcatgtaatttggtgtttttgatagatagtacctacaaaacaaacaggtaccaactcccactacttgactttgttggtgtgacaccaacggngatgacattctctgttggtttttcatatctggagggtgaacgtgttaataatgtggaatgggctttagaacaattttaaggtttatttctaagacgtgatgccctccctggagttcttgtgactgatagagacctagcattgatgaattcggtgaaaactgtattccctgagtgtgcaaacttgttgtgcaggtttcacattgacaagaatgtcaaggaanaatgtaaatccctaattggtcaaaanaatatttgggactatgtgatggat

SEQ ID NO: 193719 - DNA, 409 bp, Glycine max
  unsure (1)..(409): unsure at all n locations
agcttgtcaagatcactgaggtgcatattttcattttatttatntnnngcataacttatcaatattacttactgttacgaaaattaatttaagtctttatggttatttattcaaactaaggcgttatacgagtgtgttttgaacgaatttatgatagatttgtcattatcatttatgaagcattcagtcattcgggaggattatgcacttgcttaaatttatttatctgttgactactatacaccgcaattaattgagatgaattatatacttggttttagctggcacgattgcaagaggaccttcggcgcatgaatgcatagaaccaaaagctgaaggagatgctcagccatgtcagcagtaactacgccaacttgcaaatgcatcttgcagcagtactgcaacagca

SEQ ID NO: 193720 - DNA, 405 bp, Glycine max
  unsure (1)..(405): unsure at all n locations
tctcaactgttgcagttaaagttgaaagaacgtttacgcttgctctaaatagagaggattgcacaaganaacttgtcactacggaacaagttgtttgtatatcctcctgtggttgagccaagtcaagatattgaagtgtttcttaataggagtgtttcaactctatgtaacgagccaaatgttttgattaagggagcatttaatgattggaggtggaaattttttaccattgtattaaataaaacacacctcctcaatggtgattggtggtcttgtcagctacatgttccaagagaagcctataaagtggactttgtgttctacaatgggcaaaatgtctatgacaataatgacagaagggagttctccatacctgtctatggcggaatggatgctattcggatt

SEQ ID NO: 193721 - DNA, 376 bp, Glycine max
cagctatgcaccacttaggaagcgggaagagtattttgttttatctatccggaccacggcgcctgtggctcagtggtatttcacgttcaatcgcttacaattggtctcggcccaacatgaaaatcggtgctaggatcattcacgcaagttcctattatcggaacgctcctgtttctcgcaaaggttgttccctttttactataatgcatgtttgcttcattgatattcgcttctattcggaagggtttaatttgattagatgtatgcatgttttcttcttaaaaaaagctacttttccttactgattcttcacctctgcttcggtcctcttttatttttccggctaaatttttcgtcaccttcccttatggtcgaa

SEQ ID NO: 193722 - DNA, 357 bp, Glycine max
tagactcttcatgtctggccaagaggatcatttataagagttattacttttagaaaaacttataaccaatttgaaaaagtcaaaaacctttctgaagagttacatcttttgatttattagaaacagtcactggtaatcgattaccaaattagtgtaatcgattacacaaagcttttgtgtgaaaggatgtgactcttcactattgaatttgaatttcaatgttcaaaggcactggtaatcgattaccaaaacactgtaatcaattacaactttttgaaaataattttaacattgtaaattcaatttgaaaactttttcaaaacaattatgctactggtaatcgattacaacaatttg

SEQ ID NO: 193723 - DNA, 400 bp, Glycine max
agcttaaaatacttaaacatctaattattttatttatacccatgggcccacttgtatattttgaatttgtgtcttttgaagtcagctggtatgtaaattgcatgatgtcaactgctgccttgcagtaaattcattggtactttctgtcagttggtctgtccctataaaactatattgagaacaacgaatcatcgtgatgctctgataataaattgtctgataggtcaacctgctaatataatatatcattggtcccaagttgatggttgtgtgcatgaataccatatttatttccgtgtacatacttggataaaccaaagggtgattatctggggcgtggaacaagcttcatgccaaccgattatatatatatatatatatatatatatatatacatatt

SEQ ID NO: 193724 - DNA, 410 bp, Glycine max
agcttacagattcgtaatccgagagaggcttatttgttatctgcataccaaggggcaatacgcctgtactgatcatatatttattttggttgtctacaaattaatttaaaattaatcccttctccattattcgaacctatgactttcatatatatgagcacgacgctctaatcaactaaactaataggtcgattatattattaaataattaatatagtcatatataacactaaaatttataatgtatattttgcgcacatgtaaatctacatagtaaattttgtgacagttaatattgatctaataattaatttctttacatatataacttttatgagacctatctttttgaaacaaattaattattagatcaaaattaattgtcacaaaatttatcatgtaaataaata

SEQ ID NO: 193725 - DNA, 431 bp, Glycine max
cggcggaatgtggtcttaaatgtgatctgcggcgctattgttttttttctttttgcatatgtcacaattcgtgaactttctctgaactaacatggcttaaaacgtgtattattatttgtgactgtcaaaattttgagactttgaatcaatttctgtcgacattactgatctatgtaacttcaaaaaatatgatgcatctaagtgatataatgatttctcattttcctcttcatgttctgaatttagtaatatttcatctgagaatgtcactcatttctgtaatcttaaccgtttaagagatttctaatcgaacgcttattgcttatattgcggaatggattattgccttcatttccatctctttgatacatggatgacttgaatacaccatgttattaaaattcattactatcaacatttttagttactaa

SEQ ID NO: 193726 - DNA, 407 bp, Glycine max
agcttgatggctatagatgacaatgttttttcttttcacttcgacaagacgcgatggaccgtgtcgttataatgaaaatctaaattgattcaaccccatgtcctgtctaaaatcgcaatacttcaaccgtgcatcattcccatacatccatgcttattatggttgcattgctcatagcattcttttcttgaaaaaaatgaacttaatcattgttatcaaaaagaaaagaacacgctgtacgacgcccttaccgaactcgtgctagagctagagtaatgggtgaactataagatgtgcaataccagatgaatgccgacatggatgccatgaaaaataaaatgaccaccatgatggaggccatgatgagcatgaatacaataatggacgcaatgcggttgcaattgccg

SEQ ID NO: 193727 - DNA, 456 bp, Glycine max
tccttgagaagattactacagaagctagagctgaattattcactccttataatagctaagctcacccccatgataaaatacatgaaaatacaaaaaatttcctactacaaagactactcaaaatgcctcgaaatacaaggctaaagccctatactactataatggccaaaatacaaggcccaaacgaaggaaaaacctattctaatatttacaaaaataattgggctcatacttagcccatgagctcgaaatctaccctaaggctcatgagaaccctagggctatcccttggatctctggcccaatctacttggagtcttttatccaatgcacttgcggtgtaggattgcatcacatattctctacttaacaatgcttatgtgttctatggtgtcacctgaaatgctaaaccccgattcctcggataatctagcctaatcctgacaagcatcatcc

SEQ ID NO: 193728 - DNA, 408 bp, Glycine max
agcttgaccaatcccgacccaacccgggcatattctgtcagtgagaacctgtgatgtacctaagcaggcgagctcctggcagtcaacagataaaaggaaaacaagaccacaaagcaaggaggcttgtggtggctggccagctgtgaattttgtgtaatatgtggatggtggcctctggtaatcgattacaaggcttaaaattgaggacaggaggctaagatggtctctggtaatcgattaccaaggggtgtaatcgattaccaggcttgaaaacgaagtcaggaaacttagggagcctctggtaatcgattaccagcctgtgtaatcgattacacagaggaatgggtcactggtaatcgattaccaagcatgtgtaatcgattacacagtgtattattgcatatttca

SEQ ID NO: 193729 - DNA, 415 bp, Glycine max
  unsure (1)..(415): unsure at all n locations
tgagatgaggaagtgtngaagggtgaaacttcctgcttttattgttgaccacagagtggtacctggagatatgtcgcgggggtcaggagaccttggggacgtcaggtggggtgctattgcccaaaaccaagcttgaccaatcccgacccaacccgggcatagtcggtcagtgagaacctgtgatgtacctaagcaggcgagctcctggcagtcaacagataaaaggaacaaagaccacaaagcaaggaggcttgtggtggctggccagctgtgaaacttgattgatatgtgagatatggtctctggtaatcgattaccaagggtgggtaatcgattacaaggcttanaaatgaagacaggaggctaagatggtctctggtaatcgattaccaaggcgtgtaatcgattaccaggc

SEQ ID NO: 193730 - DNA, 422 bp, Glycine max
  unsure (1)..(422): unsure at all n locations
ttaagcaccgcggctgcagcttggggctgaagaaaactatataatagctccaacgntctagtttaggggaccccctctctccctcgtgggagactcactctctctctcctctctctcttctatttttcgtttttagttttagtctctcttctctttctcttttattttcgtttcttttacaattccagttcagacttttagttttatcaataaaatttcattctctatttgattaatggaaggctaagtccgcagcgttgttctcccttgaggatcaagcacagttctctttgaggttctattattactggtaaattctggttagtctttcctcttcactaattactttgaatttgatgcttttaattcatgcctgcttagtgcttgaataattggttctgcgcttaatttacgctcatgct

SEQ ID NO: 193731 - DNA, 406 bp, Glycine max
  unsure (1)..(406): unsure at all n locations
agctntatgtacctttgtgtgggtttcctctattctgttgaacccagtgtttcttataatgctctttaagaaatcaaatgccaatgtcttatatctcattattggttacgagaaattatatctgtatgctttcattcctccttcgtcccattatttttaacaaaaaaatgtgtgtttgatgtgccatcattttcttctatttcctaaaccctttttgcaccattttaattattgattggtcttaattgtcaattaattacgcagttttattatttgggctcatttagctaatgtgatgtttttaatctaatttcacgaattaatgaaacattgggcttaatccggattttggctgtggacttgaagagggcaaataaagaagcgcttaccttagttaatttctaat

SEQ ID NO: 193732 - DNA, 410 bp, Glycine max
tcatgataaatcaggaatactatatgacgtgggtttttattgtgtgtaacacaggggaaatatagcttggtttcttaaatatgtctgacgtaagcaactacatacattctaccatatatttaacatatttaatgacaatttcataaactaaaagatgaatcaatattgtattctgaatattcattttcctattttttttaccagggtgacattcaaacaacacttaggagtttgtttcctaaagatttttcactagagtaccgccctaacaaattgatcaaaacccttcaacatcatcttcaccttctttgagatcaatctccacaagaagcccagaatactcatactttctaatcattgtctatatatgctaccaactagaaattaatcttactctataactaggttat

SEQ ID NO: 193733 - DNA, 345 bp, Glycine max
agctttagatacacagctcaactcgttattttaatttaagagaacttcccttctatcaatgttaatgtagttcatgtcatctctagacaattattatcctcaaaatgtccttattcttgatcacttaaatttgttatttgtgtttatatctatcatagggaaaatgaggcatcacttgctattctacctgatttgtagatggagcttgatagtatagatgacggatgccttactattactataatcctctgcatttaacatggtgggaggagtcaatatttgttccttttcgtgtagacatgagatgctatttgcaactaatacattattccttttctagtcata

SEQ ID NO: 193734 - DNA, 412 bp, Glycine max
  unsure (1)..(412): unsure at all n locations
tgtacctctagtactcagttaatataatatctattttttctgagcaaaaaanaaaatatatatatatattgtttttctagttttttacatgtatatagttngaaatatgtaacaatatatgtaattttaatagtattttgtatttttttagttattatttatatttcttattattatgttatttagaaattttgttattaatatttgtattaatttattatatcacatatcatgctttatttaatttattattatttagttgattatattatgcttcaagttgttttattattttaaaaactatattattattatcattattattctgtagtccattatattatatattatactattacatttattattattattattattatttaagtggatgtatgtttacataaaaaaa

SEQ ID NO: 193735 - DNA, 399 bp, Glycine max
  unsure (1)..(399): unsure at all n locations
agcttcaagcatacgcttcngaatatttttaatgtgtatcctgcttaaaaaccttttgaaacttagtcagtggcttataatatttaattgaggaagtgacgtgcatgctgcttatctttcccttcttttttatgtttgtttgtttcaagataaagcacgtcaccggaactcacaccattaaactatgtttcatcacaagatttataagagaaaattgtcatagagatgattttcaaataatgcttatatgaagctgtaaataattgaaccgtaaaatttggtactttatataattgaactgtaaaatttcatttccattcaacctgctaatatggtaaagtgttcagtacagtggaaacaaatggcctaatacggtaatacattgtatacatacgacgt

SEQ ID NO: 193736 - DNA, 374 bp, Glycine max
atatacatgtcccgagagagaatggtactctcgatgaactactatttcggatttctgcgtatgatcaatatgatcatcttttcactgacaaaaagattactgacggaatttgcatcacataatgcgtgcactaacgtacaatgtaccaacatttttgttctggaaacatcttatcttataatgttatttacccattacagcacatcgcggagtatcgggtacatctgctaatatatattggctgaatatgtatctcgtgctttagtgctaacttgtcaatatgtgacatgaacaaaagtggtgcgtctccagttctatatatgcatgcgttatataagtcgaattgttatatgacatatatataattatggttc

SEQ ID NO: 193737 - DNA, 402 bp, Glycine max
  unsure (1)..(402): unsure at all n locations
agcttccccgtgagactcaaattttatgttataaagnggctcaagatttgtatcttccttaaacattacaatatcaactgtgggtgaattcaaatctccaccatttagagcatgtacctcaattccagtatcaactatatttctgccatctatacctccattatgcaatttttcttcactgtccaacatgttatcaattgtagttgtttcttcatcctccttatcatgttcaccagaaggtaaccgaagatctatatccatgatgaaaacagctntctgcttgatggtttaaagggtactgaattatatataaaagacatgtcaagccatcaagtaaactagtccctcctcaataacatatacagcgcctccctatgtgattntgtattttctaggaacaaa

SEQ ID NO: 193738 - DNA, 433 bp, Glycine max
tatggatggtgcgtacgacatccaattattgatatttctatacgcttaatcaaggtacaaccaaatcaagatgcaccttccagatgaagaaaaaatcatttctataactgaagacgccaacttttgttacagggtcatgcctttcggattgaagaacgaaagagccacataccatagactcataggctggtcttcaaacgacatataggttggaatgtcaaagtctacatggacgatatagtcttcaagtctcacagcgtggcccaacatgtggtagatttggaggaggtgtttataaagattcacaagtatgacatgcgcatcaatcccaagaagtgcacctgagccattcttatggggcgaggcctgcgatcaagccttcttagtccttaagaatactattgccacaccgctagtcctaagtcgactaaag

SEQ ID NO: 193739 - DNA, 419 bp, Glycine max
  unsure (1)..(419): unsure at all n locations
tgcagcatgcaagctgcttctcacaccataaaagagcctctttcttttattggacaaaanggaccatccaaagcatgaaatcaacacataactttatcgctattgcaagaactacataggtctgagttcctcaccacaaatcgaggatacgtacgatcaaaagccccgcttttgtcgaccatctcttttcaaaaaaacaagagatcgttaatggcccaatgccttaacatttctcttctttcacaaccaacagatcgttaatggtccaacgccttaacgtttttctccttttcaaaaatcaaaagattgtttaaaggtccaatgccttaaatgacttatgatcgattaaaatatatcttgcgaaaaaagataacaacagcttatacaacgtataattctcaaagaactacgtatgtcta

SEQ ID NO: 193740 - DNA, 395 bp, Glycine max
  unsure (1)..(395): unsure at all n locations
tgtatactgaattgagtatggcgcatgcatngcatgtctgatatgccttttagagggtggaaaagtgcaagaaaatgagctgtgttttctgcattttctggaaaacgcgatgaactcgctaagcgagcatgcggcactaagcgagtttatcaatactcattgtatataagcgttatctgaagaactcgctaagtggacttaccatgctaagtgagttcatcttttgaggatgaacactcatcctcttgctgaactacctgtggctaagcgaggctgaatcgctaagccctggtaacttaaccaaatttcgtattgtaagccttgcactaagccaagtttacttgagctaagcacatttcatcatggcaacctttatgctaagccgacatgttatg

SEQ ID NO: 193741 - DNA, 361 bp, Glycine max
agcttcttatccaaggctcatcttggggttattctccttcttccatggcttattccctaggggatggcgtctcctctcacctcttcaactttgtcttccgctgcatctccatggtggaaaatcaccattaaaggacctcattgaagctcaaagatccagcctccatagaagccctacaagcaagcttccatcaacataggtaagtatacacattgctcaactaatttctgatgtcatctattgtttgcagggatcttgcctgcaagacacccaatggacccgaagaagtccaacaaggtcttggagttgctagctctgatacgagcctttggcagttctacggagtgcctgttgcccccag

SEQ ID NO: 193742 - DNA, 338 bp, Glycine max
  unsure (1)..(338): unsure at all n locations
tgtcccacttctctttactttcattctaaagatggatgatttatattngtaaacgacttttcactttcttaaatattgtgaaagactcacttgtttctatcaagcgatatacatttcgtcacgactttgtatgtataaaaaaaaattacccacatttcttaaattacaatgctttcataattacattgttgaatacttttattaaaaaaaataaaaagggagacaaagtgcatgtttattaataagagattttagggtgtcacactaattatcactttcgcccttcatgttttagtattttctgatatttaaagtctcatttgaacattgatgttttc

SEQ ID NO: 193743 - DNA, 269 bp, Glycine max
tctacgaacaccatcattccctcttctcctcctttcttctccactatgaactctattccccatttgatccaacctctcatggagcgcatcatctccttgtttcattaacctctccaaatgttccatcaaagcctgcatttggaattgccaacgccccacctcatcattaggaatagtacccgacatctcatacaaacaaatctaacgtaacaaaacaattatagatgctgtgtgaatacctcacccactcacgtgtatcacacaaatat

SEQ ID NO: 193744 - DNA, 419 bp, Glycine max
cacctgccgcatgcagctttgagcatagaactaagttgtgagcttgctcatcctgtcctacagttactgacggaggggctggagtggatgaccaatggatgtcttttgttcttgctctttttcttgattccatttgtaactaaaaagaactcataattccttagaccaaaatcattcaagttaaacaacaacataaaggctaaaattaacaataggcgcttagcgggatacagctcgctcaatgcgccctgagcaacataacatgtcggcttagcctaaaggttgccatgatgaaatgtgcttagctcaagtaaacttggcttagtgcaaggcttacaatacgcaaattggttaagttaccagggcttatcgattcaccctcgcttatccacaggtagttcagcaagacgatgagtgtt

SEQ ID NO: 193745 - DNA, 464 bp, Glycine max
  unsure (1)..(464): unsure at all n locations
agcggaagaaaggaaaacagaaactgacgagatgattatgatatgaagcaaaacaagaatgaattgaaagcctcggatttgaacacttaccggttgaagaccgaaggacgaaccaagaacagatgaagaacgacggaaaatcttcacaaaattgctcacagaaactgtagacaaaggatcaagctgaaagntttgatgatgccaaaggattacatgaatcacatgcttctcaaagatttactcaagacaaagcaattagagatattcaagatggatgatcaagacagtctatagagtcttagaaagggtatattaaataggaagggaattccaattgaagtagcaaaagggttggccaagaaatttaagttaaaaagtctttttcaacaaatntactctctggtaatcgattaccagaggatgtaatcgattaccagtggccaaaactgaattacaacagctat

SEQ ID NO: 193746 - DNA, 407 bp, Glycine max
agcttcaccttctggtcctgctcatagtcgtgtttgagaaaacatgctctattttcatctcccactccaagtaggcctccggatcattctttcctttaaatggaggaatgttgagtttaataccatcaattcggttttgtctacgaacaccatcattccctcttctcctcctttcttcttcattatgatctctattctccatttgatccaacctctcatggagcgcatcatctcgttgtttcattaacctctccatatgttgcatcaaagcttgcatttggaattgcgaaagccccactccatcattaagattagtacctgacatctcaaacaaacaaatcaaacgtaacaagacaattatagttgctgtttgaataccctacccactcaagtgtatcacacaatta

SEQ ID NO: 193747 - DNA, 406 bp, Glycine max
tactaagcttcctctgggccatttgctgtgaaggcgaacagtgggattgtttttttaccaacaaatgctactcttacaacacaaatggcatacaacctcctttaataaacaccaacatcagtgtcaatttagaataaactcatgcacatactcacttacgaacgttcacttgcacaagatattctcctaactaagaaaaatgcacccacgcacaatcaatgcaccttcgtcacctagattatttatatgtacttccgaggtgtatttgttacctacatcacatgtgacttcttggctgaatttacacacacgcatactcaaagcattttggctaccaaatatcgcacccgtgcacattcttgtatttctaatacctatgcatatacaaaccttgtgatgaatcttg

SEQ ID NO: 193748 - DNA, 399 bp, Glycine max
agcttcagcacttctgtagaggttttgtgtcttttcatcagctctgataaatctgccatatactcagccggtattaggcctcatgagctttctcatattcagcagcttactggatttagcttgggtgacttccctttcagatacttgggtgttccccttttatcatctagattaaatgtatgtcattatgctcccttgctttccaagattactggcctgattcagggatggagcaaaaagtctttatcttatgcaggtaagttagagttgatcagagcggttattcaaggaattgtgaatttctggatggggatttttcctttgccgcaatctgttttggaccggatctacgcttcgtgccgtaattttctgtggggcaaagcggatattggcaaaaac

SEQ ID NO: 193749 - DNA, 462 bp, Glycine max
  unsure (1)..(462): unsure at all n locations
acaatacttgaatatccaactctataagatggtgttcatttttattcacatgtcgtaatactacaaagaaggggcctatgactacagtgaaaccaagaaactaaactattgaaattaaacttaactagtgacaaaactaaaacaattgagttaaaacatccctctacataaagaaaagggtgagatgatagcataaaaaactacttgataagtaggtgattttagcacttatcaactctcccaaacttagagttttattgtcctcaagaggaagatacagactaacaactagtacctagaaatactaacactacaatgacccacatggacaaagatcaatctcatcctagagaatctagcacatacttncatccgatcttgataggaacaaccaaagattaaattcaacatggtgcttcacaagacataacaggagcaaatgccaaatatgaatggactata

SEQ ID NO: 193750 - DNA, 404 bp, Glycine max
  unsure (1)..(404): unsure at all n locations
agctntgaagcttgaaaaggttttgtctttttttatttccaactctttgaagtaatgtttgtattgattgttacatcttagtctctatatttctatatgtacatcatgcatcatcatgtagagataggaagattgtttttaaagttagaaacttcttttgtgcataaaattctttattttaatcgattaccagactgttcgtaatagattacacaacttgtttgtagtttgcagaaagattctagtttcggtttaattgattaccggttatccccaatcaattacatagctcagttgagaccatatctagtttttcatgagtctcttgctttaatcgattactcggtgatcggaatcgattacttcgttcctgaaagggttacagaagtgatcgagaacaattt

SEQ ID NO: 193751 - DNA, 345 bp, Glycine max
aatccacagagaacgccgatattatatattttttactaacagatattctttatcattatataatatgttacctcttttttggggtccaacgaggttaccgcacgactgaacggtcgaatttcattttaacagaaattaacacatattacaattcaaatgatcggcggaaatatattatatcttttgattaggcgagaaaatgacttacataaatgactaaagcacgtcaaaagggggtacagatagctcacgaaatgaaaataaaagtacgccaaacaagaggggaccaccaacggtacaaacaatgaattgaaaagctcgatttctggaattacccgtggagac

SEQ ID NO: 193752 - DNA, 405 bp, Glycine max
agcttgttgtgtcatcactgttccggctctatatttattccatgctcataagcatctttcagcataactcgggctaccatcaaagaggcaccagacaaacgtggttgtatcggaggagaatcgacataagcgttgttcacaatttccaatgcttaaaagaatgtttctagcgactcctccacagcttcaacaaaaggcatagaagacggacaactcactagtatgttctctttgcccgacactataaccagttgacccctcaccataaacttcaatttctggtgcaatgttgatgggaccaccctaacataatggatccaaggtcgacctaacaagcaactataggcggggtttatgtccatcacttggaatattatttggcatgtgtgtggcccaatctgaatc

SEQ ID NO: 193753 - DNA, 469 bp, Glycine max
  unsure (1)..(469): unsure at all n locations
cttgacatanaanannaaaaaaacttgttgaagaggttacttttcttatataatatatatcacgattctaacttcatgatattgatgcctagctacgccacaaatgaatcattgtataatggaacaaaaatatatggatgtatagagatggaaaagctgaccttctcgtctatttttgctatatagatgtcgacttgctccttggcagcactggtcatgtttttcagcttctccttcgaagattgcatctatgttcttcttggctgtctctctctctctgtctctttctatattatatcaaagagttccagtgctgaacgatttaagttgaacagaatactcgacgtggttgaggatttatatgataaggaagatgcgaaccataccaagcctagacaatagaagagcaaggcacgctatgtacctgtgccacttgttcacatgcagagctaattccatcaatatgctg

SEQ ID NO: 193754 - DNA, 392 bp, Glycine max
  unsure (1)..(392): unsure at all n locations
agctntaaggagaaaatcattttttttttctctataacataagctatatcaaacatgctctactgcacacacccctaacaacattacctccactgtgtaatacacttttataatagggtttaacatggaggataagacattggcgttggaattggatattcctctatttctctctatcctgttcctaatcatataatcttctgtagattatcaaggagtggaatgctgagttgcaagagcgaactggaaaatttaaaaaacaagccaatgcaatagctgaatgggatcggaggattttgaacaatcgtgatgtttattgagacttgaggtttctctacatatactgataaacatttttaattatttgttacatccaatgacttaaatttttg

SEQ ID NO: 193755 - DNA, 398 bp, Glycine max
gccgcgatggacgaaggatgcagaatactacgttattctctgcgtgctatcacgcttttcatcttacagacagcaaaagtaaagttatactgataaccactcgggtatttccacccgtcaacgtgactcagatgtcagtatgacagatcttgtgaatgtggccgacaaaagcgaggctcttgctcctacgtatcctccaatgaggaactcacacctacgtagttcttgataacttgtgagacttgaaaaacgctccaccggaagatgctgacatttcctgaaagggcgcagatgaccacattggcctatgctcgtcaatcacacttggtgtcactgaatgacgaggtgcggataaccgtatggtgcttcgcgaactccaattttggtcatggaacaaa

SEQ ID NO: 193756 - DNA, 421 bp, Glycine max
cttaaactaactgacacaccatattcggtgcgagccattcctatgtctccaaagggtcctaaagatgaatatacaatcttagcacttactcttttctctcaaggtatattgggagctctttacaactatacagaaaacctaccaatagcattttacaaaaagaattaatctatagctatgtaaaacaacctagcattctttcgtaagatcttgttttgtatctccaaagcttctaatatatatagcattcatctttaagtgtcattatctcacaatggatgaatttcttcacttaagcttgtgtctaatgctaatgatcgatggagcatttaatgtttacattaaatgcacatccctcctcatgcaaccaaaccactctgatcggctttcttgtagagcacttcattagaaaaccacttcc

SEQ ID NO: 193757 - DNA, 405 bp, Glycine max
  unsure (1)..(405): unsure at all n locations
agctntaacctcatcgtctctcacagtctttagatttgggagccaatccaatccttgtgttcggactctcagccacttatgatagccgccgatgatcccattactgcttcccctaagctctctgtcctttcttcacgccgcatcccatgccttgtgaactccttagagtaccctcgcattggggtcactgaaaccccgtgtgatgaaaggcgtgatgctttcgcctgatggcactcctctcatggggtagccaagctgtcttatggcgaggacgggattataattaatacaaccccttgttccatcaagggaacatttggacatccttcgcatgaagatagaatcctgattcttccttccttctagcgagggaacaaattaacagatgcccctccatgctagcca

SEQ ID NO: 193758 - DNA, 388 bp, Glycine max
gtggtactctctggtaatcgattaccagaacgctgtaatctattgaccagaacgccacattcttgaaaatggttcttgaaaagtgtaatcgattaccatgactttgtgatcgattaccagtgcttataaagatcaaagatatttcgaaaaaccttgtaatcgattacacaaaacatgtaatcgagtactagaggctctgaatgttggaaattcaaattttaaatgaagagtcacaacttttcaagaaagataactgtgtaatcgagtacaccacgaatgtaatcgattactagtgtcaagttatgagaaaatctggcaacagtcacatattttcattcgattgttaaatggtcatcacaggcctataaataagtgagttgagcacgaa

SEQ ID NO: 193759 - DNA, 399 bp, Glycine max
acttcccctcttgctcaaagtgctgctgctaatgctctgtgtcattaggctaatgattaggatagggttagagtcattgtgagtgagcatggtgtgcctgctgttgttcaaattctcagtgactcccccatgagggttcagaccctggctgccaatttggatgccaggatggccaagcatgaccctgtcgcacaggaggatttcgctcgggagaacgccattatgccgctcgtcacgctcctgtcgtttgatacctttgtggatgatccattggggcatttggggaagcagagtattcactctattgttcagactaataaagagttggtgaagggtggtcagggagggtggaagttcacgagttcctactcgaattcatatttgtttatggaggggagt

SEQ ID NO: 193760 - DNA, 414 bp, Glycine max
agcttataagaacaaaattgcctcaatcatttcttaatatgcatgtgaattaggacgcatcaacaagaatcaagccaaggctattgtgcaagcaatcaatggggcaaaacacaccaaatgattatgatgatggatggctcaaattctcacaaaggtaaactcatcactttcaaattgagctttcgaaactatcatgacatgtagagaagaatcaaggatttcaagtcacaaaatgtcaagaacttttattttcaaaacaattacccatttcttgaacatatcctataattcaaagaaaaacatgcaaattcgtacgtgcacacaaaattgacccaaaatattaaactgaaaatccgacgaaactaacaacatttacaaattaacacaactaacaaattaacaaaaccaacaaaa

SEQ ID NO: 193761 - DNA, 457 bp, Glycine max
  unsure (1)..(457): unsure at all n locations
cgcttaaacacagacatactcagttatcagggtgtgttatgtaccaacattntaaaatatgatttaacatgcttatacaagaaaagtgagtgcctcccaattgatcacaaaaatagcacacccaacttagtattctagctagatcataacacacttcttgggaaacattatcagaaaggaacatacaaggaactcacagtcacaggtcatggtaggtatcttgtattctttctattgcagaggttgtctatttatctgtaatactcttctgtntctaatcagcagtattgcatgaaatatggaactaacttttaaatgtcagtatgtatgtcttgaaatcttattttggtttaattattcatttggtcttatagttacaaaactttcccttntagtccttatacattaaaacacccccttttagtccctacacatcatttttaatctctgttagtcc

SEQ ID NO: 193762 - DNA, 415 bp, Glycine max
agcttgcctaattagcctgaaattgagagaaaatgattattaaacacacaaaatgaaaatactaagtatttattacctatacttaacagaaaatacttataacactacaaaataaccataaattgggagagtttgatacaatttatacaagttttatacacaaaagttagtcgttttcaccgactaacagtttctcaaataggggtccacaacaacagcaagcttagccaggtagaatgtcaaagatggaagatactttaacacagtttatccaggtatctatcacaaaacaaaagaacactgatgcttctattaaaaatctagaagttcaagttggacaactagctaaacaactatctgaacatggaagtagatctttcttagcaaccacatatgtcaaccacaggaacattgt

SEQ ID NO: 193763 - DNA, 484 bp, Glycine max
  unsure (1)..(484): unsure at all n locations
ntaaggagacaaagttgtatctntaccatcaacgatggctttggtctagtggtaagtgcttgatccaacaagactcctaagtaataaacaaaagctaccattttatccagttgcaacacatatgcatatacatagtcaagatcacaaaggaaacaacttcttttggctcaacaagtccttatacattgaacaaatgaaccacatatactttctcgaccatcaaagatcactagagccatatccataacatacccaatgataacatatttttgaacacctattttatatgacacaaacttacatagtgattcaagttttaatggatcactaaaccataatagtagcacaatcagccatgacaaccatagagctacttcaaagttctactaatgtaaataaggcacacaaatacaanatactgaccattgaccagctaattgatcagcttgaatggatgaactcanacttnctcatatntattact

SEQ ID NO: 193764 - DNA, 389 bp, Glycine max
agcttacatgaagaggctgttctaacatttccttaccgacatcatgcaaattttgttcacggattgaattgaaaactcaattgccgatatcggtcatgagatagccccaactgatatttttcagccgacattgcgcaatttttttttaaaaacgctcgctggcagataatgtttttttttacggctgaggaagttttcttgttttggtgttgcataaagaatttacaatgtaggtcggctaggtttttctgtgcgagctcagccgacgttttgtttcggccaaaactggcatgttcccatatatttcggcaggaaaacattaacccacctctggcaaaaaatatttgcaaccgacttatgcttattgatccaggattgattaaaacctc

SEQ ID NO: 193765 - DNA, 440 bp, Glycine max
  unsure (1)..(440): unsure at all n locations
ctaagcttggaaaccaaccatcgaatgctttacttttatttatgggaatagaggtaacaatggcggtaatgacggaccgaggcaaaaccgggttgagggagtaaagctcaatgttcctcccttcaaaggtagaagtgatccacatgcctacctggactgggaaatgaagactgagcacgtatttgcctgcaatgactacactgatgcgcagaaagtcaagctagcagcagctgaattctccgactatgcccttgnttggtggcataaataccaaagagaaatgttgatagaggaacggcgagaggtatatacattgactgagatgaaaagggtgatgagaaatatgtatgtgcccactatctataacagaaccatgcgacagaaaactctatggctgtctcaacggaattaaccgtggagaatatataaagagatggaat

SEQ ID NO: 193766 - DNA, 439 bp, Glycine max
tagagagattgatggggacccggtgtcgagaggatctatgtataagggctacgtgggagtacgtgagctcagtgaatgtgggcaactgcggatggtgggtttatgtgtgatctgtggatgtggagagatgacttgcaccatcgcccgaccgccacctagtaccacatatgatgggtaccccataatcctacaagcttgaaatgaggaagtgtggaagggtgagacttcctacttttattcgttgaccacagagtggtacctggagatatgtcgtgggggtcatgagaccttggggacgtcaggtggggtgctattgcccaaaaccaagcttgaccaatcccgacccaacccgggcatagtcagtcagtgagaacctgtgatgtacctaaacaggcgagctcctagcagtcaaccgataaaagaacaaagaccacatagc

SEQ ID NO: 193767 - DNA, 408 bp, Glycine max
  unsure (1)..(408): unsure at all n locations
agcttagttntaactgtgatttccaccattttatataatatacaaattccgtatcattccataattaaacaagcacttatatatgtttgagagtcaaatctggagcagctgaaaggaaagtggctaagacgtgcagtgaaatagtagttcaggtttattagaagtgaagatccaattttgagtgtgagcactgtcgcgtcggttgcatcctagtggtggctcgcacatcgttgttacaggtttacttgtgattgggaaagctcaagttcgaaactcaagagtcaagttagtaaaaaatcttggccccactaattttatccgttaataaccccttgtatatatcgaatgaaacaaccgtagcctaattttttattactggagaacaaaagacctttcttttcaaaaaaa

SEQ ID NO: 193768 - DNA, 454 bp, Glycine max
  unsure (1)..(454): unsure at all n locations
tatctttcctagccatttacttttatttatcaccttttctactttttctacccaaaatgtgacattgaacacgtaggtcaatggagctgccactatattntatttntaggaaaaaacttggatacaatacttttgatattnatttccaatcagaattaaaatttaatcttagtaatctacattgacaaactttagttaaaaaaaaaaaaactcaaagtgaaactccaattttaatggaaaacaacacaaatcaaaagtagttatataacggtatctaagttttgcctttntaataaaaaaattaacgttttcaattnttcaatttatttaaactgtatctaatcacaaactctgttttggctatatattctatttgttccgacgcctctctcttttctcttccgattttcttattcccctggctctctgaatttaatctgtagtcctgctacct

SEQ ID NO: 193769 - DNA, 406 bp, Glycine max
  unsure (1)..(406): unsure at all n locations
agctngtatccaacagctgagaattctttttacagtacaaaagtagttagactatcacaccctagtcttcgttctaaaacaatgatgttgctaataagtacattaaaaatgagagaaaatattacttttaagaagttatcgccttaaaaaaaaatttaatgccaccatgttcaacaaaaaatcgaaagcgggaaaccaaaaagtcacttttttgctattgtcaactcattcccccaaggtcacccatatgtcatgggaaatacataatcgagctatttagtgataaggtagggttacgttacctgttataactaggatgtaattataacggtcactccacactacaactacgcacaaacagatctaatgagaaagggcaatacagtaattagcaacttggacagct

SEQ ID NO: 193770 - DNA, 436 bp, Glycine max
  unsure (1)..(436): unsure at all n locations
acctataaaactaagcttgtgaacccacacatgttcaaatgcaacaatctcacattatcatgcacagttatcttatctgctcctcaaaaaaacatccacacgttgattaaaaacgatccatcaactntagtgtcagccttgatagcacatgtcataagcactaaaggatacactaccacgtactataaaagcatggttggcaaagcacaaggccattgaaaacatctacaatagttgggaaagatcattccatgatttattgagatatttgcaagctatgcaacaacctgttcttggtatggttgtggagaaggaaacactgccaatgccaccacaaggaggtcaaacagtagagggttttgtgaaaatccattgtcgtttntggagtttcatactatgtatcgatagggttcaatatngcaagcccatcgttcaa

SEQ ID NO: 193771 - DNA, 407 bp, Glycine max
agcttcgaagggaagagaaagaccgattttatcacataacatgattttaaaagaagagttagccgtttgctcaaggtccaaaagaaacttgtctcagcgtttatgcgaagcagaaaccaacatgttagctatcatcaccaagtaccaagaagaactaagtctagccacggcccacgagcataaggtgcggacgagtatgcccatgtgtacgcggaaaaggaggctagaggaagggtgatcgactcgttacaccaagaggcaaccatgtggatggaccgatttgctcttaccttgaatgggaatcaagaacttcctcgattgctagccaaggccaaagcaatggcggacacctactccacccccgaggagatccacagacttctcgactattgtcagcatatgataga

SEQ ID NO: 193772 - DNA, 437 bp, Glycine max
  unsure (1)..(437): unsure at all n locations
ggaccttagatactcagcttttgctgcnaattccttttgttggtgtgggttttttttggtttgtgctaaaggtggtcttcgtcattggaagtgcggtagacaggctatgtggttgatttatggatggcctttgtggataactgggtggtgggtaacgaggaggtttgttattggctgagtaatgacattgttgggttgtggggaaacttggccgtatatgaatggcagtcacagcatgggtttctccctctgtctcaccctcttcatttgccccacttttctcagtcgtcctagtgggatgatcaaatttgcccttttttcagactcacatcgatcctttcactggcgaagaccaaatctgcaaagcttttgagggtgcgcagtccaccatcttttcatagtggagtaccgatattgtgtctaccatcacgattatc

SEQ ID NO: 193773 - DNA, 409 bp, Glycine max
  unsure (1)..(409): unsure at all n locations
agcttactgtgtggtggtattgtttggttgaatcacaacgggaagngaagagaatagagagaacaaagaaaatgcatagggcgatggagatagcataagtgaaaggtgtgaaagttgggatccttgaacgtggaattcgatgattcaccattttggtgtcagaaactcagaaccagagagagtgatgaatgatttgattcagaggaagcagcactcactcactcgactctcaaaatcagagtctcggattttctctgtcactcttctttgcaaagagagacaggaaggaaggcacagacttgacatcttaatatgttaacttaaattattagtttttgtactggttgaaaatatatatataaaataaaacaaaaaaagttaatgcttgtagaatttattttattttttt

SEQ ID NO: 193774 - DNA, 362 bp, Glycine max
  unsure (1)..(362): unsure at all n locations
cttgatgcaacatttggagaggttgatgaatcatctagattatgcactccatgagagggtggatcaaatggagaatagagatcataatgaagaagaaaggaggagaagagggaatgatggtgtttctatacaaaaccgaatngatggtattaaactcaacattcctccatttaaaggaaagaatgatccggaagcctacttgtagtgggagatgaaaatagagcatgtattctcatgcaacaactatgatgaggacaaaaaggtgaagcttgccgccacggaattttacgactatgcccttgtgtggtggaacaagctacacaacgagagagcaagaaatgaagagccaatggttgatacat

SEQ ID NO: 193775 - DNA, 404 bp, Glycine max
  unsure (1)..(404): unsure at all n locations
agcttctaaactatatacaatattgatattctgataccactcgntagacaagtggcctcagatatcttaagatagggggtggttgaattaacatattccaaactacttccccaaataaaaatctatttcactgtttattcaatttatacattcccttaacaatgaacttcttaaatattgattcaaataaaacaatttgaatatgaatgtaaagcaataataaataaaggagtctaatggaatataaagagcaaactcagatttatactggttcagccacacccttgtgcctacgtccagtccccaagcaacccgcttgagagttccactatcttgttaattccttgtacaagttctatacacacaaagacaatccttcctttgtgattagaattctcttacaa

SEQ ID NO: 193776 - DNA, 438 bp, Glycine max
  unsure (1)..(438): unsure at all n locations
ttgcccatgtccctatatgataggagcatattggcccattttctcttttngactgtgacccatactcagtcacaaaagtgagaaaaatctgactcttgaaacgctaaaatcctgcctcggtttgcgtgccgtttctctgattccagtttctcgcgtttctctgcgtacgccggggccagttntcgaaagcaagcaatatatatatcaaaacgctcagaataaaaccccgagcgtggtttagaggttggtttcgttaaattttaagtcgcacgcaacacgatgatttttaactaattaattatgaattaacccataacctcccagatatggatttctctcccttaattagcctaacccgcatatcttgccctccgctatatctacttctaccaagaacatatttgcatatacactgaatntacttatatataatcattc

SEQ ID NO: 193777 - DNA, 382 bp, Glycine max
  unsure (1)..(382): unsure at all n locations
agcgcagaaggaagcgaggatcatatatcttaacatataaccnaagggaacgaaaactaagataagagacatcgactctatcgacaatggaagtacccttgcacactcccaaaaacaagaatcaggaaaaaaaattaaaacatcacctatactgatataaccttaaccggaaacggcacacagattctgtctttgctgataaatcatgaaacaacaggagaaactaaaacggagacattaaaagggcgtgtctgcagatgcagagaaaacgactcgtttgaaaacataagaatgtcatctcactacaatagggaaagaattattggcattcaaaagattacacagggataacttcctacaagagatcgtgaagacaagcgcc

SEQ ID NO: 193778 - DNA, 398 bp, Glycine max
  unsure (1)..(398): unsure at all n locations
tgccagcttgtngaaaactgaaacgacaaaatattttatcttagatttccgaatcaatgccggcgtatatcgagacgctcgaaattcaaaataaacctctcagcaaaatgaaacgacaataactttttactcgaatgtccgaatgaatcccgtaatatatcgagacgctcgtaactgaaaacagaagctctgagcaaattcaaaagataataactttttactcgtacgtccgattgtttcctgtagtatatcgagaccctcggaattgaaaccagaagcccgtagcaaactcaaacggcaataaatttttactcggatgcccgaatgaatcccataatatattcgaggcgatccgaattgaaaacagaagctatgagcaaattcaaacgacaataact

SEQ ID NO: 193779 - DNA, 388 bp, Glycine max
tctgttttcaattacgagcgtctccatatattactggcctcaatccgacatcggagtataaagttattgtcgttagaatttgctcagagcttctgttctgaattttgagagtctcgatatactacggaacacaatcggacatctcagtaaaaagttattgtcgtttgaaattgctcagagcttctgttcttaattacgagagtctcgatatattacgggattcattctgacatccaagttaaaaggttttgccgtttgaaattgctcaaagcatttcttgtcaattacgagcggctagatatattacgggattcattctgacatccgaataaaaggtattgccttttatttgctagagctctgtttcaattcaacatcttgtatatac

SEQ ID NO: 193780 - DNA, 329 bp, Glycine max
  unsure (1)..(329): unsure at all n locations
aatagccacatgctgatcttcacgtgttgtgcatttagatttgggctgatgtatgaaagacaaatctttctctctttcactttaaaaagacatgcagtgggtcacacatggggatggtgaaagataatgtgaggcaatatacattgcccatatttactctggagtctatatatatacttgatcctaaggaaggtggtgatattaatttttggaatacaatcttctgattattgaatatttatttggactgtttctatttcatagcattgatgcagggtattttanaggcttctatagactttgaccagcacacatagtgcaacaaatag

SEQ ID NO: 193781 - DNA, 382 bp, Glycine max
agcttgtcttgggtcgacatggtttgtatgaaatagcacttccttggaaaaacctttctttgtcatctgggttttcaccattgacctttagtaactttacagaatcccaggcagagtggttggtgcataagactcctaagaaggggtttcatgttgagaaaaggcagccttcccttgttctttgctggcaaaggaaggatctcatctcagtttcaacttggagatgctaagcagagccattttgcacctttgaactaccaatttaattttaaattctaaagtgctacataacttacagcttctattgatcttttcttgcttgaattgcctttgctatggttctatgctaattgtctggttttaagatttattattttcagtt

SEQ ID NO: 193782 - DNA, 376 bp, Glycine max
agcttaccatacctgcaatacaaatttttcttgcctgagatcatgagcaacaaggacctcaatagcttcagtattgaagataaaaaaaagcataccaggattctccttaagcaaaaactgtccaaggtctttgctaaagaaatggacactgacaagtttttgcaagtccttctcacctctcatttctattcctacaagctttcttacaatacttcctgcaccatctgtaccaataaggatgttacagtgaatgttctgttctacacgcttccctttaatgatagaagatgcagttactgttacaaattcactgctggccttaatggaaacacactcatggcccatcattatttttttgtcacaagactgttcattt

SEQ ID NO: 193783 - DNA, 378 bp, Glycine max
agcttgtacagcatttacaagctctgttttgttagttttgatagatctttaatattctccaaggatgcaatagtagcctcaaatctttcagggacaggcaccaatattttctcaactatccttaagctaaaaaaaattagaaccaagcaatcttactttgttagcaatgctaaaaagcttgttagcatgctctttaattgtttcagactccttcattttctgcatctcaaattctctaaccagatttagggcttgcattcctttaatccattcatctccttcgcattcattctggaggaaactccatattttatatgttgatttggcggtcatgattctagtgaaaatttcttttgagacaacagcaaacaaattagt

SEQ ID NO: 193784 - DNA, 433 bp, Glycine max
ctcaagcctctcgcatagccactctgggtgctcagaagaacctttattcttattcctcttactactaactatgttgaattctttataacctgaatgaacaaccttcaaattgttgttcgttcccctcattgttttctgcaaaaaagaaaatcaatatcaaagaaaacatgaatgaagtcctaaggatgccatgttcatgtatttatgaaaatatagtattaatactccatcaagcatacatcgactgctgattacatgtaatagactttttataacatggttgcccaaatcacaattaaaaagcacaactacccaattttcggagtcctttggtaaatatgacctggctacatctagggaggcgttatgtttaacaataatatacttttgccttccaaaaaacataagactgatcccttttcattaacccatt

SEQ ID NO: 193785 - DNA, 177 bp, Glycine max
ccccccccccccctttcccccccccctttcccctcctccctcccccccttcccctcctccctttctcccctcccctcccctccccccctctctcccccctccctccctccctcttctccccccccccccccccccccccctcttccccttcctttccttccccccccccttccctcc

SEQ ID NO: 193786 - DNA, 386 bp, Glycine max
  unsure (1)..(386): unsure at all n locations
gcttatggaaggatgtggaaacctctggaatattctggagatgcgngggctggaaccttatggaagaatatgaaagggaataaaagagtgtacagactcctaaaatgggtggagcattctaaagaattaatcttcatcctaggatacaagtaatctccaccattcattgtggagatggagtagtataaataagggtaggagccttcatttctaaccatccaagtagagagcctctttgagagagaagataaatagcttgggaagtctttatcctcaagcttgagtaagcctctctgagagagaagataaatagcttgggaagtctctatccctaagcttgagtgagccaccgtagagtgagtcgatccacgagacaagaatgaatc

SEQ ID NO: 193787 - DNA, 420 bp, Glycine max
  unsure (1)..(420): unsure at all n locations
aagctactatcggactctctaggatatcatcccttttatttgttttgtaatgtnccacagcatatgcccattctgctactgttttaccaaacaagttggaacctatggcttccaaagcccgtggaaggcctgaagcataagctaccacacgattcaagacgtcctcataacatggatcaattttttcacttttgaaagcattccacgtaagcaattgaagagcagcattctgattcaaaaccttcacctcataagttctttcaacgccatgatattttagcagatgtttgtcccgagtggtaatgatgactctgctaccgggaccaaagcaattatggcttccaacaatagcccttaattgctcttgctcgtcagcgtcgctaaaatcaagagaaccttcttttgtctgagcctacgttg

SEQ ID NO: 193788 - DNA, 291 bp, Glycine max
aagcctctagagaatgctacttgaagctgccttggtaaaaatgctgcccaaccctcgttaaccgttggatattctcaaaatctggtctgcaacttcacaagacacttgtgcatcatctgaccggtgggatctttgaaagaatctgagtgtgcttgaagcttctgttcccgagggcatttcttatttaagcacttcaccctttgatttcgtgtagcttaagaaaaaacgtcactttttcttcttttctttcttcacaaaccatttattaaggtccaggctctttttcatcac

SEQ ID NO: 193789 - DNA, 432 bp, Glycine max
aagcttggaagaaagggggatccttataggaaagctttttttgtgttcgctctcattcaataaataaaaacattctttatgttactaacagaactataatatatttaagcccatcctgtgatctatcttctcaacctcacccaagtacacacataaaaggatcaagtgagaaagaaattcaaactatcaaacaccatacaaacaatgtttaataagtttcaatgaggagaaaacacaataaaagcacctttgaatccagcacactactccataatcatccacatgaatttattacttatcctcaaaaggacttttgaactccacaatgatggactgtccactcaaatgctgcatgatttgaatcttcctcttcatgtccttcttgtcagctttgctcataaacttcctcctcaaaatggacttataggcata

SEQ ID NO: 193790 - DNA, 405 bp, Glycine max
tggcaaactgttgttatcttctatcacagacatcactaagcttggcatgacagtgttttcaagcatgcatgccatctgcttccatcaccttgatcaccttaatgaagataatcacccattgcttcatccttggatttccctgccacacaaaagttatgatgtctttcagaaagcatgtaagttatatatctatacttaatcgatcaactctaccctttttctaccttcaacagcctttcatgcatcccatttagctctgtccctcatgttgcacattccatgacggccttgtaattattcagaaaatacatgaatatggatattgtccttatgaatatatataagaggggtggaattatcaaccccccgccacctattgaaaagagaactcaaaagtggaagaca

SEQ ID NO: 193791 - DNA, 380 bp, Glycine max
agcttattagggacaacaaagacaattattctttttttactttacaaggacattattcacgctatatgctaaaacgctacacaaaatggaaaattgccgcacaaatttttaagaaattcccaaacaccataatatatgtccaaaaaaaacatttttgatttcttgtaattttttggagatttttaaaagtcatgaaaatagaaaataattccaaaagtgtcatagatcatcaaatttggcataaatcaagaaattccttgatgtatgaattttttctacattctgacaaagtttcaacccattctgagctagtcgcatatgaaatgaccaaaatgcctctatcactgaaactcatatttagaagctgaatttgcaatttt

SEQ ID NO: 193792 - DNA, 429 bp, Glycine max
  unsure (1)..(429): unsure at all n locations
nttcgatagctgaaggaaacattggcaacaccacttgtttcgtcaaaactgaagaacattcaaagggtgaatgcttgcctttagatatcagatgaagcaataagtgcggtactagtacatgaagtaaggggtgaactaaactaatatatttcgtgagccgagtacttcacgatccacaaacaagatatcatgtgatggagaaagtatccttggcacttgtccatgaggcccaccgtctctgtcaatatttatagagtcactgaatcaccgcttgagctaattgccccatagctaaaatactactcaagcatgaattggtagggcaaatgatgatgtggcctatcaaacatttatcgtatgaaaatgtttatgagccacgagggactatctccgtgagaccaatttcatcaatgaatctcatcctccaca

SEQ ID NO: 193793 - DNA, 385 bp, Glycine max
  unsure (1)..(385): unsure at all n locations
agcttgggatcttaactttgaggaccttgactgtccttatctggngactaaggcaaagagccaaaggaagcgcgagagagtggagggagaaatgaaagggatttcaaagtacacgaaacagtggcaattctataattaggggaacaaaaacaacgacatttntacatataaaactgtcatcgttttcgttctccctaattacatcatagtacattctaaggcggttccgaaaaaccattttagaatgtgtgtcataaaaaaaattcattctccttaattacaaaattatcactgggtgacattctaagacggttacctataactgtcttagaatgtgtgttgtaaaaaagtaatttttttagtagtggcgtctcggtactagtga

SEQ ID NO: 193794 - DNA, 395 bp, Glycine max
ttgtagttgtaggtattctggaaggatcaccccatattttaactataatcacaagttatgttggatgacggattcccatggatctatgtcacgtgccaatattaattagcctccatcatatatatctatgcaacacttattgaggataccatgttgtcaacccccaccaactcaactatagtagaaattttatttgtgtttcgggtttccttatgaatgctatcttctggttggttattatttatgtgcgaaaataataatataacacgaaaaaagagtttggaacttaagtcactggtttttcattttcatggaatgtcatcaaactgctgataggacattacggacgggaaggaagaacagatgagtgccataaattgcacggtggaaagggg

SEQ ID NO: 193795 - DNA, 386 bp, Glycine max
  unsure (1)..(386): unsure at all n locations
agctttgatgctttggaggataaactttttatatgttttcttgacattgcttgttgcttcaaagggtataaatggacagaagtttatgatatattccgtgctctttatagtaactgcaagatgcatcatattggggtgttggttgaaaaatctctcttattaaaggttagctggcgtgataatgttgaaatgcacgacctgattcaggacatgggtagagacattgagcggcagagatcaccacaagagcccgggaagtgcaagagattatggtcaccaaaagatataattcaagttttaaaacacaacacggtgagtgagctcgtgaatagatgaaaatgtttttgtctatctcatatttacatcatagntaactttttcttgat

SEQ ID NO: 193796 - DNA, 410 bp, Glycine max
gtaatcaaagcacacgagctccattattttgctccttaaacctccattaattgtcagctttaccttctcctccatttttgatccttcatttttctccatgcatctcctcacatgtcttgtgctaaatgttgttaacatgattctttagaattcccaccgattaatcttgctatagaagctagatttgattttctatgggtcaaatgtcttgttcataccaacttttaaaaattactaagaattagtcactgcgaattttgagctgaaatttttactgaattttctagacatctgtaaaaaagtttaaaaaaagaaccacgtgattcggataaagggtaaaaatactaaaaatcacacactttggcagacagatagtttccataaacaaaataggtgaaacggcattgtgc

SEQ ID NO: 193797 - DNA, 381 bp, Glycine max
  unsure (1)..(381): unsure at all n locations
agcttgtaatttgtaatagatgctattattatgtgagagactatatttcttgcgtggaaaccctctgtgaggtgaaaatctatgtccgtgcactttaaaacacaaaaacccctttgttgttgtaagtcaaacaatggttgtcaaggttaaaatccactagtgttgttggtctaattgaggctaggttgaaagtctaatataagtattagcaggttgttgaaattcagtggttggttgtgtttgtgaaatctcattttanagggcgaggactangcgtaactcaagcttgggctgaaccagtataaaaatcaatgngcactcttttntctttctcctatttgcactatatttgaacaaattcgtttactagttttgttaatc

SEQ ID NO: 193798 - DNA, 410 bp, Glycine max
tgcaagttcatatcataccgtaaaagactctttatttgtaaaaaaaacctgtacaaaactcatctaccaacaattattatatgctccaagactatgtgatcctaatgaatctctaggtgacacgtaatcacattttccaattaacaagaaagagttcataatgtgtcacgatcacatactttcgtatcatataataatttctctaaaatagtgaccttatttgcgattcttcgagttgatttcctccatgaaatctaaaatttttaaggctttactagattatcaattataggaaaccaacaagatcttgaacccgatgattctcaccaataattaataaaccattgatgtgtacccttttccatagagaggcttctctccgatgtactctgatttcttgaaagagaaaa

SEQ ID NO: 193799 - DNA, 331 bp, Glycine max
agcttgaactacccgagctctcattcttttatccagggtttcattgctcccctctaaagccctttattggaccactggacacggtgcatattgagaaactgccaccaggggcggttgataatcagccagttcccatacccttggctattctgggccacaagactctctcgactaaccacgggccaaagcagctggtcttagtgcagtggcagggacttcaccctgacgaaacgtcgtgggaagactggtcacgccttcaggagccttatcaccttgaggacaaggtgttgtttgtagcacgcgggaatgttacaagtagcaactatgaacc

SEQ ID NO: 193800 - DNA, 362 bp, Glycine max
tgataggcaaatctgttcctcatatttctcataaatgtaaagacccaagtactctctgtgtacctagcgttatagggaacaacaatcataagaatgccatgctatacttaggagcatcaatgagtgccatgcctttgactatcttcacatctttatctcttggacctttgcaatctacagatgtcataaatcatttggcaaatagaaaagttgcttaccctacatctttcatagaggatgaactggagagggttggtgaacatattatccctggagaactatatagtctcgatatggaagaaggattcccccatggatcatctccaattattttatgcaggcccattatgagaacaacccaa

SEQ ID NO: 193801 - DNA, 377 bp, Glycine max
  unsure (1)..(377): unsure at all n locations
agcttctcttagaaacttatattnttttcgtacctaaataggaggtttttagacttcacttgaaaacccttaaaactgagatgttgcaaaagttacctttttataaaattgatgttgttttcgtgacctttattgaaccccagccacattggcgtaatcagaatttcaaaatgacgtctccttgaagtagaaaccaaaaacaccattttcgtcccttttaaaactgaatgggtatttgacccaaatgttaatatcaaccttgcccttgaaatatatatgttagtgcttagctttactgagttttaaaagattggctaaaattttgttaaaacataagcacttacacaatgaaggaaagctggagttactgcacatga

SEQ ID NO: 193802 - DNA, 385 bp, Glycine max
tgtttaaaacggaagacaatataaccgaatatgatctatatgaagaccaaagctaaaaaacaagaaatgaattataagtctcggattcgaaaacttacctgttgaagaacgaagaacgaacgaagaacgaatgaagaacgactaataaccttcacggattcgctcacagaaacatctcggaaacgttacggatgcacctcggcttggattttcttcacggaaacaattttttttacccaaaatagctgaaatgcatagctaggcggatctgggatccttaccctttcgcctatttataggaaaaagggggaggaggttgtcgcccagctctgccaggcgagctgcattgcttcctctagaagcaacccttgcttcaaaatactct

SEQ ID NO: 193803 - DNA, 373 bp, Glycine max
  unsure (1)..(373): unsure at all n locations
agcttggaaaaggcagagatcatgtgatcttttttacctcctagcactaagtgtcacaaaccccaaatggcactaagatccaaatatggggttaatccttaaacaagaagaaagcaacccattctttggcctcatgggatagcgtggggggtttatgcgttgagcgtangaaccccagccttgttttgtgagattaatgaatgaattaactaaccaatgactttggaaacaccaatatttataccttcacctttgagcttacatatggcaatggttttatacaaataatataaaatttgttgtgaaagtatacatacatatatacatacatatttgatcaattagaacttatacttggagtaaaacaacacta

SEQ ID NO: 193804 - DNA, 411 bp, Glycine max
tgatagagcccgggtagtcaaagagaagttcatgtctcatatccatcaaagtctgaagagagtatgatgaactaagggacgtcaatatggccaccgctgaagccttggaacgagaaaccaagaatgcccgaaagtaagaacacgaccaatacaaagttttgaggggctttatagggcagcaatagtgagctcaagctccgaagaagtgaaaggaatcatcacgggtcaaaggcatgatcttgaaggacgagctataggcttgtcttatgtcggaaagatatttgtccctacagttaagcgagactgaagggaatatgtgggccatcatcgatgagtgcatagagaagctaattctagcagcgactcacgagcgaaggctagaggatgagttccctagatatcaccctaaat

SEQ ID NO: 193805 - DNA, 188 bp, Glycine max
ccggaccttaagcactgggctgcagctttttttagagatctttttttgagctcctcagcctccctatgactatactcattctggcgcaaatgcgggagtaaaacctctttcattaattctggctcgcggagcattctccaaggctccccctggacaaccacatactcttccatatactgagccttcat

SEQ ID NO: 193806 - DNA, 434 bp, Glycine max
  unsure (1)..(434): unsure at all n locations
ntgagcnttgagcacccacgagtgtttcagcaccctattagcaacagtgtatgtagggttttcttcgagcgaggacaatgtgggttttgtggggttcgagtgaggacaatgtgggttttccggcagtgtagggggttctgtgggttccagcgaggacaatgtgggtgccgagggagcggtttccggcagatttcatgcgggaggagaaagagaagagcgatttcaggcaggaggatgacaaagagaagagggagggcaaggttttcgagagcgcgcggcttgtgaaatctcaattttttttaacttataaacataacaacatcagttttttatggataaccgatgttaaaatcaactccttaacatcggctttctcaaaaccaatgttaaaatcaactccttaacatcggttttctcaaaaccgatgttaactc

SEQ ID NO: 193807 - DNA, 360 bp, Glycine max
agcttggttcgaggtacttattccttgtatatcgaagaacgatgaagaacgaatgaagaacatctaataacggttgaaatctttgcgagattcctcacggaaaacgttacggaaacgtttcggaagcgcctcggcttagatattctttacggaaacaatttttccaagcaaattcgaaagagaaagaagtgcctaaggggctggaccccttccttcttcatttcctcccctatttatagcaaaataggggaggtggttgccgcccagctcgcccaggcgagctcagctcgcccaggcgagcagggttgcttcctccataagcaaccgccttctgaggaatcttctggagggcccatatgg

SEQ ID NO: 193808 - DNA, 426 bp, Glycine max
tagctacacacacccttctaatagatatgatcaccctcatgccaaaatacatgaaaatacaaaaaggtccctactacaaagactactcaaaatgtccagaaatacaaggctaaaaccctatactactggaatggccaaaatacaaggcccaagagaaggaaaacctattctagtatttagaaagaagagaggacccaaccttggcccatgggctcaaaaatctaccctgaggttgatgagaaccctagggccttctttagccgctctaaccctatcctcttggagtcttctatccaatacccttgtggggagggtaggaatgcattacactagtaaagggttctactaatctataattgattacagaacacagtatttaacctaccactcctgaatttacaaatattcttaataccactcctaaca

SEQ ID NO: 193809 - DNA, 391 bp, Glycine max
  unsure (1)..(391): unsure at all n locations
agcttctcccccaattttctataaatagggggagaagtgaagtanaaaagggttcagccacttaggcacttctctctctctcgaaatagctgagaaaaattagttccgtgaagaaaatccaagccgaggcgcttctgtaacgtttccgtaacgtttccgtgagtgatttcgcgaaggttttcgaccgttcttcgacgttcttatttcgttcttcatcgttcttcagtcttcaacgggtaagtacctcaaaccaagctttttaattcattctatgtacccgtggtggtccacattttgtttcatgtatttttattctcgttttcatttactttttatacccccttttgacgtgcttaagctatttatttaagtcattcctcgcttaatctaa

SEQ ID NO: 193810 - DNA, 154 bp, Glycine max
attctaagtaatccatggctcttattgaattctcttccatatgtttattccgaccaaataaacttgtaagaacccggatcgatgtgtgaaagacatggctattggtatagaaccgaaagaaatgcggtgaggtctaaacaaggtggtaaaggat

SEQ ID NO: 193811 - DNA, 382 bp, Glycine max
tcaccccatccacgagaagcatataaggaatgttagccagcccatatatactggccaccaacagtggcaacacaataccaaagcttctgagcaacagtgagtccaggttcctccagaccagttctgactggaatgtacaacatacataaggatgagaagatagcagttaggatgagcaatactcatatcaaggtataaatgcatcggtaacagagcaccagaaaaaatgatcactttttcctctccgttattggtttgttaaagcatggacccaccacaaaaaagtatacaatttaacaccttcatatgtatgctatatgaccatgaagcaaagtacacataatcatggccatagatgatgagtatacttaaaggtaacctg

SEQ ID NO: 193812 - DNA, 382 bp, Glycine max
agcttgcatgatttacattctccccctttctcaagcaaattcttaattcttcttttaaacataggacaattgaatctcatgtgcccaagtttatcgcactcagcattttggggctaaagaggaaccttcttctttcttctttcatcatcatcttctttcttctctagttttttttatgtagtttcatttctctcaaccattgtaggaataaatgaatcaaattcaatggcttcccatatctttagatctatggcttctataaagatctacattcgggttttccaataatgataaccctcaccattgaacataagagcctattgatagaattttcctcaaaaaatggaaatttggttgaggccatatctattcttgaagtttt

SEQ ID NO: 193813 - DNA, 403 bp, Glycine max
tattactacttcttggatggatattctggatacatttatattgctgtggaccccaaggatcaagagaagacaaccttcacatgcccttttagtgtcttttcctacagatggatgccatttcggttatgtaatgcacctaccacatttcagaggctcatgttggccatttctacagatatggtggagaaaagtatctaggtattcatggatgacttctcgctatttgggccctcttttgaatgctacttgaagaacttggagatagtgctacaaagatgcgtggaaacaaacctatttctaaactgggagaaatgccacttcatggttcgagaaagcatggtctcttgccacaaaattttgacctgagggattgaggtagaccgggccaagattgatgtcattg

SEQ ID NO: 193814 - DNA, 250 bp, Glycine max
  unsure (1)..(250): unsure at all n locations
agctnatacaacaatacacgaagattaatttttatgcaatgggaaaccatggtagggaaaaacatcaccaggacacctaggactacataacaaaatatggcacacaaaggggatgctaagccaccctcactaagggaaataataaggtgaccactcaggggcactctaatttgcgaaaatggtacaaccatatgggatcaacataagcctaaaaaaaacactaaaccaattggatttacccccaaggcct

SEQ ID NO: 193815 - DNA, 433 bp, Glycine max
  unsure (1)..(433): unsure at all n locations
cacaccatanaaaacacacgcctagcacacatataatgtctaataacaagactgctgttttctaagaaaaaagaatggggaaacctgtagttgggtccaaataaggagctatgacacaagagaagagagacaattccctcactcagggatcatttccttcattttcttccatgctcttccacacctctacatcttctttttgaacgtgtaaatctttcatgacaatgaaaggtttaaccatccatcgttgggagcatatcaacacaacattcttaaggtagtgattctaactaactatctaacggtattttgatactatagcctctctcttgtccttaaaataatgtttatggtctgatcacccatgatcatgtggtgttataaggcttatacattggaaaacgcttatctcttagaacttgaaaaaacattt

SEQ ID NO: 193816 - DNA, 347 bp, Glycine max
  unsure (1)..(347): unsure at all n locations
agcttgcacttctcaaagaagtcaactttgagatttttttctcggtcaccatggtaagggtcaatgtggaagccanacttgccgtgcacaatgatctcagcaggaccaccattgcatgtggcgaatgttggcaagccgcagtcatggcctcaaccactgtcaaaccaaaagccttgtatacagcaggctgcacgaaagcacccctggtgtgacagatcaatcggtaaacccctccattcctcacacggttcatctgctatgaaatccatctgaattggccgttcaacttgtcggtctcgatcaggccgtacatcctcttcatctcggccttttcttccaagcctttg

SEQ ID NO: 193817 - DNA, 251 bp, Glycine max
  unsure (1)..(251): unsure at all n locations
aaaactcagcttcccgcantcaatcagagtgtttaggagatatttatattatttagcttatccaaaaggctaattttaactcgtacataagctaattttagttgatgagacaagcttatttaattttcccttcttattgtctttcatggagaatcttatccaaacggggcctttgtgctgttcaatgattttaccctcggttgagatctagaacgatttattgtagttataagctgagtgaaccacctaat

SEQ ID NO: 193818 - DNA, 385 bp, Glycine max
agcttagcataatcaatggtagctgttgtctccaatgagtgcattgatgatgacgtgcaacggtggttccttgcgctaacaacattggttttgtgtgtggcttcatgcgagtgtgacgacaacaatctgagagatagacaaagtcaacaacttcagtgatccaaggttgatgacatcgatggagtttggaggccgattagagttccttcatgaatttgagagacggggaaagactttgagtttaagagcaaagctgagttgcctcctttgcgtattcactcatccctttcttttttcttttttcagctagtaatcaaaatgatgttgtttcataacattaaaaaggtggctcagtctggattgtagttcactagtccaactagca

SEQ ID NO: 193819 - DNA, 381 bp, Glycine max
acaaaaaagtaatatttacctaccgacgacgatatgggacccctatatgttatattcattcgtgcgttgacatggttgggacgttatattccacgtctgtaaggacttaattttcccccattaaacaaagaaaaggagcgaattgggaaagggaacgttgaaaatatatatatatatatttaacgcttattagttgaatagtaatttagccctttatatgtggtgtatctcttgtaatacccgtgaagaaaaaaactataagccagagcaaatataatgacattattcaataagaaaagttaattgaattacagaatgctttttttttttcttgatactattgagtatgcacatccacaacatatgcgttctatgggaaag

SEQ ID NO: 193820 - DNA, 385 bp, Glycine max
agcttcacttgatgagacgttatatatatttctatattcgcttcttcagattaatcatgctgcagaggctagccgttatcaattctacacaaaagattcttccaaatttatgctgatataaataaaaatactccagctgcctcctattatgttacagtcacacacacaaaaaaagatccttggtaatataatggctactatgttgttaatagcgaagctagctaagaaaggttagggttaaaagaaaaaagagtaatcatataatgagcacccatttagctaaggtagcaggtgagattaaagtaaaaatgatcgtaaacaaggcacgtggatgagatcatggccacttttggattaagttgagctgtaagcgtcgtgctgaaac

SEQ ID NO: 193821 - DNA, 372 bp, Glycine max
acaagcttttatactatcatgtatatacccacaaaattattatatagtggccaccatgtctctgatagtacaaagtcaacaatttagataatatgtatagaaatatgttgtctacaaaaatcaatgctacgaacacatgtgttaatgactcttgataacatcacatataaatagagatattctaacatagttttatatatttatttaagtgtacatcaaggagaaaagaactatattatatacatatattttttttggtccgtttacacactaaaaccaaaaaattcccataatttatactaagaaagacatgtatgttgtgaatatgatctattttctattttaaaattaaatattttgtcaaatataaca

SEQ ID NO: 193822 - DNA, 349 bp, Glycine max
agcttctaggttctggaataatttattatcaaatgtagtaatcaattattttgtcacatagagagttccttgagtttgcaaacgcaatataattgattactacacatcagaaatcaattatctcgagccataaagttttccttcttttgaaactggcttatgtaatcgattactgaaacaagtaatctattaatttgatgcttcttgccaaatttaaaagtaaagggatttttggtgctttctctaataatcgataattgattactaaaccttgtaatcgactatacattggtgggactattgcttctaagagactttgagatcaactatctatctatcatgtttgatt

SEQ ID NO: 193823 - DNA, 394 bp, Glycine max
tggttcgaggaacctacccgttgaagatccattatcgatgaacaacgaatgacgaacgtcgaagaacggttgaaaccttcgcgagattcctcacggaaaacgatacggatacgcttcggaagcgcctcggcttacattatcttcacggaaacaatttttccaagctaattcgaatgagagagaagtgccaaaggggctgaaccccttctttcttgccttcctcccctatttatagcacaataggggaggtggttgtcgtccagctcgcccaagcgagcagggttgcttcctccagaagcaacctccttctggaggaatattccggagggcccacaggggcctaggcgctatatgcacccccattattactaagtacaccaccctctggcgcttt

SEQ ID NO: 193824 - DNA, 377 bp, Glycine max
agcttctgtacgggtgcattctactttatatggagttggccactgctttgcctgaggatgagaattcctagaccataacaatgctagaggcggtaaaggacaacggtcttttaaataaacctgttgtacatgcacaaacaatattaagtcaaatgaacacaaatgattgcataaatttaaaaataacactacctattttcaatgtacctgaacaaaatgattgtcaaagacatgaccgatacatataatgcgatacacagaagaatcttgtggtggttgacttctaagagaaaaaaatgtcatgcttttgtgttgggataacaattcaaggattacattataccttgatgcaataacgtgtctcatctccgttatat

SEQ ID NO: 193825 - DNA, 423 bp, Glycine max
tgcaagtgtatgttagagctagaagtaacaattatctattcttgtaactttgataagttagtaaaaacttggtggtcgctaagaattggatgcaatcttgaggttgagacaaactaatataaatcatttgtgtgctatcttacttaattgacagagggttttgaatttatttttagatcttacatcttctttctaaataaaattgatattctcattgtctgatctttctatattcattaaacaataaatgtgctctataatcttacgaaaagttgtatttttttttctaaaaacacaattcaagatcccttcttctgtcatttgctgttacactctctcacttccttttcttccaccaattcacgtaactcactcacccctttgtcatgactcaaggcctattcacttaagttcaaactttta

SEQ ID NO: 193826 - DNA, 379 bp, Glycine max
agcttctaaatgttgcaatctattgttttattcttatgaagaattaaataggaaagatagtgaagtgtcttacgattgacaatgacttggaattctattctaccaaattcaatgaattctataaagataaaggcatcacaagatagtgtaacgtacgctatactttgtagcagaatggagtacctgaaagaataaacaagaccctattggaaagggccaaatacattctatccaatttagggttgaataggagtttctgggctgaaacaatcaacacaacatactatctcaagaatcattcaccatccactatcatagattttagaactcgtagtgaagtatggtctaacaaacttgttgaatactcaatgttaggtgt

SEQ ID NO: 193827 - DNA, 387 bp, Glycine max
cgtctcgctaagtgcaatggtgagacactgctttattaaaatgctgtccttcctgcaccaaagttgcacctcctgcgccataacaagctagctagcctgctcctctgaactcagcatgccacctcagctgtctcgccattggcactggcaagacagtgtccacgtcagccccgtgtctcattgctacaacccggcggcacccatgtggcaccagtctcgctcattagcccggcggcatcatcacttgttttcacccactcataccgccatgcatgctcggcggataaagctggcgtaccaaaaaaaagtgatccgcttggaaaaaatttgaaataaacctatttggaataagtcctaaaactaccccattaggcaaaagccccagtt

SEQ ID NO: 193828 - DNA, 259 bp, Glycine max
caccatcatatatgcgatcgtggtggctgactggggtccttgataaccaacaacccgggtagaagaacctccgagatagcagtggcgtatactgaaacgcgacaggaggatcaatgtcgccaacaaggctgtgctcaaacagtatcattcaaggatctttacccggtttcgatggaaaactgtttgatgactggaaggccaagaagccatcaatctttggcttacaagacgtatttgaagtggtgacatttgagtttga

SEQ ID NO: 193829 - DNA, 412 bp, Glycine max
tgtgctgttgagcgagttgacgcgttgggcctatcttatgcgctaagcgagttgtctcaatcttcaactttatcttcaaggcttttttatcaagtttttcatcaatttttcctccaaagcacttgtaatttccatattttgaatctcgttgttcaaaaaattaaaatgctattaaaatcctcattattcccttaaaaacaacaataaaatagaggaattctaatcattcttagtcaaaattaactatcaattaaaccaaaatttcgtagttatcaaggagcatttgtattgaaaaaaaagcttaagcatctaaaacgaagttgaagaactggagtaagattaaccttggtgactgttaacttattggcaagtgtaccaaattgtcacaagtagtagagtaacatgaaagttc

SEQ ID NO: 193830 - DNA, 390 bp, Glycine max
agcttgtattcggcaaataagacattgtggtctctgtgcatctgcctgaagaacattaaaaacaaagaaaagttagggtttcgcggtgacactgggaagtgagagcaaggaggaagtataacgggggtacatgcggaggatgttgccgatagtgtgctcctatctctcgatggtgaaggatgtcgcattgatgatcttcgtgtccctttcataagaaaccctgttttttttttcccgaaattgaaaggaaaaaagagaatgagaaagtgaaaaaattgaatgaaagagaagagaagaattgaagattgagagaatagatagttactttttggtgccttcaggacgacgaaacgctcgtaatgatttggagcattcatcgcttcacttttg

SEQ ID NO: 193831 - DNA, 412 bp, Glycine max
agagtggatactctgttgttatcaactcggtacaaacataaaatttttaagaattgacaatggcctggagttagtttcaaagcagttcaatgagttttttagaaaaataggcatcaaaaggcataaaacagtccctcacactccacagcagaatggtttggcagaaagaatgaatacgaccattctggaaagagtgaggtgtatgcttctaagtgcaggactgccaaagaccttttggggagaagctgcaaatacaacaacatatttgattaatagatgtccatcatcagccttagatttcaagacaccactggaagcttggagtggtgaaccacctgattattcagaattaaaggtgtttggatcgctggcctttgctcatgttaaacaaggaaagctggatgcaacggct

SEQ ID NO: 193832 - DNA, 374 bp, Glycine max
  unsure (1)..(374): unsure at all n locations
agcttcttgcgtagccgctcttggtgctcanaatattcaaaaaacaaatccctcttattactagctattttgaattctttagttcctgaatgtacaaccttcaaattgttgctcgttcccctctttattttctgcaaaaaataaaatcaatatcaaagaaaacagagaattgtcatggttattattactcgaaccagaaggaataacatctaaacaagtcattttattcttagaatgtgaaaactctgcatatttatggagaacatggggtatggaggcacgtaagtatgtgaataccacaagtcattttctccaattcaagggattgattaattgctctaggaaaaaaacatacatctggtatattgtttggt

SEQ ID NO: 193833 - DNA, 425 bp, Glycine max
  unsure (1)..(425): unsure at all n locations
tcgatcttncaccaccacctccaccttcttagagtttagtttctaattttcttttaagccgcgtattttggctatggtatttaagttatcattttctgcactttatttatcatttggtatttggactttagtcttttatgattagattctatgtggtttacaattatgactgtttggattatattttgattatgacttatttatgatttgctcaagtttggttgtgacttttgattgatctttgtccacttcattctcttatctaatattgattcccatgaactttggctttctgatgttgccaaagggggagaaaaatggggtggtagagaagcttagaaaaagcttagaaatcaagtgatcatcaattccaacacatagggggagtgaacgcaatataatatgcatatacatttcttgtatct

SEQ ID NO: 193834 - DNA, 379 bp, Glycine max
agcttggaatgggaagaagccatcatctaatcacctattggtctttggatctatatgctacattcatattccagacgtgaagaggcacaagcttgaagacaagactatacgaggtatctttcttgggtatagcaatatctctaagggctaccgtgtctacaacttgcaaactaaaaaactcgtcatcagtcgagatgttgaagttgatgagtacgcttcttagaattgggatgaagaaaaaatggagaagaacattcttatacccgctcaactacctcaagaagaagctgaggaagaagacccaggtgaaccacctttaccttcaccacaacaacaagatcaagaactatcattcccagagtatacttccagaggagta

SEQ ID NO: 193835 - DNA, 425 bp, Glycine max
tctagacaatggttctgtcaattctcaataacattatttgctaatggtccctctcacgcaaagaatcattattatctctctaccattggcaaaggtgcttccttggttccttgaaatattctctgggactgggaattgcaaaatccagcaagggcattgtcccgactccgcgaaaatatgctctttctctgttagaagatactggcttccttggctgcaaaccatcttctcttccaatggatccaaatttaaagcttaacatgctcaatggcgaattactacttgatcccttaatgtacaagcgtttacttggtagcctaatgtatctaactatttcaaggccagatattacatttgatgttaacaagctaagccagacatgcagaatccaacgaaaccccatctatatgttatgcatcatcttc

SEQ ID NO: 193836 - DNA, 381 bp, Glycine max
agctttaaaatttgaattaaaacgttcataaactgctggtaattgattaccatatatgtgtaatcgattacacagggcaaattttgaattcaaattttaatagctattgtaaatcagttttggccactggtaatcgattacatcctctggtaatcgattaccagagagtaaatttcttgtaaaagactttttaacttaattttcttggccaaaccttttgctacttcaattggaatttccttcctatttaatataccctttctaagactctatagactgtcttgatcatctatcttgaatatctttaattgctttgtcttgaataaagctttgagacgcatttgatcttttgcatcatcaaaacatcggcttgatcctttg

SEQ ID NO: 193837 - DNA, 437 bp, Glycine max
tgtaggattatggggtacccatcacatgtggtactatgtggcggtcgggcgatggtgcacaacaagttttccacatccacaaatcgcgcataaacccaccatcccctgttgcccacctccaactgagctcacgtactcccacgtagcccatatcctcgtttctctcaacaccgggtccccatcaatcctcccaagcttccccaacatccaagtaattcaaaattcaaacaacacaaactatcacagccaataaaacagggcaaaggcagaaaactctgcccaaaacaccaaccaaaatcacaacttttctcacttacagactccagtagcatttccttcgttccaattcgttaaccgttggattgactcgaaaatattactggaagtctctagtacataagcctacattttgaccggtgggatctactagaaaacat

SEQ ID NO: 193838 - DNA, 418 bp, Glycine max
  unsure (1)..(418): unsure at all n locations
agctctagtatgatcacatcgcctgttattgtattcatcgactccaacgagcagccttcaagggttcattgtttctctctccaacgcttagagaaaccttcacaaccacaattcaggggaataacatccttctgccaagaaaggggctttctatcaatagattacttgtagaatcatacacaaattccagtttaaaacagtacttgacgaacggaatcctgaaatatatgaaaggtggattaccgtttcaaaaagagttcgggtgttgctaggtgctttttgctagtgcacccagcacttaaagcgaaaagtcaaaaatgccctttttatatttttaaaaaacttgtgcacccagncattctgcttccttcttcatttccttcttccgcgagcattgttctttctccttcttctgtgc

SEQ ID NO: 193839 - DNA, 377 bp, Glycine max
tctaatatccatttctagaccaaaatccaattatttatatcaatgtcattaacgagttgaccattatttgaccaaagaattttctctgaattattcttattctttctagactttaccttaaaaacttcagagcttaaccattcttaagtatcctatgataacatttcattttttaccatttcaatagtctaaaaacactattcatcacaccacaaagcaattacactgtctaccacacacccatgtgaaaatagggatgtttcaaaagagagagtagtagcaacactcattttatatttggccacttcaacaaagttacatcttagtttcctttacaaactattaaagatccccttataatgtttgatacaataaaa

SEQ ID NO: 193840 - DNA, 376 bp, Glycine max
agcttgactcttctgactcatgatgtttatccatgtcattcttgagtagtcatcaattatggacagaaaataccttccaccaactagtgaaggtactcttgcaggcccccaacagtaagcatgaatgtaatcaagagttcctttggtggtgtgaattgctttaggaaatttaatcctatgttgcttgccaaaaacacagtgctcacagaatttaagttcatccaatttttgatttcccaacagttgatgtttttgaagtatcatcatacctttttcactcatataacctagcctcatgtgccataattgaattaaatcaggtaggctcttattggatcttgatgcaacagctactagaccatcatcaatacatgtt

SEQ ID NO: 193841 - DNA, 417 bp, Glycine max
  unsure (1)..(417): unsure at all n locations
tacctccaacccaaacagtgacaatggcagtgagatgttacaaaatggcacgaaacttgaagctttcctcgtacctcaatcagcaatactgcaactgaagacgtattattattattatcatcaataaaacatgaacacccaaggaaacttagcatacaccaactttacctacaatgtatgtagggtattcttcgagccacacttctaagagcagtgtagggggttctgtgggttcggccgaggggtttccggcagtattgagaacaatgtgggtgtcgagggagcggtttccagcagatttcaagcgggaggagaaagatgtaacatcccaatttttcgtaaataaatttaaaaagctttntagtaaaaaaataaataaataaataaatatagagcaaataataggctgagtaccct

SEQ ID NO: 193842 - DNA, 383 bp, Glycine max
agcttggaaggatgcttcaatggaggaaaataaagagggagagaaagagagaggggggagaacaaaattgaaggaataaaagagggagagaagtggaactttgaagtatgtctcacaagactctcattcatcaaagttacaacaagttttacacatgtttctatttatagactaggtagcttccttgagaagctttcttgagaaaacttccttgagaagctagagcttagctacacacacgcctctaataaccaagctcacctccttgagaagcttccttgaaaagattcctaaagaagctagagcttagctacacacacctctctaatagctaagctcacctccttgagatgagaagctagaacttagctacacccccccta

SEQ ID NO: 193843 - DNA, 375 bp, Glycine max
tgaatcggacatccgtgtgaaaagttatgaccattttaatttctcaagagcttccgtagttcaatttcgagcttctcgacatattatgcgcccgaatcggacattcgtgtgaaaagttatgaccatttgaatatctcgagagcttccgatgtttaatttcgagcgtatcgatatattataagcctgaattggacatccgtgagaaaagttatgaccatttgaatttgcgagagattccgaggtttaatttctagcatatcgatatattatacgccagaatcggacctctcgtgtgaaagctatgagcatttgaatttcacgagaacttccggtgcgcatttaccaacgactctatatgtgatacacccgaatccg

SEQ ID NO: 193844 - DNA, 376 bp, Glycine max
  unsure (1)..(376): unsure at all n locations
agctttgagacgcatgtgtttctttttcatcatcaaaacattcagcttgatcctttgtccacaatctccccctntttgatgatgacaatccctgaaatcaagacaagctatatacaagatgatagcacgttcacaaaacccttactccccctatcttttggcatgtatgcctaactttacttaatgataaatttctaatagataattgatttctaacccaagttttcctctcaagttctctccccctttgccaacatcaaaaagaactaagcaacataatcaatatccaaacagagccaaacaataaaccaaaataaatccatacattggcataaccaaccaaatcaaagccaagaattataatataaatgaaaga

SEQ ID NO: 193845 - DNA, 406 bp, Glycine max
tctctacaccccatttatctccccctttggttattctaaaagccaaagtacgtgggaatcaaaacagatataataatggagtggaaacagatcaatatcaaagtataaagcataaccaatcaaactcacaaataagacacaatcaaactagaatcctaacaatttaaaaccaaaaccacagagtatcaaagcacaaaaagtctgaaatccaaatactacaagataaataaagtactgaacataatgatctaagtagcatagtcaaaatacacggcttataaaagatatataattagaaactaaattctaagaaggtggaggtggcggtggaagatcgaaactctgacgaatataacccacatcctcttcaagctgtgtgaggtgaatatccatgccggcataacgt

SEQ ID NO: 193846 - DNA, 347 bp, Glycine max
  unsure (1)..(347): unsure at all n locations
agcttctaggttagtgtaccagatgtctgttgccccanctaaactatcttgaaagaaatgcatcaataacttcgcgtccctggaatatgcacccatctttcgacagtacatttttaggtgattcttaggacaagtcgtccctttgtacctatcgaagtcaggtaccttgaacttcggagggatgacgacgtccgacactaggcacaggttggtcatgtctgcgaacggataatcgccaaatccttcaatagccctcaatctctcttcgatgagatcgagtttcccttttccttccgctatcgggggtggccctcccacggacagaaacattggctgtgttgggtggg

SEQ ID NO: 193847 - DNA, 408 bp, Glycine max
tgaaggaaaacttgatgccttggtcaacctattatctcatctcgccatgaatcaaaaatctacacctgttgcaagagtctgtggtctatgttcttctgcagatcaccacttaaatctttgtacttctttgcagcaatctggaatcaatgagctacctaaagcttatgctgcaaacatttataatagacctcctcaacaacaaaaccaacaacagtagaataattatgacctttcaagcaatagatacaatccaggttagaggaatcatccaaatctgagatggacaagtccttcacaacaacaacagcctatccctccttttcagaatgttgctggtccaagcaagccatatgttcattctccaattcaacaacaactacaacatcaatcacaacaacagtcacaaca

SEQ ID NO: 193848 - DNA, 374 bp, Glycine max
agcttcaactggaatgatgctatgctttatttatattcggttttgaccatttttcatgttttcatatttgttaatagggggtataaattgtcaactatgttgacactttatgttgtttgaatgggtggcatcaacttaattgactccttacgttttgtgtgtgtgtggagtcaccattgttaacgtgtctgccttgtgtgtagattgtattgccagtttctgttgagttcaggcccgtgcttggagtttaatgtgagtgtccatttttttttgtcgggttacgaaaaaaaccaagtgcagtgacttctaaatagtttcatgggcttacactgttgcacgagatgactctatgtgtaatgttttgaaaagaaata

SEQ ID NO: 193849 - DNA, 348 bp, Glycine max
gctatgaaaggaggttacgtcaattggtgattaattataaagaaaaggagaaaaaaatgctaaatttaatttcttcaactaataaaaaattaacaattaacatttgaccataaaaaatgaaatggagaaaaaagaaaaggatgagaatctattctcataaaaaaatgagtgtgtttaagtgaaaactaaagtgacagtaatttttttaacaaatgtgtgccttcgacgaatatatatataatcaattatgataagacataattgattatatatgaatatataactaattatcttatgtgtttgcaactgaatattacaatttacgtaacatgcctcaagtgcttattg

SEQ ID NO: 193850 - DNA, 379 bp, Glycine max
agcttataatatattgatacgctcgtttttaaacgtcggaaactctcgggaaattcaaatagccataaattttcacacggatgtccgattcgggcgtataatatgtcgagaggctcgaaattgaacaatggaagctcttgagaaatttaaatgggcataacttttcacacggatgtccgattcaggcttataatatatcgatacgctcgaaattaaacatcggaaactctcaagaaattcaaatggtcataacttttcacacggatgtccgattcgatcgcataagatgtcgagaggctcgaaattgaacaatggaaactcttgagaaattcaaatggtcataacttttcaaacagatgtccaattcaggcttataata

SEQ ID NO: 193851 - DNA, 192 bp, Glycine max
tgtttcacaacgatttgccttcctaacaatcgtcttggaagaaatcatattaccttattacctcccccttggactctgaagacatggcctatattatcctcctttttctgtgtttcactaaatgaccttttgccacctatgaaagtgtctgaagatgctatacaaatacactggcaacaagggtgagggtca

SEQ ID NO: 193852 - DNA, 361 bp, Glycine max
agcttgcctcagcgtttatgcgagatttataccaacatgttagccatcatcagcaagtactaagaagagctaagtctagccacagtccacgagcatagagtggcggacgagtatgcccaagtgtacgcggaaaagaaggctagaggaagggtgatcgactcgctacatcaagaggcaacgatgtggatggaccgatttgctcttaccttgaacgggagtcaagaacttccccgattgctagccaaggccaaagcgatggcggacatctactccgcccccgaggagatccacggacttctcagctattgtcagcatatgatagaattaatggcccatataattagaaaccgctaggaaactt

SEQ ID NO: 193853 - DNA, 427 bp, Glycine max
  unsure (1)..(427): unsure at all n locations
ngctcttacataactgttagggacgaattctccataacctangacaagagaatggcttctaaatcagaggaaacaacccatttttaatactattaatttcgtattctagtttacttgttctttaaatcacaaaacaaacaacccccccaattgttactgttactgcaagtatattatgaacatttggtttatcattgctcgttgggaaacaacctaggatcacttcctagttactgcattttaatgtttatttgattcgggtatggcctcgatcaaatatggtgtcgttgccagggattgaacccgggtcacccgcttgacaggcgggaatacttaccactatactacaacaaacatttttgtatttcgtgttgaaataatggaccatcttgttgatgaatacataactgatcttcattctaatctg

SEQ ID NO: 193854 - DNA, 382 bp, Glycine max
  unsure (1)..(382): unsure at all n locations
agctnggaatactacaatactccttaatgttggttttgttggtacttcacatccagcattcactgtatagagcaacttgtaacttccaaattcatgtatttaagcatagctcccatgccattctaagttagatagccaacaaacaaagttgaatgtgcttttactcaattaagttcctttatggttgcaaagttaatagaacaatcctctttatggccactatcaaactcattaattagtgtaatcaagatacttctattaagaagaatggttttattgatgaccattcctctttactgattaggctaaaaacaaacattaagcatagaacaataacaataagaatctttaattgaaatagaaacaaggtacaaatcacacg

SEQ ID NO: 193855 - DNA, 345 bp, Glycine max
tacagaccacagagacgtgcacgcatactccagaagatccgagaaagtcccgtaacacaaaactcataacgtctttgaatcgctaccatccctacttgcagactagtcatagaacaaaaccgcaataatgagtttgttatttcggacaattatttacatgtaaggaatgcatcacaaacaattggcaacaaacttctgctgaaaatgaattcaatctagtcaagaatcttaaacgagctttaaatgtataacggccacttaaaagatgtgccagcttcattactaggaggctcgagcgacatgaacggccgtgataaaaacaacgagcatgattatcaatccatg

SEQ ID NO: 193856 - DNA, 385 bp, Glycine max
cgaccgcggctgcagctaaggaaggaacaacagcttttcattatgtctccgcatcgaatgggaaatctgtccctcaaattcctaaaaaatgcaaagatccaggtacattcagcattaccttgtattatagggaatagtaagtttgacaatgccatgctagatttaggagcctctgttagtgttatgcctctgtcgatttttaattctctatctctaggtcccttgcagtcaactgatgtggtaattcatttagctaatagaagtgttgcctatcctgttggtttcatagaagatgtcttatttagagttggtgaactgattttccctggtgatatttatatcctgaatatggaagatggattttctcaaggatcagttcccatca

SEQ ID NO: 193857 - DNA, 391 bp, Glycine max
aaaccgagctctttttataaaaaataaaaatctacagggttctatacttaacaggtgccctaactgttaaacatatatctacacttactagagaaatgctaaaattcttattacactttccctgaaggaacatgctcaactcaaacttaattttactttttttctaaaaaaagtcgcaaatttaaatataataaattatatcttctattccaatttaaaatacttttcttttaatctataaattctcaaattctcgcaaaactcaaagaaaaggggagcctgggcacaacgggaaagatgtgccttggagatctattaggcatgggctcaaattcggatgcaacaactttgcatatgaaagggaacgctgcgaaagcatacaattaccccc

SEQ ID NO: 193858 - DNA, 326 bp, Glycine max
  unsure (1)..(326): unsure at all n locations
gacctggcggcatgcaagctncaatattcaatgtcgagcgtttctatatattacttgtgactcaaaaaacaaccgagaaaaaagttattgtcgattgaattggctcaaaacttcaacattcaatttttagcgtctcgaaatgttaccggactcaatcacacatccgtgaaaaaagttattgtcgtttgaattggctcaaagcttcaacattcaatttcgagcgtctcgatatgttacgggactcaatcagacatccgagaaaaaagttattggcgtttgaattggctcaaacgttcaacattcaatttcgagcgtctaaatattta

SEQ ID NO: 193859 - DNA, 401 bp, Glycine max
  unsure (1)..(401): unsure at all n locations
gtggagtgtccaagtgccaattcgtgctcttctttattccagtcttcttctggcttcaatacatcagtgggctttccttctgtgtccagcatcttgggatgttcccagcctttgatgacagctttccaggttctgctatccagagatttgaagaaggccaccattcttgctttccagtattcatagttgcttccatcaagaattggaggtctgttcactggtcctccttctttctccatgttcatcataatttatctccccagatctcactctgtgatatccagtgttggctctgataccaattgaaattctgataccactggacagatgtcttacaggatgtccnacatcacgcttcataacatgcagatattgtggtccgtttaaccgattctcatttc

SEQ ID NO: 193860 - DNA, 380 bp, Glycine max
agcttacccttatggcttgcctacaatcttcacttctcgtaccgctccggaagatttgagccaagcccctaccttcgaggggtaactccctccttatgccgactatcccctgcaagaagatgatgaaggagatgcccatctaggccctctacttcccctcaaagatccgccccccccatgaattaccccaaccaaacatagtccgccatgtcccatctccacccgcacccgtaaaagaatccattccctttgcaaaagataagggaaagattgattcacttgaagagaggctaatagcggtagagggcctcggcaactacccgttctcagatgtagcggatctgtggctagtacctgacatcgccatccctcccaagttc

SEQ ID NO: 193861 - DNA, 336 bp, Glycine max
ttttgcctccgattttgaaaaaatgtgtcattgggatgaagcagtaaaaacattgcgagagtgtggtagtgagtgaattataccatattgagcaaattaagccttctgctgcaccttcactttcacagctagtagctagctctatagctatggtaggagcaataaagcgtgtgataatagctggaaaactccttttattatacaaacatttgggtaatcaggaatgtattttgatagaattctacaccattcgttgctaattatactaatcagtttgcatgcccttcagagaagagaaattttataacttgctaaaaataactttacaacaaataa

SEQ ID NO: 193862 - DNA, 294 bp, Glycine max
  unsure (1)..(294): unsure at all n locations
caaagccaactcaaacgggacgaaccaacaccagcgacatttgcacagaagcccgaaacnaagcgacggaaatacagccgccaacaaaacacaaaggacaaaccaagagggacaataaaaaacgacaccaaggggagcccgacgaaaccacacagcagaaatagccacaagaacaaaaagggtggggacaagcgagaccaggtcaaggaaaatgggaaagacagcccgccggataggtgaagggacacgacaaaatcctcaggatgactcaccaacagaggcaaaaaccggcgc

SEQ ID NO: 193863 - DNA, 387 bp, Glycine max
cgggatccttaagtcacctgcggcatgcagcttgatgaaaatcttattcctatattcttccattgcaaataatcaactttaaatcatctcatgtcaactctgtgtataaatacatactatctttctttgccatgctaataacaaatgttgcatataaatgtgatgtcaatgtataaagtctcctattctgtgggactttccttataagaaagattttctatggattcggcgggtccattattactatttcacagacagcgatatgtgaaattacaatacttcttcatcagattcagttttgattaagaaaatcatttaaataaagaattttattatcttcaaagagttaaccacggaagaggccaaaaagaggattcaatcttgaag

SEQ ID NO: 193864 - DNA, 372 bp, Glycine max
cttttctagctattacataagcatctacttcctctaactctcgctgctttactgcaatttaatcttcggacgccatgattgtcacaaacaatggcctctacataagtcacaacattttcagattaacagatatggttcacgatgaagcctgcatgttttgataatatggtgatagcgtcacccgaaatcatatcctcttaccaactgtaacacacggtattattatggtagacaattagttatcaataatttagctccggacataaaaactgtttttcaataattaaatagaaattatcacaatgcactgttaacatacctcttaactataaacaaaaatacactatttctgaaattctaaacctatgccaa

SEQ ID NO: 193865 - DNA, 381 bp, Glycine max
  unsure (1)..(381): unsure at all n locations
agctcggcctttctgacatttatttngtatattcaagagacaaccattacaataaccatacttttaatcaagttgagaagaatttcatccatggtagttcttcaactcatggtgttggaatcaatttcaacactaaccaaacttatgaaggacaagcaagtaaaccgggcttggatctcaacatggccacaaaaatggaggatccacaaaggctaaagaggtatatatattattaatttatttaaacttaaatatgcttattgtttatgaaaacatgatatttgtttttaatgttcactcgattgttggttcaattacattctttttattaggatgagggaaaaaaaaaggcactccgtacctttctatcataccactcta

SEQ ID NO: 193866 - DNA, 419 bp, Glycine max
  unsure (1)..(419): unsure at all n locations
cgctaaggccaaatcacatccctgatattgacttttangncaaagnttctaaaggagtttgtacttacataaggcacgaaatgcatattactaccaaatatcaatatgtcatccagatacaaacataaaatgacacatccattattatcaaattgtttcacatacacacatttatcactatcattaatttgaaaatcatactaaagaataacttaatcaaacttttgtgtcaatgctttggagcttgtttcataccatacaaagatttaacaatttatttttcaagaaaaaatattctcaaagaaagtcacatctcttgactccataatagtaccatttgaaatttcagatacttctgaataataactaagaatcttaaatagtattatgttaaaaatattcacaaaatataataatat

SEQ ID NO: 193867 - DNA, 363 bp, Glycine max
agcttctctaaagaagcatctttagttttgatctgctctatcaaaatctgaactttcgatctcagctcattttctcgttgtatataaccattgaggttgaactcagttacttgaaagtgtcccattatacctttataaatccccattaacacctctgcagaattgtctgcctctagaaatcttccccaaactacttctgcagcctcttccatataaaatgccacttgttctgtgtagcatacgtttcaagttaggtcttcattgttgtttgactctgctaacttccttttaagctcgagttcccttgctagagatttctcaagcattcgcagaatatatctttggtgttcaccatctgacatt

SEQ ID NO: 193868 - DNA, 398 bp, Glycine max
tttaccacccctaaggctaccttaatatacacactcgaaatgcaaacatcgaaaaatttgataaagatgagggaacgaaaaaaatatataaaacatttctgaacaatccatcatggaacagagtatacgtcctcctttcgtgttcggatgaacgagaactcaggattaatataaattgcagtataagttcgccttatcccgtctgacaagatacaccgccagaccattaatgcttgattttctcaaaaactttggacaaaattcatttagtaacacattggacacgcaagttatcttacacaacattggataaataaaccccatgttattaaaacacaaaataacttattaataactcatgatattcattaacaaagtcagcctagtatatttgaaac

SEQ ID NO: 193869 - DNA, 365 bp, Glycine max
  unsure (1)..(365): unsure at all n locations
agcttgcctgtccgatgcttcanntaatantgcccgacntatgtgggggaacgggtacgaacccggaatgggtttaggcaaagacaacggcggcataactagcctgataaatgccaaaggaaatcgcgggaagtatggtttaggctataagcccactcaggcagatgtaaagagaaccatcccgggaaggaagggcggtggtcaaagctcgcggttgagacaagaaagtgaaggaagcccgccctgccacataagtagaagctttataagcacaggtctgggggacgcgatatacgaagatgatgttccaagtacattggatttggtacaaccatgccctcctgatttccagctgggaaattggc

SEQ ID NO: 193870 - DNA, 347 bp, Glycine max
gatagaggggggagcaccaaattgaatgaagaaaatagggagagaagctgaactttgtattgtgttctacaagactcttattcatcaaagttacaacaagtgttacacatgcttctatttatagactaggtttcttccttgagaactttcttgaaaaacttccttgagaagcttctttgagaaaacttccttgggaagatagagcttagcttctcacacctttttaatagctaagctcacctcctttagatgagaagctagagcttatcttcactcaccctttatttgcttagctcacccgcatgacataattcattggaaaacaaaataaaaaaccgtcccttcta

SEQ ID NO: 193871 - DNA, 324 bp, Glycine max
gcagcaaccagagggaagaagtttagtttttggcacagccaaagaataaagtcatacatccattactaacactcttgcacctcaaaaaccccggcgtcttttacccttccatgaggcatatatcatgtggatcatttcccatatccaaccctttttactcttcgactataaacatagcacagttccatacaccccaaactaccggacaagaatgtgaaccagcaagacctcgccattatcatatgccccataattaacgaaatacgcgatcgggagggggcaattgatacaatctctatggagacaaatacaatgaaataacac

SEQ ID NO: 193872 - DNA, 371 bp, Glycine max
  unsure (1)..(371): unsure at all n locations
agctngctaacctatgggatcttctatttctcccacactttttggggcgggccattcttggatggccttaattttctcacggtccacttgcaccccatttctaccaactacaaaccttaagagaactatattatctacacaaaaggtacacttttctatatttgcatagagggtgtttttcctaaggactgaaagaacttgcctgagatgtcctaagtgatcatctaggcttctactgtgcaataaaatatcatcaaaataaacaactataaatctacctatgaaatcccttaagatatgatgcataagcctcataaaagtgcttgggcattagtgagcccaaaaggcgtcactagccattcatacaaacc

SEQ ID NO: 193873 - DNA, 276 bp, Glycine max
acctgcggcatgaagcttggccatattccccattatcttcccaaggaagaccatcctctttttaccctcttccaaaatagaatcctgcattctatctatgattaaaccctgaaatggttaaaaatttactaacattttacaaccatactacttggtcccaagattccccatgtatgaaccttccacaatgatatgactaaacgcctgtttggcttgactcttcccaactgaattataattacatcacttaattctgaatatattcaatccgtttat

SEQ ID NO: 193874 - DNA, 385 bp, Glycine max
tctgcaaaaccctaatcttctcacttattctctcccttctgagccttgcaaccacagtttgtggatcagttgatatcttcacattcttcctctttagcttttcaaccacctccaagccaaagttcactggcctaaaagctgcagccctatatatcatttccttcatttgtgcaattgcctctggatcaggctcttcaatggaagaagaaatggatgaatctggttgctggaaattgatattatttgaggaggaactcatatcccatctgggtttcttgcattctggtggattatctgagataagactgaaaccaccttcttcaattggagaagaattctgaacaatactgatgcaggaatcaccaacttggatcattttagattg

SEQ ID NO: 193875 - DNA, 387 bp, Glycine max
agctttgaacattaattcaacatcgttttatataagtataacccttttatttcaggtcactttttttagttatattattatacctttacacttggtgggaaacaatcatttttgctttctctttaattatacttcttataaaaatgtcaaatcgtaacagagaatatcagctgacttcttcaatagatgtataatgaaaatgatgcaaaatcaatcagagatcttttattctctgacatgggcaatttagaatggaaatgctacttgtgcatacggtgtttaaaacttgcataagctgattttctgctattatttgtgagagaaaaaattaccaatccaaaatatatttatttctgcatattagagctagctgagtcagtgtaatgc

SEQ ID NO: 193876 - DNA, 305 bp, Glycine max
gcaatatgggttttttaaaacggaggctccctcatggcataccatctaggcggttccggcaattttgcagaagaccgcgaaagagcatcagaagcaggtaaaaaaggaggacagcacagcgggggtaatttcaagaatgacccgcagcgcgcatctgaagcaggtaaaaaaggtggtaagagcagtcacggcataagcgacaactagccgggctaatcaatgacgaatgcatttttgtctgtagctcgtcaaagagccatcaccgccggttacccggtggttgatactgatgacaaaatgaagct

SEQ ID NO: 193877 - DNA, 386 bp, Glycine max
ctgcgacttaaagaacaaatgcctgaatatttcttaattgcatgcgaattaggacgcatcatcaagaatcaagccaaggctattgtgctagcaatcaatggggcaaaacacaccaaatgattatgatgatggatggctcaaattctcacaaaggtaaactcatcactctcaaattgagctttcaaaactatcatgacatgtagagaagaatcaaggatttcaagtcacaaaatgtcaaaaacttttattttcaaaacaattacccatttcttgaacatatcctataattcaaagaaaaacatgcaaattcttacgtgcacacaaaattgacccaaaatattaaactgataatccgacgaaactaacaacattaagcaaataacaca

SEQ ID NO: 193878 - DNA, 405 bp, Glycine max
  unsure (1)..(405): unsure at all n locations
tgtgaatataagagntcaagctacacaaaacttattctactagagtttggggtgtgaagtccttgaatcctgtcgtgtatttaaaacacaataatgcgaaaaatgaccactaatccaactcatattttgttcaaggacttcacaccaatcaagagatatacgaacaatatatgaaaattaaacttatgactatgggagctcaagctgcacaaaacttatacaatgtgagtttggggtatgaaatcctgaaatcctgtcctgtatttcaaacacaataatgggaaaaacgaccactaatccatctcatattttgttcaaggacttctcaccaatcatgagatataggaacaatataagagaattaaacctatgactattggagctcaagctgcacaatacttatac

SEQ ID NO: 193879 - DNA, 424 bp, Glycine max
  unsure (1)..(424): unsure at all n locations
tatagganaacccttcgcattgtagccttttaatttcctgctgaaacccataactgtctcggtgaaattatgatctcggtttcgttaaccgttggattttcatgagatttggatatgttgttagacgttaaagttcgcacgcttacaccgctgggatttgtgagataatatttgtggagggagaaaaaggaatctcatgaagataatacaagtggaggtttcaatctcttttccgtctctctgacgtttgagaattctatcggaacagtcggaggaataattgaaggaatctcatggaactgctagagatgctcctaattaatttggattgatgaaataaagtaaggaacaatttatagagagatattgactctgtatattctccttttcttgctttctttaggggtgtaatataatttaaaaa

SEQ ID NO: 193880 - DNA, 314 bp, Glycine max
agtatatgagggaatataatgttgtttatgagaggcgaccacgaagatagctctgggaactgaagtggcccacatgcttatgccttgggaaagaaatagctcattgttccaccacattctgttggcttttttcttcatactcgtctttacattttcttccctttttaccatagtaatagaagcagtgtgatgtaactccattggagcctgcaggccttggatcttcttcaataatggagtcctttgcttcttgaagtttgatggcggcggaaaggagaaagagaaatatgattggagacaccacttcaaggaga

SEQ ID NO: 193881 - DNA, 399 bp, Glycine max
tttcgattcattctatgtacccgtagtggtccacatttgttttcgtgcacttatattctcgttttgtttactttatatacccctgttgacgtgcttaagccattttacttaagtcatttctcgcttaacttaaaaataaaataaatttccaccgaacgtttgaattggattatccgttaacttcggttaaaatgaatatcgaccgttcggtcgtgccgtaaccacgttggaaatcaaaaagaggtgaaaaataatataataataaaaaaaaacatcttttataaaataaagcggaaaatcaatcggacgttttctctttgggatttctcattcttaatcgaattgattaataactaaagtgaaactaaggcttaaatcaactcgccttagtcagctcgt

SEQ ID NO: 193882 - DNA, 373 bp, Glycine max
agcttacatttgtcatcagtatcaaccaccgggtaaccggcggtgatggcttttcgacgagctacagacaaaaatgcattcgtcattgattagcccggctagttgtcgcttttgccgggactgctcttaccaccttttttacctgcttcagatgcgcgctgcgggtcattcttgaaattacccccgctgtgctgtccaccttttttacctgcttctgatgctctttcgcggtcttctgcaaaattgccggaaccgcctcgatgggttgccattactgacctccgtctgggtatagacatcatattgcatagaattaacgcggcgtatggcggctgccatattttctctacgtgggactaagctttgagattct

SEQ ID NO: 193883 - DNA, 382 bp, Glycine max
agctttagtcaaacaaaacattctgtttatgtcaaagaattcggtgttgaaaaagcataacaagactttctgtgattggtttaaagatacaatctttgcagatgagaatgcttcagaaacattaagaaagctagcagatgggcctaaaagaaatgttataatctggcaaggatacgacataaacaggtattcattttacacaaaagcacaagatgacaaaagtacaatgcagaacagcggggtagccctaaaggctgaatctcaacactttgcaagtgtcaatgacgccaatccctgtgtagcttccatcccttactttgggttcattgatgaaaattgggagcttaattatgtgaaatttacagtatgtgttttcaaatgt

SEQ ID NO: 193884 - DNA, 416 bp, Glycine max
tccactagaagaacatgtaggataaatgacatatcttatctactaaaaatctaaaacatagattaacactaacagaagtcagagactagatagagcagtgaaagggtaaatcacctttggaggtttaattccaaattgaagaaagagctcaggattcatcagaggtaggtcaattgactcccttaattccctgatttgatcagataagccactaacagttgaatagagctgatatagaagaaaactgataaattgtatagccttttgaaacgtgaacactcagtatcgatacacatacaaatttgaataacattttgaataatatttgaatttactaatagatatgacaggagcgggtccccataaatcacaatgtattttttcaaagataaaagaactatagttgtctgaagaag

SEQ ID NO: 193885 - DNA, 376 bp, Glycine max
  unsure (1)..(376): unsure at all n locations
agcttgatgtcattcaaaatacacnatgnttacctaaacgaagactaaacatgcattggttatgtaattgcattcattatgcgatataatttgttggaactcattactaaccaattaatattattaagtactcgtttggttaagcaaaaaaattgttggtccaactaaaatcatttacgcgtgtagcatacatcattgtcataattgacaacacataatgacatgcatgcgtattaaagtttgagcgcgacaacacattgactgacttgactatacattctgaaggaaacataaacacgaaaatgttcacacgtgtctattttttttgtaacaaagtaaaccaatcgttcggtcacaaccatttatttatatagca

SEQ ID NO: 193886 - DNA, 320 bp, Glycine max
  unsure (1)..(320): unsure at all n locations
caagaactcacatnctctagaccaaattagggtccattgtttaacacagaaaggatgggccctatttaatgcctcgtcaagagaagcccacactctatctataacattatctcttaatggacataatttcacaaaacaccaaggcggaggtatactaaagcgaattacaaacttgaagtttaaactccttgacgagccaacggttaacgagcccaggattacaattttactaaaacagacttgggcgtctgcaagaaaaaaaactacctcaccctgaaactgacaaacatgcttttatatatagctagggcaccccccac

SEQ ID NO: 193887 - DNA, 314 bp, Glycine max
  unsure (1)..(314): unsure at all n locations
agcacaaggagcagcagtgttgttcccttatcgtggtccgcccttgnaagacttctaagagggatatcttatgtcttatagggtgcgtgaactgcccactattttgagcgaacaatgtaaaaaccgtaacatcctttccccaaaccaagtttttattttaaatattaccgaaatttgatataattttttgctgcggaataaacgaaaccttgactataaaagtctaacttgattgaatacctgagtattgcaactccttaaatcatgtttaattcttatgtctaaaaaaaatatgaatttaaaactttaataac

SEQ ID NO: 193888 - DNA, 361 bp, Glycine max
agcttcagtgcaagaaaacatactcttgactaggaacccaaagtttggttttagagttagaaaaacatgaaaattatgatttgcttgtgagagtttttgctcgaatttgggctgccccatgtttgatactttacatagaggtagcgtggaaaaagccttgcaatagtatgtatacgtaggtaaatataaggagcatggaattcctagcaaagtgtgaatgattgtcttcctaaataaatggtatgatagcacggaattcccttttgaatgcaagcgtgtgcataatgtaaatagcttgccaatgtgaataaatgtgaatgaaacaatacaaaaattttatgatatatatttcaaacatatg

SEQ ID NO: 193889 - DNA, 357 bp, Glycine max
agctagtgcttcaattcatgtctctctttaacactggacaagccgcttattggcgaaccgaacgtgttgtcacaggactgctgctgatctcaccatcatgactgataaccctgcggagaaaacggagtccttttacatgatacactgccctaggaaggagaatcatcacaatccaccaaacaagtagtgggtgctggccatgatcttatagaaaagcattgacccttgcaagtttcaaaagaaacactcgttccctgcttgctgcaattatggcatagattgctttgcaacatttggtaaatgcctagcacaggctcgtgatataaaatggacaccacctcgacttgggtgtttctg

SEQ ID NO: 193890 - DNA, 399 bp, Glycine max
ttaaggtaaatcggaagcattcccatatcatgatttaatgataatgtttcgaacttggatggaataggaatttatatgatacttaattccagagatgaatactttatttccatcatttatatgagtgaaagggaagaaacaccttgcatctcatttattcatagaaataacattgatgaacggactctacctttgttggttatattatgctaaatcctatcttcatataccctaatgtatgggttggaatcaaatcaaccttctttccccctatggtcccgcttgtgtgagagtgactgtagatccatctttgttcctgtgtgaatcatcatcagtatttctgaaaatgagtaatgtgtctctaactgcatataattattccaacttctcataacattc

SEQ ID NO: 193891 - DNA, 433 bp, Glycine max
  unsure (1)..(433): unsure at all n locations
gcnnatgcaagctttttagaaataatagaatgaggcgagtatatatatgtactttttgtagagaagtgatcacttcttttctaaaaagcttacataatgcgacatacaatagagaagaaatatttgacttttgcaaagttaactaactaagtggttaatgcaccatatgcctctaaggtcaattatttcctttctgccctttgcccggacttctgannacttttgcggtagctttctatttctagaacaagggttcaccacaaattcttactcgatagaagttaaatttatcattccgtccaataactgttttaagtgttagtgaaaggagaggataaggaaagaaaatgagtaataactaataagtaagacgattttttaagctgtttgataggagaaacaaataaataaaaaataagttttatttttattt

SEQ ID NO: 193892 - DNA, 258 bp, Glycine max
agctccggtagcgcacactcatgggctaggcaagaaactctggagaaatactgtcagtcgctaaacgcaccgcttatcccaaagccaccgctcagttcattcacctaacgagaaggcacgcctaatccgaaatcaccaatgagcgcctagcagtcccataaatgcgttaagcgcccgagcaccaacaaagctacctatttaagcctgaaatccgatttacagaaagaagttggactgagatttagagctttgcatgtc

SEQ ID NO: 193893 - DNA, 322 bp, Glycine max
ccgccgcttacgacaatgaagaaggtgatttatttttattgaagacgacaaaagcgcacgagaatgatttctccattgagctcccaagtccaagatcaagatcaactcctcgtttcatgagaagaaatcacgaagactcacgattcaagagaagatgaattcaagattcaagagaagaaatcaggaaaacttcacagaggatgtattgaaaatattcctcaaaaaataaacatagcacaactttgctttacatcaaaaagcttttccaaatttttctaaggtaccagagttgttactctctggtaatcgattatcagtggca

SEQ ID NO: 193894 - DNA, 303 bp, Glycine max
ggctcaaataggtcctatatgtccagatttggtcatttgcacaacctctaaagacttttttaatccataaacagaaaaataccagttctttctaatataaggtacaacaaaacctctctttcctacagctcttatttttaaggagagaggcacatcgtatgaaaccaacaagtgtgactaggatgccagtcaggacccactcatggatagctataagaaggcagaaacattaacaactttcactcaaaggaatttctttgctagcccataaaacattagtattgacaagaatacctagaagct

SEQ ID NO: 193895 - DNA, 381 bp, Glycine max
agcttaatattcatccaaattgaagctaagattgatgattaaatacatagatgaataatattcataggaatccaattgttcaaataacaaaattaacaaagcaacccgtgcgtacgcacgggtcgtttggtaagcgctattgcaaaggttaatatgcatataaatttaaccaaagattgcaaagtttaatgtacatataagattaaatacatagattgaaccatgaagcatgataaagcttaatattcataacaaaacaattgttcagacaacaaaattaacaaaacatttgtggcaaaatttaaaaatacaaaacaaagtttaatcggtatcgctatcaccccaatccttttgtttctaattacaattccccaaattttt

SEQ ID NO: 193896 - DNA, 383 bp, Glycine max
  unsure (1)..(383): unsure at all n locations
agctctgangcaagaggaataatgacactatcatttttagctatccaaataaatattgtaaatatcatgattacactcatagacccagctggaacttccaaatttggagtgatatgtcggttaagggatttatcttgcagcaattcaaaactagccttcaatgttaaaatacatcatgatccctgtagaccacaggggaataactttaataatagcttttaattcttttacttgatcaactgtgcagaaactccaccgattgtaggctgacccatcaaaggctatatctttttctgagcccttaatgaagcaagctttattctgatacctataaaaaccttactaaaagttcatattatttcatccacggagtaagcaaaaaa

SEQ ID NO: 193897 - DNA, 370 bp, Glycine max
  unsure (1)..(370): unsure at all n locations
ntaatggcaacacacacaacatatacccttctttgtttttttctctctctacctcactcacccattctccatttaaacgtgtacctgcacagccagaagctcattcattcacactgtcccaccttcctacgcactgtacaaacacaatcattgaacagtgtcagtgttaaaaggcaccgcttcctctgtttttgggagagaaaaataataacatagcaaaacaggggaaagcacagctgatggcgaaacatgtgaatgagcagagaatacaacacgaggcaaaagtggcggcgttggaatacatctgctcaatgaatggacccctcgtctgaactgccgcctcctaccggactctccgacgaccgaaggc

SEQ ID NO: 193898 - DNA, 386 bp, Glycine max
agcttgtaaacacaataggcaaaatcttctcttgttacagcatttgcacctcacaaccctgcctttatcatttctcttacattgatggcacgttaaggggccctcttcatcacactgataattgagaaacaaaaaacatgatctcaaatacaatgttgtatgtaaagacaaactcaaacatgcattcatatttgaatgataaatcatatcaccttggcctttctcctgttggcttttggctccatctcttgtttacagcccctaagaccatattttttctcagtgccagacatttcaaattcagccatttcatcatatttctttctttttctactgggtctctgctcggaaaccccaccttccatggcggtagcatctaacatctt

SEQ ID NO: 193899 - DNA, 408 bp, Glycine max
ctgaaggtgtgtaacccaccatttttttcatagtagttcaccggtcacgtgtctactatcattgtgataatctctttctctgttattgggggtgctacttgagttgccaagactctccatcattgggcgtattctttgaaagattcgtgccccctttttgcacactttttgtagttgcatcctatccggagccatatcagaattgtactgacactgcttaatgaaagcaaccattaggtccttccaagaatggactccaaaaggttccctaagtattataccatgcgacaagttgcctattagactttctaaggaaaaagttcaccagttcttatttttgcgtatcgcccatctccgacagacattttaaaggttttgagcgagtatcccctttcttgccaagacgga

SEQ ID NO: 193900 - DNA, 372 bp, Glycine max
ggaccttaagtcgacctgcggctgcaagctgggggtgagatttccaaatttcttctccaagaaaacaatcactatacactgacccctataattcgaatctaagatttcggagcctttatttattttatttcgcgcatccaactctacattctagaaatccacatctttcaatccaatttttaatactgcatacatttcttcatttcttattggagctcaattgaatcttacccatgaattaaaagcaacctttacagccattttgggctattgcctcatgcatccttttcggaagtttttaccttttagactcatcacttgaaaatcacatctctgatggaatttgccacgcattaaacaaaatttcaaaaa

SEQ ID NO: 193901 - DNA, 344 bp, Glycine max
  unsure (1)..(344): unsure at all n locations
aacacagccagcttttcactgcacaagcaggaacaattttttatttccatgcggacccantaacccgacgaagacactgacaaaaacctagctccatctactaggacaagtaaggcatgctgggggcaaagaaaacattcttcccaataaaccttggtagcaactgcgatacgaaacctatatcatctaaaacctgaagggtatacaagctatcctctatagtcgcctgaatgataaagagcgtcccaatcacactgtcacaaacagtttgtctcacatgcaaaacatctattcaatgcttacatcaagaccacaccaactcggaagacacaaaaaatggacca

SEQ ID NO: 193902 - DNA, 379 bp, Glycine max
agcttaagacgtggcaggtgacgtgtctttttattccccaaccgtgtaccgttcatggcatttgcggagctaacagcgcgtgcaattacaatcgtgttgtcggaaggacctgctattgtttaaaagggtttaaggttaaggatcctaatgattggactcaggggtgtgagcccgagttcgatccttctgttttttcttgcaacagtggcgagtctatgggttttctccattatccaaccacggagttgtacggctatgactggaacataacagtggttaatagcttggaggaatgcctgaatctatgcctggaactttgtgataagtgcgtatctgttcaattcaagttcaacgatgttgctaagtataattgttaccc

SEQ ID NO: 193903 - DNA, 380 bp, Glycine max
ctcaagcttctaaactttgtacaagaatgaagctcttatacctcttgttagacaagtggcctcggatatcttaagaagggggggttgaattaagatattccaaacttttctcctaattaaaaatctatcttactttttacttaaattatgaattcccttaatgacaatcttcttaaatattaattcaaatgaagcaacttgaattatgaatataaagcaataataaataaaggagattaacggaagagaaaatgctaactcagttttatactggttcggccacacccttgtgcctacgtccagtccccaagcaacccgcttgagagttccactaacttgtaaattccttttacaagttctaaacacacaaggacaaccct

SEQ ID NO: 193904 - DNA, 372 bp, Glycine max
agtcttagaggacaagttgctggttatttatattactccatgtcgaagttggtaaccttgacaaatttaagagtcataggctagacaagcccccaacctggacgagcattgtctgggctaatgctaccaaattgtctagggtgagtgtgctttacgtcccttcaagtaaagccaggtgtttgaatgttttatgagaggtccatgtatttgaccattttgacacttctaactgttagaaagtgctctgaaaagatgcatttcattctactcaaggtgagcgcgtgttatgcatgcaggttgcctttttacacatgtcactctatgagagggtacgcctcaaaacgagttatatggtttgatgggggttacatt

SEQ ID NO: 193905 - DNA, 436 bp, Glycine max
  unsure (1)..(436): unsure at all n locations
tgtgaagncatggaagccccaaatctttcttatatttcgtggagtgggccactcaggaatgacctttattcacttatggatcttgggaatcccttgatcactatttaaaatattaacaaaagtaatgcaataaaacatacatttttcagtattttcatgttgattattcctaccaaacagtatggcaaaccttaggtgtcccatatgaatacctaactttgttttgaaactaataatatgaataaacctacctaatgagaccctatgtgcacaaatcatgaagatgttggatgcacgagtgattttacaaaagagggtttcaccactcaacacattcattataccacctattatacggaatttgtgcctaataatacctatttnggacacccaataagctcaaaggaattaatctcttgtgaaccaaacccttatc

SEQ ID NO: 193906 - DNA, 288 bp, Glycine max
  unsure (1)..(288): unsure at all n locations
acctgcggcatgcaagcttagcaaaaaagactgactttttttatcngcccgccgacagtctctaccttcatattctcattcctgagcccgtcacacaacagatacaaacatcattccattgccataacaaatcaggctatccttttccaacggcatcctctccaaccatacaaccattgatttctgcatgaccccaggacactcctttccttcctctaaaaccccattcatatattcacacccaattcaacaagcgctccttccacccctaacctaaactgaattctt

SEQ ID NO: 193907 - DNA, 363 bp, Glycine max
  unsure (1)..(363): unsure at all n locations
agcttggaatactacaatacttcttttgttgnnnnngnnnggacttcacatccagcattcactgtatagagcaacttgtaactcccaaattcatgtatttaagcatagctcccatgccattctaagttagatagccaacaaacaaagttgaatgtgcttttactcaattaagttcctttatggttgcaaagttaatagaacaatcctctttatggccactatcaaactcattaattagtgtaatcaagatacttctattaagaagaatggttttattgatgaccattcctctntactgattacgctaaaaacaaacatttagccttgaacaataacaataagaatcttttattgaaatagaaa

SEQ ID NO: 193908 - DNA, 412 bp, Glycine max
tcgagaattgcccgaactcccttccataatctgattttaggcttaaataggtggctttgtttgtgctagcacgcttagcgcaactatggaccgctcaacgcgcattattggatttcagcttagcgcgtgcttttctcgctcagcggatggactgaagcagtgcgcttatagggatgacccttcgcttagtgcaaatgcacaactcatccttcttctagattcttcctcgctctcagccgaagagtgttgcgctcatcggatggctcgctaagccaaaagattggcttatcgagcggatgaaaatcaacacttcacaaacttgccttaataacctgaatttgaaggagatggtttttaacacacaaaatgggagtacgaaatatttattacctatttttacaaaaatattata

SEQ ID NO: 193909 - DNA, 380 bp, Glycine max
acctgcggcatgcaagcttgaagtgtgtaacccaccatttccataatagaacactggtaacatgtctactatcattgcgataatctctttctctgttattggtgcgctacttgagctgccaagtctctccatctttgggcgtatcctttgaaagatccgtgccctctttttgcacatgttctgtagttgcatcctatccgaagccattatactgacacagcctaacgaaggcaaccattaggtccttccaagaatggactcgggaaggttccaagttagtgtaccacgtaacagctaccccagtaagactttctaggaaggaatggatcaacaattcttcatcatttgggtatgcccccatctcccgacaatacatcttt

SEQ ID NO: 193910 - DNA, 344 bp, Glycine max
agctttgtttgttactcggtgaaactattttcctcattaatatggcaatatcactccccccaaacatatcattaacaattttaatattatgcaacttcaacatgatcttctgctccacctatatatcccaccaacttattgatgcatgtacataattcccttataacctcactatcaaattgcatttgaggattgtgattgaactctgcattctaaaacttgacaaccacatgttataggtgatgaagttggatattccatctttgttcaatgatttccaacacacaagtgtgtgtgcttattgatttattcaacatattaaaaaggttctaaaatcctaaagg

SEQ ID NO: 193911 - DNA, 415 bp, Glycine max
  unsure (1)..(415): unsure at all n locations
ttgcctntgtagatggnttttttattttgtgtatatttgctttgtactgaaaaaaaaaatacttgagctttgtctcattttgattgtcatttagttttgttggatttggttgtatattgctttggactgaaaacaaatgttgcctcattttgatttttggtttggactaaaaacaaatgtaacctttgtctcattgtcactctcattttgtttagtactgtttaacttcttctatatccagccgtgaaactatcatttgattcttctttttccaggattgtctatggtttttgtgtttatggtcgtttccattgatgtgtcaaaatttttattacttttgtatttgatttttttattccactgtttgggcctttttggtctgttaccttaccttttgttgggcttactgcgtgtg

SEQ ID NO: 193912 - DNA, 257 bp, Glycine max
ccgcggcagcaacttacggagggcaaccgggataaccattcttttctaaagaccccgatttagtacggctctaaacaacatacaagattcctaacgaattctaatcaggagggccgttaaggccaacatacgcgggcaataaccaaaaagcccaagaatgtctaaaggggcggaggaggtcgcagccaaccccttggccacggctaccaagccggggacatatctttgacatccccgagcaagcgaaagagcaaaac

SEQ ID NO: 193913 - DNA, 303 bp, Glycine max
gcaatgaacaaccaagacagaagtcgttattgactatcatcaaacctcctaagtgggcgttccatggtatagtacgaaacacttgccaccaaatacatgaagaagcgagatgttggttccaatcacgacagacccatggagtcttctttaaagagggtcttactaaagccctattcatgatataacatgttgaatataacggatctagcccaaaaatatcctggaagaggagtcttatttaataaggtcctagcacattcttccaaagaccaatgattcctttcaacaactctaatttgtaga

SEQ ID NO: 193914 - DNA, 386 bp, Glycine max
agcttcgtggcaagccagtggatggaggacaatcctggatggtgaacatgatttgtggcattcataatcatgaattggccaagtcattatttagacattcatatgtcggacgattgtctaaagctgaaaagacacttattactgacatgacgaagtcaatggtcaacaccaaaaaacattccgctgactctaaaagagcataatgccaatagttgtacgaccatctaacacatatacaatgaaagaagtgcataccattcttccataagaggaagtgatactgaaatgcaacatctaatgaaacttcttgaacgagatcagtatattcattgacactgattaaaggatgaatacgtggttcgtgatatcttttggtgtcaccctaa

SEQ ID NO: 193915 - DNA, 424 bp, Glycine max
  unsure (1)..(424): unsure at all n locations
cctaatggtcttgatacaattaaagaagaaaagaacaatcttatcatggagagagagagagagtagagagagaaacagtgggtgggagagagttaggactatgaaagagaggagagctagagtcagatttcgagagtcagagggttcccatctgaccatcgaagggttagccacaggacagcgtcaatcctacacgcgagcgaactggagagaccataaggacgttatatccttttactttacgaggttcccggaagacgcaacagcaaaggatttgtggttccattttaaacagcaaggagacgtgagagaggttttcatacccaggaaaagatacaaccaaggaaggagatantggtttgtgaggtataacgcggtgagagatgtgcatcaacttcagcagcattttgacaataggttcttc

SEQ ID NO: 193916 - DNA, 369 bp, Glycine max
gagcataccaatttattgtgatggcctttttacggcggccaacacgtcaatatttctaagctttatcaaaatgcttcttcgaagctggaatattgagctgagctgagctgagtcagggattaacttaaacctagctcgctaaatttattcttcaatcaaaggcttaattcaccaagaaaatggctgtctcttcttaaacactatgagactattacatataaattgatgaccttacacaaattctacacctaatttcttgcatacattttgactttacgcatttataaatattcaaaagggaaacatacataaaaacacacatatatatacataaaggataagaacccttatttccgatatatcaccatc

SEQ ID NO: 193917 - DNA, 402 bp, Glycine max
tatactcgggataatttcatttcaacatgtttcattgaatgtaaactttaaactttctgtttttttttttaattccaattatcatctatgatccatgtaattcccacgaaatcgaagctaagagttccttcctctgccattcttatgatgagaaaagattgagggaggctcttgattttgcaatgcttgtgctgttttcccagtgacaggtagaggagccttaccttctttcccacaaaggtgctggtctcaaaatttgtttcatactaatgctcaaaaagagtagcacatttgccattgtgcttctacattggtaatctggaggggttgaattcattcagtttgttgaggcctgggcatgtcctatattgaaattgatactttttttgcctagcatttaac

SEQ ID NO: 193918 - DNA, 173 bp, Glycine max
acaccacttttggacctaaaaacaatacattcacccagagttgctattcctacctaatcttactctttcacccctctttcttaaagaacatgacattactctactttaaccatcaaaaagctttcttttaacttagattaataaacacaatttataaaaaaggctatagtata

SEQ ID NO: 193919 - DNA, 377 bp, Glycine max
agcttctttggtgccatcttcctctaccaacaactacaccaaaacccactcacacaaaccaaatccaaagtcgacccactctcacccacgatgcctccctctcccatgttgtcataaacgccagctagtctagaatgcctattgatcatgggtaactacaactttgacctcatctacaaggctcacctttccatcggtgcccctcgttggtgtcaagaagctctccatggaccccccccatagcttccgcaagttcacagaggagatggaaatatcccaagcaagctccaccacaccaagaacacacaagtgttttatcttttttttttatcaatttagtttttatatatttcaatttattttatggtgatgtttgt

SEQ ID NO: 193920 - DNA, 429 bp, Glycine max
  unsure (1)..(429): unsure at all n locations
tgccactagaacctattctttagttcatcatcattatatatgcttgntcaatgctttcttttatgttggttttattctctaataaagtataaaaataataatttaaatttgattcatttcttctgtcctttggagtatatgcataacaaaaagaaaaagaaaaagtaccttgtcatcaagaggcaaagcaagagctgtgtcaagaagagaatagccagtgaatactccaatttcgagtgttttcttcgcattcgggattttaagcaaaatagatatgaactgcacttcctccgctggaatactcaacaaataacccctgctgacatatatataaattataaacccttcacaacaataatttataatatcctatatcaataaaataagttatcataccttaatcaagattaaaattcanagctcaaatag

SEQ ID NO: 193921 - DNA, 365 bp, Glycine max
agcttttgattttgacttgatagaaccttttcttaagcagaggtgtttgatttgatcccatgtttactagaatgaaaatttctatttgaatcaatacttcaatatcctatcatggaggaaataggatgaaagcatgaaaggatgcttatgttgtgcatgacacatgcattttacagacatgagagtccggaagatcatcttttcttacttccaacatttggcagcatggtgccccacatatgcatttaagaaggcgacacagaccttttgacttctcatgacaaaatgacgagaccaaacacaacgcgtgcgtgacgatgcaatatagacgtaaacgcataaaagcgcatggttgatagcaaaag

SEQ ID NO: 193922 - DNA, 366 bp, Glycine max
ggaccctaagcaccgcagcatcagctgctatgccaaaggatgactctgtgttgcaagtgctggcatttcttgttggatcatttgaagccatccaatcacatttaacatttggatatactctacatatatatcgacctatgcgtgcgaaatcattgtgttttctgataaatgtaaaagctacttgatttaagatattcttttactttctgcaattatcttcatattgctgcctatactataaatggagaaaagagatgtccatcccacactaaattccaaaacaaagactggtctttggcgtttattctaatcacaacgactctcaaccaaaaatatatttcgctatcaaaaaaccaaaaatatttt

SEQ ID NO: 193923 - DNA, 242 bp, Glycine max
aaccagcctatcatagagagccaaacgaaggggaaaatttctattcgcccacgaagagcttgacgccaagattcaacactcaccattatgggcgctcactaatagacaatcaaatgaacacacatcatattacaccaagagaaaacaaaaatccaacgaccaggaaaggccaaacatcgttaccaagagaagcgcatctgtccaaaccatgatgaacgcacctgccccacatgaagagcaaa

SEQ ID NO: 193924 - DNA, 372 bp, Glycine max
agcttttgcatgtataaggtggattttattaatgtattgaacaattaacatgaatttccttgtgatttcccaggacacagaaacctgaaatggacccaacggtccttagccacctccactttgttttcatccctttaatggccccaggtcatcttctccctatggtagacatggccaaattgttggcacgacacaaagtgaaagtgagcatagtgaccacacccctcaattgcatccaattccaagctagcatagacagagagattcaatctggctcacccatccaaattctacatgttcaatttccttgcgcggaggctggactaccagagggatgtgagagcctagacactctgccttcaatggatctgc

SEQ ID NO: 193925 - DNA, 311 bp, Glycine max
  unsure (1)..(311): unsure at all n locations
ntagtgcaaagaattgtgtcagaatttggaactatgtttctgaaatgttttggtgactcaaattcttgtcggagacagtatccaacagtaatagaagagctgtgccgtcatttttcttatgctgatgctaagaaatcaacgaaagctttgatagaagcagacttattggacatggaagattcggtagtgaattatataaaagttgtctccaacataatggtgcttctgattatacagttgcagtgaggcggttccaaaaccactgtgtcgaacagtttaaaagtgaagtggagttgctctgccagcttcgt

SEQ ID NO: 193926 - DNA, 326 bp, Glycine max
  unsure (1)..(326): unsure at all n locations
gaccaagatgatggggtttggccctaagaatgatttcaagattgagtcaacaagtttaagatcaagtttcatgagaagaaatctagaagattcacgaatcaagagaagtctgatttcacgatttatgagaagatgaattcaagattcaagagaagaaatcaagaagacttcgcaagggaagtattgnnnngattttttcaaaaacaaacatagcacagttttctcttttcaaacagagttttcttcaaattttctacgttaccagagttattactctctggtaaacgttaccagtttcttgtatccattaccaattgcaaagttga

SEQ ID NO: 193927 - DNA, 346 bp, Glycine max
ggaagctacctagtctataaatagaagcatgtgtaacactagttgtaactttgatgaatgaaagtcttatgagatacacttcaaagttccacttctttacctcttttattccttcaatgtcgagctccccccttctctctttcttttcctccatcgaagcatcctctccaagctgtttattcaaggctcatgctggtggtgaagctccttcttccatggcttattccctagtggatggcgccaccatttccctgttgtcctttgtcttacgttgcatctcatggtggaaaataccattaaggacctcttgaatctaaagaccagcttcataaagctcacagcaagc

SEQ ID NO: 193928 - DNA, 366 bp, Glycine max
  unsure (1)..(366): unsure at all n locations
agcttcaaatgacttatgcatgtanacaacaaacataatatgcaacaagcttggaagctaacctgccagccatgtgtactcctattgtcctttgatggagattcaagttgattgctatccctgcagtccgcattttgagtggatatataaaatagtaacttacccaaagcagccatggagaacctccttactttttcctgcctgtctctaaggccatcagtcagtgcacctaaaattccagaactagccaaactgtcatcaacaaaggtggagtgcctaatcaacagaccaatcagtgaagcaagttgaacacgcaaagctgatgccttggattgacgctgcaattttacaagcatgagcattatt

SEQ ID NO: 193929 - DNA, 426 bp, Glycine max
  unsure (1)..(426): unsure at all n locations
tgaagaatatcaaccacacaacaaataactagtgttcataaaataagaaaaagatgcgctacttttaacagggaatatcataaagaatgtggatgactccatttcttgatctgatcttcaaagcttcctactttagccgattggttccagtcaccaagcctgtttgcatacatctcatgataagccttggcattcacatggctaaaaattctgactaatttcccatgttcctcatccaccaccatttatccatcgatggacacatgtccttgggccaagactttaatggtctttatctcaaattttccatttagagatgaagggccttcagctaggacaacggcacctagaatttcccctaagatgtgtcctacaacattatnaatacnaaccgtaagtaacaaaaacaatgtagaaaccaaatga

SEQ ID NO: 193930 - DNA, 301 bp, Glycine max
  unsure (1)..(301): unsure at all n locations
caagtccataaccatcaaaagtctgaaaagagtatgatgaactaagggacgtcaatatggccaccgctgatccttggaacgagaaaccagaagcccaaaggaagaacacgtgccagcaaagttttgaggggctttatagggcagcaatagtaagctcaagctccgaagaggtgaaaggaatcatcacgggtcaaggcatgatcttgaaggacgagctaaaggctaccttangtcgaaaagaaatttgtcccaacagttaagcgagactgaaaggaatatgtgggccgtcatcgatgagtgc

SEQ ID NO: 193931 - DNA, 382 bp, Glycine max
  unsure (1)..(382): unsure at all n locations
ttaaatttggaggggctaagttgaaatcaaaggagaagatgatgagaggactaccctctattaacccccgtgatcaactctgtgaaggatgtttacttggaaagcaatttagaatgagttttccaaaagagtcaaacttatgagctaagaagccacccgagctaatacatgctgacatctgtgggccaatcaagccaagctcactaggtaaaaataactatttcctccttttcattgatgatttttcaagaaaaacatgggtttatttcttaaagcaaanattaaaagtcttttctgccttcaagaagttcaaagctgcagtggagaaagaanatgatcaagatatcanagccatgaggactgatcgaggaggataattcac

SEQ ID NO: 193932 - DNA, 492 bp, Glycine max
  unsure (1)..(492): unsure at all n locations
ggatccttaagtcacctgcggcatgcaagcttcgacatcagaccacttccgggtgctggttctacttcacatggatttgatggggcctatgcaggttgaaagtcttggaggaaagaggtatgcctatgttgttgtggatgatttctccagatctacctgcggtaaatttatcagagagaaatcagaaaccttcgaagtattcaaagagttgagtctaagacttcaaagagagaaagactgtgtcatcaagagaatcaggagtgaccatggcagagatattgaaaacagcaggctcactgaattctgcacatctgaaggcatcactcatgagttctctgcagccattacaccacaacagaatgggatagttgagagggaaaacaggactttgcaagaggctgctcgggtcatgcttcatgccanagaacttccctataatctctgggctgaagccatgaacacagcatgctacatccacaacagagtcacact

SEQ ID NO: 193933 - DNA, 388 bp, Glycine max
  unsure (1)..(388): unsure at all n locations
ttgaagtctatataaatcttaaagatgttcatgttacgtcagttatatcacaagagaatattctaagacaaaaggaacaagtgttgtaacattgtcagtccactggataaagcaaactcgagtaaattaagtgaatcttagctctactaagttagtgattctcattgtattcaaggttactgtgtaaacacttattgagtgtatggaatacattntctatcaaacacatatatgttgtgaaagccagaagtggcttattgacaaagaatacttgggtcttaatctcagggggagattaagtgtagtgccaagtgtgacaaagtgacaaacaatacctgttgtaagaaaaaattgcatacagaatacttgtgtgtgatccaagaattga

SEQ ID NO: 193934 - DNA, 479 bp, Glycine max
  unsure (1)..(479): unsure at all n locations
agctngctnnggcattggacctaactcagttaaattattcttaaagtaattatatattttgttggaacatttcnaacttggaattgaaaaaaaacaattagcaatgcgttgaatcaaataaggataaaaggtattttacctgtgtctcaattttttatcaaaattaattttagtcattatataatgattttggttcttgtactttntgtaattgttaaaatttgtctttctttactaaacttaagaactaagatgagggataaaatttatcaattacaaaaaaatataatcaaaatcatggtttttagagtgtaaaaactataaccaattttaaccgaaaactaaggaacttaaaacacattntacacattaaataaattcttttatctaanaatatttaaaacacanaactaaagaaataaacgttggagtataatttaaatataaaataaaatataataactaagtataaataaata

SEQ ID NO: 193935 - DNA, 463 bp, Glycine max
  unsure (1)..(463): unsure at all n locations
tctatggactcgccagcatgggtagcgagttcaagcttctatggattcgccagtggtactgacgttttccttgccacgtgggagatgcccggcaaacccaccattgctaatggcggtttgctaagagccccatgcaatatacgtaaaaaacaactccccttgtaaaattcttgaaaacgaccccatttggacaaatattctataaaaataccccatctggggaaatttgcctatcaacgtcattggcaaagctgattggttcccttttgagggagtgacacattgctgcctttcattatgaatcaccataaaaaaagactttattaatagtagtaagaatcttcataacgaggactngtgaacaacaacagtgtatatatatatacttctcggaccagtttcttatatatatgccattctttccgattggatatattctttacctagtcacacactataagta

SEQ ID NO: 193936 - DNA, 468 bp, Glycine max
agcttcaatatcctttgcagtaccaaatacaaaaaccaaagtgtgctaaacttggtgcattcatgaaccttgaaagaaaactagtagaaaacatcaaatctagtctagttgcattcaactaaagaaagtacaaaaccaaacttttatactgaggaacatcaaccttttcatcgccatcattcttggagagtatttcatttacaacaagaggagttgtaacaagattacaactctcaaacctgaattttttttaacaaatcattggcataatttctgtgagagaaagataccatcatcaagctgatccacttccattctcaaaaaatacaccatcactccaagatttatcatttcaaaaacttgcagcatgctcttcttaaattcgcaatttatcagcatcatttctataacaagcaaatcatcacataaactgaacaccagttttctgccattgcacaactgtctcat

SEQ ID NO: 193937 - DNA, 486 bp, Glycine max
  unsure (1)..(486): unsure at all n locations
gattctccttgcctggcacttcanaaccttctggttgggtcatatagatgtcttcctctaaatccccatgcaagaatacagttntaacatctaactgctccaagtgaagattctctgcagctactatgctcagaataactatgatggtagtcatctttacaactggagagaagatctctgtgaaattaattccttgtttctactgaaaccctttcaccacaagtctcgccttgtatcttcttctaccgtcaaattctttctttagcctataaacccacctattctgtaacgctntctttccttctagcaatttagttaaagaccacgtcttattcttctaaagggatgtcatctcatctttcatcgctagctcccactcaataatgtcattcccctgtgtagcctcactgaaacattctggctcaccagcattagttaacaacaaataatgcaatgaatgggaatacctgtctggtggtactgaaa

SEQ ID NO: 193938 - DNA, 306 bp, Glycine max
  unsure (1)..(306): unsure at all n locations
accatagagtggtacctggagatatgtcgcgggggtcatgagacctttgggacgtcaagtggggtggtattgcccaaaaccaagcttgaccaatcccgacccaacccgggcatagtcagtcagtgagaacctgtgatgtacctaagcaggcaagctcctggcagtcaacagataaaaggaacaaagaccacaaatcaaggaggcttgtgtggtggctggccaactgtgaatcttgtgtgatatatgggttatggcctctggtaatcgataactaagggtggggaatcnaatacaaggcttaaaaat

SEQ ID NO: 193939 - DNA, 338 bp, Glycine max
cacatgtaaactttactctcaacacactctttggatgatgcgtccaacgatggtgatgccattcttaaattgacttccttttgcagggataaggcaaagctacaacaatgagtctcccaatttatgatatgatgtttgttagaccatctataattcgaacgggtggctaaaatgtgtaaatgcacaatactgacaagcgagctacatatgggtgttacgacatcttataatatcctatcagcatcttcaatcaaaatggcacacttgaacgaaaattgttggcttgttactcaatgtactgcgaatatataacgatctatattatgagctcaatgtat

SEQ ID NO: 193940 - DNA, 381 bp, Glycine max
tttatatttcatcttcattaaccattatgaagcatgtattgtaatcctaatgatttggtcaaaggtggcacacatgttaagactgtgaggaaggggggattactacagttaggatattgactagttaggtatggggttagtttgtcagaggggttcatcctatttaataaaattctttcttttctttgccatttcaattcttggttcctaacaacaaatctaaataaatgcatctggcatgcattcactcaagataattttataagaaatggaatagataatttaaaataaattaaaatcagcacgctctataatcattgaccacagacctgaacttaacttctccctcaaactgtccagaacgaattacaaccttaaata

SEQ ID NO: 193941 - DNA, 457 bp, Glycine max
agcttgtacgattatggagtacccttcatatgtggtactaggcggcgattgggcgatggtgcaaatcatttctcccacatccacaaataatacatgaaccctccatccccagttgcccaccttcaactgagctcacgtacccccacgtagcccttatccttgttccttttatcacgggggccccattaaaccctccaagcttccaaaatatccaagagattcaatatccaaacttcatgaactaccctcaaccaagaaaacagggcagaggtaaaaaactctgcccaaacactattcaataccacaactttccctactcaaataccccagtaacatgcgttacgattctttaaccgttggatcgacaagaaaattttactggatgttcctagtacataattctacactttgaccgttgggattctgctaaaaatgtccacaacacaatatgtactac

SEQ ID NO: 193942 - DNA, 436 bp, Glycine max
  unsure (1)..(436): unsure at all n locations
cttgtctaggatgtgcagagtgcatgcaacaatcttgagagcattattcaatctacgttctatgtcccttgaggaacttgtcagtatactcatcgctcatcaactagagactttgcaagacatatgacccagaacagagaagtctctatctctcaataaatcacaataacaaaaggcatcattgtctatagaacaagtcttgaaaagttatccaaagctcttaaagacaattattcatctaatgatgaatctggcacagactctgatgaagatgagctaacctttatttctcataatatccgtaagatgtggagaaacaaacgacgctccaattataacagattcttatgaagaatgcccaaagaatagaaagataaagattagagntccatgatttgctatgagtgcataaagcttagacacttctagtcttaat

SEQ ID NO: 193943 - DNA, 354 bp, Glycine max
  unsure (1)..(354): unsure at all n locations
ccgagcacaatactatatttctatactctaaatctctaattcaggttaccagtatttgacaaaagagttcttgaaataattttaaaactaatgatataaaaaaaattaatatttcttgtggaactaaatttgctagtaaattcacgtgaaattttatcctaattttcctaccacattattacaactattaataaatttacctacaaatacataatcgtaggtatttcctgaaaattatataaccctataaaacctngcagtatctcctatggatgttcttaaataaaaattcgtaagaatttcttgtggattatttttccaaataaattcacaagaattatcactttatagtat

SEQ ID NO: 193944 - DNA, 63 bp, Glycine max
tctctctgggaacattcccaaataccatctgaagatgaaagtagttgatattaaaaagaaaaa

SEQ ID NO: 193945 - DNA, 453 bp, Glycine max
cctataaaactcagcttgagaccaactgtgcccttaattatccgtaactcgttttattcagaataggaataatctttaccgtgatgcatttaaagctctttagtaacacataaacgcctggattatcacatttttttaccaatataataggggaggaaaatgggctagtgcttggatgtatgatgccactttgaagcatggacttgacttgagcttcaatctcttgctattggaaatagggatagcgataagggtggacattgatgggttcagaattatgtagtaagtggatggcatggttggtattgcgggaggggggaatggttgtctgtgtttggaaaatggtcaaaaattggttaagttagttagctatttctgggtactggtaacctctggtatatggatgggtgtctggtcaagacactaatgtggagaaacacttctactgcagtt

SEQ ID NO: 193946 - DNA, 268 bp, Glycine max
  unsure (1)..(268): unsure at all n locations
ctttttactcggatgtctgaatgaagtccgtaatatatcgagacgcttgaaattgaatgttgaacgtcagaagcaattcaaacgacaataacttgttacccggatgtctgattgaagtccgtcatatatcgagacgctcaaaattgaatgttgaagctctgagccaattaaacacaataacgttntactcgatgttgattggtcccgaatatatcagacctcgaattgatgttaaatctagccattcaacgacatactttttctcgat

SEQ ID NO: 193947 - DNA, 320 bp, Glycine max
ctcaatcaatcatccgagtaaaaagttattgttgtttgaattggctcataggttcaacattgaatatcgagcgtctcgatatattacgggactcaatcagacatccgagtaaaaagttattgtcgtttgaattggctcatagcttcaacattcaatttcgagcgtctcgttatattacgagactcaatcacacatccgagtaaaaagttattgttgtttgaattggctcataggttcatcattgaatattgagcgtctcgatatattacgggactcaatcacacatccgagtaaaaagttattgtcgtttgaattggctc

SEQ ID NO: 193948 - DNA, 449 bp, Glycine max
  unsure (1)..(449): unsure at all n locations
agctnttaatttatccaaaaatttacctactagttttgctaaatataagntgaaacattaatatatgtggtgaatctgagttgaatcccatgaaataagatttcagattttagcattgaagggacaaaatgtaattttgaaagttcccaagagtatcaatatgtgcatctatcgttttcctctcttttattccttttacaagaagtattttatagacaaaatttgtaataatcttagtggttgttttggtgcatcaatatcaaatactaaataattactctgatgcttgaagcgtgaggcaatcttattctttctaggaggtaattatggtgcagaagaagcgtcattccaacaccaaaaacaagtgggatccaataatcagcttgtttcgtttgcgaatctgattttcctcaggattaaacacctataacgttaggtggaactggaac

SEQ ID NO: 193949 - DNA, 421 bp, Glycine max
  unsure (1)..(421): unsure at all n locations
tctcatcaatatcatcattccacgaatcacgaaatgtctccattttgttaataagttcactacagctgatacacacagatctttccttcattcttgtaactttgtgagtcctacattntctgcgtatttatcacaatactgcaaaataggctcaaatgttatattatatgtcactaacatttgcatgccttagcatataccaatccacaaataaacttacatcaaagccttcaatttcatgggtataatgtttaggaatgccagcttcttcttttgaatgataaaactccttgatcgatttcatcatttcctcatatgatggcaaagcctttttcccagaaagcagttgagctacccattttccttgcgactcacagaaagggagccccaggatctgcaccactcatcaaccaatgttact

SEQ ID NO: 193950 - DNA, 484 bp, Glycine max
  unsure (1)..(484): unsure at all n locations
agctaagctccttcaactgcacaaggctcttaatattngaagagtatccttgnggaaccttcacctgacgaagacactgacaaaaacttatcttctcctttttggacaaagtatgacaagctggggcaagtaaattttcttcccatcaaaccttggatgcaactgtgatcgtatccccatcttagctagatcttgatgggtacttaacccatccttcgtcttgccttgaatgttaaggagcgtcccaatcacattgtcacatacattnttctccacatgcataacatcaatacaatgtctaacgtctagatcagaccagtaggatgatgaaagaaattggacctcttcttccatatgcaagtcttacttttatccttcttttgggtctttccaaatacagtattcaggtgttgaacccactggtatacctgctcactagtcaatggtatcggtgcaatatcatgctcctgacttccattaaaag

SEQ ID NO: 193951 - DNA, 507 bp, Glycine max
  unsure (1)..(507): unsure at all n locations
acatattatactaagcttaagtataagctaagtaactaacctaagggttaaaacattatttataaacaatgattatggaagcttacttggatcgctgaaattggatgcatagaacgaagcatggagagcaagcaaagagtgaggcacagtgcagagataaagcaccaacgaaatgccaaaatgcaatttaaaagcacaaatgaaaatgtaactgccaaaggcagatatgccttatttttggtggtttcgaatgccttgcttagtgcgtcaactcgctaagcgagcatacatgatgtttaagtttccaaacacatgcgcttagcgggcaaactcgcttatcctaatgcanaaattcanaatttccagagaagactttgggcttatcgtgaagagtcgcgcttagcgagttctatagctctgactggcctacaactttcgcttagcatgaagtgcccgcgcttatcgaataaaatctccttatatgcagtagtgggatgtgcttaacac

SEQ ID NO: 193952 - DNA, 453 bp, Glycine max
  unsure (1)..(453): unsure at all n locations
agcttgaaggtgtgtagcccaccatcttttcatattataatactggtaatgtgtttactatcattgtcatcatntttttctccgtcattgaggtgccacttgagctgctaagtctctccacctttgggcgtattcttttgaaagatttgtgccccctttttgcacatgttctgtagttgcatcctatccgaagacattatactgacactgcctaacgaaggaaaccactaggtccttccaagaatggactcgggaaggttccaagttagtgtaccaggtaacagctaccccagtaagactttcttggaaggaatgtatcagcaattcctcatcttttgcgtatgcccccatcttccgataatacatctttagatggttcttggggcaagtagtccccttgtacttgtcaaagtccagcaccttgacatgggaggtgtgatgatattgggtact

SEQ ID NO: 193953 - DNA, 464 bp, Glycine max
  unsure (1)..(464): unsure at all n locations
ctgaattacaatgttccattagtttcaaatggtgttatcgattactagattttggtaatcgattaccagtgtgtttgaacgttgaaattcaaattcaattgtgaagaatcgcatcctttcacaaaaatgctttgtgtaatcgattacaatgatttcgtaatcgattaccagtgataagttttgaataaaaatcacaagatgtaactcttccaatgtttctcaagtttttctaaaggttataactcttctaatggttttcttgaccagacatgaggagtctataaaagcaagaccttgacttgcattttataattcgttcataacaattattacaatcatttacaatctttgaatctctttgaacatcttcttcttcttcttcctttgccnnnaagcttctaaagatttctgggtttctaaaccttgaaaacaaaagtggttattcatctttatcattcccttct

SEQ ID NO: 193954 - DNA, 186 bp, Glycine max
tccccccaatctaacaaccacaaaatgtttaacataaacaagtattcacaataaacatgcttgaattgcgtctacaaacaatgtattaatagtccgaaactttttggttaaacaactctaaatataaggagcggtacccactcccatttttttcttaccagctgatacaaccaaaacaacaccact

SEQ ID NO: 193955 - DNA, 454 bp, Glycine max
tacctggagatttctaaactacagctaccactaacttaagaactttattaggtggcatgaattttgctaataaactagggtaggccataccttaagtagaataagcattataccttaaatgaacaacctaacaacttaattatatttgaagccctagctcatacatacatgattgtgtataaaggaattgaatccaatgtaatgattcgcatcttatgtgtgtgtacgtatatatagatggatagagaatggataatataatatgactatgcttgtgaggagaaaaaaaaattgagattaaaagactcgcttgaaaatacacttaagtaatggtggcgatgaatattatcttcataagtcactggtgcactactattaacatacataacttgttagaaatataatatatttctactatattatatatgatacacacataagaagttacgacaga

SEQ ID NO: 193956 - DNA, 447 bp, Glycine max
  unsure (1)..(447): unsure at all n locations
cagctttgtgcttacatactacatttatatatctgcccaanaccttgaaagntgtatcaatttgatgtagttgttcttttccggtgaggctctagggaggttctttaccctattgtcctattggacagagtatgtggggatcataaccttgggcccctgattaaggccagggaactaaacacatacgacttttactatgattttcgacatatccattaaaattaaactcgaatggggaagttaatactgcccaatgactattcacaagagatacaagttgatagatgcatttttggagagactggatatgctattttntaccgagtatttatgcaacacagttgcgatgggcaataatatttgaagggaccttttctttttgtagtattcaatttcagtgcttgctctccttgattatcttncaaatttgaaacaggtattggagtc

SEQ ID NO: 193957 - DNA, 463 bp, Glycine max
  unsure (1)..(463): unsure at all n locations
tgaacaatatacttgtccttcattaactgtttttttgcttgtcggcctctctcaacanagnnactttgacacctactgtacgttgatttgaccaatgctgttatgggaatgttgtgacaatcctttaaaaccttattgatacattctgagaggttggttgtcatgtggccatatcgatgtccttctctatcataagccatcatccattttttctttgatatgcgatcaatccatgttgctatggctggactcagttgacgaaatttttctaaattttgatcaaaaatgtgcttgcaaggagtgtaggctgcataaaattagttatgaataacaattttaagtatatatgagagttaaataaacgtgaccatcaaatacgagatcttacccaatttcttcaacatttctttttgtttggcattattgaattttcgattgaagttgttgtatgtgtcgcatgcat

SEQ ID NO: 193958 - DNA, 453 bp, Glycine max
  unsure (1)..(453): unsure at all n locations
agctngcattattcgcacagttattgatgctatctgtgaagaatcatcaccaccttcaaattcctcgaaaagttgcttcaaggtggattggtagctgcaaagtttaaataattcggatcagatcaaatatgtgaagatcggatctatgatgaagatcctgaataaatttataaacacattggagaagagtacacaagcttaagtattattcttcttacataaggaaggaaaactgaattttaagaaataagttctcttgaatataaaaaatataaaaaaaaatcatgggattgcacaattccattttagacatcaacattntataacatggaaaacaacactcagtacaaaatagttggaaatcttgaattagttcaccacatatcaacaggatggttcagtaaagatgtgtacaggtttaaaacaacacatttgcaagactacagacatgct

SEQ ID NO: 193959 - DNA, 442 bp, Glycine max
  unsure (1)..(442): unsure at all n locations
tctgctganaccaaccagtgtgcatcactaccctactcttcactctntccaagaaccctnttggcaatacttatttntagataattaaaaatatttaattaaatgtatttaatacttttaattaattttgttaagatatttctcactaaaattttatctgtaatttataaaaatcaaaataaatacaacttatgtttgcatatcattttcaacaaggacatgtaaaatattttatattacaatttatctctattttatataattaaaatattcctcatgtacattttcatttaatgcatgtgcagaaagaaaatatcatttttcaaaaacaatagaacccttaattcacaaaatgggtagttgaagtgactccgcaccaaccaaccatctctacccaccgttccacgctttcatttaatatataaattataaacttaaatac

SEQ ID NO: 193960 - DNA, 465 bp, Glycine max
  unsure (1)..(465): unsure at all n locations
agcttgngatctgtataaaggcttgcatggagttgtccacaacatggctagtcaccacanaggctagtccatattttctatggagggctataacaacataacagacttgccttgatgttgttgcaggggggaaactcatgcataaattaaccaatgcaacaatagaaagtattgaggccatggctttaaatgcctactggagataagaggattcttaaaaggtcgattggaatgcactaggtggaagccagatcatatagcacaactattcataaaaaatcggatgttttggcatgggtgtgttcttcatcaaagtattctttttcatccctttgcaagcttctttttgtagaattntcacattttccaatccatgtcctgatcgaatcaaacttaatagaattacatgagttttgcccattaaatcacatgaattgaatanaaggcaaggcaaaaatcttgtca

SEQ ID NO: 193961 - DNA, 494 bp, Glycine max
  unsure (1)..(494): unsure at all n locations
actcagctttatagaanggttgttcctaatntctctacaatggcatcacctctcaatgagctggtgaagaagaatatggcatttatctgggttgaaaaacaagagcaagcctttgcttttctcanagaaaagcttactaaggcacttgttctagctcttcttgatttttctaanacttttgagctagaatgtgatgcctctagagtgagagttggagctgtattgttacaaggtggacaccctattgcttattttagtgaaaaactntatagtgccacccccaactaccccacctatgataaagagctntatgccttaataagagccctccaaacttgggaacattaccttgtttccaaagaatttgtcattcatagtgatcatcaatcacttaagtacattagagggaaaagcaagttaaacaaaagggcatgcaaatgggtagagtacctagagcaatttccatatgttatcatatacaaaaagggaaaaac

SEQ ID NO: 193962 - DNA, 458 bp, Glycine max
  unsure (1)..(458): unsure at all n locations
agcttattattctattaactgatgatccataatatgtatctngatgacgcttcgagtgcaacaaagttgcaagatggtcggattaaagtgtggattcatgttgcaaatccaactaaatatgttcaacctggaagtattgtggacaggtatctggctgagattcaatgagattatttattgaatatttggcgttgtgagttcctctataatgtgcttcatggcttgcagggaggctatgagaagaggaacttcttgtttcttgcccactgctacatattctatgtttccagaaaatcttgccatggtgggcatgagtttgagacaaggagagctttgtaatgcagttactgtatcagttgtgctgcataatgatggcaggtcaatttaaatgcactgttccattgtgtggagaaattaacctgattactaggagtttacatcacattagaaagtgagat

SEQ ID NO: 193963 - DNA, 441 bp, Glycine max
tgcatatggagaggttccatcaaccgccctaattccttgatgcttggtggatctaaacttataaccttgacttggtagaaccatttgccggtttgatttgttcccatgcttgctaaagtgagacaaaagctggtgcaaatcaaaactccgatatctatgggtggaatggatgaatgcatgaaggaatgcatataacacagatgccatctatgaatgcgggggtccagtgaattcattcccttcttatacacaacgtatatgggtaacaaagtgccccaacgtacgtctttaagaaggcaacacggaccctacgttggtttgtctacagaaaggatcaatacagaacccatatgcgatgcctatgcaaaagacacaatgcatgaatgtacaccatatgaccatattcactgaacatatgccaaatggtatatgatacttatg

SEQ ID NO: 193964 - DNA, 508 bp, Glycine max
  unsure (1)..(508): unsure at all n locations
gtgatcctctcagtcacctgcggcatgcaagctngnttcttgcaattccaagatactagagagtctcctaatatgtgggatgtcccacttgtgttntttctatctnaattgcaacctataaaatcagaatctaaaaagcctgttagatttaaggaggtacctttgggatacaacaaaccaacattggttgtccccttaaggtacttaatgatccttttgacaactgttaagtgagattcctcaggattagcctgataccttgcacacaagaaaactctaagcatgatatctggtctacttgcaattaagtagagaagtgattgttagagataagaggagcaacatgaagactaaaagcttgaagatgttttgtcttttacatgcctaactcccttgagtggcatttgtattagttgttatattgaatgttgcatcttagtccatatcatatcttttgtgcatcatgcatcatcatgagtaagtgagaagaaaaattctaagtagaaaa

SEQ ID NO: 193965 - DNA, 259 bp, Glycine max
ctcaacaatggttatactctgcccatatcagcccttctcattacccactaccctatcaaccaagaacacccgatcatccatggtgtcacccctcaatcaaccataaataccatctgccacacaaccgataccatacaccacccttaacatgagccaaagcaccaaccagcgaagaaattgtctagccaagaggcctggagaattcaccccaattccagtgtcatatgctaactgactcccatatctactcaataatgca

SEQ ID NO: 193966 - DNA, 403 bp, Glycine max
  unsure (1)..(403): unsure at all n locations
cttcagtcacctgcggcatgcaagcttgcatttgtcttgatcttgtgatgaaaccttttattgaatgcatacnaagatggaaaaaattagcaaataaaaatttcatcactataagaggttataatatcataaatttatcattcatatgcgtatcaaacacatgaaaccacctatagtttaataaggcataacaagacattccaacaccttaaattcttgcaaacaactcaccaaaaactcatattaaggtgaatctcatgatctcaacataaagtcaactctaatcataaaatattttcatctcaaccataggcagaattaccacacttcattcctcacaaggctagtgtttctcccagtatacaagtgtcttactaagagtgtgtcgcaacctaccctttgg

SEQ ID NO: 193967 - DNA, 449 bp, Glycine max
  unsure (1)..(449): unsure at all n locations
ngcttgtggggcttctatggaggctggatctatgagctacaatgatgtccttttatggtgattatccaccatggagatgcagcggaagacaaaggagaagaggtgagaggaggcgccatccactatggaataagccatggaagaaggagcttcaccaccaagatgagccttggataagaagctcggaacgatgtttcaatggaggaaaagaaagagggagagaaagagagaggcgggagcactaaattgaaggaataaaagagggagagaagtggaacttttaagtatgtctcacaagactctcattcatcaaagttacaacaagtgttacacatgcttctatttatagactangtagcttccttgagaagctntcttgagaaaacttcctcgagaatcttctttgagaaaacttcttgagaagctagagcttatctcacacattcctc

SEQ ID NO: 193968 - DNA, 408 bp, Glycine max
  unsure (1)..(408): unsure at all n locations
agcttatggtggatgataatttgtgaatgaatgttattattaaatcctttgacacttcttgaatgataatgtgtagactgtnttactctaatcttaatggtttttagtacattatgggcacatgaaatttgctttttttttttttattttacttttttgcttttatgggtgatgtaagggcaacttaactttggtgtaatgaatactgctgtttcttgttttgaattgtcttaatctttacgtgatgtaacaaacctgaagattgttctatcaatgttgcttataaataataacagtttgtagggaggattaaaaccgccattttcgtatgatctctactatataaattttttgttaattttggattggcttttgatcaactctaatttaaggtacatttatcttatt

SEQ ID NO: 193969 - DNA, 417 bp, Glycine max
tataaattattatcaatattatcttccaactccagcatgattctacctgacgtggggtaatgacaggaactctgagggcaagtgctcaaccaagctcactgatatcacgcaactttttccaatctagcatcccagaagcccaaaaccttgttgtccaatcaatagccttcttggaccacaatcttctaatatcatctttttccatatgaccaacttgagcaccatctttatcaatatacagccattccttatgtggttccataaaagcactagcatcaattatattggattgaagggaatatatgtcctctctgaagtttcatgaaccgcagtaagcagatcaacagctaatacacaaccttcaactagaacacaagcctcaacatttgataagaccttcatcactgcctcgaattc

SEQ ID NO: 193970 - DNA, 501 bp, Glycine max
  unsure (1)..(501): unsure at all n locations
gatcttacagcaccgcggctgcaactgtacaacatactcactaactgtttgttaccgaanaatattgctgagaatacctcatcaccacaatttggatacaaatgcgatccacaattggttaaatacttctcattcgatgacaatggccctggtgcatttgatggttccggagcatcttgtgaaagcccgattttgaccatcaatgtggaactaatcatgaaacataggaacatttgagaaatgttgctgaatgtagccatagtttgatgatgatcaaaggtcttattgttggtaatgactaataagctttgatggctttgaaatggttggtatgaagctatatttatagttcaaaagtagatttaacgtctaaatgtgaaccgcccggtcttaattgagtttaatgaagaaataaagacgtaagttaattaattaatgtctacaaactaaaaaacgaagaaactttcggtaactcacatanttacgtttcctccataattt

SEQ ID NO: 193971 - DNA, 396 bp, Glycine max
  unsure (1)..(396): unsure at all n locations
catccctattatatgatgtaacacacttgcctaatgaatgtgtgccttttgacggtgcactgaatgatgactgaaaattcaatatttctgtgcatgatgcccgcccgttggcttgcaccaaccaatcggatatgaccggaatgattcttgccatatcattggcttatgaaagccgcatcctacattaccttattgttcacgttgtgcttgctagatcttcaaatcttgctcaggtttctgaagaagatctcattgtcatgtgggcctttcataaacgtttacaaattgattgggcacaccatgatatatatctcatgcataangcatcgcgtatgaatgcaccttcgccttatccttatgatattaccctttctcttcaacacttcaacatacctc

SEQ ID NO: 193972 - DNA, 498 bp, Glycine max
  unsure (1)..(498): unsure at all n locations
gatccttcagtcacctgcggcatgcaagcttaccattcccaggttttcngaaaataagttatggagaaaagaataataaacattactgtttacaaacagctgggttctaaatcatattcgcattttccaaatagagataactaaggccccttgagggtgccttcacaagaattagccagacatagtgagattcatacttacagtttatcggagaaaacttttggggtagagggggaaagatgcanaaaagaacttgatattattgcacatacaactattacaagcttctctttctaagtttctctctctctcaatattgggtatgatattgttcagcgtgtgtgttcaactgaacctgaacaccctttatatagagaaagtttatacaacaagacaaaaccccttcagtcaagaacagtaaaattactgttcctttactctgtcacagggctgtcctttacanatacatttattacagataagctcaatgtctaatct

SEQ ID NO: 193973 - DNA, 486 bp, Glycine max
  unsure (1)..(486): unsure at all n locations
atgttatggttgaaatcagaaagacaacattgtgagtttagctactagataattacttgacctacatgagtcattcttactctaatcattctacgaagaagcttatctcagataaaccttcaacctctttttatgttctttcagcaacaactggtatatgaagataattaataattactgcctgtttgtgaggtttgctcataatgtgccttaccttaccatgatgtatttatgttactcttgcatgtaccccactacactcagactaatacacccttagcttatggtacaataaagtgaagaataaaatttcacatagtctacacttaaggtgtagtacttttcanaaaaaataatcaatcaacaaagacctcataagcattcacaccacaaacagggaacatcacaacccagcatagccaagttgcataaacaaagacatttacctacctanggagtttcagtaagtcctaaatcactatgact

SEQ ID NO: 193974 - DNA, 272 bp, Glycine max
taccaaaaaccaccctatagggagacatccccaaaggtgttgggtaagtactcctatgggctcatagagcattctcaagtagcttgctccaatccgtcctgctgggttgcactaccatctacaacacttgcttgatttctctattaaaaacctccgcttgcctattagtttggggatgataagttgtaccaactctatgcacaaccccatacttttggagcgaggatgacaatgacctgttacagaagtggctcccctattcactgataatg

SEQ ID NO: 193975 - DNA, 398 bp, Glycine max
  unsure (1)..(398): unsure at all n locations
tataattgtaattttcttgtggataaatagttatatttctctcttaatgtgnataaccctgataaatatctcagagtacaaaaaatctatttggttgatagctttcgtccgttatttctaatgacaaagcttatgtgacacatttagagatgaatatgtcagcattttacatatttaaagatgaaaatgattatttacctaaaatataatttaatctttatttttcgtagcataatattacaataaacacttaaaaaatagataacaagcataagttaaaacaaacataataataagcataatntgcctgttgctntgaatttccaatgtgatagcattttattcaaaatatgagattcaaataataatgcacaactattaagttaatccttataaaa

SEQ ID NO: 193976 - DNA, 330 bp, Glycine max
  unsure (1)..(330): unsure at all n locations
agcttatcagttgagtaggcgtttcttctactctcttctntngacatttataangttattgaagagcatcttgaagtcaagttgaagaattctagtgagagaaactagagcaaaatctctgtgtgagaaatctacgttttctgctttaaccctctttgttgagagtgacccacttctataatcaacttataatctataatagatttgagatagaaatggcataatttattttcctgagtggaaaccctctatgaggtgaagatctatgtctatgtagctcaaaaacacaaaaatccatttattgttgtaagtctagcaatggctggcaag

SEQ ID NO: 193977 - DNA, 405 bp, Glycine max
  unsure (1)..(405): unsure at all n locations
ntagtattcccctccccaaccagtagcaattatgttgaacctatatagcaatgataccaaacagatgatgcaaaagagcaatggaataacaaacgtaccatatttcctcctccatatgacaaaaggtgaattgtgatccaaagcttgtatggctatgttccgacttcccaagatagcttttgttggaagcctatgtaaaatcttaacgtttctcgagattaacaattataagaaaccagctgaattttgaaacctatgattctcacacaatcattatagagtaagacatacatttgtccatagtgagattcctaccgagtctttggtgtgtcttgattccttgaaaaaggaaagaaacacaatattgctccattgacaattcttatctctccatgttgtgatggc

SEQ ID NO: 193978 - DNA, 431 bp, Glycine max
  unsure (1)..(431): unsure at all n locations
agcttggtcataatanaaaaatttccaaattctttgaatcattaaagaatttcatggttgaataaagaattaaataacacagcacagacgtaacacataagactactttaatggctttggccatgataaatttagctttatagattaacatctctgataggaaatcatgcataccttgcaatatttgcttggccaatgaccccacagcaatgtaagcatttgtggcataaggtgtatgctgaaattcttctttctacatcaagagaaggctggctctaaatcacccactaaaaatattgaagtatatatttttttactataaggtcaactgtgaatggttgatgctttaaaattagaagttagaactgatagtcaatgccatccagagaaaaattattatggaatacattcctttatatttacaattcaaa

SEQ ID NO: 193979 - DNA, 433 bp, Glycine max
  unsure (1)..(433): unsure at all n locations
ntacccanaatgttctgttatcaccgtaacattttattcaatgttaattataaccctatcaaccatntaaagctagtatatctcatcatcaggaatatctggggttacgaatttcctgcgatctttacttatttcttcatagtatatggttgatttcaccctatctggcactggcatgagaagaataatgctatctctatcgattacaccatcaataattccgtattccactgcttcaattggagacatatatttatccctatcaatatcttattgcacttgttcaaatgagcgtccagtgaaactagatataattcttgtgatattattcttgttgtgcataacttctatagccctgaatttctacatctatagcttgtccactagcacctcctataggttgatgaatcataattcgtgtatttggcataac

SEQ ID NO: 193980 - DNA, 436 bp, Glycine max
  unsure (1)..(436): unsure at all n locations
agcttcagaccaaggcaattcaaaatctaggtatctataacccatcaatttagtggattttcaacgtttgagaagtgaaaatgagaatggggtaatcttggagtaaactctcatctcaaacaattctataacattaatttaaacttgctcaaactggttttacggcgaaaactccaccgattcaaaatttgacccctcaacacccaatttaccctagaaatggctcttgctttcaccttggtcactcatttttctcatttgctctgcccaagctttgctacaagtcctaattgacattttaaactaggatcaactcactttagcctccaattaccactaaccccaaatttagcttttcaaaccctcnaaacctcacacttgtccactcacatcactaccattttcacatttaaccctaggttaactctccccatca

SEQ ID NO: 193981 - DNA, 464 bp, Glycine max
agcttgtctcaatggttatgcgagacagagaccaacatgttagccatcatcaacaaataccaagaagaattaaatctagccacagcccacgagcacaaagtggtggacgagtatgcccgagtgtacgcggaaaaggaggctagaggaagggtaattgactcgttacatcaagaggcaacaatgtggatggaccgatttgctcttactttgaacgggagtcaaaaacttccccgattgttagccaaggccaaagcaatggcggacacctactccgccctcgaggagatccacgtacttctcagctattgccagcatatgatagacttaatggcccatatgattaggaaccgctaggaaagttgtattgtcactcagatcttgactaagtataactttctgaataagatgagtttactcccgagttttactccaaaaatcagtgcgaatcaaatcactctcacatt

SEQ ID NO: 193982 - DNA, 471 bp, Glycine max
  unsure (1)..(471): unsure at all n locations
gatcttaagcacctgagctgcaacttatcattctttatcttttgcagtaacaatctataaattacataaacacaagaaattccacattcagaacaaaagaaaatgctcactttgttgagttctaaaacaccttcacccatcaccatcatgccttttccatgttcaacatcattgtttcctcctggttctatctctaccatgacattatcattatatttcatgttgtatgagagcactcagcactcactcacttatccaccactgccaccaacttgttatgaatcttgatccctatgtagccatagttatggtgaaatagtggtaagcttgcaagccatgcatggcaattgtgttgccccaggcaatacacgaccagttcttatattcttaccaacacacctcaattgtggcttcatcttgttatactactacatcccacaactagagaggtngtctaaattataccataca

SEQ ID NO: 193983 - DNA, 402 bp, Glycine max
  unsure (1)..(402): unsure at all n locations
actcagcgtcacccgattaaatatcttttcctgctttttttttcttaggctatgatatgcaacggatgcctttattgtaatatattaaccaccatattaggatctttaattttcatgatcaaacatggatactatgcgcctaatccgatgctacactgcggtcggattacttattaggattacgagctgggcattggatcagtgttgtttgcaaacacactggtatattttcatctttttaatcattataactcacttggatttacgaatatctaattatttattatctttctccgatactatgggttttcttctctcattcgtggactaatcaaactaaacttgaaagatatccactcantaatatcttatagtgatatatgaatacgtggacaacattac

SEQ ID NO: 193984 - DNA, 418 bp, Glycine max
  unsure (1)..(418): unsure at all n locations
agcttattcatacacctnccatgtggtaaactactccaatccattttatattcatctactccaatccacatgacatgattaatgtgtgctacaatattcctttccaacaaatcctaataaaaaacaagatgaatattgcactgagatataatgatatataggtgaaggcacaattagcaaagtgatagcataatttgatatgcagataaagcatgttggaaatattaacacctctgcttataacatanaattagtaaaagattgtaggaaaaaaattgatggctaagggaagatttagtaaatatctgatgcctgacaactttaactgaacaaaaatatacatattcaaggacaaaagttaaataattacccgacttaagtactcaacaacatctggaagaaagtgaagctcatcttt

SEQ ID NO: 193985 - DNA, 468 bp, Glycine max
  unsure (1)..(468): unsure at all n locations
tactaagcttgatctgtaactaacattggccctgggtgatattactggtgtatgtcgggttgatggcaaaaaaatataactcactgattgtaatgttntatgcagcaatatgtctttgttactgcggatcatgatcctcttctcagggttccattaacaccgactaagtgcttatcgtctgatgaattggatgatgaacccaaaaatttggagatctcgcccgcacaagtttcctcaaacaaagtagccaggcattatcagcctgaatgaattaacctgttcacaggtggtcttggatgttttttttatcatggtatcacgggattgtaatattcgtcaaaactttgctatctgcttttgtgtaggtttaacagaacaatgtcatatgttatgtcctacttagcttaaatcaaacaatcattcttttnttggtttcttttcttaatagtctacgagattgcaatctgt

SEQ ID NO: 193986 - DNA, 498 bp, Glycine max
  unsure (1)..(498): unsure at all n locations
ttaagtcacctgcggcatgcaagcttgtanacaaaagaagatgaaaataacagatgtttcatggcggcatanggtgacgtcnacggtggtgcaagggaatgttgttgactgcgaagagtggggactgaggacctttaaggttttcaaaggagtaagatagtcaaatgtgtgaccttttctttgttttttggtcattaatgttaaaatgacattgtttagagtaagtttgtttttttaaaaaaagttgcatggtccagctcgaatcagcaggtcaccacttcaaccacactaggtcaacaagtcacaccgagttgactgcataatcgatctaacatctanacccgattggtcatacctcaagttcatagtcgaatcagtctaggttttaaattattttttaatcattggatatgatcgagatatgtaccctaaattgttntgaatatcttttacattntntttttgcttaattggatatcttcttcttttattgatcat

SEQ ID NO: 193987 - DNA, 444 bp, Glycine max
  unsure (1)..(444): unsure at all n locations
ntgttggatttctgccatnntggctctatttgatacctatccatataaaataataaatatttgtagcaaaaaaatatatacaagtgctttacaagatcgttagtgcaacatttgagtcccatgtccttatttctaaaagttggatgaagaattttccttgagaaatcgaccaccccatgtccttatttttgcaaagttcttatttctaaacttttttctacattccatgtgatgaagaatttgacagtctgtttcttcggatggggaccatttcacaaaactctaagcttttcagaagaatatagaanaccaccgcataatttgttntcataattatacgaccttatgatattagtcaatgactatttaatatatttttttcgtacctctgacgtctctgactatatataaaaattagtaccaaacttaattcttttatgtctg

SEQ ID NO: 193988 - DNA, 480 bp, Glycine max
agcttgcccagagaaggaatctacggaggaaatgtcttctcacctcaaagactggatagcggtttctaatgactcctctgcggcctccacataaggcatagaggatgggcagctcaccaagttgtcttcctcgcctgatacgatgaccagatgcccttccactacgaatttcaacttttggtggagtgtagagggaacaactcccactgagtggatccacggacgccccaacagacagctgtagggggggttaatgtccattatttggaaggtaacttggcatgtgtgagggcctatctatactgggaggtcgatctctcccctaacctctcggcgggtgccgtcgaaggcacgaaccaccattgaactcggctttaggtgggaggcattgaatggtaatttctccaaagtgctcttaggcatcacgtttaaacttgaaccattatcgatgagcaccttggctacaatatggtccataca

SEQ ID NO: 193989 - DNA, 451 bp, Glycine max
  unsure (1)..(451): unsure at all n locations
ctaagcttctgctttgtcagtcaagctttagaactcattatatattgtttgaaactgaagaanaatacanggtgacaattntcaatgcttcttccaaaacaaatattaactaatataaaanaataaaataacatatgaatgagttggtgttctcttaaaaatgtccgtggaggtgaaaatattacagcctgtttgatctanaaaatcaattttggttttaactatattcatgtttcacaaataattataaaaaatgtcatcttattttcattgttttagagaaaatgatgaacataataaattaaacaaagtgaaaataaagtaacattcttataatcattcataanaatagagtatagaaaaccatttctcanactaaacaactttgagcgtgtattttgaaattaattctgttcactaaaattaagagaanaactgaactgaccatgag

SEQ ID NO: 193990 - DNA, 483 bp, Glycine max
  unsure (1)..(483): unsure at all n locations
agcttgcatctatgttatnttatgaaatattttgaatttcaacaaacgtatcatcagttaggggatacaagtagcgcgagtagtttagacttgtttgtgaaaaaaggagggataaaaagaaacaaatcatatctgcgtaaatatacattatagcgtattgatatataaaacctgtagtattaatctttaatcgtaatcgtaatataaaaggataaaagataaaaaggataaatgctaattgatacaaagaccaatgatatgaaaacaaaccaagtgaagattggttagtattatcaaattaatccaacttaatttcagtcaaattaaaatagttacttgtttctcanaaaaaaaaaaaaatctacagttcgtggaaaccattcttcttaccaaatagtcactactgcatatgtgactttttagtaacatntttttatttaacacttaacananattactaaaagtntttatcatattaaaaaa

SEQ ID NO: 193991 - DNA, 437 bp, Glycine max
  unsure (1)..(437): unsure at all n locations
gggtttataggtacacatactctaatacatacattactgcaacatanttgttagtcccttttgaaaagtagagaaaactaattgattttaactagctaattaaactcgcggaactcgaaagttcaaatttaagtcgtggtggttagttatatgctcagtattgtaaaagaagtactattctttgtttctgttttataattatctatttaattcttcatatactaatttactttattcctttctttgtaaagtggagataccgatggaagaattctcgtgacttcaacaagatacactcttagaaagttggggcttgngattgttgaagattggactccttggttgatacacccaatagtgaaaatagcaggagagagttgcaatcagcatagcccaaaaggcaaattaacatccccacacgactganggagtacgtg

SEQ ID NO: 193992 - DNA, 414 bp, Glycine max
  unsure (1)..(414): unsure at all n locations
agcttgccaagtcaaacactgataaaatttagatacttgtggaatccttgctggtttgcttgtaagagatattcgcacttttattttggtgcttgaagcaacaagcaaggtaaatcctagatgagcttgagaccctaatatatgccttaacctcatgttattttcctcttgtattaaaagggtgtgcacttaactatcttagaaacaaagntaacctattgctggattcccagacccaaaagaaaattaaacttgggtataatttcatgtgatgtccatatcacaacaatttggggactgtcttttaatcatgtgtgtttgggcatgcttgctatacacaacatattttatacactgggctgtaaattttcactgtggtcgatttaaatntcgatctatcttctagcttaaatc

SEQ ID NO: 193993 - DNA, 374 bp, Glycine max
cttgcagggagtggtgcatgtttctttttggactgagtgagtgcacgttctaataatcccacgcacatctttttgttgaataatcggtgtaattattgtaaactataacaactctatgattaccatattgctagacatatttttaggaaaataattatgtcgctctatatgaattttacagaccacgtctatttaaaactattaataatatcggatagacctaactatgggccattttcattactgtctcaattaacgagaaaagtttaacgaaaacagttcacttctggatcatgcttgtatcttattggcatcatattattcaacattgcattttagattgacgggattaattgcttacttttttattaaat

SEQ ID NO: 193994 - DNA, 443 bp, Glycine max
  unsure (1)..(443): unsure at all n locations
agcttccttttagtgcgtcacatttaaagccgagttcgatggtggngcgagnccttgatggtactcggcgggaggtgatgggggaaatcgacattcccatttagataggcccccacacttgcaatgtggtgtttcaagtgatggatataaaccccgcctatagctgcctcttgggaagaccgtggattcatgccctgngagtggtcccctcaacgcttcaccaaaaattgaaattcgcagtgggtggacttttagtgatagtatcgggtgaagaggatatgctagtaagctgcccttcctccgcaccgtacgtagaagcggcagaagaatcattggaaacggctttccaatcctttgaggttgtgagctgcgcctctgtggaaccaagtccgtcgctgccttctctctccaacacggccataatggtggcacgtgttatgctc

SEQ ID NO: 193995 - DNA, 464 bp, Glycine max
  unsure (1)..(464): unsure at all n locations
ntaattctgatgaatttcanagtaaaaataagtattctagagtcttttatatgcaactagttggtaacccgtgcatacgcacgggtcacttgtaatttattttgtatgaatatttatttattctataatacagtattaaaatgaaaaatagtacgaaaataaaaaaatatgtaacattaataataattagattgtttgcataaacaaaaaaaaagcaagattactcattgaccaaggtaatgttaataaacaaaacaaacaacataaacttaatttagtcactatcactgtcgttccaatccttttgacttctaataataatttcccaaatttgttcatgacgcttgtagtagaatgagatttcatcaccataagaaaaattactttctttaaggaatttatatcaaggttgcacaacatatattttcccaattttaatatcaagaacgataacattccactgt

SEQ ID NO: 193996 - DNA, 433 bp, Glycine max
  unsure (1)..(433): unsure at all n locations
agcttctcccccattttggctatattatgggcgtataggttgagggaaagaggccagcaccctgngagctcaggaatcacttaaaattagtgaggagaagaagaaagaagganaaaaaaatccaagccaagacgcttccgtaacgcttctgagacattttcatcatcaattccgtggacattcttcgccattcttcgttcgttcatcatcgttctccgagcttcaactggttagtttncgatttcaaagctttcaattcattctatacacccttagtgggccattccttctttgtttgctttcctcttcatatcagtatcctcttcttccgtttttaatgagcttcaaccgatcatttaagccattgtctcgcctaataaatgataaaatgaatatcaaccgatcatttgtgttgtaatctcgtttaatcact

SEQ ID NO: 193997 - DNA, 481 bp, Glycine max
  unsure (1)..(481): unsure at all n locations
tgtcgctagtgttagtcgatgagtatgactaactctngtgtatataacctgtgtatattgnatcaaactatcccaatatatggttgtcttgtaatactataagtactttttgtaaatataggtaatagataatttatacttttgttttgtgcgtttaataatcaatttctctcaatttcaggttaaataggcaactttggcaaagtgttgtttttcactcttttgctaagccaagctgctggcttagcgagaattcgctaagcgcaaccttcagcggctaagcgcgaggaagaatccagaagaagatgagctgtcaagttcgctaagcgcaccgctccaggtcatcaagtgcactgcttcagctcatccgctaagtgaaacaagcgtgctaatccaaaattcacttatgcgcgctaagcgatccagatctgcgctatcacacgagcatgaacaggccacctatttagcctgaaatagattg

SEQ ID NO: 193998 - DNA, 438 bp, Glycine max
  unsure (1)..(438): unsure at all n locations
agcttaaagtatgcccgagtcattcatccctatgagatgttgnngaagtattggcgatcagaattgccattccttggattatagggttgatccaagctcatgcttttacaaaaaggttcatcaagtcaagttgaaatatggaagtaaccgtcttgcaaaattggggcaaaaaatgaatcgagtcacatcactgcttcgtctactgccaaacatatttaggattattgatgtccttgttacttccagtttcaccttgacaaagatgtcatggaccatgttgaaaatctaaattgattcaaccccatatcttgcgtaaaaattcgcaatacttcaactgtacatcattcgcatgcatccatgcttttcattggttgcattgctcgttgcattctttccttngaaaatanaataaaatgaacttaatcattgttataaaaa

SEQ ID NO: 193999 - DNA, 486 bp, Glycine max
  unsure (1)..(486): unsure at all n locations
ggtctcagcgtttatgcgagacagagaccaacatgttagctatcatcgtcaagtacgaagaagagttatgtctagccacggcccacgagcatagaatcgcggatgagtatgctcaagtatatgcggaaaaagaggctagaggaagggtgatcgactctttacaccaagaggcaaccatgtggatggatcggtttgctcttaccttgaacaggagtcaagaacttccccgattgttagccaaggccaaggcgatggcagacacctactccacccccgaagagattcatgggcttctcggctattgtcagcatatgatagacttaatggcccacataattagaaatcgttaggaaacttgtatggtctcttagaccttgactagatatgacttcctttnttgaaataaaatgaggtggtcccatgtttctactccaaaaagcttgtgcanatcaaatcactcctacatctcatctctagcatgcattt

SEQ ID NO: 194000 - DNA, 385 bp, Glycine max
agcttcatgatgaatcaagatggattcacagagttttgatgataacaaagatgatgacaaaaagctcaaaagtcaagaacacttcttgataacaaagatgatgatctcaagaatcaaagaatgggttcaagattgaatcaataacacttcaaggttcaaaaggaaatttgatttcaagaatcaagaatcaagtttcatgattcaagttccaagaatcaagatcaagattcaagactaaagattctagaatcaagagaagactcaatcaagataagtattaaaagggtttttcaaaaactgagtagcacatgatattttctcacaaccttttaccaaagagtttttactctctgttaatcaattactagactattgtaatcaatta

SEQ ID NO: 194001 - DNA, 440 bp, Glycine max
ctacgcttgcgtgatgcttgactgcttggtataactgtatttacaccttcttctttttaaatataccatctaaaaaatgggaaaaacttatgtctagttattaacctatttgtggagatataaaacatctgggtttagagatccatctatgagcctaaatcaagtctgggagacacaaaaagggatatgtagaaagaataacaagtgaatttgcatgaatagaacgcgtgagagaagaaaaagaatggacctcactatgcccattggctgcagcaatatgaagaggagagtgacaatcatagagaagggtcatagttcaagagagctgtgactatatgaacgtcgtcttacatcacgacagagaagaggccgtggtcatggttaccactgctacttatgctcttgacccatatttataatgatccattgttactcaacgt

SEQ ID NO: 194002 - DNA, 326 bp, Glycine max
tgagggagcatgaaggcaatagacctgtttttaactgacccttggacaagagacatcggtactcttattatttttgttggacaaatgtttactccagattaagaaattatgactaaacactactctattatgttttcaagttaatgcgtttattattattttaattaagaaaatattcgtacaactattcaaatatgtttattagtttctaagaggtacactaatattaacaaacaaattacctttctattaattagggtatattacgtttaaactatctattaaaaagagaaacactgattttcattctcaaacctcaaaaaata

SEQ ID NO: 194003 - DNA, 362 bp, Glycine max
ccgcagctgcaactaccatttgcaagctaatccttttttatctttctgtggtcattatgtaatacttttatatttaatgatgtttgtgtgtaactgtgcttaagaactcatttaccatgctttgccttgatatgtatatgcatgtgttttaggacattcacagtggaaacaggctgattctagaactttatggacaggctagttgttattttactaagactgtgttcgcaaccagggtgtattatgctaatacgtctacccatttttccacatgagatttcaacaagctgctagattagctaatatttggacccttgatcctaactttctgttataattcctcttacatgccctttcgatga

SEQ ID NO: 194004 - DNA, 310 bp, Glycine max
  unsure (1)..(310): unsure at all n locations
atgaagatgaagatcttagcctctttgtcaaaagattcaacaaatttattagaatgagaggaaatcaaagaagacaaaacttcaaatctaaaagaagaactgaagagtcatctcaaatcccaaaatgctntgagtgcaatcaacccggacatctgagggctgattgtccaatctttaagaagaaaataaagaagtatgaaaagaagactattggagataagaagtgaaagaaggcctatgtcacatgggatgacaatgacttataatcgtctgatgattctgcaaaagaaatggttaatctatgtctaat

SEQ ID NO: 194005 - DNA, 433 bp, Glycine max
  unsure (1)..(433): unsure at all n locations
cacctgcggcatgcaagcttnttntggaccttgaacaagcaattaactcctctttcagaaccatgctatgtgctcgtgactggtccattacttcccttcgcaacttgagttcgctattgctaccccatagagctcggcgaaatttatcccggccatactcttccttgcgagccctcttggtctcttgttcaagggctcttgcggtaattgcattctctttccgtaacccggcacactccttccaaaatgtgtgttgcggccaacttgaacttttcctcggctaatttcgcctttcctaactcgctattgagagcttggacttcttcgtcctcttccggtgcttcataactgtcttcgctgacgactcttaacttggtgagccaatctaatacctctatatgaacattcagccattcatgatagccaccaatga

SEQ ID NO: 194006 - DNA, 457 bp, Glycine max
  unsure (1)..(457): unsure at all n locations
gagtcctcacaaataattatcatgaaacagaagacttgtctagacttactccatcatatctccccaaaacgcccatactccacgaanaatcaagagggaaagaagtccacccaaacctgaaatntcgaagtcccactcgtagacacgcacttcacgaccccgaagatgccctcctttcacgaattggggcagaaatgatggccaaaggttgaagctctgtgtggagcttcaatggtggatgaggaagagagaaagctacttgagagagggagagaaaaggcttctgaatatttttggggctgagtgaggagagagaacatatncttttggtttaaataaaagggttttctctntttctattattttatataagcaatgccacatgtctccatttgagtggatccaaaagggcccactttcccttttgnatgtgacccatactcatgcacaaaaagtg

SEQ ID NO: 194007 - DNA, 439 bp, Glycine max
  unsure (1)..(439): unsure at all n locations
tacanagaagacacatgagaaagcttctctatgaagcctcacgagaaagcttctcaaggaagctgtttgagctgtctcggtaaaagcaccctcctgtattcgttaaccgctggatctntttggtctggaggtttataggacagatgtccatgatttgaccgttgcgatctgcgatatgtcttttggtgtgtgagaaacgcttcttttcccgagagcagaaacacttgagtgtttcaagtcttatttttcgtgtagccttggaaaatagtcattcctttctcctctttttttcaaacccttccccaacgtcccaagcttcttcttaccacccacaaccaccagtagccaccacgaaccgccgtagttctcctgtgaaaccccacatcgagaggaaccctttaatcggagcggaatcttctaaacttgtctctcggtttcg

SEQ ID NO: 194008 - DNA, 431 bp, Glycine max
  unsure (1)..(431): unsure at all n locations
actacgctgagcgaagaccccggtggcttgtgtcaaccttgataaattcttatcagtcagctatggtccagaatgccattgattcagccaaggtattcctacaaccgaagttggtgatcctggaagagaattagcaaaggcaccaacaggatctaaacaaggtggcatccttggaggctgaggtttccaaatggaggtccactgcttgtatagtctggagagtagatcaccctaaggtagctaatgccactgtcacctttgctgaagctgtgaagtcgaaccactaactgtcttccaatgttggcagtgttcttgccaagttgttgcgcactatattggatggtgatgagtngtttgagcgtagtaagagcttatagagggagaaaaatgagttgactaatatggtggaaaataacatggtggagttgggc

SEQ ID NO: 194009 - DNA, 480 bp, Glycine max
  unsure (1)..(480): unsure at all n locations
caagctgatgacattggattgaacanactccctgtttgatttggggtctatgncaacggggttggaccgttcgtggtgcgcacggttagaggcaaggcttatagcagatttattatcacaaaacaacatcacagagggcatatcaatttcaaagtgaagaagtaaccttctcaaccaaaaaacttcactagtaacaaaagacaaagcacgatattcagcctctgtggacgatttagaaacagttggttgtttcttataacgccaagagagaaggttattccctataaacacacaaaagccaaaagtggacctcctggtatcaacacagctggctcaatcagcatcagcaaaggcagtgagtttgagagagttctgagcagggaaaaataagccttgtcctatagcagaattgagatactgcaaaagatgatggacaacatttaggtgaggaactctaggttcttcatatattgactcaag

SEQ ID NO: 194010 - DNA, 380 bp, Glycine max
gcatgcggatcaacctattatgcttgcggatcaagttgatccgtgtgaatcttgcggatcaagttgatccgcatgaaacttttttaattttagaaagctgaaattaggttatcataatcgagaaatggtctttaactaatggtatagggttacttttgaagcttgtaacctcaagtatgctattgtataatggtcgttaagttattgtttaacatttggtttgacgttttttggttgtattaagtatacagtataatgtttgttaagaattttgtctgacggaatctatatttgaggtttactagctattacttatttatatcctgtatggtacgaatatgcattgaaataggacacaaactatggttgggcttacttga

SEQ ID NO: 194011 - DNA, 409 bp, Glycine max
cgctggccaataagcatcaaagtatctttgtcatttgcgaaagatcaccttaatggagtgcaagaagctccaggttctaccaaagcttccaccatgcctgcaatcattttgtgcagctgactgcagatcacttgagattgttcgaagatcaaagactgtcttaatagaagatagatatgcatactattacaattgcataagcttggatcaaaattcacgcaacaatatcattgcagatgcaccctttgaggcagcttatacttttttgcaacaaggaacacctctggggcctctcatttctatttgtttgccgggaactgaaatcccagactggttcagctaccaatcaacaaattcttcactggacatggaaattcctcaccatgggttcaaagattcaaagttctta

SEQ ID NO: 194012 - DNA, 491 bp, Glycine max
  unsure (1)..(491): unsure at all n locations
gacactatgaaactcagcttatgggaacattgaacacgtatgtttttgcataatgcctaccatatatctttggaatatgacttactctttggttggggatgtctactgtttcagtgtcttgcctaacgaacctgtcaaccattttctgccgcatccatttaatagaaggaaaaaaaaaactgatgtagggaaatgggaagtagtatggtgcggtgtgttgtggtgattaagttatctttttttggaccataatcgaaaacagatntaataatttacaataactcaagtgttgtgttcattacggaggaagaaaaacaattgcatttatatgcgtatctttttccttcgttcacgtattattttgttaagtggcaagttaatcctggcaagtgcttagatcaaatgtagcaacatggaaacattattttttatctataacaattgaaccaatactaatgttactgtaacactacacacggcggcatattggt

SEQ ID NO: 194013 - DNA, 373 bp, Glycine max
agcttgctggagccgctcttgtctgcgatctctttctctacttgagcgctgtcgcttatatgtgatgcatcccctttcatattgcacaagaagacggctgcaaagaagctgctatctgcgccttccacgtaggattccgccatagaaggatgcacttctcccccacaatcggatttgcattataacctatgctaggttgctttcatggatcaccatcgccaccgctattaagcgagcaggagtagctctttctttaaggagagacagggctaatatttagaagtataattccttgatttccagaatgttattggtctcaactaccacggcccgtggatatgtttgatccaaaaatctacgtggatttctttgt

SEQ ID NO: 194014 - DNA, 266 bp, Glycine max
tgtgagaggatgctcctccattcgggataaccataaagagaggagcttcacctctaagagagtgttctggatgcgaaccttatatagataacttctatcgacgatatcaatgacagatacgcggggtgtgttgaacttccatagttgttgactcgtatcagtttaatcgatactaccttattgtaatccattacatattttgttatggacaatgattgatttattcatgagtctctgctttaatcgactaccatgtgctataatcg

SEQ ID NO: 194015 - DNA, 423 bp, Glycine max
  unsure (1)..(423): unsure at all n locations
agctntcctacaagttctaatgtgtatttttaaactatcatcaactcactttagactcncaattacactaaccccaaatttagcttttcaaaccctcaaaacctcacacttttccactcacatcactacgattntcacatttaaccctaggttaactctccccatcatctctaccagttttctaccaacaatttcagcacacaaacatcacaaagcatcatcataaaacccttaaacagaatgggtaaatttggctcacatcaaacatgtcaagtttagcatgctttcaacaaatttcttcgcaaataactacataaggcataaacatagtagaactacccatcatatctcccaaaaacccaatacccacgaaattcatgtgagaagaagtcacccatacgtgaaattcgaatcccacaacgt

SEQ ID NO: 194016 - DNA, 422 bp, Glycine max
  unsure (1)..(422): unsure at all n locations
tgaaatgaggaagtgtagaagggtganacttcctgcttatattctttgaccatagagcggtacctggagatatgtcgcgggggtcaggagaccttgtggacgacaggtgcggtgctatttcccaaaaccaagcttgaccaatcccgacccaacccgggcatagtcagtcagtgagaacctgtgatgtacctaagcaggcgagctcctggcagtcaacagataaaaggaacgaagaccacaaagcaaggaggcttgtgtggtggctggccagctgtgaactttgattgatatatgggatatggcctctggtaatcgattaccaagggtgggtaatcaattacaaggcctaaaaatgaagacaggaggctaagatggtctctggtaatcgattaccaagggagtgtaatcgattaccatgcttg

SEQ ID NO: 194017 - DNA, 438 bp, Glycine max
  unsure (1)..(438): unsure at all n locations
ttcagtcacctgcggcatgcacctgggacattgggaagggtntggaagaatataaaacaaagaatggttgcttccaggctacacgttaaataagacttgaaacactcaagtgtttctactctcaggaaaagaagcgtgtctcacacaccagaagacattgcagatcacaacggtcagatcatggacatctaccctatgaacctccagacctaatttcgagaagaacccacggttaatgtatacaggaggcgcttctaccgagatagctttcggcagcttcctggagaagcttcctcatgaggcttcttctgagaagcttccttgagaggcttctttgagaagttaaagtctaactacccacaccccttaataataaactaacctcttgaaaaaaaacatggataaatacaccacaataaacaaactcattatattcta

SEQ ID NO: 194018 - DNA, 60 bp, Glycine max
  unsure (1)..(60): unsure at all n locations
ntactaataatgaccacacacacacacacttacacacacttacacgctcacgcccncccc

SEQ ID NO: 194019 - DNA, 468 bp, Glycine max
  unsure (1)..(468): unsure at all n locations
gtgcaagctggagatgatgcttcaatggagganaagaatgagagaaggggggagcacgatattgaaggaataaaagagggagagaagtggaactttgaagtgtgtctcataagactttcattcatcaaagttacaacaagtgttacacatgcttttatttatagactaggtagcttccttgagaagctntcttgagaaaacttccttgagaagcttctttgagaaaacttccttgagaagctagagcttagctacacacacccctctcataactaagctcacctccttgcgaagcttccttaagaagattcctaaagaagctagagcttagctacacatacctctctaatagctaagctcacctccttgagatgagaagctagaacttagctacaccccccctataatagctaagctcacccncatgacaaaaaacatgaaaataccaaaaaaagtccttactacaaa

SEQ ID NO: 194020 - DNA, 273 bp, Glycine max
cgtttatattcttgaaatggaaacttttatagcccctcttgacgtgctatagccattgtactcacgtcattgctcgctcttcttagacatattataaagtatcatcgtacgtgcgggttgcattataccttatcttctgactagataaattccgaccgtactggcgtgccgaaaccacgtcggagggcagcactaggttataggatgcttattaatgataagctcccccatctggtaatacaattaagaagaaaagcggtcggacgtgatgtc

SEQ ID NO: 194021 - DNA, 434 bp, Glycine max
agcttgcctttcctttgactaagcttactcgtattggtcaagtttttgtgtgggatgcccaatgtgagagtagtttccgtacccttaaggaaaggttaaccactgcaccaggtttagtgttacctgacccgagtgaaccttttgtggtgtactgtgatgcgtccaagatgggtttgggtggagtgcttatgcaatgaggacaggtagtggcctatgcttctcgacaacttaagatacatgataggaattatcccacacacgatcttgaattacagccgtagtttttgctcttaagctttggaggcattacctctatggatctaaattggaggtgtctagtgatcataacagcactatatatttgtttgatcaataatagcttaacatgaggcaaaggagatggtagagttcttaatgattacaatttaacttac

SEQ ID NO: 194022 - DNA, 470 bp, Glycine max
  unsure (1)..(470): unsure at all n locations
ntaaaggccactataggatactcatggattgaaaataatgtcttcttgaggaagagactaccatgtagaagaaactcacatggagggaaaaaatgttaaagtacaagtatgaggtgaagtctcacaatgagcataagtaaaaataattgagcaccaaataagtaagaataagatccataaacatgagtcttaagatcttaggttaaagtgtgatgttaatatcacttatatgatttactcatgatccattggtgataaatctttctagcttaccctctcaatttcacaacatatccattaggtttatgtaatattgttattgttacgggaatctcgggttttaaattaaatattattgggaaataccaagaattgtattctctctctatatgagtaagatggacgaataataaaatatatttagagagtatgagaagaagactaacacccagatnattttaacatgaaaa

SEQ ID NO: 194023 - DNA, 430 bp, Glycine max
  unsure (1)..(430): unsure at all n locations
ttcagtcacctgcggcatgcaagcttatcccatgcctccttagcgaatggtgcatcttaaatcttcttgtacacatcatcatctaatactcaatagatgaagaagagacctttcttgtatctctttcttgaatccttaaaagtcttaatttgtgcttgggataatgaagtctcatcttgcgactccttatagccttttccaaccatttcccgaacatcatgtgctccaagaagggccttcattttgatgctccaattgtcataggtgctcccctttagaagtagaacccaagctttgataccactttgttggaaaggagaagggtatagaaagtatttgagagaaatgaaggagataatttttacagaaggctagttctattacatgagaaatgctnntggtttggctccattttcaaatgacaacctct

SEQ ID NO: 194024 - DNA, 405 bp, Glycine max
  unsure (1)..(405): unsure at all n locations
actagctagctatttttcactcatcaccccttaccagttattttaatcataagtaggagaacacagatatcgacgatcacttgaatacaagagatctatttataatagatatttcttggagtatatgatcaactacaagacaaattaatagtgtccatatatcttttaacaaatttatggaataaacaattacttaatctctagaaagtggaagacattgtgaaaatgtncaaataatttttatatgtcaaaaaaatatctcgataactatttaatatcatgttgctccctaaatatatattcatattattacttacatcacactctctataattttgggccaatatgtcatcatctatattgtctatgtacactttntactttcacggatatagcacattactc

SEQ ID NO: 194025 - DNA, 475 bp, Glycine max
  unsure (1)..(475): unsure at all n locations
cttcagcactgcggctgcagcttaaaagatcatccccttgacaacattattgttgatatcttttatggggncacaactagacattctcttaaatatttatgcagtaatatggcttttgtgtctatgattgaacctaaaaatttaaatgaagccataatagatgatcattggatagttgctatgcaagaagaactaaatcagtttgagagaaacaatgtgtaagaactattagagaaacctgaaaactaccccatcataggaacaaaatgggtatttagcaataagttagatgaacatggcataatcatcangaataaggctagattagttgcaaaaggatataatcaagaagaaggaatagattacgaagaaacatatgcttcttttgcaagaatagaagccattagaatgctcttagcttatgcatccataatgaatcttaagttttatcaaatggatgttaaagtggctttct

SEQ ID NO: 194026 - DNA, 358 bp, Glycine max
taatatgtgacccatgctttgagtttcatattcatcaatcatcaatcatctttgaatcatctaatctttattctttacaacatcatctctcaacatctgtcaatcaatctttcaatatctttctacagaatattctgattcatttctcttcatatttctaaaagtttttgatcaacattttctctttcaagaaaagttctttgttcaaaaacttgtgctattcatctttttcgttctcttcttcctttgccaaaagaacgaaggacaaaccgcctgaattcttttgtgtctcttctcccttacaaaagattcaaaggactaaccgcctaagaattcgtttgattcttcccttcccttt

SEQ ID NO: 194027 - DNA, 405 bp, Glycine max
  unsure (1)..(405): unsure at all n locations
agctttacagcagattatagtgatgacgcactaacttataattaatataacttaatgtccttaaccctaggaattaanaacaaaaaacttaatggctgagtgtaactgatattgtggcaaccaaaagtcaccccttacagccaacaagttagccaccatttggtctcccaaaggctgatgcctatgttgccaattgggcccttattacaacttgaactaaacctaactaaagccctcttagttgattaacccaaacacatatttttggtcagccaactttacaagaattgggtcattatntatacaaactaaacactctaaaattgaaacaaagtggtgtcatttagtcctcctccatttgggccatgatacaactcacaaccttagacttttctccttgaaact

SEQ ID NO: 194028 - DNA, 440 bp, Glycine max
  unsure (1)..(440): unsure at all n locations
tgtgaacatttatgatncaattaattttagtctcgacaatatgacgatgttgatatgaactactaatgccaattaacatggcaaaacaaaaagcatgagtaatgcatcatttaataaaataatcaatccaacgttacatgcaatatactatgattctgaaccctaaattggggctgagcttcagtaaggatgtgaccacggcagagcgacacatgagatggtggagcagcctgtggttcatggatgggacaatgatacgatacacacgagatagctagggcgcacaggcgttgttctccggttagtaatgaacgatgtcttgcgcgagtgaatgattattgaaatcaataaccaaacatagaatggtttcatgagaaaaccatctttgtagataagcatacattacaactttgtatcgcttatacgttacgcactattaa

SEQ ID NO: 194029 - DNA, 473 bp, Glycine max
  unsure (1)..(473): unsure at all n locations
agcctctacattataggagagttctagagagagatatgtccacatttctgagagcttgagaccatgtgtcgtgcgaagatctacaaagactatagctggaagaggaagctgtcctgagagcttgcgatgagattgcgacccattgtgacgtcctagaggtggaggagacatcccccctacttggattgctgaaatctctcattctcttctctttgttggaaaggaagcctcccacctatcggaaagctaaatcctctgtgggatcctcctctgcaagacttgatgtaaatactcttttaccaattaatgatgctctggcggtcactgtgctatcaaaactcttntctaccatgctttagccttgatcacatagttgcatgtgcttttaggatcattctacaganggaactggtctgattcttataacttgatcggacagggctccgttgccttatttcacaacgaatccgggt

SEQ ID NO: 194030 - DNA, 488 bp, Glycine max
  unsure (1)..(488): unsure at all n locations
gcttgtgtatcgataccactgattggtaatcgaatactagtgactgtttctgataaatcattagatgtaactcttcacaaggcttctgactctttcaaattggttttaagtttttctaaaagttataactcttctaaatggtcttcttggccagacataaagagtctataaaagccaggctttgatatgctcttcaatacacttcttacacttttacttttccaattaatcctttacaagccttgaatctctttgaacttcttcttctttgtaccaaaatctttctgaagttttctggttntccaaaccttgaaaacttgtgctattcatctnttcattctcttctccctttgccaaaaagaattcgccaaggactaaccgcctgaattctatttgtgtctctctatctccctttccaaaagaacaaaggactaaccgcctgaattctttngtgtctcccttctcccttgcanagaatcaaaacacac

SEQ ID NO: 194031 - DNA, 422 bp, Glycine max
  unsure (1)..(422): unsure at all n locations
agcttaccactatagtctatacaaagaaattatggngaatttcttacgctttactaaggtataaggggaagtaataattttaggagtttgagataattatcattcccttatgtgatgagtgattctagaatgagaagtgtttattgggcttggctctttcaaagtgaataagggtaaagtaattaattttagtcattgatgaacaaaattagcggctgatatttcaactcattcttgatttgttatgcaagtgcatgtaatatcgactattaattttctcattaatgattgagaatatttaatttactttctagagtgagttgctcacgaggagctaaatccttattgaaatgttttcttctgtttctgtgtctaacagcaactttctcgtgcaagaaaaatcagtcggtctgtttatgctt

SEQ ID NO: 194032 - DNA, 474 bp, Glycine max
  unsure (1)..(474): unsure at all n locations
gcacgagatgctngatctccctctgccatcacgctctccgatctctgtcatcttcnacccttcaacctcctctagtggaatttctctttttcaaaactatcataatctgatgagatgnaattgtgatttggggttgtgatttgtggttctttacttgttttacgttatgttcttgttctgggttatgaattatgttcttcatttggattcttagatgttgttcttgcgtttacaaaataaacatgtttaaagaaaaaaaagttatttgtgatgacttttaactgctaatggagctagatttgtcttgacggaagaattgctctgaaccttttagttaatataaataaccaaagtgaactttttttaaantaaataaactaatctgacaaaaaagataacaaatcaataagttattatcctaaaaatacatgtaccacattttgacactttttataattaacagtctaataaata

SEQ ID NO: 194033 - DNA, 330 bp, Glycine max
  unsure (1)..(330): unsure at all n locations
actcagcgaaacaccatgaaacttgagatgtcgcgaatgaaagaagcatatacggggcatgataacctacagaaataccgtctgctaagtgagaaaagtattgcaggtaacgttagcaaagcttgtattctatagaagacccccttaccagccttactatctacgcatgcaatctactagtagtaatgtgattgaaaacacttatgacaccacattgagcggagaaatattgcgttccaatacgataacaccaaactngcggtgcttctacgtcgcattcgcattactctatcacaaactcacactcaaacccgtggcttgtgcatcttc

SEQ ID NO: 194034 - DNA, 457 bp, Glycine max
  unsure (1)..(457): unsure at all n locations
agcttaatntaattgcgatggatctattcaaggtcttcctagtaatgctactacgactggatgtgttnttagaggccatataggtaatctcatctttggttttgttgttaatattggtttgtatgatagtggtggttcaagtcaagctttggggaattttattacgcatttgtatatttgtattgcctggagcaggggagttctagtttttgttgtcgaatctgactcccaacatgcaattnattttgcttcagcaggctatggtaggtctcattcataccatggcttggttcagaatattntgatacttagactcaaggagggagcttttcctaactacacacgcttcgtgaagctaaccaagtgttaggatgcactttatggactgttggattacttggccatataatatatcatacattcatgcctcgatatgctattcccttatcttgtcctt

SEQ ID NO: 194035 - DNA, 480 bp, Glycine max
  unsure (1)..(480): unsure at all n locations
tacggtggttaagtctgcatcagtaataatggttcatgatcatttatactgcttacataaatgttntcgaaaatacattgtttttaattattatttaatatatttcttttcaattatgtatttgaaaatttttatgtttcaatctattatttgtcgtcagtcttcttttattaaatgatacataatagatgaaatgagtgtcacgtcttcgtatcttatcattgatatctcataggtcattgtcaataaatgacatcatgacatgttagtgatgtgattaagtccaataacgagacatttcgtctgttatgtcatcccttgacaaaagaagactaataacaaatagtaaattgaaacataaaatttttttaggtaattaaatgaaaaaatgaacattaagtatatttcatatgtatgaaaaacatatgaatcacacaggttatgatgtgataataactgctagtgattaatacgcgatgt

SEQ ID NO: 194036 - DNA, 313 bp, Glycine max
  unsure (1)..(313): unsure at all n locations
agctnttacagagaacaccggctatacctttcttttttntaccactctttagagcaacggcggcagtgactctatcgcgttgattactgctccagaagctctctgcaaggccgatttgggtgtggatctgttctccaagggagcagtgcttccttcttttagcgttggagctggagatctttctccccgaagaatcccacggtggtgcagcattgtccgcgcgtgaacgagttgaaaccgttcgttgaacacgaactgacgtcatccctcaggtagtccttcatctaaacggagcgttctcggagatgtttta

SEQ ID NO: 194037 - DNA, 473 bp, Glycine max
  unsure (1)..(473): unsure at all n locations
agctgggaaggattcttcattggaggacaagaatgatggagagattaagagaggcgggagaacgaaattgaaggattaaaagagggagagaagtggaaatntgaagtatgtctcacaagactcttattctttaaagttacaacaagtgttacacatgcttctatttatagactaagtagcttccttgagaagctttcttgagaaaacttcctggagaagcttctttgagaaaacttacttgagaagctagagcttatctacacacacccctataataactaagctcacctccttgagaagctctcttgagaagattcctaaagaagctagagcttatctacacacaccccctataatagctaagctcacccccatgccagaatacatgaaaatataaaanaagggtcctattacaaagactactcaatatgccctgacatacaaggctaaaactctatactactagaatggcc

SEQ ID NO: 194038 - DNA, 448 bp, Glycine max
  unsure (1)..(448): unsure at all n locations
agctagtaacatanttgagcactgaaaacccaatttattcctcgagattggcgggtgcatgaattattcgcattggccatggaaaaatcagaagaagaaaaggagggtttatattagtatcggaggcaattatttgagggatttgaggctggttgatgagtttcgtgaagatcgagatgatatacatgatgtcctcgcctggcgtttttaaagatcagttaagcacttccagctcggatatacgaaatagattggaatatggtgttgagctttcgtggctggaaagtttgtgcaggacatacgttatcccaaccctgcaggttgaacctgacaatgtctgttcccgtgtctcgcaatacgcacatgtacgaacgtttggtaacaacattttgttaattataacgtctggtttttggcttaaatctanggttttttcttttggaagatc

SEQ ID NO: 194039 - DNA, 397 bp, Glycine max
ctagaactaggcattatcagagttggttctctaaaataaacagtggatttgatgactatgagaaaaaatgaattcataacatgtatatttatttataaaaggaggagactctgtttccgacgcggcggcgccgccacccatggccggtcaaccactgcgccgggaaacaactttcggcggtgtgtgctagagagagaagagagataatgggttgacagaatagagaatagatagaaaagttttttaaaaatggtgaaaaaccggcccgagcccttatatagatgccggaccgtgtcggtatttatttacttggaccaaaccgagccggttctccgttattggcccgatggactcaccattggccaaatatgtttattgtcttgtactctttacctct

SEQ ID NO: 194040 - DNA, 460 bp, Glycine max
  unsure (1)..(460): unsure at all n locations
agctnttagcanagttggtccttaacattgtaacattctatgaccaagtagttcggtgcttgtcactgtaatagaaaaagttaaatttaagatggaagtgtgggcctgtgcattgcccacacaaaccacacttcaacactgtgacctttcacctaaaagcttaagctttaaaagaaagttggtccctgaaacctagagctataatgaattactctttatctaaaagaagacagatgacaagtaaagctgtgagtaactgattatggtacagagaactgttcggatggttaggttgttacaaagtcagtgatacagctgtcactataaatacctagatacagctgtcactatgacagctgtatctaggtgcttataaataccttctgtatctcttcatttagatgcaagacattcattttttagtatcatcaataatacagttttttttccttctaaattc

SEQ ID NO: 194041 - DNA, 483 bp, Glycine max
  unsure (1)..(483): unsure at all n locations
agcttgagatgatgatgccacgtcccattttgttttattaacatatgacgtccaaaacttcatgaaacgacagaaggctcttccatcagcaataagagggaacaaccacgtgccatcttctttctacttggggtaggtaacacaagaaccaaagggtgagtgatagggacactattctactatgactattaagataagtattaatgcatctctgcctttattccttcatttgctctatatttatagctgaatacaagataaatttgcgggaaattggagataacaaactttgataatttgaatggtaggttgttaatgttggaagaagaagaaattttatttcatttggcacacaaaatacaagagtatgatcctctatntatactaaaatagagtgaccactcacataatttgcttattcaagaatactaaatgctcacataatcgcttattcaagactctgtaactcacaaccttataact

SEQ ID NO: 194042 - DNA, 427 bp, Glycine max
  unsure (1)..(427): unsure at all n locations
agcttggagtgagagaaaagagaaagctcggcggataatgcgtattatcagagaaaagaggcgccgaatatagcagggagtaaaaccttagatcttaggtggattctaggtttttgagtgattcttaagatcctaaaggtggaggagacatccccactactttgtatctgtcaattgctctcaaatccctcttcctgattgtaaaaggcgcttccttgtgatggaaagctaaacccatatgttgaggaattctgctgagtatttgatgtaaactcttatcctatctatttaaagttngtttatgtgttcatnggttctatttgcgctttattatcgcatgcttgtggcttgatcactcatttgtatgtgctgctaggagctctaccattggaaaatgtactgcatccttagaactggatagaacaag

SEQ ID NO: 194043 - DNA, 471 bp, Glycine max
  unsure (1)..(471): unsure at all n locations
gctgcttctgttttcaggatataagcaaattataaaacatatttttgatgtctgtaacggtctttctgtcgatttggagaaaaagttccgttaatcacaattaattactngttaggaaggctaataatacaattttagcctattcttttgaatataaatctgtgattccaaataacatagcacccagtttcttactttcctactttttcaccctcaaatttaattctttgctttctttcgtccgtatctatttaggttaattgtttgtttgttaaagaagaaaaaaaaatgagaagtacttaatatcctttattgaataattttcactattttaagagaataagtgttgattaaatatttttctaagaaaaatgttagtaacacacttcttcgtaacacactatgttaaaaagtgtgttattaatattatatcattttgtaatagttgtagttaatattacttaatatcta

SEQ ID NO: 194044 - DNA, 479 bp, Glycine max
tctcagtcgacctgccgcatgcaagcttcattaagaggcttctagtacactccagacatcttcgcatatatcgcaacggtccgatcatgggaaaatgttttgtgaagttgcaaacaaagtttcgagaagatccaacggttaatgaaggctgagcagcgtttttaccgaggcagcttcatgtagctttctctagaagcttcattaagaggcttcctctagaagcttcctcatggcttctttgagaagctttctcaagaggcttctttgagaagctagatccttatctatccacccctctattaactaaattaacttccgtaaaaataattacggatgaaaataacgcaacaaataatcaaacatcaaacataattactaataatatatagatatatatatcagggtgttacaactctcccaccctcttagaatattcgtcctcgaaatttaccttactcaaacaaggatgggtgagcttc

SEQ ID NO: 194045 - DNA, 385 bp, Glycine max
  unsure (1)..(385): unsure at all n locations
gataaactgtacaggctcaaggttcaatcaaacaatcatactttcagctcaaaatgggtgcaagggataaatcaatcatgcataaggtaagctttttaactaagtggctatcttcaatcaaaacatggccttcatcatcttcaatttcacgcatccattccatactcagagattcatgcaaaaatcattacttaatgttagtcgttctctcacaatcaaagatcacactctcactgggatgcggctaatgcgttccttcacaatcaacctgacaaaccaactaacattntcagtcatgatcctaattccatnttctttctcttctaatgactgcatgctcattcaaggcatatgatctacgcatttcaattcactcacatcatac

SEQ ID NO: 194046 - DNA, 381 bp, Glycine max
  unsure (1)..(381): unsure at all n locations
agcttctagccaaatggacttaccttgaattaatttctttgatagctcctttgagccttgtttccctttccttgttttgaagctcactacaagccttaagtgaaaaaccatgatattaccatatccttaaggaatnttggagctttggaattgttttgggaataagtgtggggggtttttgtttcattggacaacttgttttgttgactatgcttcatgatgtatttttggccatacttgatgtacattgtatattggttaaatggtggacatgctgaatgaaatgttgtttctcaaaggcaaaaaanaaaaaaaaaaaaaaaattcaaaaaactttcaaaaaaaaaaaaaaaaaagcaataaagttgagtaaataagatc

SEQ ID NO: 194047 - DNA, 426 bp, Glycine max
  unsure (1)..(426): unsure at all n locations
taccttgctagaacaaagataagaatagccaaaggtccaaattttatcacttgttgatgcaatcctaccaccaaagggcattggatataagactctaagaagattgagccagagacgtaggaaaagggccttaggttctcatgagccttanggtagattttgggaccatgggctcagtatgagcccactatctttgtacatattagattaatgtttcattatttttggaccttgtatttaggcctccatagtgtatggaggataccctagtaatgtaggatttttcagcccttgtattttatggcacctagactagtttttgtattaggggtagttttgaaatttcacatgcattaagtgcactatttgttgtgtgtgtgtanggagaatattttaattgtattgggagaagccgaatccaattat

SEQ ID NO: 194048 - DNA, 410 bp, Glycine max
  unsure (1)..(410): unsure at all n locations
agcttgaggagtgtaaaaatatctataaaataatcacattatctgtatcatatgcttgaatgtttaagtttttaggatatataatgtgatcttcaaaataacagtggaatgaattgttcatcaaattgaggaagcaatcctaggagctatttcctattttcggggtttcctaatttatttccttatattaaaaattcaaggtgttagtaacatagaaacataattcggtccttcacccggccaaccacgaaatggacctgcataccaatttatctcacttttgcgaatngattctctccaattccctatgaaatcatagacaagcatgtatgtgctaagttcgttaagaagtaaaggaagctgaaagcaaaaagggtggacatcattgcatgcattctaatgaacaatgt

SEQ ID NO: 194049 - DNA, 466 bp, Glycine max
  unsure (1)..(466): unsure at all n locations
tatacatactcaagcttgtccgcataaaatcactaanaaggaatttaaggttcgatacctcattttnttcaccaagtaaatggatcattttaaggtccaacgccttatatgacctttcattcaaaaaaatatatatcttgcaaaaaaggataaaaaataaccaaaacgctttgttcacaaaagaactacgtaggtctgattttgtcatcataattgaggaatacgtatgagcaaaggtaaacgcccttatcgaccacaaaaagatataaatataaaaggcataaaanagacataagaatgtaaaaagggaaaataacataaattgaagtcatatttgcatatttgattaaaggctgtcgtctcttgtgacggacgtgtggtgtgctaatacctcccccgtgcgtaaacacaactcccgaacctttcacttanagttcatagaccatgtcttctccggttttctgac

SEQ ID NO: 194050 - DNA, 280 bp, Glycine max
  unsure (1)..(280): unsure at all n locations
atcatgacaaattagacaacagaattcactcagactaagccaccactagaatatcttcaaagcatattctggatgccaacgacgaaatacacaaacaaatagctcggtgagggaggaggctgcaaactattacctcatgtttccatgaaattcttcctaagacacaagactgggagatcactncaagggcaggaccaactccaagggttgagcctcttcctgcagatcctcatgctaccttgtctttctccaccatcaacatttgaattaaaggaaacaa

SEQ ID NO: 194051 - DNA, 421 bp, Glycine max
  unsure (1)..(421): unsure at all n locations
caatgtgagattctnttaacaaataaactctttatctaactcttgatcttagtttctcgatcttgatttaaggcttgaagcaatcttggtctttgacatcattaanacctgtatacatacattcacacaaaagtgtagagactagggtataatggagttgccttatcaagatcatgagttattccattagcttgtctcctaataaaagcagctataaaagttggattttgtactaaactcatccagtaactttgaatgaagctccccaactaggagttgtcaacaaccaccgattaaatgttcatagcaatagttntaccatcactctctagaataacgttctgcactcttaatgaatccaaaatgtcaagaggagaccccaagcttatccttcaatgaggttcatgcatgggtgccttca

SEQ ID NO: 194052 - DNA, 475 bp, Glycine max
  unsure (1)..(475): unsure at all n locations
agcttgaaggtaaactagatgccttggttaaccttgtaacccaactggccatgaataaaaaatctgcacctgtcgccagactctgtggtttatgctcctctgctgaccaccacacagacctttgcccttctgtgcaacaatctgaagcaattgaacaacctgaagcttatgttgcaaacatctacaatagacctcctcaacctcagcagcaaaatcagctacaacagaacaattatgacctctccagcaacaggtacaaacctgtgtggaggaatcatcccaaccttagatggtcaaatccttcacaatagcagcaacaacaacaacagccttattttcataatgttgctggcccaagcagaccatacgttcctccaccaatccagcagcaacaatagcaacaaccccagaaacaacaaactgttgaggctcctctgcaaccttcccttgaagaactngtgaggcaaatgactat

SEQ ID NO: 194053 - DNA, 351 bp, Glycine max
atcctactacgacgactgataaaactggcgcaaatatagagggcgagaaagagggagaaacccatgttgtgactgccattcctgtactgacaatgttcccaccaacccaacaatatctatactcagtcaataacaaactttctccttacccaccacccatttatccacaaaggccatccctaaatctaccacaaagtctgtctaccgcacttcaatgacgaacaccacctttagcacacaccataaacacctaccaagaacgtgaattctgctgcgagaaagcttgtaaaattcaccacaattccagtgtcctatgcggacttgctcacatatatacttgataactcaatg

SEQ ID NO: 194054 - DNA, 465 bp, Glycine max
  unsure (1)..(465): unsure at all n locations
agcttcagaccaaagcaactcattatctaggtatttatnacccctcaatttaggggattntcaagctttgagaagtgaaaatgagaatggggtataattggagcaaactctcacctcacacaagtctataaccttaatctaaacttgctcaaactgccaccgaatcaaaatttgactcctcaacacccaatttaccctagaaatggctcttgtcttcactttggtcactcattttcctcctttgcacaacccaagctttctcacagtcctaaatgacatttcaaactaggattacctcactctaacctccaattaccactaaatccagatttggcttttcaaatcctcaaagcatcacacttttccactcatatcactacattctcactgtttaaccctaggttaactctacccttcatctctatcagttctccatcagccatttcagcacacaagcatcatcat

SEQ ID NO: 194055 - DNA, 351 bp, Glycine max
caagcatataacaacatacagagacttgtcatctaaagggcccatagcggcgtcgtatattccatcatgcacggtgtgcagcaaataatcgacgagaatgggactcgttatcttcacgcggctgctccgccgtatctcgttgtcggttaggaagctgaacgccaccgcctcgacggagttcttcgcgccctgcgaagttgcgtacgactgcgttattagataggtttcagagagcaagacaagtataagagagcgttgagttggagattattacctctgtagtgagaaccatggtgccgccaccgtctaagcaggtccgaacgccgtcaatggtttaacggagagggacac

SEQ ID NO: 194056 - DNA, 390 bp, Glycine max
  unsure (1)..(390): unsure at all n locations
agcttagggatggaacacttacttgttgtgattaacanaagcgcacaacagaatcaaaaaatgcgnaaaatgatgaccctagggctgcaaactcgtcaatcccatgggtatggcttatgaaaggggggaaaataagttnttgaatgcaaaaacgtccctcctttcgtcattcttataatttggtgcaggggtggctcgcccaggcgagctaacctgcattttttttttttttgaggggaacattaaccatgtcccctcctttctcatggattagcgtcttgcctaacttgaacttacttaggttagaattaagcattgattacttattnttacccttttttaaaacaaatagttaaagaacactgcgaatacataggatacggggctgcc

SEQ ID NO: 194057 - DNA, 170 bp, Glycine max
tcactcatctcttaacctgcctcatatggtcacgaccatattgtcgttcgtatcacctagtgactcatttagtgaccatagggtaatctatatacctttctgatggcttaagcctgaaaccaatcaacgacaatgacaattatttttacttgctcgacatatacaaaaac

SEQ ID NO: 194058 - DNA, 482 bp, Glycine max
  unsure (1)..(482): unsure at all n locations
tgttaaaaagccttataagcctgataggtcggcctatatatatatatttatattattnnttggtaccaatttatacttatattatnttttggatacaattaatttttttntaaaccagcagacttgattacacattactgctccataacttccattcctataatcaagtaagattttaattacaatttaggtgtctttatattactcattatttttattggctttcctattctggtttaacgtttctttttcattaactttcctatttttctaccccanagcaaacaaatataaaaaggcttttaaaaaggctatcaggtcaggctagacttttaaaaaggtcaggccgagccaaaataaaagcttttgataggctataggccaggctcacgcctaaaaaattcatcgtatgctaggctcaggcactttaaagcctggtctggccttggctattntcactcctagcgcncactcacattctt

SEQ ID NO: 194059 - DNA, 435 bp, Glycine max
  unsure (1)..(435): unsure at all n locations
agcttagaagccttttggattcttcttgtgttctcgacaagggttgctccatgcattcttcttttgtatgttttaaaggaatattaggaagtaaagataatgatgttgtaattctcaaaaaaaaaaaaatgatgttgtagatctaacgtatattataatttctttcctaacgaggcatcaaattaggagagaaaaaatgtaaatttgttttttattgttttaatttattaaaaaaatattataatataaaaataataaacaattacatgctaataaaataatatagtaataggtttaaatttatttcagttaaatttaacttttcaacccaataaaaaatatttatatnaattatttctttatttttactctattcaaaanaattaagagaaattatattcttcttatttttaattattaattntatttctaatc

SEQ ID NO: 194060 - DNA, 473 bp, Glycine max
  unsure (1)..(473): unsure at all n locations
ngctaaactgntaatgtgaagaaggttgtacaaagtcatttactcattccagcanaaactcctattggtgttactcctatcacaccattggttcactatctaagaaaaggacaactgcatcactgtttcaatagcccacctcaacgcgcaagcttctgctacattggcagtccggggatgggttataactgagagggattttgaggattccttgttgggctggagggggtattagattctgcgctttttgagtctcatttcatattttggttatcatgctttgcaaggcgtgactcattaaactcctgcatacgtatgaaaccgagaccaccattcaactttgattcgatcaataattcccatttcagccaatgtaacttcctcatgtctggttctccacccccaaagaaactggcaatcatgctttcaatttgcttgcaaagggagatagggagctngaagtaactcatgaa

SEQ ID NO: 194061 - DNA, 424 bp, Glycine max
  unsure (1)..(424): unsure at all n locations
agctngatcaaacatatgcagcggaataagaacgatcacganaaattggttttatgatcttcctcaatcaaatcaccttattccttatgggacgaaccatttctctttagatggaaagatgagaaactatctctcgatttgatgtgttggggaccataatcgcgcctcaagtttttaacttattagggttctcattatcccttaatgggtcaaatcgggttccgctcactgangcctatatttatttctattggtagtctaatggactcactaaattagatcacttatattaagtccacccaaatgtaaataactaatataaatgttataatataatatgtagcccatatntattaattaggaatcataanattcttaacaattttccatttaggcttcatattaaccgtagaccattatacta

SEQ ID NO: 194062 - DNA, 453 bp, Glycine max
  unsure (1)..(453): unsure at all n locations
tctgtccttgaganactggttcctataagacaacatggagtgtatattgctgaaaaccctagccttgcaacaagacctatggaagtagacacggagatggacaagataatccgcagtattgtgagtagcattttgaaagacgcctctgttcctgatgctgagaaagatgttccaacatcctccaccccagatgttgctgtccctgaagctgatgaagatgtcccaacatcttccaccccgaatgtttctgtgcctgatgttgagaaagatgttccaacatcttccggcccaaatgctgaagtactctcttcccccagcaaagagagatcaacagaggaagatgatcaagccacagaggagacctctgcaccacgggcaccagaacctgctccaggtgacctcattgacctagaagaggtagaatctgatgaggaacccattgccaacaaattg

SEQ ID NO: 194063 - DNA, 470 bp, Glycine max
  unsure (1)..(470): unsure at all n locations
agcttacccattctggtttaggggttttatgatgttgcttgtgatgttcatgtgctgaaattgcttatggaaaactgtttgagatgaagggtanaactaacctagggttagaaagtgagaatgtggtgtatgagtggaaaaagagtgaggctttgagagttggaaggctaaatctggattctgtggtaaatgaaggttaaaatgggttaatcctagcttgaaatgtncgttaggacatgtgagaaaggttacgctgagctatagagaataacaaatgaccaaagtgaaccaagagtcatttctagggcaaaattgggtgttgaggagtcaaactttgattcggtggaattttatgtgtaaattcagtttgagcaagtttagatcgatgttatggacttgtgtgaggtgagagtttgcttcaaatttacctcgttctaaatttcacttctcacacctagaaaacccattga

SEQ ID NO: 194064 - DNA, 348 bp, Glycine max
  unsure (1)..(348): unsure at all n locations
agactctgtgggttatgctcctctgccgaccaccacacaaaccttttgccttctgtgcaacaatcttgagcaatngaacaccctgaagcttatgctgcaaacatctacaacagacctcctcaacctcagcagcaaaatcaaccacaacagaacaattatgagctctccagcaataggtacaatctcgggtggaagaatcatcccaaccttagatggttgagtcctttacaacagcagcaacaacaatagccttattttcagaatgctgctggcccaagcagaccatacgttcctttcaccgatccaacacaacaacaacaacaacaacaaccctagaaatagcaaaca

SEQ ID NO: 194065 - DNA, 449 bp, Glycine max
tcttagcactctgtgtgacatataatccatgtattacacgttcttcttatttattactcattcgacatgtctttaggcataggatatgagatgaggaaaccacaatttaaggcaaagttgctttaaatgagatcagagttttcacgagcagctaattggttggaccagattcctaagagtaaatggactcgagcctatgatgaacgaaaaatgtataggcatacgactaccaaccttgccgaatgtatgaaatatgtgttgaacggagcctcaatatctactataactgccttagtcacgaaacatttaataaaataaattactatctctctactaatggcgtgacaattatgaatatgataaacgtagcacatacgtacactaaatacgtatgtgtcatgatgcacgacaattgacccattgctacctcgtattatgtacgcatgtat

SEQ ID NO: 194066 - DNA, 374 bp, Glycine max
  unsure (1)..(374): unsure at all n locations
agctntcctganattggtacgacaaggacatggtactcggatgatctanntgcacgctccggattatagtacagacacctgctntattgagacgctcgaacactcatccatcagcattcaaggacactcataggcgatgtgtacgttgtctcgccgtgagctgacttccttgctctatatcgacgacgataatactgatttgcagaacgacatagggcgccggacgtgggcatcactgtacactccaatggccaatgaggatccagatataaccctacgactttatgccaatgcttggccatctgtcgagggcgtgcgagacatgatatcctctcggacgggtgattggatcccgtattatgcccacactctca

SEQ ID NO: 194067 - DNA, 414 bp, Glycine max
  unsure (1)..(414): unsure at all n locations
agcttggataagttaaaatcgacatcgctttagtgactactttggttgaaaggtggagatttaagtcacacacattntatcttcctgttggagaatgcacaatcaccttgaaagatgttgctcttcaactaggtttacgcattgatggaagaccagttactggcccaacatattatgattggaaacaaatgtgtgtagtatatataggtgttgttcccccaaagaatgcactggtgggatcaacacttaagctaaaattgttaaaggaatgcatgttgactctcccagtataacccacaccacaacaactagtatcccattgtagggctaattggtggggtgtttatgctagacaagtcagggaatagagttcacctaatgtatatacccctattagcaaatctcgattgggat

SEQ ID NO: 194068 - DNA, 428 bp, Glycine max
actggatgcattggttaactgggtaacccagctggccttgaattataaatctgtacctgtcgcacgggtttgtggtttgtgctcctctgctgaccaccatacagacctttgcccttccatgcagcaacctggagcaattgagcagcctgaagcttatgctgcaaatatttacaatagacctcctcaacctcagcagcaaaatcaaccacagcagaacaattatgacctctccagcaatagatataaccctggatgaaggaatcaccctaacctcagatggtccagccctcaacaacaacaacagcagcctgctccttccttccaaaatgctgctggcccaagcagaccatacattcctccaccaatccaacaacaacaacaaccccagaaacagccaacagttgagggccctccacaaccttccctcg

SEQ ID NO: 194069 - DNA, 426 bp, Glycine max
  unsure (1)..(426): unsure at all n locations
agcttgatagcacgcatactctaacgtcgncttttgtgcccttcgtcaatcgcgggcgacaagcccgttgacacacggagaattacgtcatcttccgcgctcacaagatctgtcatattgactnttgagtcccgctgacgggcggaaatttccgagtggttatccgtataaaatttttgttgtctgtaagatgaaaagcctgatagcacgtaaaaactaacggtgtctattgcggccttcatcaatagcggtcgacaagcctcgtgacacgcagagatttacgtcatcttccgcgcttacaagatctgtcatactgacttttgagtcacgctgacgggaggaaatacccgagtgggtatccgataaacttttggcttctgttaacgaaacgcctgattgcacgcagagactaacgtcgcttctgcg

SEQ ID NO: 194070 - DNA, 422 bp, Glycine max
  unsure (1)..(422): unsure at all n locations
ctttcgtcttacagacagcanaaagtntatacggataaccactctggtatttccgcccgtcagcgtgactcataagtcaatatgacagatcttgtgagcgcggaagatgacgtaaatctccgcgtgtcaacgggcttgtcggccgcgattgacgaatggcgcataagacgacgttagtctctgcgtgctatcaggcttttcatcttacagcaacaaaaagtttatacggataacaactcacgtattttcgcccgtcaacgtgactgaaaagtcagtatgacagatcttgtgagcgtggaagatgacgtaaatcttcgcgagtcaacgggcttgtctgtcgcgattgacgaatggcgcacaagacaacattagtcaatgcgtgctatcaggcttttcatcttacagaccagcaaaagtttata

SEQ ID NO: 194071 - DNA, 418 bp, Glycine max
atttagtgagtcttgcaagttaccaaaaaataaatgatattacattcttcaaatttctgataactcgttggatttaattctcacgtgattctttcatgtatatggttcttttttatttgaacgtcccttagcttctacggtttcatataactaaatcaaacaaaacaaatttcacatctcgaattgataaaaaaggattcaaaattgataatgatcattgtttcaaaagaattattttggctcactttaaaaatatgaatgattaaattcaaatttaaaaaaataagatatcaaactaaatataatcaattatataaaggactaaacgtatcatttaacctactttttataataaataattatttttattatataaattatatcttgaatttaaaaaaataatgaatcttattatcta

SEQ ID NO: 194072 - DNA, 428 bp, Glycine max
  unsure (1)..(428): unsure at all n locations
agaagaagtccttgaagtgcttatcttgtgtctatgtttttatgatantccggggggttcaagggaattggtgtatttggcattctggatatttgttggcgttggtgacgagtacattctatcatttggggtaagctcccttgtgaaatagtaagactttctgagattgtattggtgtggttgctttggttttgatgctttttgggttgaggctggtgaaggttgctatttcttcctggaatgagttgatggggtttgctttctgtttttccatgtccttgagtttgaaaaccacgcattggggatcatatctgataatctgaacctgttgttacccataccctctttgatctatgtgctcttctctctctttctctatggacgagtgtgaggaatatttctactcttctatatgaagagatgaactt

SEQ ID NO: 194073 - DNA, 429 bp, Glycine max
  unsure (1)..(429): unsure at all n locations
taacacccgggacaataacatcaaggaattcttgcaccctggatacaaaggcttctttgaattannttgcaatgtatcatatataggggcatgtgcttgctgaaaatactcttgtccaagatcacgaatcatatcctctaagcaatctcccatttctacatcaaatggttcaaattgagaccccctttgcatgtctatcaattcaccatgtcgtatccacgtggtataattcttcttaatcccatcacacaacaaatactcgtctagtnatttgtgtctcccgttcaaacaatttatgcaaggacaaaaatatttttcgtcctcatccgggcgatttctttcgaaagcaaattgcaaaaactaatcaacgccttcctcatatgcagggctcatgcgactttcattcatccaacttcgatccatctaaat

SEQ ID NO: 194074 - DNA, 470 bp, Glycine max
  unsure (1)..(470): unsure at all n locations
agcttactctggcatattccttgattgcgtcatgcatctctncatggcatcgaaaataggcatatcattcctgcatcatattcgtgcattgccttttcataaatcactgcataatcatacgccttcatttagcatgcttttgttcggccaactgcatatattctacttccatcatccgcatgtcatgttcactcatacatgatccttgcatcttcctctgtcaaaacaaataataaagaacagaaaaggtcacaccacattcttaatttcatgtttggggaccatgatgatggctataaaccaaccatgttgggattatacacccatctctcttgaagaaaaggctgaaaaaaaattattaaaaatcatgtgaacgtggtacctattgcatggttaactaagaaaatggtggttcctaaggcatctcatgtcaaactcataatagcatttcccatgcataagcataaaca

SEQ ID NO: 194075 - DNA, 454 bp, Glycine max
  unsure (1)..(454): unsure at all n locations
tctcaggaagtttgtcaggaagattcccattgttagcttttattgaagtttcttaaggaagctacctatgctataaatagaagtatgtgtaacactcgttgtaactttgatgaattagagtcttgtgagacacaactcanagtttaacttctctcccccttttcctccttcaatttcgtgctcctcccctctctctctntctctctctctttcttttcctccattgaagcatcatctccaagctttttatccaaggcatattcttggtggcgaagctcctttttccatggcttattccctagtggatagcgccttctctcacctcttctcctttatcttctactgcatctccatggtgtaaaatcaccattgaaggacctcattgaagctcaaagaaccagcctctgtagaagctccacaagccagcttacatcaagtggaaatcagatcacaa

SEQ ID NO: 194076 - DNA, 110 bp, Glycine max
tcaaaggagccataccaatactggctgggaactattggtgtttgttaactcaatcaacgacaaacaatccatccagctaccttgttgctctataatacacgccctaagta

SEQ ID NO: 194077 - DNA, 427 bp, Glycine max
  unsure (1)..(427): unsure at all n locations
agcttatggtaagatcttggacctaaccatggcagaggtctccacggaggccatttcctctctcgcccaatattatgaccagcctttgaggtgcttcacctttggggacttccagttaacacccatgatggaagagtttgaagagatcctgtgatgccctctgggaggaaggaaaccatatctcttctcgggattntatccctccttagctagaanttctaaaatagtccaaatctcgacacaggaattgaactgcgggaagcaagtcgaaaatggggtggttggggtaccaaggaaatgtttggaagtaaaggcgagagtcttggcaagtcaagacgaatgggacccgttcatggacatcatggcacttttgatcttcggggtggtcctctttccaaatgtggatgggntggtggaccggacagcg

SEQ ID NO: 194078 - DNA, 464 bp, Glycine max
  unsure (1)..(464): unsure at all n locations
gggccttagttgngttcatttatgattggtgttatgatttccacaatagaacttgctctacataatttggaccatgtatcattcataatggataacttttgacatgtgtatacacttatttttctttgtatacgtgtagtaaattatgaactatatgaactatgtttcagttgtcagaacattaaacaaatacgttctcttaaaattttaatttgttgtatgaggaaccaattcgttgtaggtggaaccaattcgtaacctatntgcagctctctttctctcaagtattggaatgatcatacatgtttacttccttgtatattggttgtacctctcctattaaatgtgtggccatacaagaaaacatangatacaaaatgattgtataagacaagatattagtcacaatattatctattagtctatatagttcattataaggaatatcaatgtataaatgtata

SEQ ID NO: 194079 - DNA, 466 bp, Glycine max
  unsure (1)..(466): unsure at all n locations
tttntgtatttcttcaccggagatntttctaagtctntcccactgatgaggtagcgaagaagacttggatacttgcaagaaattatgagtggtccaactgttgagaaagtgcctttcattaaccatcccggtgttatatatatgcatgcttattagcactgctaaactcaccaatatcattctaattctcatactcggtggattcatttcatcaatcactttgcctttgtgatcataaccaccaaaatgccaacaattaatccagttcgtttcaaattcatgcaagccataataattgttgatagttgattagatgatagttgatagttgatagttttagataattgttttagaaagaaggctatgtcattaatttcttagatgatcaattacaacataccaattgtctatttatatgctcaagtcaccaacctctcaatggtggtgaatggttctacattacttt

SEQ ID NO: 194080 - DNA, 349 bp, Glycine max
gataacaacttacatatctcaagcatcattaactttgataccaagaatatttcatctaatagaaaatgatctaaacccactgatgaaagcctcaaaagtggtaacagtactaagcactaacaaccctactaatgatctatagaaaaaatccatatcttcggacctccatcgaaaatgaagaatttgaatatgttggagttggaccacaattagccattatttatctacagcttaacaggagaatgttcatcatataaccataagacataattgcaacattacaaggtatagataggtttcatatacacaccaataaacagtcattatattttgtcaaaccaaaaacaca

SEQ ID NO: 194081 - DNA, 473 bp, Glycine max
  unsure (1)..(473): unsure at all n locations
tcataannattgctgntagttatagtgcacttgctgtcccaattctctactttgtaatatctattatataagcttcataacttcttcttttaaaggcctggttgaaggcagcttcactgatatgtatcggtgaaacatccaagacctagagtattggggtctgacacatatcaaatacggatacttgaagcaaactaaagcatcagtgctttatagagcatcaccaaacaagccactaaaatatgaagaatcaccaaggcacagcactaacagtagagagggttgagacttgagatagacaagagggagagatgttcatgatcagtcacgtgcacaagcactgaagcacagccacaagcacaattcagaaattagaactgagagagatgagaatgagagatgttcgaagagggagagagaatgggggtgggctgagtgtggctcatatatgagaatatgtctgagaataaatg

SEQ ID NO: 194082 - DNA, 368 bp, Glycine max
  unsure (1)..(368): unsure at all n locations
ccaatgatattccaacaccacaaatnttggacttaagctctcttttacgctggaaaatatcgccaaatatctctttgttaaagatattggaagcatttttaacctcctcgaaggaccccgcaaaatttcctcttcttctaaaccaagcataaccaacagatgcgcccaaattggctcccatctctaaaccctctgtgcaccattttaaagactgattaatcctaatagacacactaactccgcagcctcattatntgggcccatttagctaatttgacggttttaatctaatctcaagaattaatgaagcattgcgcttgaatccacaattgggcttgggcttgaatccacaaatggacttggacttg

SEQ ID NO: 194083 - DNA, 440 bp, Glycine max
agcttatgccaccgtcttatcataaagattttcttaaaatttcatggaagcccagccaaacaaattgagtcttaagtgtgtgccctgcattctctatagaaaactctatctctctctcaggtggcagaccggatatagcctcataaaacactttatgaaactctctgactacagggaggtcacacataaaaacctttgtctctatttccaagctagacaagatcatgtatacttgagtatctttctttaaagatgacacaacttggttgacagagataaacatcatatccttactcactctagaatcatcagacaccacactcttatcaaaatagttcaacaagacatgggtggaagataaccagtccataccaagaagtacatcagactgactcactggctaacatatcatatcaattaagaatgttgtaccagaaatc

SEQ ID NO: 194084 - DNA, 444 bp, Glycine max
cccgcccctcagaccgcctcgtacgccgtcccaccccccccccagacgagcttgatgctgcatgcagcaccccaagcaccgcagcaagcaagccaaacaacagcaagagcagggattcattttttaatggaaaaaaacaagactaagaatgacctcaagctttcggactcagcataacagaaacatgcgaatggaaaagatcataattcttctataccaagaaggatattcctatacactattaacctgatagttacaaacagcgaaacagcacaactgcgagcagctagaaccctgaagtatatatgggacatgttccatcgtcctgcaatctcagaaaaaactctcataaaagagggtacaagatggtacccaaagcccacgcagaagcctggcagatactacaaagaaaggaaacagataccactatctcctccgaaaaaa

SEQ ID NO: 194085 - DNA, 326 bp, Glycine max
ttatatgtgttgaatgaatacggatactctaaccgttaacaaatacttataaagatggaaaataaactattggaaaatcacacccatccatcgtattaattttatcacacgaattttacgttctatcatcagccaagactcaatgctcaacgcgcattagtgtcgaccataaacttaagtcttacacacacgcacatatatatataaatctactgccaagacaacttatatacgcctgatatacaaagctgctaacggaaactactaaccgtccaattaactatcgcctatatatataaaacaatgaatttactttcgaacaatat

SEQ ID NO: 194086 - DNA, 282 bp, Glycine max
  unsure (1)..(282): unsure at all n locations
agacacgtatgtttcattacaaccattatgctcgagagcgacaggtgttcctcgtgactatacttgtgaaagataccaacgagcgtggaattatttgcaaaaattcccataatagaagtctaaccttccattcaactggtgaaacctcgattcttagatctagctatagaacatcttcttgaatactagaccggacgatccacgctaccaaatctaaggctcttggattantacatgatggatatttctcacagcgtcactcatgttatagttataaatgac

SEQ ID NO: 194087 - DNA, 444 bp, Glycine max
cggaccttaagcacctgagctgcagcttgaaatgagaaattgtttctttattttcttacgaagcatgatggggttcggttccctagtattcttggacttacggagcatatatttactggaaggtaaattcatattgctctatctgcaaccatacatgatttctgtgtttctgaatattgtcttggtttggcttcagtgtttcttcccttgcatgggtcatgtcaaatcaggagacaagtttcttgacaattggtcagagattgttggctaatcctttgaagtaagttattctactggttcttgttctgggtgcagcataatatggacagaattttggaataaatgtgctgctagattttaatatgagagaatagttagctgcgcagatagaaagagagagagttcttaaaagttaatagaattgatttgaattggtaaataaac

SEQ ID NO: 194088 - DNA, 458 bp, Glycine max
gatccttaagcaccgcggctgcagcttgttgtagttattgatattatcttatattttttatatgcaaatcaaatgatattgattaataagtgatatagctcaattggcaccccagtatttgagattggggtgcaattatgttgaaagttgaatcatcatccaagccacctgtccccttcacctagacaggtcccttcacctccaaatatcaaattattacatgatactaattgaggatttagtttaggaaattttaaatgtgaatgttttattatttatattaaatctattctcatggcttccatttcaaaatttatgcatgtggtttgcctgcttcagttggtacgtgatatgcttgctgtcttcaagatttatttatggtattaggacattttagtgattatttaaatgtaaaagcaggtggtagaccctgtttttgcggcatatcatttgcaatc

SEQ ID NO: 194089 - DNA, 440 bp, Glycine max
  unsure (1)..(440): unsure at all n locations
agcttatctggttgggctgatgatgtaatttttattgcaagagtacgcaagtatggttgaggttgatcctcagtagcatcaaatgtttgtgagtctaacaaattggtggaaaatggtgcacaaagaagttgagtaaaagaagatgtgtttggttcatataaattttgttgtgcatgggttaaagaaaaagtgttttggattgcattagatgtatgtgaataatgggataaggataatattgaagttcatgagatactgtttgaaggtttgtggtgggaagtgtatgtagctggatgtttgcatacaattcaatgcatgaaagaatcttatgttggaaaacaaaaaannaaaatcatacctctgacatctttgtcgttaacaagttgtactatagtaaacttaagcatttcgcaccccactacttgtaagtatcagaatga

SEQ ID NO: 194090 - DNA, 449 bp, Glycine max
agctagcttgtggagcttctatggaggctggatctttgtttcttaatgagggccttcaatggtgatttttcaccatggagatgcagcggaagacaaaggagaagaggtgagaggaggcgccatccattaaggaataagccatgaaaaaaaagagcttcaccaccaagatgagccttggataagaagcttggaaggatgcttcaatggaggaaaagaaagagggagagaaagagagaggggggagcacgaaattgaaggaagaaaaagggagagaagttgaactttgagttgtgtctcacaagactctcattcatcaaagctacaacaagtgttacacatgcttctatttatagactaggtagcttccttgagaagctctcttgagaaaacttccttgagaagcttctttgagaaaacttccttgagaagctagagcttagctacacaca

SEQ ID NO: 194091 - DNA, 347 bp, Glycine max
ctaagcaaagaggatcattttcaatgaccaacgcctcaaaatgatcacctttcaagtcaaaaagagtcacttgattcacgcataacgaaacaactacgtccgtctgatgtcctcattacattttgaagaatactcacgatcagagggaaacaccctcgtcgaccacagacagagaataaaatataaacgactttccgacatcaaaaggaacagaaaaatcaaagacatgttcgcacattcgattaaacgctgttgctctttgagacaaacgtgagacgtgcttataccttccttaagcgtaaataccactcccgaacttataatttctccttttgaccggtttcctt

SEQ ID NO: 194092 - DNA, 271 bp, Glycine max
cgccacaacccacggaactaaaaaaacacaaaggctgagcgaaaccgacattgtggcaaccaaaagtcacccccaacagccaacaagacagccaccattcgagcacccaaaacgctgacgcctacgcagccaagtgggccctcatcacaacgcgaactaaacctaacaaaaaccctgtaggggagaaacccaaaacacatactcggtcacacaaccctacaaggatcggcccattaatcagacaaactaaacactctaaaagcgaaacaaa

SEQ ID NO: 194093 - DNA, 458 bp, Glycine max
ttaagtcacctgcagctgcaagctatagttacttgattgtagaatatttttttaaaaatcatataaaaaaaactgtatactctatttactggatgagaacatttatttcaatggctgagttaataaaattttatatgtatatagaatatcgagtggagtaattttataaataattactaataaaataatttaattataccacatatgtgtatcaaatatcatacatcaaccattaaaaaattatgatagatataaattttatatgataataaatgtaaaaatcaataaattaatcatatttaataattatttatgattagatgataatattaaaaaaatttactatttttttatgagagctaaaaaactttatgctattattacacatatactatttactctatgtacatataacatatatgtataagccatctgtagttgagttgacttcttctgtg

SEQ ID NO: 194094 - DNA, 336 bp, Glycine max
  unsure (1)..(336): unsure at all n locations
agctngaagcccttaatagtgagagaaattattttttgctgtctactgtcacatgagatntgaacatctactggatgatagtactattgaagcgaacagtcccagaaatgctttcctgcatctgatcaagaagataaatcccgatatttttactcatatcattattaatggatcatatgatgcccctttctttgccacacggtttaaggaggcactcttccattattctgctatttatgacatgtttgacactgtcataactagtgaaaatgaatggaggatgaccattgatagtgagcttctgggccgggacgttatgaatgttatagcatgtga

SEQ ID NO: 194095 - DNA, 434 bp, Glycine max
agcttgtgaaatatgaagtggggattgttttctatgaaaggaaggtacccaagaagtggcaagcctagtggaactggaggcaaaggagatgaaaaggtggcttcattgcttgaattcttgaaccatcttagcaagcatagcacactgatcagtgtgactagaatggttagaattggatgcaagttggtggaatcccaacaccacaaatatggccatgtgacacaaaatgaactcaacagcattttggattatgcagggtgaactaccttgtgtttcctagttatttttgcttagttaacctgtgattgagtgattgtagatctcatcatctcaagctagaacattactagaccaaaagtcaacacagtacaacttcagaacagaagatccaaagagcaggttttggatagtttcttgcaacccgtaaattgaat

SEQ ID NO: 194096 - DNA, 430 bp, Glycine max
tgataaggagtcttctttgagcagatgccttatatttatgctcgcctaacttcttgttttattgcacagtgatatgtggtctttgtaaagtgaagggtaggatgcaacaagttgaagagctcatttcggatatgcttcagaatgggcataacctgtatgccactatgcataattacttacttgcgggattttttgaagacggggatgaagaaatgacaccaaagacaattatgacataatggacaagaactttgtaatcaaccaagacattttcttcacttttgtgaaggtgttgtgtgcaaagggaaaactgaaagatggagaaacagtatctgatgagatatgcacgagatgccagttgaatgggaaagttgaggcaacgaatgaacattaacgtgcatggaattcttgcacaactatattggagagg

SEQ ID NO: 194097 - DNA, 420 bp, Glycine max
  unsure (1)..(420): unsure at all n locations
agctntgcaacagaagacacncagctctattattttgttatataagncaacaaggaagcataaatatattcatcaggaaaacatcatagtggaaggaaactgcagtgctgtgatccataagatccttccacccaagcataaagatcctaggagtgtaactattccttgttcaattggagaagtcaatgtgggaaaagctcttattgacctaagagctagtatcaatttgatgccactctccatgtgcagaagattgggagagttggaaataatgtccactcaaatgactttacaattagctgaccgctccattaccaggacatatggagtaattgaagatgtgttggtcagagtaaaacattntatcttcccggcagactttgtggtaatggatatctctaaagatactggcatccctgt

SEQ ID NO: 194098 - DNA, 459 bp, Glycine max
  unsure (1)..(459): unsure at all n locations
gcttcatcgttaattcaagaagaaagtgataaagaggactatatatgaagatgatgattttagtttcttcataaagagattcaataaattcctaagaaacaaaggatatcaaagaagatcatgctttaaaccaaagaaaaaaggagaagattcatcttctatttcaaagtgttatgaatgtaatcaaccaggacatctgagagttgattgccctagtttcaagaaaagaatggaaaaatatgagaggaaaaccttcaatgataagaaagcaaagaaagcttacatcacttgggaagataacgatatggattcatccggagactcagaaaatgaagtcatgaatctaagtctcatggccaaaaattatgaaagcgaataagaggtaacatcttctaacaataacttatctatttccttagatgaacttcanaatgcattcaatgatttacataaagaatc

SEQ ID NO: 194099 - DNA, 360 bp, Glycine max
catctcactgatctgagctattcctttataccacttggtgtaaaggactgatgaatttagacctcatcactgctctctatacgtgtgtattcttgacctatgtagtaccaactagtgtgtttatctcaacgctatgaatttctactattaattataaatgcattttaatattacggtatatatgttgagcatctatatatgtgtagtataaactataaattcgtctatattatattcaaaatagggttcctcccactatgtgctcacctgtatatattcttgaccatgtcggacagatactatcacaataacaaattgttggtaactttccatccgattacttactgttttatctatcct

SEQ ID NO: 194100 - DNA, 272 bp, Glycine max
  unsure (1)..(272): unsure at all n locations
aaccgacgaaacaaaaaccccccccncccgcaggggnttgatgcatcgtgacaacggaananaaaaccagcggaagaannaaaacaaaaagaaagaagaactttgttaaggaagaacacccaaacgcagaacggaaaacaataacacaagggcacaccccaagcgccgacccagagaaactcgcaagcccgacgaggagtgcgcgagctcgagccaaaagaccgaaaagccaccggctaacagctaccgactgagacacccacgcaagccac

SEQ ID NO: 194101 - DNA, 299 bp, Glycine max
caacgacccaagcgggagactctcgaagagccggcagcgcaacacggaagcaagagccaacaacaagaccaagcctggcgaacaagaggaaacacaaaagaaagggactaacagagaacaagtgcaaaaaaccaaccaatcacgggcaagacaaacgaaaggaccagccaaaaggcatgacacgagggacaagatccacaggcgagagacaatccaaagggagccacgaccacgcggacgacgacaaccaaacacaaaacgaggcctgaaccgcgccataacagaggaagaagccgaaa

SEQ ID NO: 194102 - DNA, 428 bp, Glycine max
agcttaaatacactataaatactttcttcattgtccacccactggattaagccagcccgaccactgataggagtcacagaataatagcgaatgctaagagaattgctacatgcagaagaagaagaatgcagaaaaccatttatagcctgcagtaattgcataattctagcatcaaggcgcaaatcttctcgtcctttaaggagatatgtgtacttctgaccatctgaaccaagtatacctagtttcttaggctttgtctttgttgataagatagtgacttgttcatgaaaagaagcaatagtgacaaccccttggagatcagttgctttgccagagtcaagtactttcattagtttctcaagacctggcattggaacatctgaagatgatagcaaagctcaatgaggtgcaacttctcgcaaagaaac

SEQ ID NO: 194103 - DNA, 412 bp, Glycine max
tatgaaatcaaagaaatagagatgaaaaaatgaattgtttttatataattaaccaaatgtaatgtaaaaatcataaaagaacaaaaaaaaatcattaataatacaattttaaatatttcaataaaatctctatttttatttctttatttcccaacaacacttgtaagcatttgtaaaaaaaaaaattaaaaaatcaacagtaatgaaaaaaaggactatttattccttctaaagaatcacgaaaagttcatgttgtctactatatattgcgaattgcgaagatgataaattttaatctataataatctcagtattttcaccactaaacccctaattttaaagataaacttcaatctataatctcaatattttaaccaccaaaaccctaattccttgaatcctcatcgacgtt

SEQ ID NO: 194104 - DNA, 356 bp, Glycine max
actggctaaacgatactatggtctatttcgggtggaagaacgcatcggccaagttgtctactcgattgaagttaccaaaatcctttaaaattcacccaaattttcatgtttctttactgaagcctcaccatgtcccttgccgtctccagcagctctccctcccgccaatttcaacaaccacccagtcatcaagccactttccctgctggactggaagtgggattcatcaacttcaaccctgactaagttggtcttggtgcaatggaccagattggctcctgatgataccacgtgggagaatctgttctcctagtgcaaggagatgatagcaacatacccatgcccactaatagacc

SEQ ID NO: 194105 - DNA, 453 bp, Glycine max
  unsure (1)..(453): unsure at all n locations
ctaccttgaatagaaaaaggaagagagggattattttcttttcatgagtggttggctntcaaaccaaacaaatttaaaaggtgatcatagacctaaatcctcaaacaaaagaggaggagattacatgaaaaccaatggagcatcaaaatcctttgataaaagaaaagtgcggttctttaattgtcaacaatgggttcactttgcatatgagtgctagcatagtaaaggaaaacaaaagaaagaaagtaatgatgaagcatgtgcggcccaagaagattcagattctgatgtagttctattgatagcaaccacctatgaggatcttccacagtttgagtcttggttccttgatactagatgttcaaaccatatgacaagccacacagaatggttaagtgattttgataccacaagagcaagaaaagttcaatttgaagatgatataacattgag

SEQ ID NO: 194106 - DNA, 435 bp, Glycine max
  unsure (1)..(435): unsure at all n locations
agcttgganaaagctattnttcaccttttcgttaagccaatatgttggcttagcgagcatccgctaagcacaacactcatgggctaagagcgaggaagaatccaaaagaagatgggctgtacagattcgctaagcacactgctccagttcatccgctaagcgagaaaggcgtgctaagccaaaaatcactaacgtgcgctaagtggtccatacgtgcgctaagcacacgagcacgaacaagcccacctatttaagcttgaaatcaaattttgtgaagagagtttggacagggattcagagctttgcatgtctagggtttctagagagagaaaggtccaagttccagagagtgttgagagattttgctgtgagaagatctgtagagaccacaactcgaagcatgagccggttngagagcttgagaatgaattgtga

SEQ ID NO: 194107 - DNA, 440 bp, Glycine max
  unsure (1)..(440): unsure at all n locations
tgagatgaggaagtgttgaagggtgaaacttcctgctnttantgttgaccacagagtggtacctggagatatgtcgcgggggtcaggagaccttggggacgtcaggtggggtgctattgcccaaaaccaagcttgaccaatcccaacccaacccgggcatagtcggtcagtgagaacctgtgatgtacctaaacaggcgagctcctggcagtcaacagataaaagaaacaaagaccacaaagcaaggaggcttgtggtggctggccagctgtgaattttgtgtgatatgtggattatggcctctggtaatcgattaccaagggtgggtaatcgattacaaggcttaaaaatgaagacaggaggctaagatggtctctggtaatcgattaccaaggggtgtaatcgattaccangctttgaaaacgaagtcaggaaactat

SEQ ID NO: 194108 - DNA, 448 bp, Glycine max
  unsure (1)..(448): unsure at all n locations
agcttcanacatgaacagaagtagnctgcagtcttaactttattttgaagctngnatgcttgcactagttcttttgctttacacactaactcagacaaaatgttgacccaatatgcttctcagttcaagaaaaccatggttacattcatcattgacttttggacaaggaattcagggaagtaacaactagttgcaagtaaaacttacatattcttaggaaagaaatgagcttgtacccttggaatagatctatcttctaccaaattgagatntttgagagcagctctagtgcatttggatttacatgtgtcaatcgtagaccagacatgacacataacccacaccgtatgaaataacatcaagcataaatacaggagggagttgatgtttttattttttcagaacccaagaagataaggatcctctagattatagaaaacaaagagaa

SEQ ID NO: 194109 - DNA, 451 bp, Glycine max
  unsure (1)..(451): unsure at all n locations
tacatcttcaacggctccagcgtaacacattatggctctcttcacgttctgtgagttgaagatggagctaaggaagctagctattctactccccggtgaaatgggttgcttcactctctggttcaattcgccgtaaattttcaacgccctcaacttggtccttgtaaaaccactttctttgttctgcttttctgaactcataatacggtcctgcttcttcttcttcttctccgatgtgagccttgctggtctttgtttcttcaacgttagggttgttgttgtgtctgtttctgaagaggagaatatgccccctgcagagctgcattctgaggagcttgaactcgagtttatcaactgagcattgagggaatgggaaccgtgcttctccatccaatcttncaacatcacggctcggcgaagattcattctttcttttttgccacccttttca

SEQ ID NO: 194110 - DNA, 450 bp, Glycine max
  unsure (1)..(450): unsure at all n locations
agcttgccttgccccttgatatattngatggacttatggtcactatgaatgacaaattccttgggataaaggtagtgttgccatgttttcaaagcccgtactaaggcatacaactccttatcataagttgaatagttaaaggtaggaccacttaacttttcactaaaataagcaattgaatggccttcttgcatcaacacagccccaatcccaacatttgaagcatcacactcaatttcaaaagatttttgaaagtttggcaacgcaagtatgagggcattagttagcttttgcttaagaacattgaaagcttcttcttgtttctctccccatttgaaaccaacatttttcttgagcacttcattgagaggtgctgccaatgtgctaaaatccttcacaaatcgtctataaaaacttgctaagccatgaanactcctcacctcggtcatg

SEQ ID NO: 194111 - DNA, 413 bp, Glycine max
tgacaggttcaagtgcaggtactgctactagtggaggcttcttgtttttggttgccagacctcaaggtgatggcactcacatttttcagattctgcacagattgtgaaggcaatttgtcagaattttgggattgagcttggttcaactaagtagccatctgccccatctgatttttcagactctgaatggaggctcttgtctcttgctgaaattgcatattctggatggtcatttgcctcactaactcttctaaggaaggttgagaaggagcctcagatgcttgttgtctttgttgtgactgctgctgttgtattggaggaggaacatatggattgcttggaccagcagcattctgaacaggagggacatgctattgttgttatggaggacttgtacatctcagatttggatg

SEQ ID NO: 194112 - DNA, 440 bp, Glycine max
  unsure (1)..(440): unsure at all n locations
tgcagctttactaattgcaaaggccaatgatttcatttagtgnaancgantacaatatattggtaatcgattaccagagtatctgaacgttgaaattctaattcaattgtgaagagtcacatcttttcataaaatgctttgtgtaatcgattacatggttttggtaatcaattaccagtgacaagttttgaatacaaatcaaaagatgtaactcttccaatggttttcaagtttttctcaaagttataattcttccaatggttttcttgaccagacataaagagtctataaaagcaagaccttgacttgcatttcaataactgtgataattatttgatatctttcttcttcttctattgccaaaagctttctgagttttatgagttccaaaccttgttctttcacagaagacaaaagtgtgctatatcttttcattctct

SEQ ID NO: 194113 - DNA, 384 bp, Glycine max
aaaagtgaaattgagaatgggataagattggagcaaactctcacctcacacaagtctataacatcgatttaaacttgttcaaactggatttacacctaaaatttcactgaatcaaaatttgactcctcaacacccaaatttaccctagaaatggctctttgttcactttggtcatatgtttttctctctagcacaacccaaactttttcataagtcttaaatgacatttcaagctaggattaactcactctaacctccaaataccactaaatccagatttggccttccaactctcagaatctcactctttttccactcacaacaccatactctcaccttctaaccctaggttaatgctacccttcatctctaataagtttccat

SEQ ID NO: 194114 - DNA, 447 bp, Glycine max
agctcttggtttgtttttgagcgaaacattatattttccatcatacaacccggaccaagccgaaaacgaagaacaaacaacgtttatgaacaaaaaggtcaaagattttggtttgtgtttgtgcgaaaaaactaaaaaaccatcatacatcccgaaccaaccagaaaacgaacaacaaacaacgtttatgaacaaaaagctcaaagcttttgctttgtttttgtgccaaaaaagtaaaaaaccatcatacattccgaaccaagccgaaaatgaacaacaaaaaacgtttatgaacaaaaagctcgaagcttttggctttgttttgtgcgaaaaaagtcaaaaaccatcatacatcccgaaccaagctagaaacgaacaacaaacaacgtttatgagcaagaagctcgaacctttttggtgtggttttgtgcgtaaaaagtaaaacac

SEQ ID NO: 194115 - DNA, 450 bp, Glycine max
  unsure (1)..(450): unsure at all n locations
nntgattgcttttgcnatttatactgtctgagaatactgtttgttattcacctaatggttatnttattatagtttgtgtgagatggttatctttgggtatatatatttgtgattgtggcatcataatcttgggaaaaatgtaaattatattaaacccaaaatgatacaacaataaacggggcattccctacagttagagaaaatcaaaagcctccctaatacaagaagtcctatatcaagatgctaaaacaaatgcaacaggtgtggttgtctatacataagaaacttaatcttgctaataacctctattacagaaaattgataatcttcaaaaatcagcttgttcctagacagccaaatgcagtaaactgtaattgttatagccagacaacgtaattntccttgaacacctgatgtggatctgcccctaattaaagagtcagtaatgcc

SEQ ID NO: 194116 - DNA, 441 bp, Glycine max
agcttgctcaatattgattgttggggtttttatttgtgtggttggagggtgcaatttgcgttttatatggatgttagttcaaggtggtgaattgttgagttgtgactaaaatccatatggaagtttattctgttatttttatgttttgtcctctgcctatataaggcaaggatgccctgtattttctatataagagaagcttccacttgtatactgcatcgataataaaaagctctctgtttttccctcccgtggatgtagccttgatcaaaggtgaaccacgcaaatctgtgtatttttctcgtctctctcccactttcaatttgctgcaacttcggtgtatgacatttctgttctgctgcatctactgatactagttcttgttgttcttcatcacttccataacatcgttcttgcattttgaaagtgaacacccttcgt

SEQ ID NO: 194117 - DNA, 443 bp, Glycine max
  unsure (1)..(443): unsure at all n locations
ggcaaccacaaacaacttctactcttcgagtaacagtatgtgtatggcgaggagctgcagggcaaccaagtttgcccggaagttgcggtacacattcaggcacacaccttcttggttgatttccatattcttccaatttgcggagctgacgtagtgctagaagtacagtggctaaagtcactgggacctgttctaacagactacgcaactctcaccatgaaattcatttataacgataaattgattaagctcaagggtgatcgtgatgcaaatattgatcagatatcaccatcacagctgcgacgccttatgaacacaggtaacactagtacctattttcacattcagcttgactctcatcatcccaaacccttaccatngactcactcgataccggcaattcaaaccttactcaccaaatattcctccgttttcaaccataa

SEQ ID NO: 194118 - DNA, 436 bp, Glycine max
agcttctaaggaagagagcttatctattataatggtgtgtgtaactaagctctagtttctcaaggaatttttctcacagaagcttctcaacgaagttttctcacgatagcttttcaaggaagctacctactctataaatagaagcatgtgtaacacttgttgtaactttgatgaatgagagtcttatgagacacaactcaaagttcaacttctctccctttttcttccttcaatttcgagctcccctctctcttttcctctccctctttcttttcctccattgaagcattctctccaagcttcttatccaatgctcatcttggtggtgaagctccttcttcctggcttattccctagtggatggcgcctgctctcaccttttctcctttgtctctcactgcatctccatggtggaaaattaccattataagacctc

SEQ ID NO: 194119 - DNA, 456 bp, Glycine max
  unsure (1)..(456): unsure at all n locations
ctttaacaaattttctttctagggaattatacatgtttgttttacatagntaacaaacattggccatggtgaacatgcaatttcaaacttcttaagacaatcatcgaactgatccttggaaggacaataaaccaaactcccccaggcatccataacataatcttatgcattttgtgaccaaccagggatttacatccttgacattcttgttaatgtgaaacctacacaacaagtgggtacactcaggaaatatagttttcactgcattcattaatgctagatttttatcggtagcaataactccaaagagggcatcatgtctaagaaaaagacttcgaaacctgtctaaagcccacaccacattatttagacgttctccctcctaataggcaaaaccattagagaatgtcatccgcgtnggtgtcacaccaacaaagtcaagtaacgggagcctat

SEQ ID NO: 194120 - DNA, 351 bp, Glycine max
  unsure (1)..(351): unsure at all n locations
cccttggagcttggactcctgtccatggccgaaactcactacaagccttaaatgaaaaaccatgatatcaccatatccttaaggattgctggagcttcggaattgattagggaataagagcgggggttatcgtttcattggataacatgtctagttggctatgcttcatgatgtattttgggccacacaggatgtacattggatatgaggcaaatgttggacatgctgaaagagatgttgctactcaaaagctacgtctgttaagaanaatcgaaaaagataaagactagctatccagttgagtgaataagatnctaaacgacaaaagaatgatgagactcttgggtctac

SEQ ID NO: 194121 - DNA, 405 bp, Glycine max
  unsure (1)..(405): unsure at all n locations
taggctaagttaagcgtaccaccctcaaactgatgtcctttgtttgttccattcagntactggaggaccttttgagagtgtgtgtattagaacacaaggggagttgagaaagttttctatcgttgatagagttcacctataacaatagttttcattctaccattggcatggctctctacaaagctctatatggtagaaggtgtaagacacccctgtgctggatagaacctagagggaacctcatcttatgacctgaagtggtacaacaaaccactaggaaggccaagttaatctaagagagaataaggactcctcatagtaggcagaaaagttattangacaagaggaggaaagacctagaattctatgttggtgatcatgtattcttgagagccagtctatgga

SEQ ID NO: 194122 - DNA, 440 bp, Glycine max
  unsure (1)..(440): unsure at all n locations
agcttgntgtattcctacatgcttctattggttattattaatatgagatgactgttgtgttaatgtgaggaaccttgatgatgactctcttattttttgctactttatgtggatgatatgctaatttctagtaaccatttatgtgatgtgaatgagtcaaaatctatgttgggcaaagagtttgaaatttatgacttgggtcctaccaagaagattcttgggatggatattcacaaggatagaagatccaaaaaaactatggctctcacaacagggcaatgttgagaaaatgttatacaggtttggcatgagcattactaagccagtgagtactccacttgcatactacttcaagcttttatagattagtgccataagatagatgaagtggcggaatacatatnaaaggttcgctataatagtgcaatctgttgcttaac

SEQ ID NO: 194123 - DNA, 390 bp, Glycine max
  unsure (1)..(390): unsure at all n locations
gtttactgaataatcngatacccctctggtctcgtaactaacgatggcagcggtccgatggaagagcttcgaggagaacgaggatcaccctgaaccgttctttcactttctttgaagttaaagctggaaaaagtctatttgtatcatccggaaagaagtaagcttaagctgcctaggatattatttttaatgttgcgaagaatttcttgagtatcgcatgagtgcctcatccacaatagaaaattatatggctggctgaaaaccctaacaactatccggtgattgtagcaaagtcatcaaatacctacactgacacatttattgggattgatggagctggaaagccactagccgaagaagtgaagcccgagacatgcaaatcatgtatct

SEQ ID NO: 194124 - DNA, 437 bp, Glycine max
agcttgacagtttacttagagtattcttattcttctcaaccttcaaaaggaatgtcgaaaatagtaacaagaagtacctctcaactaattaatgttattaatgaagatagtgaccaacaatcagaaaatacaactgatgtaggttcagtatcggaaaaatacattaatcatataaattccaaacattggaaaacaccctccaaactgtattatcaacgaccaactgcccctaaccttctactataagaaagaggtgagagtaatttcaaaagttttagtgcaaataacatctatgagtggaatatagatgctccaacggagtacaatatcatgaatacactctaacatatgaccatggtagccacgacttaccaaacatctcatgaatgttcggaggaaacgattattgatatcttagtatcaggattctccggaca

SEQ ID NO: 194125 - DNA, 439 bp, Glycine max
  unsure (1)..(439): unsure at all n locations
tagtgcaagaagctcactaatctacacctataacagtattagatatatgatggaaaagacacaccaaaattccaagagaatacaattccttatagaaagcaaaggctagaagaaggagaagcaagcaatggaagtcattccttccctccattccttatcttttcccactttactaaataatccccttttgcaattgtaaagtctccatgaccgcttgagggaaaggtggagaactctttattaccccaattccccaatgaatcattgagtgaatttcttaaccgctttcatggtttactctagaagacttccacccacaggttcaatgagtcagntcaactcaatatcttcattgatgacttgcgaccccattcaaagccagtacttgatgcctccgctggtgggaagaccaactaaagatactcgatgaagctatgga

SEQ ID NO: 194126 - DNA, 443 bp, Glycine max
  unsure (1)..(443): unsure at all n locations
agcttagtcactgtggtagcacattaatatttcttacaatgggagaaaaaaatggccaaaatctcaagtatcagcacatctttagtttgcaaattgtcttcacaacctgtatatcaattatttatgtgggttttgattgactatatatgtcatttattctttggataaatagtgtatgcacaatgttttctaatcacaatctatctagattgtttgataatataaaaaaaaattatcccaagctagaaacttttggtataagcgaaaaaattatattactttccacaaatctaaagtaacagtaaatagaaataaaactttgattctctaatttatatataaaatataaaacagtagttaaagcacagaggaaataatgtccaggtatacaatatctatgttaatcgtgagattcaatntcaatcaactatatatgtcatatg

SEQ ID NO: 194127 - DNA, 339 bp, Glycine max
  unsure (1)..(339): unsure at all n locations
gacacatacaactcagctgcctgacggtggaagggaattaagggttttattattatggggagnggagaggttagcattctaattatctcactaacattctaacaaaaactagcaactagcattggctaataataaaatcatttaattagaaaaaattacaaaaatttggtattatataacttgattatatatatgtagggggaggggttactaacatagatccacttcaaaattaaaaggtgtatgttaacattcatcaaccgtttatttggacaaaaacacccactcttactctatttagatggtcataagtaaaaggacaattattactaatactct

SEQ ID NO: 194128 - DNA, 441 bp, Glycine max
  unsure (1)..(441): unsure at all n locations
tcgaactctntatttattcccagctatatctatattattttttactcgaaaagcttttactaaattatagtcacactcttaattcaattatgttaactattatcattagaacaatagttaaaaatttattgacaagtgtaacatctaatattataatacatatttagtgtgctttctaataactctatttggtttattattttcttaaccattgttcttagggtccataaagaagaaaaaaaccattgttcttagggtaaatatgtacgaatattttaaaaaaccattgtaacatctaaatagatatcaaaattgcttttaatttaatggatttcgcgatttcataaatattaaccaccacttagagcccatttctcccaaataaaacccgtgatcgaagcagtccaaaaaacattngtcagataaacattacaagcctca

SEQ ID NO: 194129 - DNA, 431 bp, Glycine max
  unsure (1)..(431): unsure at all n locations
agcttgtagaaaggctatatatgatacatgtcacggcttggtttggttcaaagataaaaaggatgccccacattatttccatgacacaaatgcaaaaatgatgatttggaaactttatgcaaaactggtcatgcatgcgcctatgcggacgctcaagtgtcaaatttttatggtcaggtgatgctagggttcaagattcatttcctctattttaaatcaacccaatgtttccaaaatatgttcttttatcaatttgtgcattcctccaagtccatttcgggcgtccggggaaattttcacagcattcacccttcaggtgtagacacgtttttttcttcaaaaatcggttatgatcaatagaatttttttcaaagaanaattggaaatcatctcttttcaaaagcattgtcgttttaactagaaacttattt

SEQ ID NO: 194130 - DNA, 440 bp, Glycine max
cttctttggacctcgaacaagcaattaacttctctttcatatatcatgctatgtgctcgcgactggtctctttcttcccttcgcaacttgagttcactattgctaccccatagagctccgcgaaatttgttccggccatactcttccttgcgagccctcttggtctcttgttcaagggctcttgcagtaattgcattctcttcccgtaacccggcacactccttccgaacgtgtgtagcggccaacttgaacttctccttggcaagttttgcctttcctaactcgcttttgagagattggacttcttcgtcctcttccggtgcttcaaaactctcttcgctgacgacttttaacttggcgagccaatctaaacctcgtatatgaactttcatccattcgtggtacccacaaatgatgccattacgaatgcctctaagctc

SEQ ID NO: 194131 - DNA, 307 bp, Glycine max
agcttatcatattctttggctaagcgcgactcgttgtcgcttagctcatttccttgcagccagaactgaggttcattgagctaagcgccactcatggcagctaagctcaattctttgtggcctagactgggtttatcaagctaagtgccactcatgccagccaagcccaaattcttgcaacaatgtcagcgctaagcaatcccttttccgttgagcgcatgctcctctatactcaagatgcatcattttagctaagcgagttcatcttttgaggatgaacactcatcctcttactgaaaatacatgt

SEQ ID NO: 194132 - DNA, 457 bp, Glycine max
  unsure (1)..(457): unsure at all n locations
tatggcatntgctgcactnntgcgttggtcttctccagcatttgaatggtgggtgacccattttgccacaatggtgacaaggtgggtaatttttatttttacccttacttttactttggtcatttacagtacttccacctttatattgcttggctggtaaagcaccatcaaccacacaatcttgtctcataagccttcgctgctcctgggcttgcaaggcatgtaacactcttgccaaagtgatcttggacagatcctttgtgttctccaacgtggttattgatgcttcatatttctaaggcattgcaaccataattttttctataattctagaatcaaccaatttagtgcccattaatctaaccttattagcaatgccaagcaatcttgccaagtattctttaattgtctaagactctntcatcctttggagctcacattccctcatncaagtcag

SEQ ID NO: 194133 - DNA, 449 bp, Glycine max
  unsure (1)..(449): unsure at all n locations
agcttgaccgatcccgacccaacccgggtatattcagtcagtgagaacctgtgatgtacctaaacaggcgagctcctggcagtcaacagataaaaggaacaaaggccacaaagcaaggaggcttgtgtggtggctggccagctgtgaactttgattgatatatgggatatggcctctggtaatcgattaccaagggtgggtaatcgattacaaggcttaaaaatgaagacaggagactaagatggtctctggtaatcgattaccaagggagtgtaatcgattaccaggctagaaaacgaggtcaggaagctaggagagcttctggtaatcgattaccaaggggtgtaatcgattaccaggcttagaaatgaaagcagcatgttgtggaggcctctggtaatcgattaccangctgtgtaatcgattacacagaggaacatgccactggt

SEQ ID NO: 194134 - DNA, 460 bp, Glycine max
tccttaagaagattcctaaagaagctagagcttagctacttattcctctctaatagctaagctcacctccttgagatgagaagctagaacttagctacacaccccctataatagctaagctcacccccatgacaaaaaatatgaaaatacaaaaaaaaaagtccttcctacaaagactactcaaaatgccccaaaatacagggctaaaaccctatactactagaatggccaaaatacaaggcccaaacgaaggaaaaccctattctaatatttacaaagataagcgggcttatacttagcccgtgggctcgaaatctacccaatgcccttgcgggataagattgcataagataatacagccaaattcgcccgtttctcatttatggatggtttctcggggtataatcaaataaagatggcaccagaggatgtagagaagaccactttcgtcacccaatgg

SEQ ID NO: 194135 - DNA, 440 bp, Glycine max
agctttgaaatcaaactataccactggttatttattacagttaattggtaattgattaccagagagtaaatactttggtaacttagaaaaatttggaaaaacttttcttgtaaaaaaaaattgtgctatgtttggtttttgaaaaatctttttcaatacttcccttgtgaagtcttgacttgttgctttttggtttcttctcttgaatcttaattcttcttgatgtcttttctttaatcttgatcttgaacttgttgactcaatcttgacatcattcttttaagcttctttttgtcaaaatcaaaactacttgaatcatacttgtcacaacctacccttttgtgggcgagcgaggcgaagctcacgggtgcgttttccaaaggaagaaaatgcgcggagtcgccaccaacgtttatttgtggaaaacgtctgaaaaaccg

SEQ ID NO: 194136 - DNA, 451 bp, Glycine max
taccaatgtcattaactccttcaaattgtactctccatttattcctatatctgctaatgcctcaagtgtccttttttctcacctcaaattgatgaaccttctttaccaatagcacctcaggttgcctaaaatccacagccttaattccacttacactctcaagcaccattacaccaaaactacctagtcttgggcagcacaaccttaaatccacagctcctacccttaattaaaatccacaacctcaggttgctcctattgttgattacatgatggctatgctcattccttgacaaaaattcagccacaacaaaactacctagtcttggggtcatgtcaggttcaagagtcactgctgaagaggttatgttcctgtgaatgacttgttcatcccattcctcatgcagatagagaagtgcagatgcaagtcattttactatgttatacctat

SEQ ID NO: 194137 - DNA, 380 bp, Glycine max
actccaccgacgagtccatgcacctaagaaagacaaatcccacagagaaacgcccgaatggctttctaggctatcgtaccaaaagatagcgtcgaatcatcacatcatcacattacctccctttagggtgccaacaaggacaccgcatgaccgaacgggcggatttcattttaacagaaattaacagacgatgccactcaaatgatcggtgaaaacctatctcattctttcattaggccagaaaaagactcacataaatgactaaagcacgtcaaaacgcggtacggaaggtacatgaaacgacaataaaagtacgggaaacaagtggggacccccacaggggcccacaacgaagtgaaagtgctaccccgaaactaccc

SEQ ID NO: 194138 - DNA, 417 bp, Glycine max
  unsure (1)..(417): unsure at all n locations
acactacacnaaactcaagcttaagaaattatttgtgtttatttcagtatgtgtagaggttttgttgatttctctttatacttgcaggatgaatcgtaaaaagctaactaacaactttagttttaggatcactcacatataccatgaagacaacgcttgtgctgacaagcttgcttcatatggtgcacaatcttttcggtatacttagtgggattctccaccatctttagttgatcaggagctccttaagtattgggtataggcagaggcttcctttgtatagatttccttagactcctcttttgggtacggtttggcacccccccccacccctatagtattagtttctctcaatttgcttatatcaatatatttcatggagcgtttattggacctctaggggttggggtggcaaca

SEQ ID NO: 194139 - DNA, 404 bp, Glycine max
tatgcgcatacttcttcatgaacgttcacttgcatttgttattcttataactaagaaaaatgcacccatatacaatcaaggcaccttcgttacctagattatttacatgtattttcaaggtgtatttgctacctacatcacacacatttcctttgctgaattcacatacatgcgtactctaagcactttggctatcaaaaattgcatacgtgcacatcttggtgtttctaatacctatacatacacaaacttcatgatgaatcttgactatctacacaataaggtgctacatttcatgcttctctcttttatatttttcaagtgatttttttttactacctaaagccgcatgcgaattcaagtatatattcttatattttcgtgagacattttgactaccaaaa

SEQ ID NO: 194140 - DNA, 428 bp, Glycine max
  unsure (1)..(428): unsure at all n locations
agcctttgcaagctagaatcatttatctttatcttctacagccaatgggtgagtcccgtccaggtagtcccaaagaagactggcctcacagtgatcagaaatgagaagggggagctgattcctactcgggtgcacaacagttggagagtctgcattgactataagaggctgaaccatgttaccaaaaaagaccattttcccctgccattcattgaccagatgcttgaacgcctggcaggtaaatcccattactgcttacttgatggttgttctggttatatgcaaattactattgctcctgaggatcagganaagaccacattcacctgccccttcagcactgttgcttataggaggatgcctttcggcctgtgcaatgcccctggtgcctttcagcggtgcatgattagtattttcagtgaattttt

SEQ ID NO: 194141 - DNA, 434 bp, Glycine max
  unsure (1)..(434): unsure at all n locations
agcttgaactcgaaaacgagngagagtgttaccttaaactgngagngaacgactagctatgagcaataatatttgcatgaatatctgaattttagaatgaaatgtataaattaggacatgatgaaggccatgattgtacatacacaagctctctgaccaaataacttaccttgaatgatacttgtatcttttgctcccatgtataaagtttattgatttgtcattaactgaaccctgaactttaaatgagtatctcctaataccttgtttagattctaggagagcatatggttcaagacaaatttactctaaatttgggggagaaaagttgaaaggaatgaaaagaaaaaggttaagcatcagcacacacaacaaataagttgtatgttaaaaaaaagagagaagatagaaaagaataaattgtgttgtacaat

SEQ ID NO: 194142 - DNA, 432 bp, Glycine max
  unsure (1)..(432): unsure at all n locations
tgtcccgcaagcctctccaacatctggtccatgaatgtttatgaaaatggtctttccttgtggcttcgttgagcttgtggtagtcgatgcatattctccaaccagtgacaatccttgttggaattaggtcattctttttattccgaatgactgtcatgccccctttctttggtaccacctggactgggcttacccaagcactgtcagaaatggggtagataagcccaacctttagaagcttgagcacctctttccatacctctctcgtcattgatgggttgagccttctctgaggttgtctgactggtctgtaatcttcatccatcattatcttgcgcatacaatangcagggcttctcggatggactccctcttttcaattcttcaaaactggtcccccatacaggaatattttcttcacaatctaagtct

SEQ ID NO: 194143 - DNA, 393 bp, Glycine max
  unsure (1)..(393): unsure at all n locations
agcttggtgcagatgtgaacgacaatatttttntacttggatgntcgattgagtctcagaatatatcgaggcgctggaaacttaaaaccgaagctcgtagcaaattcgaaggacaataacttttcactgggaagtccgattgagtcccgtaatatatcgagacgctcgaaatttaaaaccgaagctctgtagcaaattctaacgacaataacatttcactcgggagttcgaatgagtcccgtcatacgctcgaaatttaaaaccgtaagtcgtagcaaatttgaacgacaataacacttcactctgaagtccgattgagccctgaacacatcgatacgctcaaacatgaaaactgtagctctgagacaattctaacgacaataacgttttact

SEQ ID NO: 194144 - DNA, 441 bp, Glycine max
  unsure (1)..(441): unsure at all n locations
tcgatttaaatttcgagcttcacgatatattacgctattcttttctacttccgagtgaaaagttattttcgttagaatttgctacgatcttcgattttaaatatcgagcgtctcgatatattacgggactcaatcggacttccgagtgaaatgttattgtcgttcaaatttgctacgagcttcggttttaaatttctagcgtctggatatattacgggactcaatcggacttccgagtgaaatgttattgtcgttcgaattggctatgagcttcaatattaaatttctagcgtctagatatattacgggactcaatcggacttccgagtgaaatgttattgtcgttcgaatttgctacgagattcggtnttaaattctatcgtctggatatattacgggactcaatcggacttccgagtgaaatgttattggcggtcaaat

SEQ ID NO: 194145 - DNA, 437 bp, Glycine max
  unsure (1)..(437): unsure at all n locations
agcttcaaggatttcaaattccgcctgttttataaaaaattaagttttattgtaagtaaattataaattatgcctattgaagaaaatcaaagaagagaactaagatgcctgaatatcctcccatatcaaatccttttgagcagcaaggacttccttccaggtctcgtatgtgacatcgaccttatcacacgcgacaatccctaaatatgttcgtaatttcttcttgtggggaccatcggccttgccggtatcaggatcaatgttgaccactagtctccctgcactaagttgtctagtggccaacgatcgtagccgtgttgctttacgtgtccacttcacagtagatggagacgccgatgggtctgtatggggaggaggaggaggaggcgancgangtggagtatccatggtcttggtaacagaanaacttgagttag

SEQ ID NO: 194146 - DNA, 449 bp, Glycine max
  unsure (1)..(449): unsure at all n locations
nntgatgcaatgacgctacagatcaatagatgactgtatcttcatttcatcaacaagtagtttatttctatcctcaacagccagcgcaaggtttaacagtactacctacacaaaattaaaataatttaacaccatagtaggagtagagttttctaacgacaaataattgaaacacaaagctaaaatttgtatttgtcatctacaattaaatctacatatggcgtttctgaagtaaatttgcatatggcttttcatatgttaagtttcagactaaaggcattatttccaatatggtacctagaccttcatgctacatactattactagaccttcatatgtatttgttaacattgagcaatntatctgtaatatctactaacatatatacaaattaaataaacacaagctgacttataattangtggaatattttgtggaaaagattgata

SEQ ID NO: 194147 - DNA, 439 bp, Glycine max
agcttctttaggaccttgaatatgcaactaactcctctttcaaaaccatgctatgtgctcgcgataggtccctctcttcccttcgcagcttgagttcattgttgctaccccacagagctccgcgaaatatgttccggccatactctttcttgcgagccctcttggtctcttgttcaaaggctcgtgtggtagttgcattctcttcccgtaatccggcacactccttccggatgtgtgtagcggccaacctgaacttctctttggcaagtttcgcctttcctaactcgcttttgagagcttggacttcttcgtcctctttcggtgcttcaaaactctcttcgctgacgacttttaacttggtgagccaatctaaacctcgtatatgaactttcagccattcatggtacccaccaatgatgccaatacgaatgcccctaag

SEQ ID NO: 194148 - DNA, 443 bp, Glycine max
  unsure (1)..(443): unsure at all n locations
ggtattaagtatttcaataattcatcttcgttccgaactatgctcaagnntcaatccatataacggattacctcaactgaaaagttggatcaacctagattaataatcaagagtaagattttcaagatgaaatcatgacaagagaatattgcccttgagaggccttactccatatcaaggaatccaactcgtgttaggctcttgtaaatacaactagcatcattgtatgagcggctcatttattacacatcatcactctggttgaatatttaataacttgatcatcaaatttgctaagagttcaccatcactagaagacttcggacaaatcatcttagtccattttggatacctcaacaacagtccactctggaaacctcagcaatctatttcagattcattagcattgtccaattaataccanaaacaatctttaacaaaaa

SEQ ID NO: 194149 - DNA, 412 bp, Glycine max
  unsure (1)..(412): unsure at all n locations
agctagncttactcttccagtcattntttcttcccaacaaaactgaacaaagcctttcccaccccttacaattgtaccttaaccaaacactttccaatgaaatgttccaactcttcaagctacacagcaccacctgattttgagcttgagtctgatccaacactcaccaatgaagacctcaagccaacagcaccaagtcaaaggacattttctggctttgaaatagcaagtttatgggttggtttagttgttggtgtcccttcttactaccttgctggaagccttgttgaccttggcatggcatggtggcaaggcatagcaactgtggtggcagccaacatggttctcttggttcctttggttctcactggccatgcaagcacacgctatggcatatcattcccacgtctag

SEQ ID NO: 194150 - DNA, 447 bp, Glycine max
  unsure (1)..(447): unsure at all n locations
cgcttattacaattgttgcaaaattatcaaatgactccttctatcaaaaattctcaaaatcctcctccattttttccctacttgccactaccaccatcaatgaattntatgcaaaataatcaaaccctttccactgaaaattctcaaaatcctcctccattttttccctacttgccactaccaccaatgaattttatgcaaaataatcaatccatttccaccaaaaattctcaaaattctcctctaattttttctacttgccaccaccaccaccaccaatgaattttatgcaaaactatcaaatccccttccactgaaaattctcacaaagttctcaaacttttccttaaatgccacaaaacaattcttccatgtttcgtaagcttcccaatagttctagtgatgcataaaatcctttcaatgatgatgttgaaatgcaatcttcat

SEQ ID NO: 194151 - DNA, 328 bp, Glycine max
  unsure (1)..(328): unsure at all n locations
cagcatgcaagcncgaagcgngtaacccaccaacttttatattctaacttctgcgcgctgtcaacgatcatagctaatatttctttcttcgccattaaaggaaacacttgggctgccagatccctccaccctggggcgtactctataaaagatccgcgccccctttttgcaaatgctctgcagttgcatcctatccgaagacattatattgacactgcctaacgaaagcaaccactaagtccttccaagaatggactccggaaaagtgccaagttagtagaccaggtaacagctaccccaccaagacttccttggaaggaatttatca

SEQ ID NO: 194152 - DNA, 347 bp, Glycine max
  unsure (1)..(347): unsure at all n locations
acgcatcaancagaatcaagccaaggctattgcgcaagcaatcaatggggcaaaacacaccaaatgatatagtgatggatggctcaaaatcccacaaaggagaaaacatcactgtcaaattgaacattcaaaactaatatgacacgtagagaagaaccaaggatttcaagccacaaaaagtcaagaaacgtgaaattcaaaacaattacccactcctggaacataacctataattcaaagaaaaacatgccacagagtacgtgcacatgaaaatgacccaaaaaataaactgaaaatccgacgaaactcatcacattaacacattaacgcaactaacaaataacaaa

SEQ ID NO: 194153 - DNA, 430 bp, Glycine max
aagaaccagaaagcaagcttgtatttgattcagaaccgacaacagatattaggcacgtcactgcgctcaaagataggaaggactcagataatgatatgacgaatcacacgccacgctagtcagcgaaccggtcctcatttccgcaaaagctggtcctttcttatacaagctcaacacgcgaaaacgggcgtgtattccacttctgaactaaaaatggtgcggcactataacacctcccccttctctgtctctgacctcataaatccgaaagtaacgaaaaggcaaaacacactcgaccacacaccagtatcaacaacgcacgctattgagatcccccagcaccattcaaatcctaaactctcattacaaacactagaatgtcatttgcagcagcacataaccattacctgacacaacacaccatatatac

SEQ ID NO: 194154 - DNA, 426 bp, Glycine max
agctgcggagctacactgatggactatgtatatttgacattgtcactcgcaccaagcgacgaacatcaatctcaagctcagcatgccctataaaggagactcccaccattgcttggtgtactaagcattcacacgctaacattcccttcaagatcatttgatatggtccatcgctctagatgccttgccccatggactgattatggtattacttcaatcttttcacttaaacattaaatgtatgcattagaaaaaatatattcttttaattctcctacttccattctgacgggtggaaagctctaggcccccagcgccagttattaggacgctctatatatctaatgggcatctttattactgttaattgagtcgacacagaatcaacattgatcagacaacccacatgcctttatatatatatct

SEQ ID NO: 194155 - DNA, 337 bp, Glycine max
gctctacataggacgggggatgtgcctcacagactgagtctgtggctgcttaaaccatgttttctgagttcggttttgatgttatacaatgtgaagctttgggcctcttccatgctttatcatgggtagctcagctggcctcccatatgtcatttaagaatatgggttttatcctgtcagagcgcaagactttgcttttctttcattgcaactttgttaggccacaagcaaatatggtggctcaagtgttagaagggcattcattggctatgctagtcccaattagtttgattctatgcccacttgtatttctcatgttgttattatgatgagttaa

SEQ ID NO: 194156 - DNA, 308 bp, Glycine max
  unsure (1)..(308): unsure at all n locations
aaattccccaaccagccaaacctgaaaagagttaggatttttaaaacaaaaggggaaccaatcatttgctaaatatacaaataccaataagagaaanaagaaataccacgagccatcaggatttcgtgttttttcaatgtaacggattgctttagaaatacagagatcgacttcctttcttctgtgtgttggatataactttctaaacaaagccaggccctgcaatgccgatgatgtgcactccacatacctatttcaaaacattgcacactgggagtaacgagaattggcgaatctagcgcaacaac

SEQ ID NO: 194157 - DNA, 363 bp, Glycine max
gaacgcaagactctggtggagcgatttaagctttactcaattgctggagctattgaagaaaatgcttcctgatcaagacacattgccgaaaaatcactacgaggcacaaaagattttatgtcctatacgaatagagtatcggaagatccatgcatgccctaatgacttcatattatataaaaatcagtttgcagaaatgcgctcgcgtcccacttgtggggtatcatgatacaaagcccagcatgatgaattcagtgatgatgccagcaaaaagaatattcatccagcaaaggtctgctcgtatcttccaataataccaacgtttaaacgattgtttgctaatagacctaatgataaataccc

SEQ ID NO: 194158 - DNA, 440 bp, Glycine max
agcttcaaggtgttcatagactctatattcctgcctagaaggacaaagatctgactggtgatttgcagaagaacatataccacagactcttgctacaggtgtagatttctaattcatggcaatatgggttactacgttgaccaaagcatcaaattttccttcaagctttttattctcactagacgaagatgaatccatggccacctcatggactcctctaagaacaatagcatcatctcttgcactgaattgttgggagttggaagccatcttctcaatcaagttcttagcttcagcaggggtcatatcaccaagagctccaccactggtagcatcagtcatactcttctccatgatgctcagtcccttatagaaatattgaagaagttgctcacaaatctgtgggtgagggcagctcgcacacaatttcttgaatcttt

SEQ ID NO: 194159 - DNA, 430 bp, Glycine max
agcttatcccatgctgtcttggctgtctttgcattggatatcttctcaaaagtatcttcatccaccgattgataaatgagaaagagagctttcttgtctctctttcttgactccttcaacgtcttctttacaccttggcttatcgaggcttcatcttgctcctcgaagtcattctctacgatatcccacacatcttgagctcctagtagcgccttcatcttgatactccaattatcatagttgttctttgtgagcatcggcatttggaaaggaaaacctccatttgccatcttttgaggatcttgaagctctaataccactttgtcggaaataagactttttatgtttaggaaaagtgtttatgaatattggagactttgaatagaaacttgataggaaggagaattctttatggacgagagaactttgt

SEQ ID NO: 194160 - DNA, 461 bp, Glycine max
  unsure (1)..(461): unsure at all n locations
gaccttagatactaagctatcagctcttacgatccactgctgagatctgattatttttattccttnnnatttagaggcacacaagtactttgttgagtacattgccaaagcttatcaagctcttacagatccaacagctcgtgaaaattatgaaaaatatggccatcctgatggcaggcaggtaatataacagacgactatgaaaaaatgccaagtggcctgatatctttttgatttcatgctgttgaaatatgcatgatattttattgtagggattccaaatgggtatagctcttcctcaattcctgctaaatattgatggggcatctggtggaatacttctgctttggattgctggtgtgtgtattctcttagccgtggtcattgctgttgtctatctctccagatcatcaaagtataccggcaactatgtgatgcatcatacacttttcacttactat

SEQ ID NO: 194161 - DNA, 412 bp, Glycine max
agcttatatagccctaatcttaaactaaatctatcataacataaaaaccctaaaaatctaaagctacagttgaagtcttctaccctaaagttaagacaagaaaaagagaaaaagaatcatggaacttacttggatggtgtatggttgatgcttcaaagttgaaaatgcacaaagaaagcacagatgcaaaatgtgcaattttttggagagagagaatgcagagacgaggtttccgtaatctcgcaaatctaagtgtaactgctgttacactcacttaagcaattttttgatactttcgcttagcggaccgctgcgctaagcgagcaagagagacgtttggtttctcaacaaggattgcttagtggacccgtgcgcttagccgacgtttcaaattcaaaatcagttttttttt

SEQ ID NO: 194162 - DNA, 447 bp, Glycine max
  unsure (1)..(447): unsure at all n locations
tgtagaatggctagacatgatacatgtcagggtttggtttgtttcaatgataaaagggatgccccacattatttccatgacacaaatgcaaaaatgatgatttggaaactntatgcaaaactggtcatgcatgcacctatgcggacactcaagtgtcaaatttttatggtcatgtgatgctagggctcatgattcatttcctctattttaatcaacccaatgtttccaaaatatgttcttttatcaatttgtgcattcatccgagtccatttcgggcgtccggggaaatttcacagcattcacccttcaggtgtagacacattttcccgaaattggttatgatcaatgaactctttcaaagaaaagttggaaatcgtctcttttcaaaagcatngctgtttttagctagacaacctaatttttccttttttctacctctttccttac

SEQ ID NO: 194163 - DNA, 442 bp, Glycine max
  unsure (1)..(442): unsure at all n locations
agccagggttngatcatagacgtgaggtgtggtattgtatctaaaggaatctgtacgaaggatggtgtgacatcctaagaacgttggaagacgttcagacaaagatacaaatgaggcaagaaggagctctcaaaagagaaagagccatggcttactctcttgctcacaaagtaactcgtctgcttgcctgtggtgtcattgggtgaccatttctgctgaacttaaaaaattaattttgaagttagatgaactttaactccacattaatttaaaattaaattaaatatgtagacattgacttacaatcatgtcagttgacattttaatgtgattctacatcatatataatttgatttcaaacaagccacaacaaagtccaataaactatgccacttttntttctactttagacagatgtttacattctcatttatatgcatat

SEQ ID NO: 194164 - DNA, 361 bp, Glycine max
aagccttggttagtctaaaagaacaaacacgctctcgtaaaaagtaggagtgaactagagatcctcgccctcaaccaacaacaagcaagaggctcaagggagtcaaacctgagagcagagtcataacttatgacagaagtgggccaccaggacagcgatagagcaatcggacagcaagtggcaagcgactcacaacgaaactgcgtagatcgcatccgacaagaaagacactctctaggcaacacaatcaccaatcgggctccatgaaacggaccaaacttgcggccgctattacacagatcaatcatgccgtcaccaatgatgaggatcgcgcttggacgacacaaaaaacaagacacaa

SEQ ID NO: 194165 - DNA, 432 bp, Glycine max
agctagtaactgtattttcaagttataatatttttctctcttgttctctgggagttacattccttaagatattttttttcaagaaacaacataatcacatttttatttggagttgaaataagagaaattgtggaatcatcgtgctacatacacatatatgcacaagagtcactattaacatgttgtctaacacattttttgagaggtccaatatcaccacaactattatttaagtaattaaattccttagttgttagaaaatctgaattacactaattaattatgaaaaataaaaaaaaattctaaaaaaaaaaccagaaaattactacacaccctaccaggtccagagagcaacataaaactcaatcacactcaaattggcattaaaatcatttttcccaattaaaacacctctcttgccactagtcatat

SEQ ID NO: 194166 - DNA, 448 bp, Glycine max
  unsure (1)..(448): unsure at all n locations
tcatgatgaatcaagagtgattcnagatgttgtgagatattattatgataacaaaagatgataacaaaggtgatgactaanagctcaaaggtcaatcaaagaatgagttcaagatgttcaagatgttcaagatagaatcaagaagacttcaagattcaagaggaaagttgaattcaagaatcaagaatcaagattcaagaaatcaaggttcaagactcaagattcaagaatcaagaaaaggctattcaagaatcaagaaaaagcttaatcaagataagtatgaaaaggtttttttcaaaaactgagtagcacatggatttttctcaaaacatgtttaccaaagaagttttactctctggtaatcgattaccagattgttgtaatcgattaccagtagcaaaatggatttgaaaaaagttttcaactgaattacaacgttccaataatt

SEQ ID NO: 194167 - DNA, 431 bp, Glycine max
  unsure (1)..(431): unsure at all n locations
gcttatgatgaataagatgattcatgagttntgatgataacaaagataatgacaaaaagctcaaaagtcaagatcacttcatgataacaaagatgatgacattcaagaatgagttcaagattgagttcaagattgagtcaagaacacttcaaggatcaagaggaaatttgatttcaagaatcaagaatcaagattcaagattcaagattcaagattcaagattcaagattcacgaataatcaagatcaagattcaagactcaaagattcaagaatcaagagaagacttaatcaagataagaattaaaaaagtttttcaaaacattgagtagcacaagaagttttacaaaatcattaccaaagagttgtactctctggtaatcgattaccagattatagtaatcgattaccagtggttttaaaacattaaga

SEQ ID NO: 194168 - DNA, 450 bp, Glycine max
gaatctaagcttcgccgcatatggatctctgtgaagagaattttattatttccaaaatagaagcacctttaatgtactcatagaatccctgaacaccataaaacagacaataatgatttttcgaaaaataattaaggaatatcccaaatgtaaaatacacagaacttaattgtgtccattcaccaacaaaaaaagaatgtccaaaataaaaacacaactcaagctgttctatgcatgggtgaccagaaatcacacatatatattcgttctaagtaaaactacaatcaactgaaatcaaaatgacattgctgaaacaaataccgggtacatcgcccaaaattggtttggctttaatgatcaaatgaaaccattatgctctaaaaagtctgaaattttatgaattcataaaacttaatatatccttatacgaataaatttagaatgcccaca

SEQ ID NO: 194169 - DNA, 443 bp, Glycine max
  unsure (1)..(443): unsure at all n locations
agnccttgttggagcttcaatggataatgtttgagaagagaatggccacgtgagggagagagagagctgtctgaaaagtgtgggggctgagtgaagagagagaaaagctttttggttctaaataaaaagggttttctctttttttctattattttatttaatcaatgccacatgtctccatttgagtggagcaaaaagggcccactttcccttttgactgtgacccatactcagccacaaaagtggggaaaatctgacctttgaaacgctaaaatccagcctcggtttgtgtgccgtttctttggttccagttcctcgcgtttctctgcgtccgtcggggccagttttcgaaagcaagcaatatatatatcaaaacgctcagaatagaaccccgagcgtggttcagaaggtggtctcattacattttaagtcgcacgcaaaac

SEQ ID NO: 194170 - DNA, 439 bp, Glycine max
  unsure (1)..(439): unsure at all n locations
tctatataagctgaaccattatatcaataagcacttgttgtttttattcagaanattagagttcatctcttttatcttagtgagagtgattctcctaaattcttgagtgattcaagaacaccctgactgtatctaaggactttcactacctttgtgtgttgccctcgctggaaagagtgattctttcctttctatcatcttcacccttgttctttcgaaccacaattccagaaaatccacctctgcccaaaattatctcgtgaccataactcccattttacacactcaaattaagtgattcttgagcctaaattgaatttcaaaacgagacctttcacctcgttttggaatcacctcatttggagccctgtagctatcgttattgacattactatatttctgtccagccaccacttaacctactgtttaccatcccatt

SEQ ID NO: 194171 - DNA, 437 bp, Glycine max
  unsure (1)..(437): unsure at all n locations
agctggtaggcctaggatcttcttcattttggagtccttggctnctcgaattttaatggcagcaaaatggagaagaagaagagttgagcggagacgccacttcaagaagaagatgagtctagaagaagctcaccaccataggaagccacggataagagcttgaaggtaggagaagatgaatggagggagagggagagaaggagcaagacattttgtgcctcaaaagaggtgtgaactttgaagtttaattctcaaatgataaaagttgaaaaaatgcacacacatggcctttatgtatagcctaagtgtcacacaaaattggagggaaatntgaatttctattcaaattttacttgaatttgagattgaatttgtggagcaaaaatttcactaattatgattagtgaagtttagctatgggttagccccctaatcga

SEQ ID NO: 194172 - DNA, 366 bp, Glycine max
acctatgaaactaagctgcctatagcctgaattgaggagaatgattattttttttcttacggagtactaagtatttattacctatacttacagaaaaacttataacactacaatttacacaagtttatacaccaaagttagtcgtattcaccgactaacacagtcttgatgtaatccagtatatctattaatgatgtttatgtgtctctggctatcagacttatttagtggctttgccttgatcacgtagatgcatgcttgttggacattaacaatgaactggctgatcttaaactgatggaagggctagtatcgatatactaggatcggacggaaccaatgttgttgttgcttaagggtctggct

SEQ ID NO: 194173 - DNA, 428 bp, Glycine max
agctctgataaacatacgacatcttatctttgttatattatcggggcgtggcctcattcacaatcctcatttttggtgtatgagttcttggaaaagggaagcattgataatattttaaaagatgatgaacaagcaatagcatttgattgggatcccaggattaatgccattaaaggtgtagcaaatgctttatcttatatgcatcatgactgttcaccttcaattgttcatcgagatatatcaagcaagaatattgttttggatttggagtatgtggctcatgtctcagattttggagcagccaggcttcttaatcctaattcaaccaattggacctcatttgttggcactcttggatatgctgctccaggttaatttctttgacttttataccgaagataaaattgatttgtacgttctcattgata

SEQ ID NO: 194174 - DNA, 464 bp, Glycine max
  unsure (1)..(464): unsure at all n locations
gacctatgaaactaagctntacagtctcaatttctttctttatgctccctttattttttttatttttgcctactgttattaaaaaaaaaaaaaacagtaagctagtcgcatataattgggatatctagggatgccttaagtaaagaatctccaataacctatgactaacacaaactatacttttaaggaagtgttgcactccaatttttaatcccattgaagtgactaagtttgagtactcccctgcatttctacttccttaaaaatgtgcgcttactcatgttcatgattttctttttgaagatacttcgtgtttattatctttgttccaactataaattgattaactattttcaacttaatctgtcaagtttttgtttaaaaaaagatgttcccaaaacatgatgtattaattatatctaaataaatggtcctgaatggatacatcttaatggctttctggt

SEQ ID NO: 194175 - DNA, 356 bp, Glycine max
agctggcgcatacaacttatatgttctatcttgatggggagtgtaaaattagctgtatagctttataaaagctggcttttgtatgtatttttcataagttgcaacctagtttctcaatgcctcttattgtactttgttcagaacactaattcatatgtaatatacatcagttgggagaagacttaatgatattgttctaatattaatcacatgtcaagtctcttaagtaaacctctagttaccttaccaagatactcttaatcacatttaatacgtaaattcatcaaaaaggttatttatttctcacgaaataccatgttaaaaggaggaaaatattatataaactttggaaaaca

SEQ ID NO: 194176 - DNA, 459 bp, Glycine max
actaagcttacgctgtattcatccacatcagactcatgtcaatttctatcaacaacacccaaaatatatcaataaaggtactgtgccctacaatgctatcaaacaaacaacaccctttaacactgacactagacagtatagtagcacgcagggtgccctagccgaaggccttgcaaggggttgtttgtttggtcactatatacagtcttgtctcttccttaccctaccctacatgtcactaacttcaaaagcccaacaacaaaaagtgagaatgaacacatgaagcttacctcgacaccaacaacgataatggcaacgacctgtcagcgagtgggagtgaaaaagaagagtcgtggcgtaaagaggaacacctacatgggcacaatgaaagttgtgacagagacgaagagtcgtgactgacttatggtgtggagccaataaactttaataaatcgagtt

SEQ ID NO: 194177 - DNA, 421 bp, Glycine max
agcttcatgatagacgggtgcctatcattcttctccgcactccgtatctctgtagctctgggttaccgcaaaatgagatcaacattcttccttccaccatatcaatctataagcattctaaccacatgtgctacttttatttttctactacctaaacatattcgatcacataatagaattcaattaatcttactgtaaaaggggggattccatggagtcatgttagttactgtggggaataagattattcacgagttaacacgcatgcttcaaattctaaacatctaatgttgattcatcaaacacatggggtgcgagtacgagacctatcaactattgggttgcaaaaggccccatgaccattgtaggctatttatatatctctatatatatatctctatatatatatagatatatatac

SEQ ID NO: 194178 - DNA, 440 bp, Glycine max
tggcatagtacttaaaacaaccaacatcattcttcttgtattatgataaaatcagagataaaaataaggaagaaaagctaatggtaacatcactcgtttttttggcaaaattaaatgtaaccactcaccaggtctgccagagctccattttttctctctgctatctaggataaagagaagcacattaaggtgtccacacatagtaaaaggtcagaaagcataaagggaaaaatgtatataaaaggtatataaaagggaagatatatagtaaaagaaagaaggtatcagtgtactcatgtagaaaacaaaataaaggcagaacaccccaaaaaatttaagcttttatgttaacgaacctgtactcatgaagatcttagataaaaatcgcaactttaatgtgttcttccaccttctctgcacacaacatgtcaaaaaatata

SEQ ID NO: 194179 - DNA, 422 bp, Glycine max
agctgtacaattgtcatatgtattatgacttctcacagaaagatatgaaaatcacatcacacaatgaaaaaagagagggtgaaggacataaacacaaatgtcagcaacgcccgtgctgaaggaaccaccagttgtacgagtgtactgacaaccacatatggtggaagcatggctggcaacaatggaaaacaatgacaattggcaccgacaaaaacatagatgtagacaatcaccacactggagcagagaactattaacatctaatacaaaaacaaggtttcatgtgcaaagatgtttgtgttcaatggaagacagagttatgtgcttcataatattttaattaatctttaatatttataatataagtatatttcttttatgatacgagtgtctggccaagagtatgttttgtcatgtatact

SEQ ID NO: 194180 - DNA, 412 bp, Glycine max
  unsure (1)..(412): unsure at all n locations
taagaatggataattaaggctataagcatttttctctatctttgactgncagctactcagctccaatccacttaaaataactgcgagaatgctttcttcactggaattttattgagaatgcaatttgttttatgccagagccactaactgggaacattcctataatgatgctgaagtgaacacatttatcacatatcttctgaagagtatcttggtgatttagtttctaattaagaactttagcatgtatggaaaacagttccagaattaccgngttgaaggatagctgatccttcattttatttttntgctggaagcgaagtattctctctcggaaccatgagataaccctctaacatagagataaccgaatagttttgttctcacaaaattttttatatccagtagaaat

SEQ ID NO: 194181 - DNA, 444 bp, Glycine max
  unsure (1)..(444): unsure at all n locations
agctngcctgtccgatgcagcagtaatgatggcccgagttatgttggggaacggttacgaacccggaatgggtttaggcaaagacaacgacggcataactagcctgataaatgccaaaggaaatcgtgggaagtatgggttaggctataagcccacttaggcagatataaagagaagcatcacgggaaggaagagcggtagtcaaagctcgcggttgagacaagaaggtgaaggaagcccaccctgccacataagtaggagctttataagcgcgggtctgggggacgaaagtcaagtggtcgcgatatacgaagatgatgttccgagtacattggatttggtacgaccatgccctcctgatttccagctgggaaattggagagtggaagaacgccccggcatttacgcgacgagcataatgtaaacctttatggttttaaagct

SEQ ID NO: 194182 - DNA, 468 bp, Glycine max
gacctataaaactaagcttcttcctggccctcaaaaatgacaaaaactctattaataatgttggtaggttctaaattggcaatgtcaaccattattggtatggaagtgttgtcaacaaccaaaaagtagcacatttgaaacatgataataggaatttgcttgttcaaatgttatccaacaaattcaatggaaaggtgtcaattactctgtacaatcgcataactgcactccaaatcaaaaccaccctcctcctcttcctcttcttcttcatcaccgtttccatgccctgcgccgttgtcctcgaattagaattctatttctaataagagttagtcttcgaattactctcaaattgatcagattacacgctccctcttctgtcaacttataatcaacctcttgaactaacaagtttgttagttttataaaatctatagttcacacattaaattaaaagaaattacaagt

SEQ ID NO: 194183 - DNA, 430 bp, Glycine max
agcttcccaaatccgatcatggaaggacttggttactgtcttcattaagcagtaccagtacaatacggacatggctcccgatcggaaccggcttcagagtatgactaagcgagagcacgagtccattaaggaatatgcccaaagatggagagatctcgcagcttaagtcgtaccgcccatgacggaaagggagatgatcacaattatggtagatacgttacccacgttctactatgaaaagctgataggctacatgccagctaactttgcggatctcgtcttcgccggagaaaggattgaatctggattacggaaaggcaagttcgaatatgcttccaacaacaatagaagagccccagtagtgggcgcgaggaagaaagaaagagacgcccacgcagtcaccaccgccccgacgtggatgaaagcaccc

SEQ ID NO: 194184 - DNA, 459 bp, Glycine max
  unsure (1)..(459): unsure at all n locations
tactcagcttaacatcagaccacttgcanggtgctggaactactttatatgtacttgatggggcctatgcaagttgaaagccttggaggaaaaaggtatgcctatgttgttgtggatgatttctccagatttacctgngtcaactttatcagagagaaatcagacacttttgaagtattcaaagagttgagtctaagacatcaaaaagaaaaagactgtgtcatcaagagaatcaggagtgaccatggcagagagtttgaaaacagcaagtttactgaattctgcacatctgaaggcatcactcatgagttctctgcagccattacaccacaacaaaatggcatagttgaaaggaaaaacaggactttgcaagaagctgctagggtcatgcttcatgccaaagaacttccccataatctctgggctgaagccatgaacacagcatgctacatccacaac

SEQ ID NO: 194185 - DNA, 440 bp, Glycine max
  unsure (1)..(440): unsure at all n locations
agcttgaggacgctggattgcactaactctctattgaagtgttnatcaatatcaatgtatttcggtcgttcatggcgagctggattggatgctacatctatgacagatttgctatcacagaaaaacatgatagaaggaatagtaatctcaaagtgcagtaaaagtcttcttagccaaatcacttcactagatattgaggagagtgcccgatattctgtctcaacagaagacttagacagaatgggttgttttttttatttccatgatattagggtatctcctaaaaacacacaagaaccagatgttgatctgcgtgtgtccaagcacttccccaatcagcatctgcatatgcagacaagttgaaggaattgcttgttggaaaatgaagaccctgacctggagtacctttgatgtattggaggagatgatgcacaacatct

SEQ ID NO: 194186 - DNA, 453 bp, Glycine max
tgcacaatacgggaattcagtggccataaagaaagctatttcttctctttacaggctcggcttaactaaatcctgtatcataaacactcaaatatatcgtttatttggtatccaccacatgaaaatatgtatgtgaataactttacaataaaacattaatcatcacttgccacccatagaaagggtataccgaataattcttggttaagttagatctaaaaaattatagatcactcctttctaaatgagtttcttgtgttcaatgcagagaatctcatgcaacagtggagtcaaaattggaaagaagactatgcaaataacatgcaacaatagcttctctattggcaacacttaacggtaaaaatatgaaaaagcgcacagaagagattaaatagaaaaggatatatcaatttctatatataaaagaaacatcatatagactaaatatatgat

SEQ ID NO: 194187 - DNA, 440 bp, Glycine max
agctagccccagctcgcccaggcgagctatgttgtcttcctccagaaggcaccgccttctggtggaacttcctggaaagcctaagtgggcctggttgctatttgcaccccctgtttactaaatacacccctaccttttttttgtaaattctttttccgtaatgttatggaactttacgaatttcgtaacgatacttgctttctttctgtaatgtcatggaaccttatggattacgtaatcatccctttttttcgctttcggaatgttacagaacctcacaaattgtgcaacaatgctttcttttgacttccggcatgttacggaacctcacggattgtgcaacaatgcttccttttgacttccggcatgttacagaacttcacagatagtgcaacaatgggtgccaagtacctcaaagcgagcaagcaatggtagcatgc

SEQ ID NO: 194188 - DNA, 412 bp, Glycine max
  unsure (1)..(412): unsure at all n locations
gaatgaagctctgataccacttgtttttttttcgggctcagntatcttaagaggggagggttgaattaagatacaaacattactccccaattaaaaatatcactctctcttcctggattaacaatgcctccttaatatgaattactcaaaagacaatcctacataaacctctttaacgcaaatgatgaatagcaacaatataaaagatgtttaatggaagagagaacgcaaactctgcttttattctggtgcggccaccccctgtgcctacttccattttataagcgaccgcgtttgatattctaccatctagataaatgccttttacaaagtccgaaccacacattgacaaatctacccttgtgtcaaaaatcgttcattcatcaaccttcatatctaaccaactttcttg

SEQ ID NO: 194189 - DNA, 377 bp, Glycine max
aaagccagggaggacaacaagcgcgaacacgcgaaatcgccacaaactatataaacacacataacaatacatccggcggaagacaacgcttctccaaccccgtaagaccactgaacaactgattctttctcaacattcaacgcaccagcagataccggatccaaatttaaaaacaccgaccgtgcgcgagtagatccaattaacacagctaactactaatgaactctgcgacacattcagaaacacgcgcacacattcggctctgaagtataacaacgattgacaggagcggaaacctattaattagcccgataacgcgcaggtaaccacaaaaagaaaacatagctaccgcacacctggcatcactagaaatgcat

SEQ ID NO: 194190 - DNA, 330 bp, Glycine max
tcaaagtttgataaaaaaaaaaaaagaaaaaacattgctgtttcaatatcaaaatccttacaatatctctgcggataaactcctgaagtttaaacataatgcgttgaccactggtgataagagtatttttcctaaacgaaaagctagatggctgcactaactgcaactttaaactcttcatatatatgttaaatgaacttgagatacaacttcttgcgttgcctgagtaaagataaatattcaaattactttttacataaaccatcacaatgctaagacaatttcaagctaatatcattgaaaaacatatcaacttacgggatttataac

SEQ ID NO: 194191 - DNA, 397 bp, Glycine max
  unsure (1)..(397): unsure at all n locations
tcatgagtgcgggcttgagacatgaagagaaagttttttgtttcacggngaagcccctccaaaaatttcagactgggtgcggccatgccttcctgattttcaattgggaaactggctagtcgtggaatgacccgaagttttcatggcgggcacaatgtaatgctttagcttcaaccctactactgggcctaagctttagggttctctccttgttaaggcgttatgtcattttctagtaaagaatataatataaagatctttccttaatctgttcttgtgccttcacccattctcattcatctgcatgtttatttttgttgcatttaaacgatacagatccgatgatgagtcttgtaaaggtactaataccgaggaccctgctgtcgattttgacaac

SEQ ID NO: 194192 - DNA, 350 bp, Glycine max
agccagctcgtacaagggcagatgtctctttctcttttttgaaaacaggacccattccattacagaaaatatattgctttacgattcagcctaaaataattacgcagaaaaaatccaccttctttgcaatactgtgtcgcaaatcaagagttgcaatccctaatctctgaatagccagcctacagacatgaaaagtcttagttatctcgtttcaacgtctcaaattgtaagaaaaatagctgtgaaaaaacgagacaggtattaagctaattacattatgcaaggagataacaatacatatctgatacacgctaatgaaaaaagccaatctcgagaacctacacgaccta

SEQ ID NO: 194193 - DNA, 363 bp, Glycine max
acaaaaattacgcaaactacataagcgcacccctgtacataaagacaaaataaagcaacctagagcatcacatatcctatagaccggctcaattctaaataagagtaatgcatcaaggaaaagaataatcaaggtgttcacacaacacacccataatagtaaatgtcaattatggtggaacggatataaattcgaaaaaaaaaaaacggaccaacctgtacattataaactaaacgttacgtaaataaaaacgcactagatttgccaatatggacggcgcatcccccaatacttaaaacgaaaatacagaattgtctacaagaaaaaagacatcacgaggaagagctgtcctacattcgtcat

SEQ ID NO: 194194 - DNA, 423 bp, Glycine max
agctctgaagtctgatgacggctaagatatacttctgcacaattcaccatgttgtgtgaggaagcatgcattgagcatcaattaacagtcttcttacacctcctcaacaaaatggggttagtgacagaacaaatcgtacaataatgtaaatggtcagatgtatgcttcatgagaaagggctacctcaggaatattgggcagaatctgcaaacactgcactatccttgctaaatcgacttcctaccaaagcagttaacgggaagactcctttctagacttggtatggctataaacattccttgaaaaatctgaaagtatctggatgcttgtgttttagtcatgtgccatagattaagacagacacgctagacaaaacagctgaaccttggatctttgtggatatatttaccatctaacgctata

SEQ ID NO: 194195 - DNA, 430 bp, Glycine max
agcttgccacccagctggataggtgattatgttgtttcctgcagaaagcaccgccttatacggaacttcctgtaaggcccaagtgatcctggatgctatctgaacccccctgtgtactaaatattccgcctgcctttgtttgctgattctttttttcgtaacagttacagaacttttcgaatttcgcaacgatgctcattttctttccgtaatgttactgaaccttaccgattacataatcattccttttttggctttcagaatggttctgaacttcacgaattgcgcattaacactttcttttcacttccgacatgtcacgaaactatacagattgtgcgacaatgttttcttttgactttcggcttgtcacggaacttcacggattgcctaatgatgggtgacaagtatctcgaaatggtcaaaagac

SEQ ID NO: 194196 - DNA, 392 bp, Glycine max
  unsure (1)..(392): unsure at all n locations
ctaagctgaccttctaangggaaaccctctcctaccttctctcctatgcncttagaatccaatccttttttcttcacatacccctgaagtgtaaagcctctcatggctattagaggctaaacctcctatttgggagcctagtagccaacacccttgtaatgaactgctcttattattattaaatgcatgtatgttctattgccttttttctgctcttatctttaagtatggactaataatcatgcattagtttaaggtttacattggaaatgtaattctaaaaactggaaaaggctcaaataatcattgtagggataaaggacttgttgcctctactacatcttatgctcatagattatatctatcttgcaagaactggagaaaataataat

SEQ ID NO: 194197 - DNA, 401 bp, Glycine max
agcttgatgcattatattttatatttgatgactgatatcacgacttcccttcttagacaaaccataatctgctacgtatgaccctctatttcctattcctttgtcattgttcttatagtgttctaaatcatacaggctctacatagcttacaaaattgaggtaaagaataggaggagaaaaataaaatattaacattaagaagagaacaaacattatcttatttgccctttcttttttttattccctgttaaagttatattttgacaattttcatagagatactagactggaactgtaatttttttctttgttttttcaaatcatataaagtgtgatagtgatttggctacaaatattggcataccctcataaaaagaagcttaatgtttggtgaagttat

SEQ ID NO: 194198 - DNA, 390 bp, Glycine max
  unsure (1)..(390): unsure at all n locations
ngtcttgtagtaagtaatagcatggcttatcactctcttgttgggtttagaatgtctgaggggttatggctaatgacaacgagggttgtccatttgcataatcttatccacgtaatgttattcattttatttccttggcgtatttgctttttgtgttagcatgggagtgaatcacacaccaatcatgttgaggtgtcataacattatccatgaccatgagcaatgttgttgaatttggtatggttatcaattacgtcaagtattaattggatcattatttccagttgatcgtgtgtattatgaagaatgtaaaataactaccgtattattgagtgtttatatatcatttatgtaaagtgattaaaatttgcttaaattttttggattttt

SEQ ID NO: 194199 - DNA, 436 bp, Glycine max
  unsure (1)..(436): unsure at all n locations
agcttgcttctactcaaatttctaatttcaaatttaacttttcaaatttcaattttcaaattcaaatttcaaatttcaatttcaaaatttccttttctaaatttgaaatagttttcttcaaatatgaaactaatttgaaaagtttaatagattctttatgcaagtcattgaatgcatcttgaagttcataaaaagaaacatataagtcatctcatagttagatgacattacctcgtcaaagacaataaaaaactcaagcaaaaataatcatcaaagacaatcaaaaatcaatcaagaacaatcatcaaaaactcaatcaaaagttaacaatcataggcaaaaataatcaaaagtaatcaatcanagacaagtgacctgctggtatcatttgatatcacttgttgggcttggtgattaagtaggccttgtttgttgc

SEQ ID NO: 194200 - DNA, 438 bp, Glycine max
tcaggctgctcaatcgctccaggttgctgcatggaagggtaaaggtctgtatggtggtcagcagaggagcacaaaccacaaacccttgcaacaggtacagatttctgattcaaggccagctgggttaccaagttaaccaatgcatccagtttgccttcaagcttcttagtctcagatgatgcagctaagtttgtagctacctcatgcactcctctaatgactatggcatcatttctggcgctaaactgctgagagttggaagccatcttctcaattaaatttctagcttcagcaggagtcatgtctccaagggctccaccactggcagcatctatcatacttctctccatattactgagtccttcataaaaatattggagaagaagttgctctgaaatctgatggtgagggcaactcgcgcatagttttttaaatcgc

SEQ ID NO: 194201 - DNA, 410 bp, Glycine max
  unsure (1)..(410): unsure at all n locations
agcttgtgggagtggtgacttttcgttctcaaaggcggcgcttacttgcctgccctacttttacatgtacaaatgattgtttgaggtattggatgtcattctacccttgaccctttttagtgtgctctactggagcactagaatgcggccccttcccagctcctcccaaatagttgggcgatggtaagggcgtttaaaattttgtgtcctttcttcaacatcaagcctagtgtgtcaatcttattcttttttcaaatgaagtttcctggaaagactagatgagtctccttgaacagcatgtccaagaagctngttgagtttgattcaacatttttcgtcgttttaaagacgcactttttaaggtcctagctactgatttcatggctaatggcatgccactgatgcttaac

SEQ ID NO: 194202 - DNA, 441 bp, Glycine max
  unsure (1)..(441): unsure at all n locations
tgacaccacattngtgtagttgacaacattttcttatatatgtgcacgcgtctctattntttaaaaaaaattgaagtaatgttagtgaaaaccatctatatatatgacacacgccaacactctaaaaacaaaatctctcccaacctaatttttataacaaagtatggcatttttgggagaaacaacaagtcagacgattgtgaactccacattgggttttatttttccaaatggatagattattcacatcgatagtggtgtttattttcaaagttccactccagtacccattcgagtacctaacacttgtgattttgaaacactaaaaaccagaatacacaatacccttcagctaaccgacaaancaatattggatgaaatntactacttgcagccattcacagatacaggtaaccaatttcgctttaatgtatgcaatga

SEQ ID NO: 194203 - DNA, 445 bp, Glycine max
agcttatcaagtgcatacagagtcagagatgcgttctggtacagcaaaagtgggtgagtactgggaggcagttttaaaacacctccacatatataaagccaaggtaatctctgccactttctaagttacatgcctttaaataatggataagttcgctccattattacattgctgtaaatacaggcttgtttaaaggaaattcatgccaagatgttatgcaagcacttgcaacgccctgaacaaccattggaggatgaagatgaattggaagatgctcaagttagaaactctgaggacgatactgagcactatgctaaaggtataagccttttgtgactgttaatttaatttataagcttcctccattccaaatttcatgttgatattctgttgatctttattgtgtagtccaatatgcagatgaatcattttcaccacaacccat

SEQ ID NO: 194204 - DNA, 451 bp, Glycine max
  unsure (1)..(451): unsure at all n locations
ncanattattaaaaagtatacaatgtcaagtggaatatatctttcatttatttaaatgaaattttactcattaaaaaatttcatgattttgtttaaaactttttcgaaacaataataaatacaattcatttaatttttgtgaaattttattacttttaaatttagatcatataaaactatttttacattgtatcatccttaaattattttttatgttaaaaaatagttattaattttttatcattattaaatacgttctctctcactttgtatctctctctgtatatataaagttttcttgtgaacctaggagataaggagagaaaaaaaaaagctttttaccgaataaaaaatgacaaaaataattgtctaataatagacacatgataaacaataagaaggaaatgaaaaagggaaataacattaatcaatcaagagaataaatgaacat

SEQ ID NO: 194205 - DNA, 437 bp, Glycine max
  unsure (1)..(437): unsure at all n locations
agctngtaggattatggagtatccatcatatgttgtactaggtggcagtcgggcgatggtgcaaaacaattctccacatccacaaatcatgtataacccaccatcccctgttgcccacctcaactgagctcacgtactcccacgtagcccttatcctcgttcctctcaacgccgggtccccatcaatcctcccaagcttccacaacatccatgtaattcaacatccaagcatcatgaactaacacagccaagaaaacagggcagaggcagaaaactctgcccaaaacacaaaccaacatcacaacttttcacactcaaataccccagtaatattctcttcgttccaattcgtaaaccgttggatcgactcgaaaattntactggaagtctctagcacataaatctacattatgaccgttgggatctgctagaaagcg

SEQ ID NO: 194206 - DNA, 300 bp, Glycine max
cactatgagatactgattgtgggccccgattcaaaatgtaccttcatgtgcaccagggtgttctttcaatgatccctacggcgttaactgattgttggactcgaggtacctgttcatttggaaaatgtttgtgcaatacgcatgcaatcgtaaacatagattctgattgtgaatgaaactgcaagtctgttctattttaagtacacaacaatgaacgcgaccaagatagctgtgaaaacatatatctaaaggcgctcggtcctcttactgaaaaacatgatgcagatgatgatgttcctg

SEQ ID NO: 194207 - DNA, 435 bp, Glycine max
agcttgagtgagccaccatagagtgagtcaattttgtattcacatccttgtaaccctactatcactttgtatagtggaagaatctccatattggagaattataattgtgtgctcctattactacctttaattactaagtgtctatcttaacttcacaatactggaaagtccgagttttcccaacagtggtatcagaaccaggttgttcaacttggtgatcggctcagaggagtaagatggcgatgatggatctcagctttggggatcccttgtatcgaaagtcttcctgacggtgagtccaggcagcgtgtcccgcatatggagcggcggtgcaagtaccgcatgtagctagagcatgaaggctctaatggttatactcgtggatgatgactttcgctcgaatggagaggcttccatgtggaagagactcacact

SEQ ID NO: 194208 - DNA, 457 bp, Glycine max
tgcttgtggggcttccatggaggctggatcttgagcttattgaggtcctttaatggtgattttccaccatggagatgcagcggaagacaaaggagaagaggtgagaggaggcgccatgcactatggaataagccatggaagaaggagcttcaccaccaagatgagccttggataagaagcttggagaggatgcttcaatggaggaaaagaaaaagggagagaaaaagagaggggggagcacgaaattgaagaaagaaaaagggagagaagttgaactttgagttgtgtctcatgagagtagcttctttgagaaaacttccttgagaagctagagcttagctacacacacccatctaaaaactaagctcacctccttgagaagattccttgagaagctagagcttatctacacgcacccatctaataactaagctcacctccttgacaaaatacatga

SEQ ID NO: 194209 - DNA, 408 bp, Glycine max
ctgcactctgggtggtggcttattttttttattgtgggattctctaaattggcattgcccctaactaagttgactcgcaagaatgagaagtttgtttggaatgagaaatgtgatcaaagtttccaagagttgaataagcggttgacaacagctccagtgttaattttgcccgaccctaagagaccatttgaagtgtattgcgatgcaagcgggcaaagcttggggtgtgtgttaatgcaagagggaagagtattggcttatgcttcacgttaattacgccctcatgaagttaactacccgacccatgacttggaactagcagcggtggtctttgctttaaagatgtggaagcattatttataccgtactcattttgagagtttcagtgatcacaatagtctcacatac

SEQ ID NO: 194210 - DNA, 402 bp, Glycine max
atcgaagtgttttttattaatacgcaaattttatatgctgctttgatgaatacgaagcctacggtaaatggagagaataaggaggagggagaaacccatgttgtgacagtcgttcctacatggccagatttcccactagctcaacaatattaatactcagccaatatcaatccttctcattacccaccaccttaccagccaagaacacccaatcatccacaaaggccgcccctaaatcagcaacaaaacccacccgctgcacatccaaagccaaacaccacccttaatacaaaccaaaacaccaaccaaggaaggaattttctacaagagaaacttgtagaattcaccctaattctggtgttgtatgctaacttactcccatatctactcaataatgcaatg

SEQ ID NO: 194211 - DNA, 364 bp, Glycine max
  unsure (1)..(364): unsure at all n locations
agcttgactaggcgagtagattatttctttantttcactgcagncattaccaagaggcaattaagaatgagaaatcccccagagaaaacgtccgattgattttttgctttattttcctaaaatatattacgtactactattgtacctgtgtttttatttccaacgtggatacggcacgaccaaacggtcggaattcattttaactaatattaacggatgatacaattcaaacgatcggtggaaatttattttattgttagattaggcgagatatgacttaaataaatgacttaagcaccgcataagggggtatagaaagcgaatgaaaacgagactaacaatacttgaaacacaatgtggacca

SEQ ID NO: 194212 - DNA, 447 bp, Glycine max
tagcctgctgcccatgcacgcttagctggcaattgtacatatatcgcaactatcaaaacagcatgtgtgtgctaagcgcacacatacacgctgagcacatagcataatcagacagcagacaacaacaaacatttgcactcagatcaactaacacaaatattcatagagtcatgggcataaccaaaatcaacctaacatcaacacaacagcaaacatcaacacgcaaatcaactaacacaattattaaacaagtcacagaaaagaggagaaaaaaggtataaatcctgagttgcctcccagtaagcgcttgtttaatgtcactagcttgacaggccatattccttgccaatcaattgatgaggaggggtattgacttggagagggctttcttggtgaatttctacttgtgagcacttctcacattggtggtgtgtactttccttacct

SEQ ID NO: 194213 - DNA, 441 bp, Glycine max
  unsure (1)..(441): unsure at all n locations
agcttanaaagagttcacgatcactttatagtattctgctgagaatttcacaatagatgggcatgaaggtagagtttcatttatcacatcgatgactgagcatttttgtgctggttgcaatagattgcgactactagctgatggaaactttaaagtctgtttatttggtccttcagaggtaagttatattcaaatcatcaaagttcagtatattatgcatggcacttaaatttggtgatggcaattgggctacaatctgtgatgcatatatttgataatgtttttggtgaacctgtgaggctacaattgaagacgataattgcaagctttctaaattcatatgtggtaaggaattggataattacgtgatgtgggtgaagaatctgagattaaagaactggtatttaactcctatatatgttnntagtgaataaaatcatg

SEQ ID NO: 194214 - DNA, 444 bp, Glycine max
tatgttcatgttaaacctatgctaggtgggactttcactgtcattgttatgtggattttctacccatttaatgggggtgcaagggcaaaagtggcatgcaccaacattccactaatgaccaaaggggaacatgtgggggattgggagcatttgacattaatggtaagcaactttaatggagaattatggagggtttatttctcacaacacagtgagggtaaatgggtggatgcatctgagcttgagttccaaaatggtaatagacccgcggcttattcttccttgcatggccatgccttgttcccaaaaccttgccttgttatgcaagggatgagagggttaggtgtaaggaatgatgcatctataagtgatgcagtcatggatatggcaactcggtttgaaatacatgctgctgaatatttggggtcacaaattagagagcca

SEQ ID NO: 194215 - DNA, 439 bp, Glycine max
  unsure (1)..(439): unsure at all n locations
agctttctaaactgcgattnatctgtttttataaattctgnagaaaacaaaagtgtgctatcttttcttccttctccctcttgccaaaagattcaaaggactaaccgtctgagaattcttttgattctttctattccctttaaacaaatgatttcaaaggactaaccgcttgagatatcttttgtttccccttacaaagattcaagggactaaccgccttttggatctttgcttgtaaaggattttccaaggttattggaaatctcaagaaccgatggtttcttgggggctggacgtacgcactggttgttgccgaaccagtataaatcttgcgtttgttttcttcttccctacactctatatctttccgctgtgtactttttattaccgctgtacttttgtctaaagcatggtctctagtctttactcttccataact

SEQ ID NO: 194216 - DNA, 444 bp, Glycine max
  unsure (1)..(444): unsure at all n locations
nttganaacaggttatcacgggcatcgcacttcctgttttatccgacaaactctattctggcagcactgatgggacagttaggatatgggactgccatactggtcaatgtgctaaagtcatcaatcttggtgctgaggttacctctttgatcagtgaggggtcatggatttttgttggtctgcaaaatgctgtcaaggaaagctcttatctgtcattgattggttttgatgtatgataatgtctaatcatacgagtagtacatgcaaactgattatgtggctgtggttgttgtgaaggcttggaatatccagaccatgtcagagtttactcttgatggacccaaatgccgagtccgtgccatgactgttggcaacaatacactctttgctggtgcagaggtaactaaccatgttattaatattgtccaatgatattccactaac

SEQ ID NO: 194217 - DNA, 360 bp, Glycine max
agcgatcatatgcaaagatcatcttgttggtgaacccccttcttccatgcgcttatagatgaagacatgaccaagagcaagggcaaggaaccacttgaaagacttggaggacctattgatgaggacatgaccaagagcaagggcaatgatccacttgaaggacttggacgacctatgacaagggctagagcaaagaaagccaaggaagctcttcaacaaatgctgtccatactatttgaatacaagcccaagtttcaaggagaaaagtgcaacgatgcgagttgtatcatggcccaaaaggaggactaaatgacaccactttatttcaatcttagagtgcttagctagtctaaataatgg

SEQ ID NO: 194218 - DNA, 419 bp, Glycine max
tagagtggtagaaggcaggggaggttttgtagatgtttctatggagtaagaaaggcctcaagccgagttggatgggaagataggtgttgctcgaagggatttaatgtaggtacaaatggtgaattctgatccaaatggtggacgtgttacatggagtaggtgtggccagaagtcatcgcctagagcattttctgaacatgctttgggtaaggccatgaatcatgtgtgggtcactacatgcttgaggcttggtacctctttcttttttttgtttctagatgtgtgcctctttctacaataggtggatctagatgtcttgatttatttgatgacaaagtggcatgctattgcttaaagcatgagaagccaatcattttttctactttacgcaacgtaatctttatgggtagtactactac

SEQ ID NO: 194219 - DNA, 405 bp, Glycine max
agcttgccacccaactcgcccaggcgagctaagttgcttcctttagaagtgtcgcaacctacccttcggcgggagggcgacgcgagactcgcgggatacgttttccacgaaaggaatacgcgcggagtcgccaccaacgtttatttgaggaaaacgtcggaaaaactggaaaagacgcgatctacgaacttttaagtgaaaggatcgggagttgtatttacgcacggggaaggtgttagcaccccacacgtccgtcacaagggacggcagcctttaatcgaatgtgcaaacatgactctgatttttttatgttccctttgtatgtctttatatcctttataccctttctatatttttctctttttgtggtcgacaagggtggatccctttgctcctacgtattcc

SEQ ID NO: 194220 - DNA, 441 bp, Glycine max
  unsure (1)..(441): unsure at all n locations
ntgagggtgcgcangcccaccatttttcatagtagagtatctataatgtgtctaccatcacgatcatcgtctccctttccatcattgggggtaccacctgngccgccagatccctccaccttttgggcgtgttctttgaaagatccgtccccctttttgcaaatgttctgtagttgcatcctatccggaaccatatcaaaattgtactgatactgcctaacaaaggcaaccattaggtccttcctagaatggactcgggaagattccaagttaatgtaccaggtaacagctaccccagtaagactttcttggaaggaatgtattagcaattcctcatcttttgcgtattcccccatcttctgacaatacatctttagatggttcttgggacaagtagtccccttgtacttgtcaaggtccagcaccttgaacttgggaatg

SEQ ID NO: 194221 - DNA, 360 bp, Glycine max
acttccttgagaagctagagtttagctacacacacccatctaaaaactaagctcacctccttgagaagcttccttgagaagctagagcttagctacacacacccatctaaaaactaagctcacctccttgagaagctttcttgagaagctagagcttagctacacacccctataatagctaagctcacccccgtgacaaaaaaacatgaaaatacaaaaaaaatcctactacaaagactactcaaaatgccctgaaatacaaggctaaaaccctatactactagaatggccaaaatacaaggcccaaaataagaaaacaatctattctactatttacaaagaagagtggacccaaccttt

SEQ ID NO: 194222 - DNA, 420 bp, Glycine max
  unsure (1)..(420): unsure at all n locations
tctacttgtagacatagacttgcttgaaagcaagctacacttctccttaagaaaccttccaaaggcaaaagctgctctcacagctgcaagaacagctgcaaatgctatttatgttcctccagctcaacaaggtgccatagatctacagagtgggattcttcacgcagaggagaaggattacaaaactgcatatagttatttctttgaagcttttgagtctttcaatgctcttgatgaccccaaggctgtatttagcctgaaatacatgttgttatgcaagattatggtgagtcaagctgatgatgtggctggaatcatatcttctaaagctggcgtgcaatatcttgggcctgatttggatgctatgaaagccatngcagatgctcattctaagcgatctctgaagttattcgaaattgc

SEQ ID NO: 194223 - DNA, 429 bp, Glycine max
  unsure (1)..(429): unsure at all n locations
atgcaagcttcttggttcaacagctgaagattatattttggctacctcaccactcctctaatgactatagcatcatttctagcattaaaatggtgggagttggaagccatcttctctattaaatttctggctttcacacgggtcatgtctccaaaggcttcaccactggcagcatctatcataattctagtcatgtgactgagtccttcataaaaatattggagaagaagttgctccgacatcttatggtgagggcaactggcacatagctttctaaatctctcctagtaatcatacaagctcttctcactgaagtgtctaatacctgaaatatctttcctgatggtcgcggctctggatagaaagaaattttcttttagaatacctcttgaaacatcctantcgtgaggaccttgagcaaggaataca

SEQ ID NO: 194224 - DNA, 290 bp, Glycine max
cttatggaagaggactctcatttaaattttatttttcttcacaggcactagtaatcgattaccaaaaacattgttatcgattacagctttttgaaattaattcggaacgtcgtaaaatcaatttgaaaacttttcaaaacaatttctctactggtaatcgattacaacaatctggttatcgaataccacagagtaaaaattctttggtaaacatgttttgtgaaaaatccatgtgctactcagtttatgaaaatccttttcatacttatcttgtacatgaatcttgatct

SEQ ID NO: 194225 - DNA, 395 bp, Glycine max
  unsure (1)..(395): unsure at all n locations
agcttatgccaccgtcttatcataatgaatattctttaataacatggaagccaagccaaacaaattgtgtcataagtgtgtgccctgcattttctatggaaaactctatctctctctcaggtggcagaccggatatagcctcagaaaacactttaagaaactctctgacaacagggaggtcacacataanaacctttgtctctattttcaggctagacaagatcatgtatacttgagtatcttcctttaaagatgtcacaacttggttgacagagataaacatcatatccttactcactctagaatcatcaaacaccacacttttatcaaaatagttcaacaagacatggttggaagataaccagtccataccaagaataacatcatactgactc

SEQ ID NO: 194226 - DNA, 406 bp, Glycine max
  unsure (1)..(406): unsure at all n locations
ctcaagcttgcttgtaggacttctatggaagctagatctctgagtttcaattttgttctttaanggngcatttccaccatggagatgcaccggaagacatatgagaagaggtgagaggaggcgtcatccactatggaataagccatggaagaaggagctncaccaccaagatgagccttggataagaagcttggagaggatgcttcaatggaggaaaagatagacggagagaaagagagaggggggagcacgatattgaacgaagaaaaagggagagaatttgaactctgagttgtgtctcacaagactcttattcatcaaagttacaacaagtgttacagatgcttctatttatagactangtagcttccttgagaaagcttcttgagaaaatttccttgaaaac

SEQ ID NO: 194227 - DNA, 446 bp, Glycine max
  unsure (1)..(446): unsure at all n locations
actcagcttgacaatggctagacatgatacatgtcagggcttgtttaggttttttggttatagggatgccccacattattctcatgacacatatgccaaaatgatgatttggaaactctatgcagatctggacatgcatgcatctatgccgactctcatatgtgaaatattcatggtcatgagatgctagggttcaagattcatctcctctatttcaatcaacccactgtttccaaaatatgttcttttatatatttgtgcattcatccgagtccatatctggcgtctgggaaaatcttacagcattcaccctccangtgttacacattttttcaaaacaattctgatcagcaatttttcaaagaaagtcgacagcattctttcaaaacatgcggtttcagcagacactatcttctttctttttatctgtgcactactttcatgat

SEQ ID NO: 194228 - DNA, 446 bp, Glycine max
gcttgtattgtgcattcacatggtagtgttcttttatgatatttaaagtccaattcatggattatcctatgactctcactaatgaatagcccacaagattatgttttctttcttttcctcgaacaacttattaatccttgattgaaaatgcaaacttatataatatcagtctcattgatatggatttgcagagcaagttcttcgagacattcgccgctccattcacaaagaggggattgttactaaagtttttgatcctgagaggtggttccaccctggcatacttgagtgccacagcgtcaggtgacattctaccaatcaagaagggcccacaacttccaccaaagccaggtcctcgtggcaagaatctaatttgtttccaattccatctgtttaagctccttcccctccccttcttcttcttctcttgaaatgaacatgtatat

SEQ ID NO: 194229 - DNA, 415 bp, Glycine max
  unsure (1)..(415): unsure at all n locations
tttgagaatcgcattggtcttttagttactctgtatattaacttttttgtgncccngcgcaacgggaatcaataatattgcagcttatgaagataacggtatccaacacatgattcattgttttgttggggtttctgcctgggaaaatgtggtgcgctttcctatattgtctgtctctaccttgttttttgtctctctcctcattcctagattcaaattcattcttaagtcatcaatttttcttatgcttcaagtacaagttaaagtggatttgcgtttttcacaatgttttaccttgttaaaaccaacttctcttgattgggagatattttgagttcagagaaaaataaaatccatttagagaatttctattcatataatacaaatactcctaagataaataagaatgtagaga

SEQ ID NO: 194230 - DNA, 445 bp, Glycine max
  unsure (1)..(445): unsure at all n locations
agctntgcgagattcctcacggaaaacgttactgttacttttctgaagcgcctcggcttagattttcttcacagaaacaatttttccaagcaaattcgaaagagagagaagtgcctaaagggctggaccctttccttcttgctttcctcccctatttatagcaaaataggggaggtggttgccgcccagctcgcccaggcgagctcagctcgcccacgcgagcaaggttgcttcctccacaagcaaccgccttctggaggaatcttctggagggcccaaatgggcctgggtgctatttgcacccccatttttactaagtacacccccctctactattatttggtgatatctttttcgtaaaagtacggaaacttacgaatttntaacgatacttgtttctntccgaatgtacggaccttgggatacataatcatccttttgacta

SEQ ID NO: 194231 - DNA, 317 bp, Glycine max
cgcgacactagaaatctaagcttacacacacttagtctgacccactaccagatttgaatatcttagcgccattaacctatggaagtaatcaaaacttaatgtgtgagtgcaactgagattgaggcaaccaagagtcgcccgaaaccacctacaatgggaccaccatgtggactgccagaatgctgatgcctaagatggcaaatgggcccttaatacaacatgaactatagctaactaatgccattttatttgattatccccacacatactactggtaatacaactatacaatgatcgcgccattatttatacaaact

SEQ ID NO: 194232 - DNA, 504 bp, Glycine max
  unsure (1)..(504): unsure at all n locations
ccccccccccagaagntatgtactcgttacacngcancttaagcaccgagcagccacgcggcaataaatactctttattttatctctagcatgcattgcatgtaggactcgtcctttgtcacaggaagccgggaaggccatatcaccttcttaattgtacacatggggcactgcacccccaaatgcacatgtaagaagagataattttccgggctctcgtgttccgaaaatgcattcatatcatgcatcgcataagcatctcttcacaacatcataatggacatatcctgcatttgtcccgtatcatattccaacctcacattttgcatgagtcatggcatcatcatgcatatgcgttcaacacactttttgatctgcaaaatngcataccattctgtttcatgtttgctcattcttgcgttttcctctaccaaacacaaacaagaagggggaagcgtgaaatttcacactacattcttagtttcatgtgttaagcaccatgaa

SEQ ID NO: 194233 - DNA, 312 bp, Glycine max
  unsure (1)..(312): unsure at all n locations
gcatcatagnncaaggaaaatgtggcccaaatttgggagagcttattgggtgacaacaattgtggtaagcaagatgacagcacacacaattatctcaagaagcagcaagaaaaagctgcttaaaaaaagagggaagaatcaagaataaaagctacatgtgtggtgtcataaaagctgttattgacagctaagtgttataaatatgggaaagcaagtaataaaagttggaataaaagaaaaaaagggtttatctaaggatgaatgctctcttaatacctaagattttgcatcctagaaaaaccatattttgtt

SEQ ID NO: 194234 - DNA, 284 bp, Glycine max
caacaccccctcccaacgcaagcccaagcgcctcgtctccaaagccggtgaactctccacctccacgtacgcgccgcctaggctccggcgacacgagcgccgactacttggcggtgcccaaagaaagcgcaggagccagcagcgcagtgttcgcggcgaaagtgaaggagaacgacgactcggcgaggaggaacaaggaaggcagagcgaggacagagagggaaactctggaaacgttggagcatcctttcttgcccacgctatacgccttgatacacgcgcct

SEQ ID NO: 194235 - DNA, 330 bp, Glycine max
gaccttaatcacgagctgcacttcacttgacctgacctttgtactatagcgctccagctatctaaagtgtgtgtgaagctagcatatactgaacaccttgtttctgcttctataagccggttacaatagtggtcaccacctggggggggaatgtggcttctctattggtaataaaaattattccttcacaccagcttaattacctgtacaacccaaaaaactataagtttgtgggcgaatggcattaatatctttatcctcactcaagcagagaacatatatgatgccgtccagcgcgtcaaatcacctggtcagtgacactcttttttt

SEQ ID NO: 194236 - DNA, 457 bp, Glycine max
  unsure (1)..(457): unsure at all n locations
ttaggcttagatagcgaggcatcgctatctttatgcttgccacctagagacatgtgcacgacacaacttatagaatactaaacagtacaagaagctctaactagaaaaactagatatattacttaattaccaagtatgagactattatatatccatatatcttcttggctaatctatacaaatatgtagtcgagttgtttaatttataagaaattaagaatcaacttgactacatcaagtagagattagtcagaaccatagcaagtaatcacataccatataaataaatctaccaatacaattgaattgaatacattatttcttgctgaaacacacacacacataccttattgcaattgggtatgagctctntcaatgtacgcatcttcttgttgatcttttctcttcgcttctgcaaaacatccacaactacttttagttacaagggaataataat

SEQ ID NO: 194237 - DNA, 454 bp, Glycine max
  unsure (1)..(454): unsure at all n locations
caagctgnggagccctagagctttggaacatttcttgttgctcagagacctcatatcataagtctatactctataccaatctaatcttaatcacactttctcttagattatgtgaaaggggttaaactagcccaataatatgatataaacgatgtagtttacaggaatagagagagaagtgtgggtagatacaatcaatttagtatggcattattgttgatacctatctccaagtgggaagatctaactgattgatgaccaagaagcaactcatatattggaaaatgtatatggtgatgatgttgaagagatagatctcgtggtaggtctcatgacagataagaaaatgttaaaaagtttcacatcacctgttttagtctttaagatgtagcttatatatccttcagacaccatcacttagtgttacatggctntaataatcatattaactcta

SEQ ID NO: 194238 - DNA, 384 bp, Glycine max
ttttaatggaaaacgtctatgtggtggtttgtataggaacataaaccacacagtctggcgacaggtgtagatttttgattcatggccaggtgggttaccacgttaaccaaggcatttagtttaccttcaagcttcttagtcttagctgatgaagaagaatttgtggctacttcatgcactcctctaatgacaatagcatcacttctggcactaaattgctgggagtttgaagccatcttctcaattaaaattttggcttcagcacgagtcatgtctccagggctcaccactggaacatctatcatacttctcctatgtcgtgagtccttcatcaaaattacaagagaagctgcttaacatctgtcgcgaggaaactggacataa

SEQ ID NO: 194239 - DNA, 340 bp, Glycine max
  unsure (1)..(340): unsure at all n locations
tgcttgaggagcttctatggaggcttgatttttgagcttcaatggnggcctttaatggcgattttccaccatggagatgcaccggaagacaaaggaaaagaggtgagaggaggcgccatccattaaagaataagccatggaagaaggaacttcaccaccaaaatgagccttggataagaagcttggagaggattgcttantggatgaaaagaaagagggagagaaagagaggggggagcacgaaattgaatgaagaaaacaggagagaagttgaactctgagtcgtgtctcgcaagactctcattcatcataattacaacacgtggtacacatgcttcta

SEQ ID NO: 194240 - DNA, 410 bp, Glycine max
  unsure (1)..(410): unsure at all n locations
agctagcataactctatcctcgttgttatataacatacaatgccaaaacgaagctntcccaacaaatcatccaaagcttcctctttctttgttaaaatccaataatcttgacgtgaacccttctcatcccaaaataaaacccccaaaacccgaaccctatttaccataacttcacacattcactactatctaatggcacctctcacttatctcttcttcccacttttcctcctctttgccttaacacactcccgaagcacaccacactcctccaaaacgacactcctcgacgtcgtttcctccctccaaaacgcacacaatgccgttgccttcaccccccatcaccttaaccaacaccaacgacaacaagaagcctngcttctatcngtcgtcgttggtatcactttacg

SEQ ID NO: 194241 - DNA, 417 bp, Glycine max
tgcccattgcaagagccatttgactcatgttttttcaacatttccactaccattgggtcctacggaagtagaggaaagtatttctacaagagattgttgcaatgcttccatgccttgatttaaagcatcctcagcctgctgggaagactgttgtagattacaaattcccatcaactgctgatctgttaatggctcaaggtggttcttgatgatctgaaacccaaaatacaagaaacgagtcaaaaacaaacaaattatgtacacaagtgaagttaattactatcattttagaatgtggatttgacctaactcgaccccaaaaattagattataacgtgagagttacacctcacttatatgctctcgcttgatcttatctcttctcaatataggacttggatttctttcaatatacct

SEQ ID NO: 194242 - DNA, 454 bp, Glycine max
  unsure (1)..(454): unsure at all n locations
agcttggttcatatgacatatatatgctttattttgagggggagtgtgananatatgatttgatatgttttaattacagcattttagtatggattatttcccttattactcattatttagtttccttattttggaaacctccttcattataaataagagtatttcatgtggtctcacacacaacattacacaataaatcattgtaatacagtccactgagcagtcttgtgctactctggccacctactaagattctcttcagtggtttgagagccaccaaacgtctggtgctattgctntagtcgcacacaccggtgaattatagcttgcatctctccttcatcttacttgggtccttgggtgcttgactatgtgcatctgaccacatatctggtaatccgtctcttttctctttcatttccacatccaacttattactgtccattacctctac

SEQ ID NO: 194243 - DNA, 397 bp, Glycine max
tgtataaatataatgggcctgtatttatagtttactttttaaatctagcgtgcctttattcactagcgctttcattcttgctcaatcctatgttcatgcaacctaaggtacctcacgaagctactttcgtttgtctacatcccacttttttcatccttctatccatctcttggttcttgcattgtgaaccaatggtacatgcacaacctagacctattgatgacttgttgttaaacttacaagacaatcatatttcgaatcaagtgtgagaaggccaacagagaacgatccggctaaggcataagactatttgggcttttacacacttagatcggatagataattgcgtcaaacacctaatcgctctagctgatgttgctcatgttataaatgctgg

SEQ ID NO: 194244 - DNA, 475 bp, Glycine max
  unsure (1)..(475): unsure at all n locations
agcttctacttataaaagctatgggatggtgattttgcttgagaacagctcctacccctactcctgaggcatcaacctctactataaaagtctttgtgaaatcatgtaaggccaatacaggtgcctggcttaacagatccttaagacactgaattgtaagcttagcttcctcagaccaagaaaaaatatcttttttcaacatgtcatttagtggtttggctatagtgctatatcttcacacaaaccttctataatagcctgccaaacccaanaatcctctcaattgtttaagggtttgaggaagtggccaattcctcactgcttccaccttaacagggtcagtagagactctctctctagtgataaaatgtcctatgtattctactcgagtaaccctaaagtagcacttaaaattcttggctaacaacgcattagctctcatggtagacaagactgtttgtaatgatcaagtgat

SEQ ID NO: 194245 - DNA, 481 bp, Glycine max
  unsure (1)..(481): unsure at all n locations
ttatacttttatatgttaaaatnttagggaatccttattaaatatcaataaccaccacgaacacattctgtcagattatcaagagaggttatgaagaatacctagatccataatacgtagcggaattaacaattataaggagcaattgattggtgatcttcttcaaccaaatcattgttttcctttgttgagaccttcattttctcctcaaatggggagaaaggaagttgtttcttgatttggtgtattggggaccacaaccatgctttgngtttttaacctattagagttttcattattccctaacgggccaaacctatttccacttttaagcccatattatatttctgatgatagcctaataggctcaccacattagatcacttatattgagcccatagaanaatataaataactaatataaatgtataatataatatgtagcccacattaattaattaattaagaatttataaatcat

SEQ ID NO: 194246 - DNA, 459 bp, Glycine max
tgcgcagacccaccatttttattttatagtatcgataatgtgtctaccatcacgatcatcgtctccctttccatcattgagggtaccacctgagccgccagatccctccaccttttgggcgtgttctttgaaagatccgtccccctttttgcaaatgttctgtagttgcatcctatccggaaccatatcaaaattgtactgatactgcctaacaaaggcaaccattaggtccttcctagaatggactcgggaagattccaagttaatgtaccacgtaacagctaccccagtaagactttcttggaaggaatgtattagcaattcctcatcttttgcgtattcccccatcttctgacaatacatctttatatggttcttgtgacaagtagtcctcttgtacttgtcaaggtccagcacctttgaacttgtgaatgaccatcgttgggtattatgaacaac

SEQ ID NO: 194247 - DNA, 447 bp, Glycine max
  unsure (1)..(447): unsure at all n locations
ntgcagatntggtcttcgccagtgaaaggatcaatgtttgtccttttagaggcanatttgatcatcctactaggacgactgagaaaactggggcaaataaagagggtgaggatgagggagaaacccatgctgtaactgccattcctgtgcggccaagtttcccaccaactcaacaatatctttactcagccaataacaaactttctccttacccaccacccagttatccacaaaggccatccctaaatctaccacaaagtctgtctaccgcacttccaatgatgaacaccacctttagcacaaaccaaaaacaccaaccaagatgtgaattttgcagcgagaaagcctgtagaattcaccccaattccagtgtcctatgctgacttgctcccatatctacttgataattcaatggtagccataaccctagccaaggttcatcaacct

SEQ ID NO: 194248 - DNA, 495 bp, Glycine max
  unsure (1)..(495): unsure at all n locations
gtcacctgcggcatgcaagctnggagaggatgcttcaatggaggatatatatatgtggagaaagagagaggggggagcacgaaatcgaagggagaaaaagggagagaagttgaactttgagttgtgtctcacaagactctcattcatcaaagttaccacaagtgttacacatgcttctatttatagactaggtagcttccttgagaagctttcttgagaaaacttccttgagaagctgtttttgagaaaacttccttgagaagcgagagcttaactacacaccccctataatagctaagctcacccacatgataaaatacatgaaaatacaaaaaatttgctactacaaagacaactcanaatgcctcgaaatacaagggctaaaccctatactactagaatggccaanatacaacgcccgaacgaagggaaaacctattctaatatttaccaaaataagtgggctcatacttagcccatgggcgtcaaatctac

SEQ ID NO: 194249 - DNA, 399 bp, Glycine max
  unsure (1)..(399): unsure at all n locations
tcctcatgtgaccaagngacttgattgagacaaagaattaggattgttcgatggataaagagtagaacgtgcagctattgcctcttttagggggtatggctttcaaattttttgctataaatggttaaagtagaattaggccaaatatggaaattttgcttttaccaaaaatggtgaatctctagtcaattattcttgatcatcgtgctaattatctacggaagaatgattaaatctaatctcaccgcggtgataatcttacatagagtaactgtatactgcacaaatatacatagtgcaagtttccattgtataaagtctacacagtccaaattcttctcaatgaaatcttaactttcaaaagatgctgcgtacatgacatcaatcctatgaataaat

SEQ ID NO: 194250 - DNA, 389 bp, Glycine max
  unsure (1)..(389): unsure at all n locations
agctgcagctggggaaagtcaagacatctgtgttattgttcctgtcatccncatccacacaaagtgactcctgcgacatgatctataaagtatacgaatcctgattcaagttntggtctntccttcactgcaacgatgtatgatatcctggaagcatggtgaggtagcgccccagcgctccttcgacttaagtcacctaacgcgataagatagcaacagcattcaaaagtcttatatatttattcactgtaacagagctgagatcttatgtcaattcatataagcacgataaagaatatacgcagtgtctcactgcatatatttattcacttaactttccctgaaagcactataggatcttggctcttgactaaagctctgccatgaaa

SEQ ID NO: 194251 - DNA, 457 bp, Glycine max
  unsure (1)..(457): unsure at all n locations
agctcgctcgacgagctgaggattatcattgctacttttctgaggatgaccgaggaacaattagggatcaacttgtaacttatgtgcttcaagtgagaagaaatcttctttttccactcgtgaagatgttcaaagtttggctatgaagatggttcaaactgagaaacatctggtatttccattggtttattaacttattgagctagctttgatattgccggtgtcgacaacatccgctgaaagagctttttcatcaatgaagattatcaagtctaaattgcgcaataagatcaacgatgtgtgggtcaatgactcgatggtatgttacaccgagcgggagatatctcagtcgcttgatgatattgatattattcgaacatttaccgcaaagaagtctcgganaggacacttgcctcggtatcttatctaacccgctattgtaagactatgtttatct

SEQ ID NO: 194252 - DNA, 474 bp, Glycine max
  unsure (1)..(474): unsure at all n locations
tgtacaatanaatattaaagatatgcttctatgaaattattaganaacagagacaaaagaaaatactaataatgatatatatttttttatatagttgagggaaagtgaaaaaaaagtataaataaatatttagtttttattttcttttttaatttacattttattttttattttttattctttctcaactgtaccagtttaaagtgaagttaaattggcatgtactattaatgtaaacatttttacatcattagttaataagaaattattgttaagaagttaatttaatcaatctttaaaacaattattaaaanaaaagtaaataaacttattgtacaatgatttgtgatctggtaatactactaatctttttacactttccatatanttcaattaaattcttaatttaaatgcatatgttaattacatttcattacttannaactaattttatcanaactaagtttaaaatca

SEQ ID NO: 194253 - DNA, 465 bp, Glycine max
  unsure (1)..(465): unsure at all n locations
agcttgagccatcacccaatcttgcaacacaatgttgggtccaagggtatcaaactcgacagtttacgtagactcgtaagagttccatagactcaactcgtagacttatacgagtccacttcatataaaaataataacaaaatatctataaataacataccaattaaacattttaacaatataataaagcaaaatagtaaatcataaatttcacaatactgaaataaccaagtctagtaatgcatcactactagataataacttgcagattgtatagtagtggtagagcattcccatcaaggatttgatgttattagagaatacgggtttgatgttattagaggtgagagtttttcaattcatgaacaacacactaaattgaggtatatggaagactaaacaaacaaaaaaacaacctcaaatgacttacantttggtctagttttattaactagatgaagtcgt

SEQ ID NO: 194254 - DNA, 477 bp, Glycine max
  unsure (1)..(477): unsure at all n locations
tctagaaaactataaatagagggagtganttttctccctcttcacttattacaaactttctttcttctctggtcaaagaattttctcctaaaaaaatacaaaatggagtgctcaatgataaccctttcgagttattcctaggttcatggcaaagtcaaaacctattccactagtttctgtacttacatgtcgatcatctatttccttgaaggtgtcaaattttgccatgatgatcggccaggagtgatgttntttgagtcgtgtctcgctagtgagcacgtctttatgtgtgcctatcctatagagacacgtttcatgtacacgtctntataagttcaaagtggacattctctgagaagtgaatgttgcctttacccaagggtgtgtgggtctctcttacccgcatttcangtagggtcgttattggcctatacaccacctcttacaatatttaaagggtcattttttcgagttcat

SEQ ID NO: 194255 - DNA, 335 bp, Glycine max
  unsure (1)..(335): unsure at all n locations
agctttacctctgcagttgcatacattnnatttattcgtcacataagcnctctgagcaagctggctcaacaactctctagtcttataattaaacgttgcaaggtcactcacatttttcaagtatcacatgtaaaacttgtttgtgttgtcaattttgccaaggaaatcagtgtccaagtacctgaacatgcaatattcgtaccaaatgatgccacctttgttgtatggacagcgactgaagatttctttgggtgcctcacagacacaagttttgcattctgcagccaacacgtcgccactgcaaagggcaagcccatattccttttgagttttgc

SEQ ID NO: 194256 - DNA, 294 bp, Glycine max
aaagtaatactctaaaagttatttctttatgtgctcctccgaacaaagattaggatctataaaatccatttagagatattcccaatccaaaatctagagaacataacaaattaaacactggtctataaaaaaaccaatttggacaatcttgaatgcccaaaacatagccagcccaatccattctagatatgtagaacattagagattagcatttagaaatcttttcccaaggctgaaaaactctgaccgagttcgataggcatcatggcgacactggattccgacgtgaccgtg

SEQ ID NO: 194257 - DNA, 449 bp, Glycine max
  unsure (1)..(449): unsure at all n locations
agctntgatgtatggagattgaaatgatgttgtttataacaattgtctatggaatgttcttaatccaattgttgtcaatggtggtgtttgtatgtattcacaagtactaagaatatatatattaagtgtaatgatgtacattgagtcttagtgtgttcatgttgttatctacttgaatgcttttaatcaatttgatgtaatgctaatctaaagaatgttattttgttgtcttagtatgtttcaatttgtttcaaaattgcataagattcagttctgcataagggcataatctgtcaaaaaaacaatgatgcataactgtataattggttccagaaaatcaatgcgtaactgtcattttagtccctgaaagatatacgtntattttgtttagtccctgtaagtgtcacttactgtcaacttagtctctgaaagtacacgtgaaataaaat

SEQ ID NO: 194258 - DNA, 447 bp, Glycine max
tatccagattctgtttagatattcgtgaattactacttgtcatcgtgaaagttttaattcagtggaaaaatctccctcccagtgaaaatagttgggaatctgtggctaaattacaagagggttttccgacttatcaccttgaggacaaagtgagtcttttatgcgggggtattgataagaataagcataagccacacatcaccaaggtgtacactccgcaaaatcccaaggggtgcaaaccacccaacagttacaacccacccaaagggtgtaaactacccaatagttacgattcacccaaagggtgcaaggtcaaaagatgtgaatcaaggagacatgacccttgcgaacagtcaaaaccaaccgataggggacataacccttgcgaacaatcacaaccaacccaaagatgtgaatcaacgtgacatgacccttgggaacgtcaca

SEQ ID NO: 194259 - DNA, 392 bp, Glycine max
  unsure (1)..(392): unsure at all n locations
acacctcctgtataccgggcgctctctcctctattttatgcctttgattttgcatgtggggaggcctatgccagttttgattccacccctgcttgtaattctatccctgaaggaagttgttgttgntaaaaaacagctcatagagattgttcctccctctcacataataaagctcatccatggtttgagccaacacacctttcacagtgcattctgctagaccatgaacacatccacacctatcacaaatgtgattgggaggtgtagaaataggcactcgagacttaactctcattccactctgaatttcttggacaaagcttatatctactcgccaaagccaaaagtaactgcttcagcttccacctcggtgaccgagcgtcttcatgatt

SEQ ID NO: 194260 - DNA, 428 bp, Glycine max
  unsure (1)..(428): unsure at all n locations
tcaagaaaaagatggcctcagcagattccttaattccttgattggaatnctatcaatagacctccaatacttaatggagagggttaccactactggaaaacccgaatgcatattttcatcgaggcaatagatctaaatatctgggaagccatagaaatagggccttatatacccaccacagtagagagagtttcaatagatggtagttcatcaagtgaaagcataaccatagaataacctacagatagatggtctgaagaggatagaaaacgagtacaatacaacttgaaagccataaacataataacatctgncctangaatggatgagtatttcacggtttcaaattgtaagagtgctaacgacatgtgggacactcttcgactaacacatgaatgaactacagatgttaaaagatctacgataaa

SEQ ID NO: 194261 - DNA, 435 bp, Glycine max
  unsure (1)..(435): unsure at all n locations
ttgaatcaancttgattcatcatgaagcttgcttctacaagatgcactccaaatgaaatagttagcaagaatgacagatcacaaggaagaatcatcaaacttcagtcctcacaaagttaatgtttctctcaatcccacaatgtctcggttaagagtgtttcaattataacaaccgaacagtaaaattcccaactttgcatatcaccttagtcaatgcaatcatacatgcacaatgtgaatcactaagcactttattatgcttgtaacgtgactgagctaacaaagaaatcatgattnttctatgattcaaagttaggatctaagagaacattcattcccccanatgtttgacanaccataacttagaatttttacaacaccaaccttattgttgtgtactattttagcacaaccactttttgatatgtttatcca

SEQ ID NO: 194262 - DNA, 419 bp, Glycine max
  unsure (1)..(419): unsure at all n locations
ttgagggtgcacagcccaccatcttttcatagtagagtttcgataatgngtttaccatcacgattatcgnctccctttccattattgggggtaccacctgngccgccagatccctccaccttttgggcgtgttctttgaatgatccgtccccctttttgcacatgttctatagttgcatcctatccggaaccatatcaaaattgtactgatactgcctaacaaaggcaaccattaggtccttccaagaatggactcgggaaggttccaagttagtgtaccaggtaacagctacccctgtaagactctcttggaaggaatgtatcagcaattcctcatctttngcgctattccccatcttctgacaatacatctatagatgggtcttgagacaagatagtcccttgtacttgtcaaagtc

SEQ ID NO: 194263 - DNA, 322 bp, Glycine max
cctgtgatgatctgcgaccggatcttatcacgagctcactgattggcaaaccttttgtactccagctctgaccccacatatttagaccacttgggcacaataaatggaaacgctttcacctttacataactattgatatggggaaccttctagggactaggggacgcatgccaatacttcattaccaaccagctacacaatttattgccactaattactacggccactacctttctattctcacaccgtccaaacctcacttacaatcaacatatccttgataatactacaaaaacaaggagaaatttgcaaatatcatcca

SEQ ID NO: 194264 - DNA, 362 bp, Glycine max
tctagcacaatggacttaccttgaattaattctttctataacccctttgagcctattttcccctttctttgctttgaagctcattacaagcgtttagtgaaaaaccatgatatcaccttacccttaaggaattttggagctcaggaattgttttgggaataagcagggaataagtgtgggggggtatgtttcattggaagatatgattttttggccatgcttaatgtgttattttggccatgcttgatgtatatatatattgcctagatctttctttaatcttcaatatcatactgtgcaataaacgaattgaaaaataaaaaataatcagttgctgcaaatattgcaatttcgtactattc

SEQ ID NO: 194265 - DNA, 468 bp, Glycine max
  unsure (1)..(468): unsure at all n locations
agcttatatatatcgatacgctcgaaatttatcatcgtttactctcgngaaattcaaatggtcataacttttcacacggatgtccgattcaagcaaatcacatatcgagtcgctcaaaactgaacaacggaagctcttgagaaattcaaatggtcataacttttcacacggatgttagattaaggcgcatcacatataaagacgctcgaaaatgaacaacggtagctctcgagaaattcaaatggtcatcacttttcacactgaggtccgattcaggcttataatatattgatatgctcgaaattaaacatcggaagctctcgagatattcaaatggtcataacttttcacatggatgtccgattcaggcgcataatatgtcgagaggctcagaaatgaacaacggaaggtcttgagaaattcaatggtcataactttacacggatgtccgatcaagttataaatatc

SEQ ID NO: 194266 - DNA, 274 bp, Glycine max
agaatcggacatccgtgtgaagagatatgagcgaatgtatatctccagattcttcgctggacaatttccagcgtctcgacatatgatgcgcccgaatcggacatccgggataagacatatgagcgttaggatatctccagaggtatcgatggagaacttccagcgtatagatatattcggaccctgaatcggacctccgtgagacgagatatgagcatttggatatgaccagagctttcgctgtagaatttccaatgtcactatatgagatgcg

SEQ ID NO: 194267 - DNA, 476 bp, Glycine max
  unsure (1)..(476): unsure at all n locations
agcttttggaaaatcattctccactaattatatgtttaggatacgttntatgtttcgtaagcatctgcctatgaagatactataattcgattattggttaatccaacttcctgtgcagaattaaataaatactaccaatgcagggacttgaaaaaagttacatgatgtcacttttataatattttgtacagcttatttctttttcaataacctacattntttccattcacaaaaatggtatgacatctgttttttatgttaatttgatgtcttcacttcatatttaacatgctctttttgttgtttctcgatagataatatcttacccacttctctcatgatattttttccctatcatccataaaagagaaacaccaatgacattatccaaaggccctacaaagcttgcttttttattatatctatatctatgtgtaggcccagcttaagtacaaagctaacaattgttattcatt

SEQ ID NO: 194268 - DNA, 410 bp, Glycine max
  unsure (1)..(410): unsure at all n locations
actaagcttattgtttaccagaccctgtatactatgtgatctatgatattattaactatatctcgatcctcattattcttgaaaacttcatcatttcaatataaccacacctcgtaaagagtttcagtgagtgctagtttcaggagtttagctttccaccatttctttccagtttctcgaatagcccacttgagttctacaccccaagttttaggttcatgagtaactncaatccatttaagaatctgctcccatatgaattttgtaattgtgcagtcaaaaaacagatgggcaatagatttcttagacatcttacatgtaactacatgatagtctttgatcattccanatcttttcagcctatcttttgtgaccattctaccatgacacgtcaaccattaattcactat

SEQ ID NO: 194269 - DNA, 470 bp, Glycine max
agcttgtaaggttaaagtctcacgattgtcacttgctgatgcaacaattgttagccgtggctatacgagacatcttgccaaacaaagtcaggttagcgataactcgcctgtgctttttcttccatgctatatgtagcaaagtcattgattcagtcaagtctgatgagttggaaaatgaggccacaattatactgtgccagctggagatgtattttccccctgctttctttgacatcatgattcacttgattatgcatctggtcagagaaatcaaatgttgtggtcctgtttatctacgatggatgtacccggttgagcaatacatgaagatcttaatagggtatacaaagaatctatatcgtctagaagcatcatggcagaacaagctagacatgtattttacgtgcaagacccttgtgatgaaaggtggtgcgtggttctgcaaggaaaaacaatcgtgtgtaatgtat

SEQ ID NO: 194270 - DNA, 472 bp, Glycine max
  unsure (1)..(472): unsure at all n locations
tctactaaccaagttccaccaaatgtgcacagccgataatatttttatcgatgattaaattgtaaaaataagagtaaaatactacaatgtaagaagtttcgaggactaaaatgtaaaagtgcgtccatgcaccctaacttacatggtacattaattgctgcacatgttctttcatttgcattacagtagaaggcttaaatgcaggtacagtatacaagcaataagaaaagaaaaagttgaaatcaatatctccaatagggaaaatataatactttgagaaaactaaattcattggattcattaaactaagaaaatagatgggaatagtaagtaccactcaccgatataaattacgaatcatgcatatagcagataaaatcaaccataatggacactcaatttcactatgacgtgcatatactccccaagaaacaattatntcaanttgtgtcctttactgctgattcttcac

SEQ ID NO: 194271 - DNA, 242 bp, Glycine max
aacttatagagttttgcatccaaaatggataagagtcttgataactttataagttatgacatgccgcgaaatgcagacttactccacatggtaaataagggaatccacttgaacgaactggtggagaaagctaaccattatattcaacaagcgattggcaatgttgaaaaaactttgacgattcccggttggttttcattttattgaaccctcttataaggactctcgttactagttcttga

SEQ ID NO: 194272 - DNA, 447 bp, Glycine max
aagtcacctgcggcatgcaagcttaatgggaaagtctaaatagagttatttgttatcactctatcaaatttctgagatactgtgctgtcaagtataaaggtgaaagacactaaaacaaaatatgcctctcaaggttttaaacaggtaattcctgctaatttaaagaatatatgacatataatcaaccttgcattaaaattatacctcattatgttagttcttcagtccttaagtccatgttacgtcagattgtttgctgaatgtatccaaagttattcccaagcaaatacgaaatttatgatggagaagttatattcctggtagattaagtcagtccttatctcttttattagatatcaatctaaccttaattcattctgtgttatcccttttaattcagttctctcatgcatatgatcaccatctccaactactattatgttgata

SEQ ID NO: 194273 - DNA, 117 bp, Glycine max
atttgactgaatatgtaagatcaagacaacaccagatatattggtactctctatagccagacatttgatgtcctcttatgagagaaatgtgacatagctaagacgcgattatacata

SEQ ID NO: 194274 - DNA, 341 bp, Glycine max
agaatatcattcaaccgacgaattattctatttgtgcacagattaatcttcgattttcatggcgtcaatggattctaatttataccatcaatgcatgatttagatagaagatgaactcaacgagcttacacaagcatatgctgtagatgagggtgcatttctcttcctctcaatacttatagtatttattgagcatatttgtctcttttaaaaaaggcatgaatattcggtctgctcggtaatttctcttgttctgccaattgtatttgtagtcgtatcgctgacataatgatactatattctaatttttgcttgtcatttgtttctaacgaagagataat

SEQ ID NO: 194275 - DNA, 412 bp, Glycine max
  unsure (1)..(412): unsure at all n locations
ggcatngnngatattatntaatcctgcttttgtatttctgataatcaatcagctcatatttagcaatcatttcaacaaaataaattaataaatcttggctgaatattgatgtgaaagattactatatacacatcatctgagtaccatgttttgcgattcatgtaagtagatttaagatccaatccatttgagtagatattgattggatgtggattatattattaaaaatccaattcatgcccacccctagtgccaccaaggaggctataatacaacactagacaaaagtttggaaaaaggccacttctagatagaataacaaatatattgtttataggatctgagtgtcatnctatgaaagaacatttggaatcaattctaatttcaaaataaactatgagttcacttcaat

SEQ ID NO: 194276 - DNA, 430 bp, Glycine max
  unsure (1)..(430): unsure at all n locations
agcttnctcaatcacctcattaagaatcttttttgccctgcacgangtgtctgcctnttatgaaagctgtctgcctctcatcaataagaccaaatatcacttgtctcaatctatctgctaataacttaactatcaccttgtacatacatccaatcaaagagattggtttgtagtcatcaaatgactgggggtcgttggttctgggaattacagctatgaaagaagcattactgcctctagggaagctgccatgcacatggaattcatctacaaatcttctgaaatcagttttatcatttcccaaactctttaatgaatatgaagttgaagccatcaggttcaggacattttgtctcatcacaactccacactgcttctttgatctccaaatccgaaaaggaacagacaaaactccctctgctcctgttta

SEQ ID NO: 194277 - DNA, 415 bp, Glycine max
ttttacaatatcacacttaaaaattatcttgaataagacattttaaataattattacataaggttaataatcttttatatatatatatatataaaatttatagttgaacatagtatatcattatgatacgttagtctgtattctgatcccattatgataataagtcccaataaggaaacatgatgatttggagtgactagtgtggaatcttctatgttaaaaaaaacacctgatcttgtttgtgatcctgacaagagaatacaaaagcaggggagaagaaatgaagctaagttaactcacattgatgcatgtcaacggtgtcgagcttcaacggcatgatgagaattacccattgacattgttcctctcattttaactaactattcacctacgggggcatgcaaccatccgatga

SEQ ID NO: 194278 - DNA, 427 bp, Glycine max
ggaccttgagtgacctgcagcatgcaacttgcatatagaagaccaagttttgtttgttgtttgcttcgtgaagacaaagctatttattctgcaaagtattctgaggatcgaaattcgtatagtcctgctcagtttctctacacggctgatactgctctctgtcatactcatactcttgcatcttaaaatttgtgtaatgaaaatagtggctggcatttatcataaggatctaacgatctgaggcagtatgctcttatggcgcttttaaatgctactgactaagaaaaaatggttcatttgtgaattactcgttttcgagctctctgatagctgttatgagatatattccatggtgaatacagaatcgtatctttgataaaatgcaatggcattaagtgaaccatgtaccgacctcgtttagtgggta

SEQ ID NO: 194279 - DNA, 331 bp, Glycine max
tattaaaattcatgaagcatttcttatttacttttaaatatgcatggatcactggtattctacaagtgcgtgggagtaaaaattgttccttgattatacccaaagatatccgcttgcgactatgataaggtatctatattacgtgaacaatttctctcaaaaaatttgatttgacgaattggagaggcatctatgtctaggcctaagaatctacaaaagatctgaagatttttgcttgctcaaaaacctattaacaagtttaaaagttaatataaaattgtaccaaggtgctccatgtgaaggtacaacttcttgatcatgcccaaatatt

SEQ ID NO: 194280 - DNA, 348 bp, Glycine max
  unsure (1)..(348): unsure at all n locations
ntgatntagatccactaatgccaacaacattataatattacattcagaaaccacgaaatatattacacaaatggcagaagagaacatagcacgacggagcataccaagcggaatcaaacaatggcactatcacctccaccggaactcgaagcagagttaaccactctctcttcctcatattccttatcatccgttggtagctcatacctgcaaacagggcaaagaatttctagaactcaaccaaggaacaatgacatcttcatgatacccatgcccgcacgggaacctcttcgccaagtttcaacaccgagcaaatccttacctatagcgcacgccacggtttccctt

SEQ ID NO: 194281 - DNA, 445 bp, Glycine max
  unsure (1)..(445): unsure at all n locations
atccttatagtcacctgcagctgcagcttgactccttagatcagtatcctttcttttctcatgtgcacccaaacccaatctccgggttcgaagacaaccttctttctcccttngttggcttgttgagcatagcttttatatttcctctcaatttgatctttgactctctcatgaagcttcttcacatagttctcctttgcttgaccttctttatgcttaaaaacagaaacattaggcataggcaaaagatcaagaggagttagtgggttaaaaccataaacaacttcaaaaggagaacaattagtggtgctatgaacagatctatngtaagcaaattcaacatggtgtaaagaagccttccaagtttttaagttattcctcaaaacttttctaagcanagtttccaaagtcctattaacaagctctcgtttgcccatcgggttat

SEQ ID NO: 194282 - DNA, 432 bp, Glycine max
  unsure (1)..(432): unsure at all n locations
cgaagatgtattgtgttntacatgtctaactctctcgagtgacattngtattggtcgttatattgagtgtgtcatcttagaatcttttgtgcatcatgcatcatcatgagtaagtgagacaaaaatttcctacattagaaagtttcttcataaggcgaaactctctattntaattgattaaaaccttatcgcgattgattacacaagttgtctgaagcttgcggagttatgtctcataccggtttaatcgattatagccttctcgtaatcgattacacaattgtgtatgagacaatgactgacttattcaagagtctctactctaatcgattaccatgtgatatatttgattacttctctttctattagtagttcagaagtgagcaagaacactttaatcgattactttgagcatataatcgattacattac

SEQ ID NO: 194283 - DNA, 418 bp, Glycine max
  unsure (1)..(418): unsure at all n locations
tttttatagacagattgctatctgggtttatataacctacatntagataccgtaaataattatattatgatggttcgaagtaaattggtacgacattacgtataagcatcacacgttgaaacatatataaaaatactatgcaacgtcaccatgttattatatacaccaaacggctgctttataattttttttgtcaaagataagcttttgaaaattctctaaccaaatgtacaacatgttataatgttcgcaatgagcaaagttttatctatttatttttaattttcaacttaagtgtgctccaagtgtagtagtacagcatgcgcgatacgactattttgactgttagtcttataaaaatatactgattngaccatcatcttatatatatatatatgtatacattgacttgaacttc

SEQ ID NO: 194284 - DNA, 449 bp, Glycine max
tttttgatatacataccagaatgccgtcccttaattttcgaagatatgactcgactctaggtacgcgttatcattcacatttgatgtgcaacatattattatgacctaaacacttccctattctacaactcctacaaatgactattattacatattaataatagtacgacaaataggcataattttcttctttatatttccatctaaatacaacccaagtgtattgatttcactttattatattctaactaattcaactatttttatggtaccttacataaatatgtcaagtctaaaaattaattggatccatataaagaaatattacatataccaacttgacaaatgaacctaatatattaatattgttagacagtggactaatacttcataacatattaaacgaactaaaagtgcacctactatattactctataatattattacct

SEQ ID NO: 194285 - DNA, 381 bp, Glycine max
ctgagctgcaacttggaagcctaaacttagggatttatttcatctaggcgccacttcgctaaaaccccgacaccctcaagcatctaaacctgtctctttcaccggaatatcacatggctgagcggtgtgacccgcagcagtcgcgtgttcgcgcccctcgacctaccaattctacccacatacgtcaaggggaaagcaaatgtattggaataacacaatgataaaacgcccctcacttctgaatgaagatattccattgaaatgtcttccatagaaaaacgattgttatggcaacaatgatgtgtcgtaacaggaagtcagcgagtttctctccataattcaacagagcgagttcaatgttattgatcattctcacaaaac

SEQ ID NO: 194286 - DNA, 364 bp, Glycine max
  unsure (1)..(364): unsure at all n locations
ggcatatgttcgngttnaaaagaggaatcataacagattttgttatacatcnaacaagcgccgagacgnngctagtccactggatgaaagaaacttgatcaaattgagtgaatcttaacctttctaagatagcaagatcatagtattcaagcatactatgtaaaaactcattgagtgataaaaatatattctctatcatacatatattgtttgtgaaagccacgagttgactagtgacagagaatactcgggtcttaattcaggggtgtagaagcaagctccattattgatgaaccaagtaattttgatgatgccaaaagcccaagtaattgattcaagattgattcaagacttcaagatcaat

SEQ ID NO: 194287 - DNA, 442 bp, Glycine max
  unsure (1)..(442): unsure at all n locations
ctcnaagcttaagagaaaaacaataattaatgcagnagccgacaatattccttatctacgtgaaancaacctacacttcattacttattatttcattctttacactacatacatacaaatttccatactatatttcaaaatttaaagaaacaatttcctgttaccaccttttcatgctcaaagaacattttccaatcacataaaatgtagtctgagttggcctataacaacaacatttggcttaaacttcagatgtttggtctacctataacattgttaatgctctcccatctttttatctttttcatcacactctatgtcacgtttactttagagacaagcttatgcatctaataaatgcttaaataaaactattcgacacgtaatatcgntagattagaaaaatcacatattgaactattgatttgaaccattatattag

SEQ ID NO: 194288 - DNA, 424 bp, Glycine max
agctagcattccttagattttctcactgtctttattctcttccttcaaaaaattccagaatttgtgtgccgttttcatcgtcattattctgttgaaaatgactggagatacaactgtgaacaaaattgatttagctttggactttcgaagcctcctttctttgtgactcttcatttgggcaacagtgggattatttggcaaaggaggaacttcgtagtcctcttctactgcttcccatacatcgttagcatcaagatatgcttccattttgacagcccacatttgatagtttagtccatcaaatacgggtacagaaatggtagtaaaggaggtttcagattccatcttatgtgtgggggctatttggtggttgtacgtgtctgtgggttatatcacaaatcccgtaaataccttattgtctgat

SEQ ID NO: 194289 - DNA, 346 bp, Glycine max
ataactgagaattaggatcctaagagtcgctactctgttatctcacacatgagtccgcttagaggtaagggatgaatctatcacaattgatgttagcgcgaacatgtgtaaggatccttacaggatcaaatcggggctaatttcggcgcgtcctaagtgctctaattttgcttgtacaatgataactatgaagtgctcatgtctgaagggtcaattgatgccctgatgtgaaatggatggcttaattgagtgattggctttgaaaggtagaaacctaaaatatttgggaattcttgattcttgcatcgtttcttgaaactaattgacgcgtattgctcctcatgat

SEQ ID NO: 194290 - DNA, 454 bp, Glycine max
  unsure (1)..(454): unsure at all n locations
agctgttttgagaagcttccttgagaagcttctttgagtatcttccttgagaagctaaagcttagctacacacacccttcatataactaagctcacctccttgagacacttctttgagaaacttccttgagaagattcctagagaaactagagcttagctacacacacccctctaatagctaagctcacctcattgagatgagaagctagagcttaactacacacaacccctataatagctaaactcacctccatgccaaagtacatgaaaatacaaaaaaatccctactacaaagactactcaaaatgccctgaaatacaaggctaanatcctatactactaanatggccaaaatacaaagcccaaaagaaggaagaacctattctaatatgtacaaacaagagtggacccaaccttggcccattggctcanaaatctaccctgagtttcatg

SEQ ID NO: 194291 - DNA, 370 bp, Glycine max
  unsure (1)..(370): unsure at all n locations
ctatatactactcaagcatttgtcactccacctatatttggccttcacattaacatgtactnatacactactgacnnatagcgccaaatgactatcatgtcaccttgcatacaaacgacttccttagatacatttccgcaatgtatcatacacaggggcatgttgcttgctcgaaagactcttgtccaaaatcacgaatcatattctctatacgaactccctgtttacatcaaaagttgaaataggaccttttttggtgtctgccattaccatccatatcctgtgcaaattctttctatcccgccacaataatgtctaaagcaatgacactcgtgcccttgtcaataatcatcaagaagaaaatttcctt

SEQ ID NO: 194292 - DNA, 454 bp, Glycine max
  unsure (1)..(454): unsure at all n locations
agcttaggctaaattagacgaaactttatttatctacttgagccgagtctagtcttacatgagggatctgcggacgaaactcactttaagttagtcaaaacctaagatggatgtctaaatcgggtgtagtcatatatgagagatctgtagacgaagcttggatattcagcttgatgagggaaatataagagcatgatagattagagaaatatatttctatgcatcagctcgttagttagaaagacccaacatatctagctactgctgtcattttatttaccatgcattttatagttnttagcatacaagtttagtttaaattctgtttgaaattatcacttatacatgttctctctaacgacccgcctctgtgctacgatatcaccactnntataactggaaaagtaaattctctctctttcgttatgaaaactcattattgttactataaaat

SEQ ID NO: 194293 - DNA, 434 bp, Glycine max
  unsure (1)..(434): unsure at all n locations
tctatgcacgttggatctttgagctncaatgttgtccttcaatggcgacnncccaccatggagatgcagcggaagataaaggagaaaacgtgaacagaggcaccatccactacggaatataccatggaagaaggagcttcaccaccaagagagtgtcttggataagaagcttaaagaggaaacttcaattggggaaaaagagagagagaaggggagcacgaaattgaacgaggaaaagagggagagaagtcgaactttgaagtgtgtctcacaagaatctcattcatcaaagttacaacaagtgttacacatgcttctatttatagcctacgtagcttccttgagaaacttacttaagaagctttcttgagaagctagagcttagctacacacacccctctacgtactaatctcactccttgagatacttcatg

SEQ ID NO: 194294 - DNA, 401 bp, Glycine max
  unsure (1)..(401): unsure at all n locations
agcttcaacctagaagagacggaccttttttattgtnggagaagatcaacgacaatgcctacaagattgacttgcctagtgagtataatgtaagtgccactttcaatgtgtctgatctatctctttttgatgcagatggaggagccttggatttgaggacaaatccttttcaagaaggagggagtgatgaggacataaccaagggcaaggaccatgaagcacttgaaggtcccatgaccagaggcagacttaaacaagcccaacacgtcatagagacaaggctggtcatttgtatagctgccattgatgatgattgaaggcccaagtggagaaagatgaatgcccagaggcagaagcactaccaagactactaattgttgttgaaggcccaaactaacttg

SEQ ID NO: 194295 - DNA, 468 bp, Glycine max
  unsure (1)..(468): unsure at all n locations
tctacttatgtggcagggcgggcttncttcttcttcttgtctccaacgtgaactntgaccatcgttcttccttcccgcgatgcttcttttcatgtccgcctgagtgggcttatagcctaaaccatacttcccacgatttccttgggtatttatcaggctagatatgccgccgntagtttttcctaaacccatcccgggttcataaccgttccccaacataactcgggccatcattaccgctgcatcggacagacaaggctgcccaaagagggagtccacggaggaaatgctgaccacctcataagactggaaagcagcttctgacgattcttctgcgggcttcacataaggcatggaggatgggcagcttaccaagatatcttcctcgcctgacacgatgaccaagtgcccctccactacggaattcaccttttggtggagtgtagaatgcacaactaccactgagtg

SEQ ID NO: 194296 - DNA, 459 bp, Glycine max
agctttcatagaagcggagtcactcttttattttatcaacaatagctaattcaattgggcttgttgggctctgtctatgtgaattgtcatttgggttactagttacaaaataaaaacttaatttcttaacaattataaatttataataatcataaaataaaataatatattattcaaatttgatgggttgatgggctagcccaccaacccacgggttgaacccacttaatccaccgactaagtgaaccgggctgaaaagttgctcaatatcgatctttttttaattgagctcggcccaactctagcccacagtgggccaggctggcccacatgccaaaaccctattctgacggctctacttctaaagtttcttcttctttactcttgtttttatatcttttcacaaactatattatatttaacatgttatgagtccattaatcttttctataaatatat

SEQ ID NO: 194297 - DNA, 456 bp, Glycine max
  unsure (1)..(456): unsure at all n locations
tcaccatggaggtagccatgatatatgagatctcaatttctagctggctttgctgtgtggagaggaagctctcccttcagcccttaaatacacactgcctcccattctatattattttaaccaataatntataccaattatatcaaacagaacttctcgtgttcagtccattaaaatcacaacacgtgaataatttatgttgtgccactttttaagccgataaaatgtgtcttccgtatgagatcatctgctacgttaaattaaattttctgggaatttttaaacaatttgaaaaaaaactgcgtgacaactgtttatgagaaaaaaaatataacaatatgttggtgagagttgtatatattttacacgaacacttaattgttacttcagtgacttacatttctcttgacattgctatgagataatttattatatgcattgtattctggatagaca

SEQ ID NO: 194298 - DNA, 344 bp, Glycine max
tctagaggcggctcatggacactcttaaaagtctatccgtttgttactcaatacatagctttgggttttctgcttgcaatagctcgttggaggaattccacaaaaagctgttgtgaccttgtgcacgcgtgggataggcgttgttttgtcgccaaaggacaaccagctggtatcttaatgggacatttaaaaagcattacattcattgatagccgtggggatggccgatatttaatttctaatggaaaagatcaaactaccaaactatgggatataaagaagatgtcttctaatgcaataacagaaaatccgttctatctgtcactttgttatggagactcata

SEQ ID NO: 194299 - DNA, 337 bp, Glycine max
tcaccatgtgtcctcatactttctccaaggtggtacatttctatgttcctgtcttctttagtcttctgaattaccatcataagctcactcgactgccactatattattcattaagccaaaatgctgactcaatgttgttacgccgctgaacgttgctggtttaaagtgcattatctcggcagctgaatggacccttatcagaatgtagaaagcacaaacgagcaattgccttttttctccttttctcaaccttttggtaatacaagttgcctgtcatttaaccatatacaagcacttcacacttgtctttccgaatagcactacacctccactctct

SEQ ID NO: 194300 - DNA, 440 bp, Glycine max
  unsure (1)..(440): unsure at all n locations
agctngcaaatgaagagaaagcctgctnatggttgtcgaacgtagccaagccatggcatcaaaaagtaatgccgaccagaatataaaactgggtcaaaaaaggaaggaacaaagcgaggatgaggaagaggaacaatatgatcaagacaatgaagaaccctcaaatcagaagaagcctcgtttattttgggatgccgagttgcataagaaatttcttgctgcgattaatcatctgggaattgacagtgagtttgtgataaagaatatctacttttctaattttgcttgacttgagaacatggaattataatgtatgtttatttggcaccttaatgaggatcttgtaactcctaacgcgagagttcaactgttattgcagaggctttccccattagaatactggacctgatgaatgttgaaagacttacacgagaatacat

SEQ ID NO: 194301 - DNA, 281 bp, Glycine max
  unsure (1)..(281): unsure at all n locations
cgtgccttcaatctcagctatgagaagcgcaccacaccttgggattgtcctattcggctgaccgaagaaacatcaactggaacatgagactggcacttgacaatcctacattgtgtgttgagtgcaaacctgttttggtcaagatttaggactcttatactcaacaatgaactaaccgcttcacgaatttactcttgaaaattgttgctggactagtcaatgctttgtacctcaccgataatgccgatgttgntagaccctgagccacaaatctgattgga

SEQ ID NO: 194302 - DNA, 439 bp, Glycine max
  unsure (1)..(439): unsure at all n locations
nagcttttcaacatgttgctttctattacttatcagnatccgagagggtgtggaaacagagtgtgggaggtacttctgtttctagtttgtgaggattattaattcacactcattgtgagatggaaatgtcaattactggaaaatgcaaataatttataaatataatcctagaatggtaaagctcaatctacagccagcagattaatnggtgtactaattttcatatattttctagttttgaaggttttgaaatcagtgaacaaaattgaaatcatatatttaattctaaaataactggcagaatgtgttagtttaaatatctcaagtgatattatntaatttgatgcgctccattcattcgacttatttcattttgatgacagataanattccttctagcttgacagtgcccctctctctcaaaagtcctctccgttat

SEQ ID NO: 194303 - DNA, 463 bp, Glycine max
  unsure (1)..(463): unsure at all n locations
tgttctgtgcagaataagggatactctttggacacttcttttgctcagacttgtgcacactattccagagtgcctatttcgggaaaagagccctaaaagcagcttatgcattgaagcctaggttttgtaaattgagagaaattagtgagttggagagtgagtgtgagatgctgagaagaggaggaggaatcccccttcttgtgtaaggaactatcattctctgtttttaatctcatttattgctagggtttctttgtaatggctggctaaacaccctagttggggatttctaatgaataactgatgtaaatacttaatatctaattgattatgctttctgtgttcaatgcttccttcaatgcttaatgtctgtctgcttttgatctgatcatccatttgtgtgcatagntaggtgactctaccagtggaaaatgtactatttgccttataacttgattgaagc

SEQ ID NO: 194304 - DNA, 449 bp, Glycine max
  unsure (1)..(449): unsure at all n locations
agcttatactaatactaaattattaaattttgttgcaacncaantccactcgagggagagagagaatcccggagaaccgcgcgtgggcttaatattaaactcattaaattaattatcataagctcgatttcttgacaaaaaaaaaatgatgatctatatgtgcaagacaactaagttcctgctttagtattttaatacaaattattggagttcagagttcaaatagaaaaagaaagagatcaatgaagtggttgttaattcattacccttaccttacttagatcttagtttttgagcggaactcgtttaaagtaaatgttttttacttcatatatggggcgggttatgaaatctgtgacaagggtggtgtatctgtgtaagtaccttcggtacttttgtctctacaatttaattatatatataaatatattatctcttccgataaaaaa

SEQ ID NO: 194305 - DNA, 446 bp, Glycine max
tgtgctaaagcaacagaatgggtattattcatcattatatcatgacaggaatatttcaccacatacaggcccagtcaacgagcaacatatctaacaacagtactttccccgcaacctgcattattacgttgatcaggaaatacaacatacaccatctatgcactcctaaaccaccgaataggtgaattttaaaatttaaatgaacaacacatgaggataatcaatggggatccaaatcacaaaatcaatctatgaatcatgggtgaaagtactgattcctttaccaaacaaagcacgacaatatagaacacacctgccaagccatacaatataactgaaacttaaacttggaagatagaccaatggacaaaagttggtgtagtatcaaagcagatgttacaagtgcccttgcaaggcacgggtcttctgtggtcaccaataacaat

SEQ ID NO: 194306 - DNA, 422 bp, Glycine max
  unsure (1)..(422): unsure at all n locations
agcacttcatagagaggagctgccatagtgctaaagtccttcacaaatcatctatacaaacttgctaagccatgagaactccgcactctgggcactgacttaagcgaaagccattcttgaatatccctaaccttctcgctatcaacttgcactcctttngaactcacaacaaaaccaagaaacacaacatggttattacaaaagatgcatttttcaagattgtcatacaattgtgtctttctaagcacagtcaagacagatgttgaatgatcaatatgcatatcaagtggagtgctatagataagaatatcatcaaagtacaccacaccaaactttcctatgaactctcttaaacatggtcattaatctcatgaaatgctacgagcgtagttatgccaaaagcataccaaccatcatacaac

SEQ ID NO: 194307 - DNA, 325 bp, Glycine max
  unsure (1)..(325): unsure at all n locations
ttccgcttncaactacaagcgccttgatctatcaccggactcaatcgaacatcagaacaaaaagtcatcgttgcacaaattacgttcacagcctctgttatccactaggaacgcctcgatatactacgggactccatcggacattcgaaaaacaagttatcgccgtccgcaattgctcagagcttctcgcgtcaatctccagcgtactgatatatcactggactccatcggacatccgagtaacaatgatcgtcgtcgaattcaaacacctccctatcaattccgagcgcggacattaccggaccaatcgacatccaccaaacca

SEQ ID NO: 194308 - DNA, 269 bp, Glycine max
gagagagccagatatagacaggttcttgagctacagagtctgacagaggcgcgagtgtgaagacctgccgacaccacagctcgaagaggaagacatcctgaaagcttgagatgagtctgtgaggtcctacaggtggaggagacaaccccactacgcgtagacaccgcaatctctcatctctcacttctctacattggaaaggaagctccctagccattcaaagctaaaacctctgacggctcttgcttgtaagtacatgacgtaaacac

SEQ ID NO: 194309 - DNA, 394 bp, Glycine max
aaactccctgcagcataaggtgtgacacgaatgtctatttttgctccctcccaccttcctaccttaccaatcctttttcttggaacagaatatttgatcttagctgccggcgccgtactttactctctctctttctctctcctacttttcaaaatcagttttactactgtgatcatggctcactgctcatgtctccatacacaacaacactgatccaatttttctctcctccctacatctgaaacatacacccaaattcaaatacaatccaaaatatgggggtattatgcgaacatactacctaaatatagcatatacttttgtattcattatatgcaggttaagtaattagttactttctgacgcaactaaatcaaattaattgaaagaataa

SEQ ID NO: 194310 - DNA, 446 bp, Glycine max
  unsure (1)..(446): unsure at all n locations
cttctacatctgtgtgcaaaatatttttgggttggacctgaatcaggagggagagaccctgactgactctttagagagtatgccttacgggtcacccggtttgagttctcctttaagcctatgttgatcccatatggttggggcattctcgtaaaacactgtgaccctgactggtctccctatgatcttacctaataagcgtgacttgacttgctagtgggtggtttgtcttgtcatgtactcataggcgcccggcgaggtttntcactaacatggtaccacattgcatataggagtgagtcttaatgtatatgttgcataatgcttgtgtattgaacgataatgattgactaggtgatattgtgtgatgatcctgtaatcgactactaatatagtgtagtctattacacttgttgtaaatcattgtggaacgttgcaacattatg

SEQ ID NO: 194311 - DNA, 408 bp, Glycine max
  unsure (1)..(408): unsure at all n locations
atcagctnctcttattttatatatatatgcacttnttgcatagtaaatttgctntatcgtggagcaactgacggcattgggttccttcaacagtaacaagatattnttcgggttcaccatcgactgtgtcatatcagcaataattttcttttcttccttagtcaatcgcccgacgtatggatgtccaactaatgacttcgccaattcatgattatgaattccacagatcaacttcaccatccaaccttcccactcacgcactggtttcccacgaagcctgaagggacaaccacatattctactcccggtgtcttttctaacgaattctttatttctacacttgtacgtaccactcccttcacacccaattaacacatatgaacttcttcctctgctaccgagctctgt

SEQ ID NO: 194312 - DNA, 361 bp, Glycine max
gtctaagagttatgtccagacgtgaatatggttactcaaccacccaatcctactttaggttttgatgtttaacaaaaatataaatattgattactggaatatgggattagcaacaaaacaccagtcaaccacaacactaaagctacaatgtttaatccaacattggatgatcatcaaggagaaaaaagagaagcaaagaaccaattggacgaaacatgatacagaaccattcacaaagtcagattattagtgatccaataaacatagtccaggcaagggccttactctaacttcaatgtcatactacattgatctcagaaattgacctaacatacgatgaaacttgcacttgaaattggtg

SEQ ID NO: 194313 - DNA, 415 bp, Glycine max
  unsure (1)..(415): unsure at all n locations
cggacactaaaatactcagctaacttntaaaagaattaacggggttacaccttctgcctatgaccacgagaccgtcttagaaagtatttcactatcacacaaatgattacaagattgtacccaccccaaatactgtattactctacaaacccgagtactccactcaatggttattagaaatgataacactctcacacatagacacttttctctcaacaaagtgactttgtttcacaatctctcttatcacacacactctcttcatgtgtagcgattctccactaaatctcttctctatctataatgaagatcgccaccaactattactaataatttctcttggaaggtgaaacaaaaacaactttcaacgcatccattagctaagctcatctataaaatccatctccactatcat

SEQ ID NO: 194314 - DNA, 249 bp, Glycine max
aactacatgaaaataccataaaaaagtccctactacaaaactactcagaaagccctgaaatacaaagctaaaaccaaacactactagaatggccgcgatacaaggcccaaaagaagcgaaaacctattctaatatttacaaagaagagtggatccaaccttgacccatgggctcaaaaatctaccctaaggttgatgagaaccctagggccttctttactagctccagcccaagcctcttggaggcgtc

SEQ ID NO: 194315 - DNA, 334 bp, Glycine max
  unsure (1)..(334): unsure at all n locations
atgacaaaaagctcaaanagaacaactcaagtgaatcaaagatccatcaaagaacaactcaagtgaatcaagaacaattcaagagttcaagataagaatcatgatgaattacagactcaagaagaaattttatagtcgagaatcaaaattcaaggttcaagatctcaataatcaagatcaagattcatgaatcaagacaacgcttaatcaagataagtataaaaaggttttctcaaaaattgagtagcacatgatctttctgaaaacatgtttaccaaaagagttttacttctctggtaatcgattaccagattgttgtaatcgattacaagta

SEQ ID NO: 194316 - DNA, 390 bp, Glycine max
  unsure (1)..(390): unsure at all n locations
agcttgatctcctcgaggagagattgtttattgtgtaaagatttggggactatccgttcgcagacatgacggatctttgcttantacccgatgttgttatccccccgaagttcaaggtaccggacttctaaaagtataaagggacaaattgtcccaaaaaaccatctcaagatgtactgtcgcaagatgggcgcacactctaaggatgagaagctattaatacaccttttttaagatagcttggccggagccgcggtagtttggtacactaatttggaagcttcccgtatccgtacttggaaggatctgattgctgtcttcctaatgcaataccagtataattccgatatggctcccgatcgcactcagctgcagaatatgttcaagaaa

SEQ ID NO: 194317 - DNA, 333 bp, Glycine max
  unsure (1)..(333): unsure at all n locations
cattctatgtacccgtggtggttcacatattgtntcgtgcatttttattctcatctcatttactttttatacccccttttgacgtgcttaagccattttacttaagtcatttcttgcttaacctaaaaataaaataaatttccaccgatcgtttgaattgtattatccgttaacttcggttaaaatgaattccgaccgttcggtcgtgccgtaaccacgttggaaatcaaaaagtgaaaaaaataaataatattacaataaaaaaaacatctttttagtaaaataaagcgggaaatcaatcggacatttcctctttgggaattctcattctta

SEQ ID NO: 194318 - DNA, 486 bp, Glycine max
  unsure (1)..(486): unsure at all n locations
atcctctgagtcacctgcggcatcaagcttgataggcgagtgcaagaatgcatatgctctccatgtgtgcatacttgtcagccattagaagtaatcccagatcattcactctcggcttcgaaccaatgaaagatgtttcaacaatctcccaagttgattgatttgttgaagaccagcattggtgaggtcaaatgtaattcttggttcaatcagtggtgcgtcttgaagaagtggatgaagttgaagccaatgaacagatggaagcgatgtctagcttcgacatgatgctcgcaaccactcaatcctcctcctctctctctattttgtcatatacaagcaattttgtatttggtgacacacaaacatcattattcaaatctaaataattnttttattactgagtaaataataatcttatttttaatctatcataaanatatcttgtttgatttctcatacattacttgatttgattntaattctgac

SEQ ID NO: 194319 - DNA, 195 bp, Glycine max
ttgacttagagacactaatggctactacactataagattaaattcagaaaccacgaacatgtattacgccaatggcacaatagatcggagcacgacggagcataccaagcggaatcaaacattggcgattccgcctccaccggatctcgtagctaaggtaaccactctctcgttctcatattccttatcatccgg

SEQ ID NO: 194320 - DNA, 437 bp, Glycine max
agcttgcccagacccatttgttatatatgttaagctagagacgttaaagaagcgcttcttgggaggcaacccaattctttttctttattttcattaatcattgcatatagctaggtttcaacttgtttgtgattgttagagtaaagtatcaacatgttttgtatgatacatggggttgttaaagcttctttgaagttgtggatgacgaataacttagaaaaaaaatttagtcattcactcgctcaccacgaccggtgtgctaagcgaatcatcatgcatgcgctgagcgagccaccactcgcgctaagcgcatcaacctctacccattggctgaaagggcattgctaagcaagacctgtgcgctaagctcaacaacctctctggaattgcattaatggaattaagctaagcgagtcatctctctaagcatgcaacat

SEQ ID NO: 194321 - DNA, 349 bp, Glycine max
ttactgcgtcatgggctatcatcaatgcaacactcgttgcatatcttgggccatagctcaaatcttacgaaatacccatcttctgatttataggatataggaaggtcctactgctatctctaacccatcgttacctatatacaaatcactcgcgccttattagatcataatcaacaattatatgttacactggagcatttgggggccttgatcaatcctatacactatcattcatgacctatagagcgcacagtcaatcattaacactacatctaagtcttaatgaatcacggtgataaacgtcgcagtcattgaattctcatatccattctatgacggggataaatac

SEQ ID NO: 194322 - DNA, 371 bp, Glycine max
agctctaacactcttgatctttctttatactgatgaagaggataaagcaggagagagttctcccatttcaagtgatttgactggagaaactatagctgatccgttgaaccaaaatgggtttcttgactcaaatgtgaaccggtttgagtttaacacaaattcagttaaggacagagagatggcagagttgtttctgtgtaagttcaaagggtcttttgaggaggtttgtgggaagcaatgttgtgagaatttaagtgtatatgagagggtgattgaagatgtgagtgttgggtgtggttattttaccaacagctcgtttgagaaatggctgaaagacgtttttcacagcagtttagaaacagctaactttg

SEQ ID NO: 194323 - DNA, 426 bp, Glycine max
  unsure (1)..(426): unsure at all n locations
tcttncattacactcggaggagaagaacaatttaattttattatctcatgaactaaaattagcttttgaagtcaacatcagttctttggagaagctcagtgacaaaagcttctacagaaagttgattttaacttatgcataagctaatcttagcctatgggaaaaagttattttatattacttccctattttcttctctcacaggtagttatgaagaaatttattcgaacgcaacctctgttcttgatggatatctcgttaatagctttggctcctatcataagtgcataatcatttcatcaatcttatagacaattcaacaagtcatgcataaaacgtaacctgaatttgcatccaatctatcctcaagtacaacatagaagaaactctctagcattagcaagagttcatcatgaaatgtttgat

SEQ ID NO: 194324 - DNA, 471 bp, Glycine max
  unsure (1)..(471): unsure at all n locations
agcttgagggccttatagtagtacatcatttctctaacattccttgatagtgtctggcctctataggatgcccatgacctcaaatcactaagtttatcagtccatatatccctctcattgttcatcccctccctcttcatcctctccataaaattcttccactcatcatcatatatagtctgcaaatagtacagggttgatatcccatcttcattcccaactctgagttgttctttactgtaaactacttcttcactgtaataaggggttagaacactgaaagccatcattttctcaacttggggggcatggtgcatgttcataaaaagtgaattggtgaagaaagaaatccttcttctggcttctagattaactgggatgttntgcattgaatctctagatgtaagaatagtatgcaagcgccgaatctgtctgtagaaagtctcattgatagcctcaggcaactgagtc

SEQ ID NO: 194325 - DNA, 450 bp, Glycine max
  unsure (1)..(450): unsure at all n locations
taacagctgcgtatgaattggtagatcacttctgcgattttatccttacgctactctcctacatccagaggcacaagttgtaactgctttctacctatctaaaccaaatacatttactagccccttatacttcacaaaaattttctgatgtttcaactttcaaaaaccagggactgtccaaatgatattaatgaagcagtctctagtcttatatttgcttctgcaagatgtggggatcttcctgagctcggtgtcatcagaaagctctttggacagcgttatggtgagaggtttgcaactgcagctgtagagctatcaccaggaaatctagtaaacaaacaagtactactttattattntttttctttcagcacagtataatcatttcactgtatcgaaattcatatttattaatgatgcatacatattcatggaattttaaaatcacag

SEQ ID NO: 194326 - DNA, 410 bp, Glycine max
  unsure (1)..(410): unsure at all n locations
agctngtcaagggtggaccttgcataccttatattcccgcaaagntaaaacttggcaacagagggctcaccaagggtgaaccttgggtttaatgagccccttgaatcaaggccgcgttcatcttgagatttagcaaggctcaccaaggccggaccttgggtttgatgagcctttggagaaactagactcaccaaggggggaccttgggtttgatgagcctatggataatccaccagggatgcatcaatcctagatttttgtgagactcaccatattaagttgccaggcttgaggctggaccttagtgttgtatcttcttgatgctcacagcttggtggcctcttcgttgattctagccatcttttggactccatccttcatctctagttccaccttcatattttcttcat

SEQ ID NO: 194327 - DNA, 454 bp, Glycine max
  unsure (1)..(454): unsure at all n locations
tgtgaacacctgcaaattanataatggaggtagttcctttacaattaaagatatataatatgggtttaaaaaacagattgaactggctaattttaattgctaactacccaggcaggattttagatcttgttaaaaaatcgtactgaagaaatgttatcaattttttaagttacatactctcattgcaagtgtataatttttaaatatttaaaattaagtaaaagtagggacataattattttttttaaaattatcataaattntgaaataaatatctaaacataaaaggattttattataaaaatagatacttaaaattgaaataagagtgtgtttggaagaattatttataacttatcttggcttatttcatggaataacatgtacttagacacttctcacatgcataacaccacaaccaaaataattttcaaaaaaatgaatatgctataac

SEQ ID NO: 194328 - DNA, 367 bp, Glycine max
  unsure (1)..(367): unsure at all n locations
agctatntngatgatgcagaagactcatgtcttgaatcaagattcaagcaagtttcaataatcaaagtcattcaatcaagaatcaagatttaagtgaagatttaagagaagactcaagatatgctagaacctcaagaaaagcatcaagataagtattgtcataccctaatttcgtccggcgattattatttgatgatatacaacctttgattggtcgcttcgggacacttggcgtccttggttgcacaatgaatgaagtcccgagacgtgtcagaaatcaaaaggaagcaagcttgcgcaatccgtgaaattccgtaatgtgacggaaatcgaaaagaggtggtttgcgcaatccgtaagttttcgt

SEQ ID NO: 194329 - DNA, 459 bp, Glycine max
  unsure (1)..(459): unsure at all n locations
ntattcaagacaagaatccaagaaagtcaagatatatgtatcagtttgatctcttagaatctctaggaagaagtttccaaattgaaacaaacaaaaggtttgaccaaagaattctatcatttcaaattgagatttgctctctggtaattgattaccagtagttgaaaatgttttaatacaattttttaaaacctgtaatcgattacataagtcttgtaacttgattaccagaagggattttcagaaaatacattccaagagacatatctattcaaatgttctatgaacgaccactcaaatgttttaaagagagttttcattgcccaaacagttttatcctctcgaaagatcaagagattttctgaactgagatgtcttatccctctcaaaagattccttgtcaaccacttgcttattaataagggaatttgattgactttatttacaatctacctttta

SEQ ID NO: 194330 - DNA, 202 bp, Glycine max
  unsure (1)..(202): unsure at all n locations
actcctgtgctcatcgcgaggaataatccagaagaagatgaactgctcaggttcgctgaacgccccgntttatctctataagtgcatcagtttatatcatgcgttaaataagaaaagcgtgctaagccataaatcaataacatgcgctaagcggtgcatacgggcgctaagtgcacgagcatgaacaaagccacctatttaa

SEQ ID NO: 194331 - DNA, 373 bp, Glycine max
tctcagcttcaatgaaagcacagagaatgaaagtgctccttgactattagttataaatgaagcacatgaacaggtgaaggacatcattgctatctttgggaagacccaaagccatcatctgagactaacctatggaagaaaaggtcaatatctattatcttccatactggatcgacctacatgtttcgcactgtctagacgtaatgcatgtggagaaaattttttgtgatagtgtaattggaacccttcttaacattaaaggctagacataggattgttcgaaatgtcatctcaaccctggtgacatggaaatactacagccagtgcctttgatatccaatgtctgcaaacatttattctccaacatgtacac

SEQ ID NO: 194332 - DNA, 422 bp, Glycine max
  unsure (1)..(422): unsure at all n locations
atccttaagncacctgcagcatgcagctgtaacgtaacctaaactcattatcatgtctctttaaaaaacaaagtggagctctgtcttctgcattttgcacaagctcaaccaaaggagagatgagtctatttctttcttcttacaagcttcatacaagtgctcttgaggtttcttccataaaagctctggtaaggggctcttaatcttccttatcttcttttccttaccaaattcgtgcaagcttctcatttatggttccaaaattccattttcatatgtagaagctcgagatatcaagaatttgatttccttgctcatctaagaaattttgtgtagcttcatcaaggtaaggggggtttctccaattcttgaaccctaatgttgtagtctgggaatgaatgtagtttcgatggtcaaaattt

SEQ ID NO: 194333 - DNA, 416 bp, Glycine max
ctagctagtcattaagaaattgcattccgaatttgagtttacaacaaaggcttctgtcaaacataatacaccgactataacatcctgctcatagtatacagaatgaaattgccaaaatgcttcagagctcgcaacttctccagttctttttcatgtatctgcggtagatggtgcttaaaagcttagttctctttagacattctaattctgctttcacgaatctgagattgtaatcttgctagagtttgcatgcttcctagacgctagcactttgcgttaacaaactgcccttgaatgtatcaacctcaaccaacctctcaacgcacgcattgctcttcttgcctatatgtcttcaaacaataaccattcattatatatgcaacataaagcaactttagtttagacacaaattctat

SEQ ID NO: 194334 - DNA, 465 bp, Glycine max
  unsure (1)..(465): unsure at all n locations
agcttgtgcatagaagagaaatatatatttattgttatagttacaaggcttatgcggccaaatttcaacaaaaaagaaaaaagattaagacaaaggcggcctagacatagacatcattgccttgctccacagcaccttacccttcatcaatagcctcctcttccgcaacaatctcctcctcattaagcaggacaccatccttcacatccttgaaaggatcaaagagacctaagtcaaggtccttcgcaaagaaaccggcttgcttgacggccttctgaaaccctntctcatgttgttccacgacttcttttatagaataaactcttcctcaagctccctgttagcttccctctccttggcagcccctaacatggactccaccagcctggactccgactccttcagctgggcctntagataaaaaaatcaccttggcaagcccgtctttctcagtcgccatgctct

SEQ ID NO: 194335 - DNA, 390 bp, Glycine max
tctaagcttgcacatgagttcttagatatggtttatttatcttgttttagtgtaagactacatgttgttgttagctactatgtgcaatatggtattaacaatgtaacaatttggtggtgctcattgaattaaaacatcattgctgtattactaattaaaatcaactgatgttttgatgcaacaagatcattcaacctcgaggctttcagtttatagttaatgcatgtatacttcatgcaatggttatacttagtgtcttaagcaggtgtggtgtaagtcaaagttaatgtgactctgtattaaatcctcttttgggttaaatggtatgacattttaatggtgcaatttttaatttgagtcatgataatcaacttttaacgctattatatg

SEQ ID NO: 194336 - DNA, 286 bp, Glycine max
gcgcaaacgaacagaacagagccatctatttttgtctttatataaactaaaaaataaaattgattgaagtttgatttcttagcgggcccgaccagaatggcgtcccatttgtgcaccacaaattcgcatgttgtcttgtaagcccaatgtttgaaatccacgtgtcctcgcagacatgccctgaatctcattcgacacacaccagtggacaattgttccctctctcttattattgcggctcgagccgagactaaatctaaaaataaaaaatgtgagtcttctatga

SEQ ID NO: 194337 - DNA, 381 bp, Glycine max
agcttgaacgaatgtaagacacatctttttctacctttgtgattcttgactccatttcattgaagcgcaaatccacttgtaatttcaaagagtcaaacctttcaccaactgggtcggcaacaatccgtgcctacattcaatccccaaacaacctgcggtgcttgagaattcttttcaaacttgtaaaaattttttaacaagcaaagatccacaaaggatgtaccctcccttgttctctttgaacctagtggatgtaccctccactagaactgatccacaagagatgtaccctctcttgttctcagccacaacccaagtagatgtactctctacttgtaccacaaaggatgtaccctccaatgtgttaagacatagatctca

SEQ ID NO: 194338 - DNA, 399 bp, Glycine max
  unsure (1)..(399): unsure at all n locations
cttggaccttttggtgctccaaggatattggattcaatattctctactctcctccattcagcttctgaatggagtaacggtagccagcgttaattccattagccacagggattgtttggccattatctgaaatagacagcacctcttttttattcatgtcaaccaatgcagtcacaccctcaattggttcatgttgaagttcacagcgccttctttggaatagcactgcaccttaatcaaccttgtattctcctccacttgtgtcccataccaccctgaagagaatggcaagcatgccaagtctgctaaaatgacaccacgtntaatgatggagcggttgaattccgtgctcttgaggagaacctcaagtactcccaccatgtcctctanggtcatggt

SEQ ID NO: 194339 - DNA, 437 bp, Glycine max
agcttgcaagcactaacaagactgtttatctaatattatcatctcggagatactccaagctccaaccatagacgccaggaaggtcatggtgggagaaatggaagaaccacactatatgaccccctattagaatttcttaatttgaggggtgtttccaccaaacaagaatgaaacctgacgccttaaaaggaaggctagcttctatgtcatcattgactgtgaactattgaaaagaggattaacaacacccttgctcacatgccatatagccaacaagtagactacatcatgcgagagctacacgaaagaatttacagcctccatatctggggaggctccttggtaaccaaagtgccaaaggcgtgaacgtgaggatgtgtagtcctctgaaagcgagggcgtgaagccctctaaaggcgatgacttgtattcctctc

SEQ ID NO: 194340 - DNA, 430 bp, Glycine max
tattataaatgaatctttgttacaacacttttcttctatatatctcatgataagtttttatttgaatttcttgttaaactaagatcaccatcggcagtaatacataagagccatgaagtaaaaattccagctccatttgctgcttcattttcacctagaggtccaaatacaggatctcaacatattctgaaggtactagtaccaaaagctgcaaaatttcctccattatatagttagtggacttaattttgatcttcttgtaaactaaccataaagttagtatttaagaactaagtgagttttataatctatttgatgcagcgtgatgttgcagctcctggcattaacatcttggcatcttatacaactatgaagtcaattactggtcagaaaggggataccccattttcagaaattacacttatgtctg

SEQ ID NO: 194341 - DNA, 467 bp, Glycine max
  unsure (1)..(467): unsure at all n locations
agcttatgcccaaatttattatgcttatgtattntaatagaaggatgaataagaaacttgaatttcaaggcttcttcaattgattatgaaccaatacattgttgaatgtatgcaagcatctatgtaagcatatgcccatatttatggtgcaaaggaaatttaatgaaagggttaaatacgaaacttgaatttcaaggcttctttaaatgcaatgaaagcctccttgctctttttcttgatcatatgcctgcatgtaaggtaaaacatataagtaaaagctagaaccaaaatttaataatccatgactatttntattattgttattaattattatggactggatactgctttataaattgtcctcacaacagtgataccaaggtaaaaaaaaaattggagagcttccaaaatgaataattagaatgtcaaactctgagagaaagcaatttaatccagttatacaaaag

SEQ ID NO: 194342 - DNA, 465 bp, Glycine max
  unsure (1)..(465): unsure at all n locations
tctgcagnttgctcgttgtgattgttgcanaactcgattgtatttgacaaactcagatgaaatgcagaaacaaaagaagccataaaaagcttgtttaagcaagagctatcttgagcactttctcatggcttgggatacatgttaatagcacaagatatacgtacaatgcagcaaagcatggtttccatttcgttttgtatgcccttgtcccattattatgcataatagttatatgtgaggagtgaagagtaacaattaactaaagaacaagaaaaaacattgtttgaatatgatatagatatgctaaaaaaaaaaacaattgcagtgcattatatatatatgcttggaaatgagtataattgatgtcttttaaatgtattcacatggntagaaagtagaatttcaagtacggtggtcttgaagaanacgtggtctttattatgcattgaacatagagaatgtgtg

SEQ ID NO: 194343 - DNA, 467 bp, Glycine max
  unsure (1)..(467): unsure at all n locations
agcttcctctttggaatatgaggagggtttatatttnntcttgngnnncaacnccttatctcaatagttataatgatggtcgcaaccgtatccttttcttagacacaatagtcttggaatttggtgccttaagtgtagtatttttcttcacaacttttttcctagctcaagaaagtcaaagtctttttccttaacaatcatatgctttggcctttattcttttgcaacctcaacctactgttctttcaccttttcacccccttcttcatttttcttttctaggtcttcttttagttcatacctcaacttcatccttcaaatgtcattgatccccaaagaaaagtttcttcaccctcatgccacccttcattatcatctcancttttagttctttaagagcttgagaatgtgcatataaatatgtctagaaaattggtcaacagacaactatgtatatgattggtttt

SEQ ID NO: 194344 - DNA, 436 bp, Glycine max
  unsure (1)..(436): unsure at all n locations
tgctctanattacattgatgtntgtatttatgggaggaggttatatgccatttttgctttaaagagtagtgtcccactggtaaaattaactttccaaatgtttgccttcgcaggaatggccccgaggaagcttgcctcanagaggtccaggaaggacaaggcggccgaaggaactagttccgctccggagtacgacagtcaccgctttatgagcgctgtacaccagcagcgcttcgaagccatcaagggatggtcgtttctccgggagcgacgcgtccagctcagggacgacgagtatacttgatttcacgaggaaatagggcgccggcggtgggcaccactggttactcctatggccaagttngatccacaaatagtccttgagttttatgccaatgcttggccaatagaggaaggcgtgcgtgacatgagatcc

SEQ ID NO: 194345 - DNA, 465 bp, Glycine max
  unsure (1)..(465): unsure at all n locations
acatggagctacatcatgtggtataatatcatcttcatctangagatgttcttttgcttcctctattnttttttccagtcaattcactttaattccttgttattcatcttattctccatgtatatcctccattgtcttgtggtttggttctgtttagagtaaattaaaaaatataaactgattaaatcttagatttacacttgttcatgcatttctatggttcaaattttatagatctactcttgaaccatgtttttgtgttgattttaagttctatcatttttcagtcataatattcttgtgttgaacctttagatctaaatnttcttccanaatattgattagaaaaaaacacaaaaatctaagtgtaaatcacttaatccatgcatcgttattatttcataacatgttctaaatcaattcctacaagtagcattgttgctgaacctttttttttcgtttcta

SEQ ID NO: 194346 - DNA, 434 bp, Glycine max
  unsure (1)..(434): unsure at all n locations
nntgcgaattggtcttcaccggcgaaatgatcaaagtgtgtctttgtaaaggcaaatctgatcatcctgctttgatgaatgcgaaaattgcggcaaatgaagaggatgagaatgagggagaaacccttgctatgactacaattcctatacgggcaaaattcccatcatcccaacaatgtcattactcagccaataacagtccctctaacccaatcatccacaaagcatgcccgccgcacatccagtgcctaaacaccaaccaaaaaggaatttgtagcaaaaagcctgtatgattgaccccaaattccggtgtcatatgctaacttgctcccatatctactcgataatgcaatggtagccataacncctgctagggtttctcaaccttcatatttccaatgatacgactcgaacgcaacatgtgcatatcatgg

SEQ ID NO: 194347 - DNA, 458 bp, Glycine max
  unsure (1)..(458): unsure at all n locations
agctagttgtattgtctcctccacctacattcttatttaacccaacatgtcaaagcagntttgagtgcaattgctgaagatccgatcttatggcaaccgttgaagagataggctgtatttcttccccatcttttctgtgtcttgatccgttccccgtgattttttcaacaaccatgatttccttgattaatcctatcatcacaatgagaattctcccttttaatttgcagaagaagccaaagtatgagtggagttgggtgttacttgccaccatgagaaaggttaaaatgaccatccttggctaagaagcacaaggcttaattaataagcaacacttaaaactaataaagatagataagagcaccacaacatccttactattagagaatgttgtgtattaaaagaaatccaagttttacatcgattataaataanatcaagatagagtatataagtgg

SEQ ID NO: 194348 - DNA, 417 bp, Glycine max
  unsure (1)..(417): unsure at all n locations
tataaaactaagcttanaaaacctatgtcatagatgttcatttctgatgctctaatnttnggataaacttatttgatgctgactttgttatctggcaggaaaaatatcgaacagtntgaaaatcttgcaaaggttcaaacaccaaaggtaattgtcctctatctttgtctctattacctacccacacttttggccaagccctttgttgtctgttaatttatcatttatggcttggttcttattccctttcgttcatttcctcaagttgtctactaaagcattagcaaataactattctttgctaacaattcccagaacaagtcatgtgtattgcttgtgcaaattctagagtatgctcttctaatgttttgtgatttcaaccagtaagacgcattcatgattcgcaatgttgctaat

SEQ ID NO: 194349 - DNA, 453 bp, Glycine max
agcttggatgattcccgtcttactcgtttatttctctatgagaccctctctccccttatctctttgtgctttgtattgagtgtctctttcaactcatttcgattgtagtggaccaaggagtttgacgtcctatacatttgagtggaaaaggagatgtaatctctcatctagcctttgcagatgatctgatattatttgcagaagcctctcttgattaggttcattctatccaaaacattatgaatttgctttccaggagttctgggcaaaagattaaccttgataagtcaaggatgttcttttcaaagaatattggtaggaatctcacacagcacatcaattctgaggtggggacgcaatggacagatgatcttggaaaatacttgggagtgtgtatttttcataagaggccccctcgaatgactctctcatttattattgattaagttcatc

SEQ ID NO: 194350 - DNA, 153 bp, Glycine max
tgaccttctatttggattatgccaacaacatcgaattgtgccttttccaaagcagaaatctctctctcgctcataacgggtgaaatacgtttgggcacaggctaaagtggtggatactggggtggaagggctatacaagtgaatgatgtggtg

SEQ ID NO: 194351 - DNA, 325 bp, Glycine max
  unsure (1)..(325): unsure at all n locations
gagaagctagagcttatctacacacacccctctaataactaagctcacctccttgagaagcttccttgagaatattcctaaagaagctagagcttatctacacacaccgcctataatagctaagctcacccccatgctcaaatacatgaaaatataaaaaaagtccctattacaaagactactccaaatgccctgaaatacaaggctgaaaccctatactactagaatgaccaaaatacaaggcccgaaagaaggagaaaccaattctaacatctacaaagaagaatggatccaaccttgacccatgggctaaaanatctagcct

SEQ ID NO: 194352 - DNA, 421 bp, Glycine max
  unsure (1)..(421): unsure at all n locations
agctntgncttatcatagagagaatgnagtaatttcttttatgctcttaaatacaccaccagtgaccccaatcagggttatgacagaattaagaggttgtgcagattgtcatatggctatcaaactcatagcaaagaattacgatagagagaatgttatcaaggatcgcagtaagttccatcattttagaggtggttcatgttcctgtaaagattactggtaatatagtaatcatcacgatttgataatggcatcttgagagtcaagttctgcattgattctcaagtacaatgtggtgctttaaaatagaggcagtgagacatactttaatatgttgtaataattctccgcaatcctctctgctgcaagggtcaaccaattcaattcaagcctcttgatacatggatgagctagtgaacat

SEQ ID NO: 194353 - DNA, 477 bp, Glycine max
  unsure (1)..(477): unsure at all n locations
acactaaaaactccgcttatcataattgcctatcaattaagaaataatttaaagagcttcataggtcataaatcacttttataagtagaaaactcgaaataagctctgcctaatgtcctcaaaagcatttaaaaaagattaagtctaaaggataaacatatttgcataaaacataattaaaaaatgtgatatgactggaaactgatcttgcttcttatccatcggggagctacttgacctcaagattgaaaaagatgctttagtcaagaaatactcccaaagcttagtgggtacttcacgctcaaccttgttttctataattctgtcttactcatagatagaccagctatatcttcgcaactcgaatgattcctatatcgtatttatgaaaaataagaatcattcaacttctgaatcaatgctntcgatgtaattaattagattatagaaatcaaataatgtcattgtaataatatt

SEQ ID NO: 194354 - DNA, 469 bp, Glycine max
  unsure (1)..(469): unsure at all n locations
ggaccttaagtcactgngctgcagctgtgtaaatgtaagaatactgttgctgttctatggaaagattattggcttgtccaaaatttatgatatattctgatcaggattatgaatctgactgagaatatcagtatcttaaaaattaaagggaaattaattggattccctaatactgggtctcctattccttggctctatatagaccattaactttttgatcaagacattaacacgagatattttatatgcttttgtataatgcaagtgtaaccttagacactagacaaatgattttgacccatgaaaaaatatataatatttgttataagaccttgtgctaaatcctagatggacttatgtcacattgntccttaatttaatcataatggtgtatnttcttgttatttaaacagctctggcgtgtctgttagtgcttctgaagataaaacagggactttagctgtcattg

SEQ ID NO: 194355 - DNA, 459 bp, Glycine max
  unsure (1)..(459): unsure at all n locations
ngagagatgaatttattaactngagtggcgaaatattttttaaagtactccaccaccaacagaggaaggacacgctcacacgaggagggaaacctatgccaattgcaaatacacaatatttttcattaatatcatttccttaacatacaaaatgaaatagaaaatatagatggttttaaaaattctaaaaattgaaaataaaaattagttttaaaaagtgaaaataaaaaacattctttagaagagtcttaagtttttagctcgagcaacttatttagctaaaaataccttaacccctattttaatgtcaccttaacccccttttaggggtcgactctattctctaacgtctttcacttgctntgttattattaatntgcgaactaaacgctttcacttaatccacgttgatgttcttaatccacttcctggaagaatctcattaaaataagtgaaatg

SEQ ID NO: 194356 - DNA, 409 bp, Glycine max
agcttaatgttgagttagacgcggctgtttctcttaacgaagccataaaattgtgacttccattgaatgttacaaatatgcataaaacttggcagtcacgcattgagttaaacgtgcgtagaacttgtaatgacccaaagaggggaaaaagaagacatggacgtgagtaaataacaacaaaagaacttatattgaaagaaaagtaacctgctgaggaaaattaattattaataaaattaattaatatttagtaccaatgtcatgaattcatattatcgacctgaaaaaaaatatcataaacttttcattttgtcctctaaatataatgagatttcaatttagtctccagttgtaaagagaacaaatgataaattcgtgatattataaagaaaacgatttgtgacaaaat

SEQ ID NO: 194357 - DNA, 382 bp, Glycine max
tgacacttaaaactcagctttctcctctaattccacatggtggagtcttaagtgtgtgtgtttctccttgggcttatttgtcccctctcctccatcttttatctcccctcactgcatacttttcctagtgggctttgatttctccatgtccacaagtggcagttcttctccaatttttggtagaaccattcgccaatgtcaccatggaagaagtgcagctattcgaactgccagaacaaggaggaacccacgaagggtattctatactagtgcattgccccaacagacacaaataactgtcattttttcaatgggttgaaaaagaaaaccaagtctctaatcctttttctatcacaagagaatcaatgatagtggctgattt

SEQ ID NO: 194358 - DNA, 442 bp, Glycine max
  unsure (1)..(442): unsure at all n locations
agctntacagcacagcaacacagatttatgtgttttcacccctcaattcaatgggttntctatgtttgaaaagtgaaattgagaatgacgtaagtttgaagcaaactctcacctcacacaagtccataacctcaatctaagcttgctcaaactgaatttacacctaaaattccaccgaatcaaaatttgactcctcaacacccaattttgccctagaaaaggctctttgttcactttgatcatttgttcttctctctagcacagtccaagctttctcccaagtcctaaatgacatttcaagctagtattaactcactttaacctccatgtaccacagaattcagacttaaccttccaactctcaaaacctcactctatttccactcataacaccacattctcactttccaaccctacggtaactctacattgtatctctaac

SEQ ID NO: 194359 - DNA, 349 bp, Glycine max
cctagtgtggaatcgacatacaaggacatccatgtatcttttttgacttgacgaagaactcatgacgtagctgactataagtaaagcgagcttctataaaatgtccattactacacactagttatggatagggaaaccatcttgtgatgactatagagctgtcacttgtgcatgctgatattacttcaaaaaaaattaacgcttaactaatgggacgcgaatatatattgcgatgaatgatattggatagcttgttgaaagctgtgcgagacgaaaagaaatgatgtgccggatgatagctgctgatgtaactaatgacgatttaattgatttggatgataatgatgat

SEQ ID NO: 194360 - DNA, 394 bp, Glycine max
  unsure (1)..(394): unsure at all n locations
nntactgattaatatttgtttaaatggatcatattttttctatccttcgncttttgactgcttaatacttattctttcatattgctatcgcactatgagaggatgaggatgtccatcattttaatttgctttgtgatagtgacgcttttatgtgtattagatatataagctcatcattcaatgaattaaatttaatgaaacatgtgaaatgaaaattgagaatcaaccttacataataataatctcgcaatataaaaagtacatataattaacaacctttgaactgagaccaacaaacaacatgccatgggtcatggaagaacatcccaactttcatcatctagtaaccccgcatgttcctcataaggtgatcaaaatgcaggcgggaacttaa

SEQ ID NO: 194361 - DNA, 391 bp, Glycine max
  unsure (1)..(391): unsure at all n locations
aactcaccatacaaagtcaccaggttgaaaggcacgtgcattattagaaaatatgctttctacactggttatttatgactttctacatcggtttttaattgatgttgaaagtattatcgttaacattggttttttaaaaccgatgttaacgtaaaattaacaacatcgattatttaaataaccgatgttatataaaaagaattacaccaaaaaaatgtatgaatggtgacaattcacatcggttctaatacaaaaccgatgttaacttatacattaacatcgattttctataaaaattgatgttaacttatacgttaacatcgtgtctgtataaanaccgatgttaacgtcagtttcagtcgaaaaccgatgttaaaatatacgttaacat

SEQ ID NO: 194362 - DNA, 472 bp, Glycine max
  unsure (1)..(472): unsure at all n locations
gacacttaaatctcagctgctatctatgactgcaattataaattttaattcccttgcagcgcaacacttggttttgaagttgagctatttgcctgtcagccaaggaagggctccagtttgggaagtgtctcaaggagaaggctaggcttgagtaagtaacagatttaatattttaccaaatttaagtgcttctgcacctgtcctaaactaaagttggaagtggaatgccataatttcgtgttgctttggatgtctctttttttattggaaagcaataatatatatataatgtctcgtcatgaaaaaaagtgaactgaagaagcagagagagctagctgctactgcctaagaggagaagataaagaagagattataagctaaagcagcggctgccgcacgtgtgccagccaagttataagccgaaaatgtcaaggaaagggtaaaggtaaagcanagtatgaagttataaatg

SEQ ID NO: 194363 - DNA, 427 bp, Glycine max
  unsure (1)..(427): unsure at all n locations
agcttccatcactaggagttcagtcttcttcttctggagggggtgggacctctacagaccatgaacctgtgccagcagaagagcctcttccatatgcagaggatgagcttgttcctcctaagccatttatctttgagactgatccagtcactcaagaggaagcagcagctcaagatcctacttatctagttcatatctctctagcacccatccctgaggattcccaaccatctacaccagcatcgaagccagagcagcctattgttcaagatccaccaactacttcggtgctggatctgaacgagcatgcagaagatcagcagcgggatgatcacgagtcttaaattctgcatagtttttaaaattttgcaaatcatggacaatttatntcctcaactatctagctcatgtcaggtatttaagttat

SEQ ID NO: 194364 - DNA, 366 bp, Glycine max
  unsure (1)..(366): unsure at all n locations
gatgcacgaacttcgttgtgccggtctttgctcgnatattcctccgcaacctactttgtatttaccaacccctccttgttcacccagagttctcgtcaaatgcctttcatctgaggaaattgcggttcacaaagacaaaggtgtctgctaccactgtgatgataagtggacgatgggtcaccattgcaagcctcacattcaactatttattgataatgatgacagtgacaattcttattcgtcacctaattctgaatcaccagatgtgttacctactccaacaccacttcccagagaccctcctcatttaagcctcaatgccttggtgggaatgttgacactcgagacagtttgcgtatacgggta

SEQ ID NO: 194365 - DNA, 397 bp, Glycine max
  unsure (1)..(397): unsure at all n locations
agcttgactaggcgagttgattttagcctttatttcttcttagttattagncaattcgggtaagaatgacgaatcccaaagagaaaatgtccggttgattttccgctttattttactaaaagacgttttttttattattatattattattttacctcttttttttgtattttcaacgtggttacggcacgaccgaacggtctgaatttattttaaccaaagtttacggatcatacaatgcaaacgttcggtggaaatttattttatttttaagtttaagcgagaaatgacttaagtaaaatggcttaagcacgtctacagggggtattaaaacgtaatgaaatgagaattaaaatacatgaaacacaatgtggaccaccacaggtacatagaatgaa

SEQ ID NO: 194366 - DNA, 466 bp, Glycine max
  unsure (1)..(466): unsure at all n locations
tttcggccttgatctcactttaggttaagaactcaacgctctgaatcatttatctttgtgtctacttcttgaaggcatttgatactatagcagccataaatttctgatccacttttattttgtggttgtctgcacgtgcttaatcatttaacctgtataggttcttcttattcgaattattttaactccttaaaaccaacgtagagtgacaagctaagtaactatgattgtcctctctaatggaagaacttggttcaggcttagcattctaaatatggcaatgttagaaactgattcaagttcacgttcagcacacagaacatcgttgtattgatgaacanaaagactgcataatttccctgcatattcaagagatccaagactctgcctagccacaatgctaactctcaaattgactaactactctcaacccttctttctcctattataggcaacagtcgtatat

SEQ ID NO: 194367 - DNA, 454 bp, Glycine max
  unsure (1)..(454): unsure at all n locations
ngngtgttctcatgacttgtttgaggagatggagggattttacttttatctancnggctcgaaaatacaatctaaaccttcaagtcaagttaatcaatgctaaagatagcttctcaattaagctctaagatagataggtataacaattaagctccaagtgttggtcgagtgaagattaatggagtttcaagaaatttatcgaactcagaaaacatcatttcacatctgtgagtccataagaaatcttttggctgctccaataacttgaagaaaggctcagccttttttgccattnttggtagaaaatgggataaagatgttaacttcctattaacttctgtacctctttcaagctatgagggatcctcattatgattacctgctcacacttatctggattggntccaatacctctgcaagtgatcatgaaaccaataaaattttctcctctgac

SEQ ID NO: 194368 - DNA, 393 bp, Glycine max
  unsure (1)..(393): unsure at all n locations
agctntctcgcatcgagagagaaccactgttgtcacttgttgtcccctctatggatgtttttatacatggcaaccaaattatcatcctgaaagggtaaaaacccagctaggagaacgtagaggattactccgcatgaccatatatcatccttggcaccgtcatagcctttctttgcaataacttccggtgacacatacgcaagcgtgccgcacgtggtgtgtaacagaccgtcctctttaacgtggtcggagaaagcggtgagtccgaagtcggagaccttgaagttgccgtgttcgtccaggaagagaatctcctgcttgaggtcacagtggtagacgccgcggctgtggcagacatcgaccgctgagattaactgctggaagtagagtctg

SEQ ID NO: 194369 - DNA, 384 bp, Glycine max
ttatatatatcacccaaatataaagccacaattcaattccagttgcaattgcttaagcagggctaagctttgattgagcagagagtccttcacacgaggcatgaacgacagcaacactgcttgcttgagaagacttggcagcctccacaacggtctcgccaagacccttataaggagaaggagtggaaggtgactgaccaataccaatcaatccaaccctctttgatccaagtcctgttattctaagaacagttgactgaccaactttgccagagaaatcctcttgagaagaggcttcatctaataatccacccaactttgagtcgatctttctcacaatcacattctgagacttcgagtttgcatatatagccaaatctttct

SEQ ID NO: 194370 - DNA, 421 bp, Glycine max
  unsure (1)..(421): unsure at all n locations
agctagaaagagtttcatgcatcaaggatctttttcactctataagtgggtcccaattggcttcctaattctcagcttacctctttggatgtgagatcgtggcagtaaggtgccaattttccatcatggattcagtcacaaaacaaacttcaagatgttggactgtctaacacggggattttagattctattcccatacggatgtgagaagcactntctcaggatttgtatttaaacctctcttacaatcatatccatggtgagcttgngactacattaaagaatccattatctatccatactattgatctaagctcaaatcacttatgtggtaaattatcctatctntcaagagacgtgtgtcggttagatctttcaagcaagtcattctctgaatccatgacaatagaatttctgaatc

SEQ ID NO: 194371 - DNA, 368 bp, Glycine max
  unsure (1)..(368): unsure at all n locations
ntggaagagatagntgngtagtcatgttggctattgttgtgttttaattattattccatttggatgataagtgattgtggacagaagaacacaaaccaaagaggctgaaagcaaccattaatgggatgaaagcaaccatttcagaggttgacattgggttttagttgtagtagagtgtagcgtcttttccttaatacgtatcaatgcacaatatggtatttataagcgctggaacttggaaatcatcgccagctatctacgtgtgtttgtggagaatatgtttacgtttcatattttacacacgacctaagtgtgcaacactttctttatagaaattatttacggatcctaatgagagaaagatgaag

SEQ ID NO: 194372 - DNA, 447 bp, Glycine max
  unsure (1)..(447): unsure at all n locations
caagctgtaatcaannaaaccgatatgagatataactctgcaagcttaaaacaacgtgtgtaatcgattaatataagattgtaatcatttaaaatagagagttttgccttctaaagaaactttctaacttttgaaatattctccttactcacacatgatgatgcatgatgcacatatgatatgatagagactaagatgcaacatacaatacaacaatcaatacaaatgccactcaagagagttgggcgtgtaaatgagagaacttcttcaagctcttcttcaagcttcaaagctaagtcttcatgttgctccccctatctctgacaatctcccnctttttggctttgatgatgccaaacttgaatttgccattgagtgcatctggaggggctgagtttgagagtagagactcacttttcttattctacctgaanatttcttacacta

SEQ ID NO: 194373 - DNA, 354 bp, Glycine max
ctcagctgcactttgggaaagggtttgattttatgtgttgcagctacaatcatataccagtttccagttgtcatctatctcatccatgatgagctttcctatgtctcacttctaagtgtgggccttccatagcaagcatttcacacgatagaaacagacccactctgctctcattcataatgccagagattaaatagtaatgagccagctgctctcagcttcgtgggcccgcctccaatttttatcaactggcgcatattcatatgcaagtcgagtctaaaatagtgtaatgacacagctattccccactcaagtgtatatgttatatatttacaacacagattgatgcacgat

SEQ ID NO: 194374 - DNA, 427 bp, Glycine max
ataagcagcatcagtacaactctaacatggctcctgaccgaactcaactacaaaatatgattaaatgggaacatgagtcttttaaagaatacgctcagcgttggagggacctatcagcgcaagtagcccctcccatggtcgagagagaaatggttactatgatggtagataccttgcctgtattctactatgagaaaatagtgggctacatgtcctctagctctgcgaacttggttctcgccggagaaaggatcgaggtgggtttgaagacgggaatagttgattatgtctccccagtaagtgccggtaggaggaggaccggaacagctggcgccaagaagaaagaaggagatgcccataccatcacatcaacacctgcatggtccaagcctgcgcaaaccctccacagtacccaccaatatgcaca

SEQ ID NO: 194375 - DNA, 469 bp, Glycine max
  unsure (1)..(469): unsure at all n locations
agcttgtaacccatggaactccttattttcctactctntntggtgtggaccatacttagatggactngattttctcaaggtccacttggaccccatttctaacaactacaaaccatatgaaaactatattatctacacaaaaagtacacttctctatatatgcataaagggtgtttttcctaaagactgaaatatcatcaaaataagcaactacaaatctacctatgaaatcccttaagacatgatgcataagcctcataaaggngcttggtgcattagtgaacccaaaagacatcactagccattcatacaaaccaaacttggtcttgagagtggttttccactcatcaccctttatcttcctgagttggtgatacccacttttaagatcaatctttgataagatattggcgccatgcaactcatcaagcggatcatcaagcctaagaatgatatgcctatactttac

SEQ ID NO: 194376 - DNA, 440 bp, Glycine max
  unsure (1)..(440): unsure at all n locations
tgcttctacaagttntatgcaaatgcttggtctactgtagaaagcgtcatggataagcgctccagagtgcggggccaatggattccatacgacatagatgccatcaaccaatttttagggcatccactaatcttataagagggacaacaatgcgagtacgctgagtgaataagccaattttcaggttttgatgaagagaccatagatcaactactttgctcccccgaacatgattttgcatgaagcgtagtagggaagtgggtacgaatcatgcgcactagcattactactctgactcaaatctggatgactgttctactcatcaacatccttccaagtgaccacaactctaatctcacactacccaaatgtcagctggtctacaacattatgaggcagatcagtgttcatgtggcacaactcatctcatatgtcattca

SEQ ID NO: 194377 - DNA, 344 bp, Glycine max
  unsure (1)..(344): unsure at all n locations
tatgagaacatgcttaagaatctntcttctttatcccctcttcctttgtgtgtgattagtgacttcaatgacttgttctcatttaatgacttgtaatttaactagtattctttntgttagttatccttatacttggtccaagagtaaaggcactcctcatgtagttgaggagcgtctagacaaagccatggcaactaatgatttggtgtacttatctcctaatgttgaactgaaaaatgttatggctttcatgttggaccacatccctatattgttgtgtactaatgcatngtcatacaattatagaaggaggaagtttaacattgaaaatgtatggcttcttg

SEQ ID NO: 194378 - DNA, 454 bp, Glycine max
gaccttaaaactcagctatcccattctgttagaattttgaattcttcctggaaacgtggaagttttaattaagtatcaaaatctcccttctcgcgaaaatagttgagaatctgcggctaaattacaagaggttgttccgacttatcatcttgaggacaaggtgagtcttttacgcaggggtattgataagcataagcataagccacacatcaccaaggtgtacacctgcaaacaacatgcaagagaagcagtaatcatggaccaccagcagcatggcacacaacacccaatgggtgcaaaccacccaatagttacaacccacccaaaggatgtaaaccacccaatagttatgattcacccaaagggtgcaaagtcagaagatgtgaatcaaggaaacatgatccttgggaacagtcgcaaccaactgatagatgtgaatcaaggggacatgacc

SEQ ID NO: 194379 - DNA, 439 bp, Glycine max
agcttacatgagaaaactttcttgtttatttatgttgagaggactttctcgagaagctagagtttgactacacacacgcgtcttataactaagctcaccgtcttgagaagcgtccttgagaagctagagcttacctacacacacccatctaagaactagagctcaccttcttgagaagctttcttgagaagctagagcttatctacacacccctataatagctgagctcagcctcatgacaaaaaaacatgacaatactcaaaagactcctactacaaagactactgagaatgccctgacagacagtgctaaaaccctatactactatagtgggccatatacacggtccggagttagacaacaatctattctactatatacaaagaagagtggaccccaccttggtccatgggctcataaatctaccctaagggtcatg

SEQ ID NO: 194380 - DNA, 272 bp, Glycine max
  unsure (1)..(272): unsure at all n locations
tatgattatgattccaagaccaaagcctatttgaaggatcattcacattattcttaaancttataagtgtctcacgctcacttgggatgcacacactctctgcgtggtgacctaaacaaccaatgctccacatgcacaacaatataaataatggacgaggaattcatgttcagacaaagatatatcaaacaaatcaattgtataagtgcttcgtgattctgcatataaaacttacgtttttctattattgatactgccgcggccgcctttct

SEQ ID NO: 194381 - DNA, 332 bp, Glycine max
  unsure (1)..(332): unsure at all n locations
gcatcgcggaacaatttcactntaatattgtttcccaattggattcctaattntcaacttacctatgtggacgtgacaccatggcagttaggttccagctttccattggggattcagtcacgaaaccaacttcattatgtcggactatctaacgacgggattttcgactctatttccacacagatgtgggaagcacttactcaggtttgtagttaaacctctctcgtaatcatatccatggtgagaatgggactacattatagaatccaatatctatcccaactattgatctaagctcacatcacttgcgggggaaattaccctatctttca

SEQ ID NO: 194382 - DNA, 363 bp, Glycine max
  unsure (1)..(363): unsure at all n locations
agcttgaaatgaggaagtgtggaagggtgagactttctttttttattcggngaccacagagtggtacctggagatatgtcgcgggggtcaagagaccttggggatgtcaggtggggtgctattgccctaaaccactcttcgccaatcccgacccaacccgggcatagtcagtcagtgagaacctgttatatacctaatcaagcgagctcccgaccgttcgcgcgtgccgtaaccacgaccacaatgcaaggaggcttgtgtggtgactggccatcaataagtcttgagtgagatttgggatatggccctctgtaatcgtatacccagggttggtgatcgattcccacacttaaaagtgaacac

SEQ ID NO: 194383 - DNA, 346 bp, Glycine max
  unsure (1)..(346): unsure at all n locations
attgatcatcatgctttgataaatgcaaaaactggggcaaatgatgagggtgagaataacggagaaacctatgttgtgactgccattcctatacggtcaagtttcccaccgacccaacattgtcattactcagccaataacatacccttctctttacccaccacccaattatccacagaggtcatccctaaatcaaccacaaaacccacctaccacacaaccaatgatgaacaccacctttagcacatacataaacaccaaccacaaaggaatnttgcagtctaaagcctgtaggattcaccccaattccggggcatatgctaacttgctncatatctactctata

SEQ ID NO: 194384 - DNA, 428 bp, Glycine max
agcttatatattggggtatgtatataaatatagtacgtttcattaaaatactaatttaattatattaattatatatataaatgatattaacgtaaacataattaatatatcatattaatgtaaactcacattaacataatatattaaaatattaacatagatgtacattaatataaatatattaaaatattagcgtaaagcttgtatcttttccaactatagctcaattatatttaatagttacatataaccgttttgcgcgttgtaaaaaagtaatttttttagtagtagtaatagtcattcactctataagtccaacaaaataaatactttccttgtgtccatacggctgcctattaagtataccattcatgaaacttacaaatacttttactataatataactatattaaaatattaacttgcat

SEQ ID NO: 194385 - DNA, 410 bp, Glycine max
atcctataagtccaataatgcaagctcgtttttggttgcctcagcacaactccataagcttgacaaaacacaaagcagacatgtcaccatgccaatgctcgactaatccaacgatcatcctttcctttactaagactcgtctccataagaactaaatgtactcaagggctacccttgacaatcttctctatttctaacctttatctgttcatgaatacaagattatcataaacttgacgttcatccttgtaacttacatctctaaaacccaatgcccacccttagacacactcttgcaaacccaaagtccatccttggacatacttctacaaacccaaataccccatggtccgcttggatcaacttgacaaccacgcccatgcccaatcaacaaacaactacacacattt

SEQ ID NO: 194386 - DNA, 439 bp, Glycine max
  unsure (1)..(439): unsure at all n locations
agcttcccaagtttttaagttcttcctcaaaactgtcctaagcaaagttcccaaagtcctattaacaacttccgtttgcccatcggtttgtgggtgacaagtggttgaaaataacaatttagtgcccaacttgctccacaaagtcctccaaaaatggcttaggaacttagagtccctatcactaacaatgctccttggcaaaccatggagtctcacaatctccttgaaaaacaaatcagccacatgggaagcatcatcaacttttttacatggaataaaatgagccattttagaaaacctatcaacaaccacaaaaatggaatctctaccattgcttgtttttggcagccccaaaacaaaatccatggataaatcaatccaaggatactccggaattggcaatggagtatacaatccatgaggctntaccttagacttt

SEQ ID NO: 194387 - DNA, 451 bp, Glycine max
  unsure (1)..(451): unsure at all n locations
ttctggtcctcctcatagttgtggcatgaganaattgctctatnttcatctcccactccaagtaggcctccggatcattctttcctttanatggaggaatgttgagtttaataccatcaattcggttttgtctaggaacaccatcattccctcttctcctcctttcttcttcattatgatctctattctccatttgatccaacctctcatggagcgcatcatctcgttgtttcattaacctctccatatgttgcatcaaagcttgcatttggaattgcgaaagccccactccatcattaggattagtacctgacatctcaaacaaacaaatcatacgtaacaagacaattatagttgctggttgaatacctcacccactcaagtgtatcacacaattatggcttttctctaatgaaacactcttgcctttaccactctaattccccttgag

SEQ ID NO: 194388 - DNA, 416 bp, Glycine max
  unsure (1)..(416): unsure at all n locations
agctnttcgattcattctatgtacccgtagtggtccacattgtgtttcgcgcatttttattctcgttttgtttactttttataccccctcttgacgtgcttaagccgttttacttaagtcatttctcgcttaacttaaaaataaaataaatttccaccgaacgtttgaattatattatccattaacttcggttaaaataaattccgaccgttcggtcgtgccgtaaccacgttggaaatcaaaaaaaaggtaaaaaaataatataataatcaaaaagacatcttttagtaaaataaagcggaaaatcaatcggacgttttctctttgggatttctcattcttaaccgaattgattaataactaaagtgaaactaaggctaaaatcaactcgcctagtcaagctcgtccacaaaaat

SEQ ID NO: 194389 - DNA, 175 bp, Glycine max
gcacatgacatacgagtgagatcctgtgaccatgagaatttatctagaactcccgggagatagaccatagcgagtgcttgaattattcaccgacaatgctcactcaggtgaactgcctggagagtataatgttagttacgacctcactgtgtctgatttatcgcttcttgatgca

SEQ ID NO: 194390 - DNA, 403 bp, Glycine max
  unsure (1)..(403): unsure at all n locations
tgctctttcaacctaantatgaattcttttaacnggcatcatcttcgagggttatatgcacaattctgattcaaagtaaggacccttgttcaaaaagtttcctaataattctccaaatgtcatggatcaatattattatatggatggagaagaagttgcacttatcaacctcccattgctaattatctacatcaatcatagaaagttgtatatcccaccaccaaaaaaaaatctttaaggtaaacatacgtgaaaacaatggcaaaattccaccgtagcacataccaaaaaactatnttgtttttgttgttttctctatccgaaatctactaactaaagaaaaatagattgtgttttttataaacaacttttttatataaagacaatatattgaaactgtatg

SEQ ID NO: 194391 - DNA, 201 bp, Glycine max
tacgactcaacaggtaacctcgctggacctatcccagactctcatccaaagacctactgggttcttcttccgagctcatacaagaaaagcaaaggcagctcgagaaccctatctgccgccgtcgcaggcacagttatcggtgtcatcatgttatccctttctgttgatgtcttactcaccatacgcatgatgaacatggcc

SEQ ID NO: 194392 - DNA, 375 bp, Glycine max
  unsure (1)..(375): unsure at all n locations
ttgaatnttgtagcgtataactttgaatcttccattgccataccgattttttagcgtcatgttatttgaggaactatatatacgactgattaaaaacttaagatatattaaaaataaagagtttgaaacatctttatttttaataaatgatgtcacctgcaagaattattctagattagtagattgttaataaagcatcaacacactttgggcccatatgtaaaaggcccatatttgatttaatctactccaaaaaaaagggtaaaacttcctacactcccaccaaggccagacaaattgttgcagatcaacatccatatacgtgcaacaaaaatccaagatttgtgcggcaattaatttctgtcgttggtgtca

SEQ ID NO: 194393 - DNA, 425 bp, Glycine max
  unsure (1)..(425): unsure at all n locations
tccgccatcgacacctactggttcttatacgactaccgccttcnncctttttgtcggttagtaattgtttaatttcaactgactgtggttttaaattgaaacaattaacacaaaggtagcagagaagaagataaagaacaatttgggtttatttgcaccgcctattagtagcagacacagagaagaagagaaatttgggtttgtctttgaaaggttaaatattttatgctatatagaagtactaacattgtgaaaatgggtctcatatttttcaagtttatctaaaatctcatatggngaaattataatatcgtatcatactgataacttcaatatatgtcattataaaaaatatttaccttataatatatttcgccattgtgtgtgctgctaagtgtcagattaagctctacacagcacgattc

SEQ ID NO: 194394 - DNA, 313 bp, Glycine max
gaccgaaaggacctgcagctgcatctaacccagtgcaagagtttacaattgttctgtttgacaatcctctgaaaaaaggatgggagtctttattctagactaaatttctagacattgtcaatcataggtcttgggtgcctcttagacctgacatgattatcaatattcatgcttgatatgggcgcaaaggataaaatgctctcctgaaactcatattatatatatatgcttataaacaaatcatgactggaagtgtttcacctgtcgaatatccattagaatcatcattattatagacattactacttcgacc

SEQ ID NO: 194395 - DNA, 297 bp, Glycine max
tcatgagatttgattgtaacttaaagggtgagatttaccctggcctaaccaaaatatatactaccatttgtattttggtgaagtatatcaccgtaagtattaatccataatcattaatcagttatgtatcataaccacgtatgtgcatatatctatgttgcacaatattagaacaactcgcttttctattcttagaaaaatcatcataatatatatataggaaactagtctctgaatctatatatggttctatgaagaaaatatttacgaactaagattatgatactatggttctat

SEQ ID NO: 194396 - DNA, 400 bp, Glycine max
ggatccttaagtcacctgcggcatgcagctttaataaatattggtcatcatctttctttctgttatatttacaacttacaacttgcttattagatctcacttcccatatgacgactttactccagatattgttagttgaccatcatatatttccttatctacggagattctccatccactttagtacgtgttcattgttaaaatgtgatttcaaaggccaaaataccagtatttgcaacatttttttttcattatgccatatgcaaatatgataacagactcatgttaacagttaacacaaatggttaagaacaaaagactaactttcacattctcctctctatatgtatggggttgatgacgacatttaacttgtttatagataagtctccttcaaaat

SEQ ID NO: 194397 - DNA, 476 bp, Glycine max
  unsure (1)..(476): unsure at all n locations
aagagcgcttagtgagtatcactctcagatcctcgcttctctcttcanagatgcagatcaaaacagcagctctcttgtatccgatttttgctgtgttttgagcaataggggtggctgatttcgtgtaactcacttctgagacaaccttatctcccttctcttccatgatctgatccaagatgtcttcagggaatggtgggggtttgtacaggcggagccgttgagccaagtccaggagcctctgtgatgctccattggagtttgaagaatccatgaacttggagagagaaaacactatcttctcacaatagaagccatgagtggcagttaactacttatcataatacccatatatatatgagcatgcactaatgatatttgacctgtataaataataaaaaaggtgatggtgaaaggacaagtctatgattgatgatgtgacgatacctcgtttggcacaaatataatgtcctgaa

SEQ ID NO: 194398 - DNA, 354 bp, Glycine max
gaccttaagcacgcggagctcttagggagagatttttttgtagacgaaagggatctatgggaagctataaagaatacaaagtttcttttgtcctttggttctctaaaccccatccttttttttacccaccctcttttaaaaggttcaataacttaacttggaccctttaacccccccatactatttacccccaaaactgactttttccttttttttatacaaaaaccatcaaattaagcgcccgcgttttttatccgcactcttctccaattaaaaaccccggtccatctccattattttaatggggggttgtatcccatgcttaaaaaaaattttgggtgggagaaaaaaaaa

SEQ ID NO: 194399 - DNA, 480 bp, Glycine max
  unsure (1)..(480): unsure at all n locations
cgacactataaatactcanctttatccaagaaaagagaagttttgatatcantgctttgtaaggattgtaatgaattgattggatcgctacaaaagactattttaaatgtcaaataaagccctgcttttatagactcttcatgtctggtcaagaagaccatttataagagttataacttttagaaaaacttataaccaatttgaaaaagtcaaaaaccatttgaagagtaacatcttttgatattttcagacacaatcactggtaatcgattaccaaataagtgtaatcgattacacgaagctcttatgtgaaaggatgggactcttcacattctgagtttaatttcaaccattcaaggcactggtaatcgtataccanaacattgtaatctgatacaactntttgaaatcaattggaacattgagattcatttgaaacttttcaaatcatttgctctggtattgatacacaactgtatt

SEQ ID NO: 194400 - DNA, 416 bp, Glycine max
  unsure (1)..(416): unsure at all n locations
agctntgaatgctctattcaatggagttgacattattatcttcagactgatcaacacatgcacagtggccaaggatgcatgggagatcctgaaaaccactcatgaaggaacctccaaagtgaagatgtccagattgcaactattggccacaaaattcgaaaatctgaagatgaaggaggaagagtgtattcatgacttccacatgaacattcttgaaattgccaatgcttgcactgccttgggagaaagaatgacagatgaaaagctggtgagaaagatcctcagatctttgcctaagagatttgacatgaaagtcactgcaatagaggaggcccaagacatttgcaacatgagagtagatgaactcattggttcccttcaaacctttgagctangactctcggataggactgaaa

SEQ ID NO: 194401 - DNA, 377 bp, Glycine max
  unsure (1)..(377): unsure at all n locations
tgaagaggcagctgtcctaagagcttgagatgagtntgtgagtgattgtgatgttctagaagtggaggagacatcctcaccacttgtatttcttcaatccttcatctttttcttctctttgttgtaaaggaagcttcctagttacggagagctaaatcctctgttagttcttctttgtaggtacttgatgtaaatacctatatatctatttaatgatgttttgtgtgttcactgtgctatcagaacttcattctaccatgcttttgccttgatcatgtagatgcatgtgtgtttaggatcattcaacagtggaaattggtcagattcttagaacttgataggacggggctagtttaatgtattatcacgagggatcg

SEQ ID NO: 194402 - DNA, 428 bp, Glycine max
  unsure (1)..(428): unsure at all n locations
agctngcattgttactggcagggtaagctattttattttattgttcaagctntttttctcgagattccacactcctcaatgtgggtgcgcccgaaactattaatcgtcgcaagggatcaaggttgattgttagagcaaatgctgtaagtttaaaatgcactctttagcagtgatgagttccttttgcgtgtgtgtgttttaaatatatgattttactttgtgaaaggatgcctcatggtctcttatttcaactgtataaagcccaagtgaattatttaatatattgcactaaatatcctttatttgtcaacatgcaggattattattctgtccttgggattattattctatttgttcccttatctgttacacgataatacctccattattaatttattataagttgaacgtttgaaacaatgtattat

SEQ ID NO: 194403 - DNA, 339 bp, Glycine max
  unsure (1)..(339): unsure at all n locations
tcaatgtcgcagttgacatanactatgccgatgtattcaacatatcaacatcgttaatacgtaaatgccgtcgttgtaggatactaatcaacgtcgttcatgggaaaacgtcgtcgttgtagtaatgacatcaacgtcagtgattaagataggctgtccttgttttcatcattgtcaacgactgtgtgtacgtcccaccatcattgaggttgttggtgtcaatgtcgggcggacaaagaacgtctgtgtactatcgttatcatacggcaacgacgactggaatggtgacgcgcgttgtattggtcacctcagtggataacgacaggtctatgtttgacc

SEQ ID NO: 194404 - DNA, 419 bp, Glycine max
  unsure (1)..(419): unsure at all n locations
agcttcagaccaaggcaactcanaatctaggtatctattttccctcaatttagtggattttcaaggtttgagaagtgaaaatgagaatggggtaaatttggagcaaactctcacctcacacaagtctataaccttaatctaaacttgctcaaactggttttacgtctaaaattccaccaaatcaaaatttgagtcctcaacacccaattttaccctagaaatggctcttgccttcactttggtcttttgtttttctctcttgcacagcccaagctttctcataagtcctaaatgacacttcaaactagcactaactcactttaacctccaatttctactgaatccatatttagcctttcaaaccctcaaagcatcatacttttccacacataacactacattctcactttctaacccta

SEQ ID NO: 194405 - DNA, 453 bp, Glycine max
  unsure (1)..(453): unsure at all n locations
cactaccgtgtttctatctcggtccagaattaatgcgggatgcagcaccggctccgcttccctaactgtactggaggcggttgccgtggctttatcctctataattttctggagtttaacatgacctccgagatggaagccatttgatcttttaaagctgatagatcggccttcatctgttcctgcacgccctcttcattatccatntttctggatcgagtgttatangggtgccttggtggtttcttagttatgatgaaattcctaaagaaataaacaacggtgagtacgccaccaaaacatgaatatgcaaatggatgatcggagcactcggatccaccccaatggttttagataacatgatgagttcagaacttctcatttataagaagacaaagctttatctaccaagatatacaaggtattacagagacctaacggttctaatatgtg

SEQ ID NO: 194406 - DNA, 428 bp, Glycine max
  unsure (1)..(428): unsure at all n locations
agctntaacctcatcgtctctcacagactttagatttgttatccaatccaatccttgtgtccgaactctcagccacttatgatagccgccgatgatcccattactgcttcccctaagctctctgtcctttcttcacgccgcatcccatgccttgcgaactccttggagtaccctcgcgttgtggtcactgaaaccccgtgcgatgaaaggcgtgatgctttcgtctgatggcactcctctcatgaggtagccaagctgtcttatggcgaggacgggattaatacaaccccttgttccatcaagggaacctttggacatccttcgtatgaagatagaatcccgattcttccttccttcttggagaaaaaggtgtgaaaccagccacacatagagagccagtgcacaacaaacaattcttgcgccactct

SEQ ID NO: 194407 - DNA, 276 bp, Glycine max
  unsure (1)..(276): unsure at all n locations
actgatcacagaaagtctcagtatattcttgacccgagacttttcacagcttttcaacaaaatggttggtaaaacttaatgaatttgatttcattattgaatataagcagggaaatgagaaccaaagctgctgatgcattntcaagagttgaatgtgctactatttccattcaccaacccgattctgatctactagagagaatcaaagcatcttgggcaaggtgatgatgccttacaaanactgattgctgaagttacgaaagatccttcttcaca

SEQ ID NO: 194408 - DNA, 452 bp, Glycine max
  unsure (1)..(452): unsure at all n locations
acctgcggcatgcaagcttgaaaagaccttctgatactatatatgcatttctgactntatggctngagatgaagatcaaagattggacctcttgctagtttttattgatgaatagcttaaacacttgtgcttgaatgaaacaaaagttttgagactgtggtttaagctgctttccttgatatatgtcttatgcctaacttcatctaattgtacaggttacattttattcttctctttgaacaactgcatgctttgtgaaagacaagtgatgagggcattttggttcatccttttatcatgcaatcaatcaaaactgtaaatttgggggagttcttagtcgatgaatacgactaacttttgtgtataacacctgtgtaaatggcatcaaaatcctaccatttatgggtattttgtagcgttggaactacttctttgttaaagataggtaataa

SEQ ID NO: 194409 - DNA, 464 bp, Glycine max
  unsure (1)..(464): unsure at all n locations
acccatcacatgtggactaagtgtgggtcgggcgattttgcaagtcaactctccacatccacaaatcacacataaacccaccatccncagttgcccaccttcattgagctcacgtactcccacgtagcccttatcctcgttcctctcaatgttgggtccccatcaatcctctcaagcttccacaacatccaagtaattcaacatccaagcatcatgaactaacacagccaagaaaacagagcagaggcagaaaactttgcccaaaacacatatcaatatcacagctgttcacactcaaataccccaataacattctcttcgtccaattcgtaaccgtggatgactcgaaatttactggaagctctattacataagttacattttgaccgttggatctgctgcaaatatacagaccccatatgactacctttcaccaccaccataccaagcatttctgacataac

SEQ ID NO: 194410 - DNA, 375 bp, Glycine max
  unsure (1)..(375): unsure at all n locations
actcagnggctgcacccggttgagtcttgtgctcaattgggcatgctttccacccggagtgatccggccgggtctatgctcgaaccaaaataggtcatttatccttcttttttttcctctgtggagtgcaaaactaggggtgggtaagtgggccggcctgccccttataaggaccgcccgtataagcccacattgactgccgacctggccaacccaccgcgccatcttatacggacctaataaattggtccgcccctaccccgcgggtcaaactggcctaattttaaaagaatttcaatttcaataaatatgcgacacaatcaaattatgttcaacacaaatgtaataaaatatcacaattatcaattacataat

SEQ ID NO: 194411 - DNA, 338 bp, Glycine max
  unsure (1)..(338): unsure at all n locations
catattggccgaaaagtgttgttgtttaactcttgccacaagcttatttttggtaaacttccatctatatgagatggtccttttgttattactaatgttcttccccatattgcaattgagattaacaatgaagttattggcagagtcttcaaagtgaacggtcaccaactcaagcttttacatgagagccgccctgtggatgaggaatctgtgggagacctttcttacttaatcttaccacatttatgtgatgatgtgccttgaatgaaacttgangagataccttcccttttctttaatatgttggcgctttatttcatttcattacatgaccatat

SEQ ID NO: 194412 - DNA, 351 bp, Glycine max
  unsure (1)..(351): unsure at all n locations
agcttgtccttggtttaaacatgattggtacattatttgggacttgnaggattcaatttgggcaaaattggatgagggaaagagtggttttcgaaatctgcactttatgcagaattttactgttgaaatgtgcagtataattttgtataagtgcacaaaaatgtttgtgtatggctggttgtgaaaagggtagtacatatggggttctagacattttctagcagatcccaacggtcaaaatgtagacttatgtactatagacttccagtaaaattttcgagttgatccaacggttaaagaattggaacgatggaaatgttactggggtatttgtatgtgaaaagctgtgat

SEQ ID NO: 194413 - DNA, 402 bp, Glycine max
  unsure (1)..(402): unsure at all n locations
actcagctttatgactttnagtcgacttcaggtgaaagaattcttatacgagttccaccctgacccatgagtcgatcgtgacacctttgggtaattaatttgagacccacccgaaatgaataataataataaaaaaaaacccgtttgcggtcaaaaagacttcattgcatattgttagaatgcaacatgctgagtaattgagtagctttactcattgcatgtagatttttgtatttgtactcattattaattagaaaatacacatcgttatatctatgtncgataatattntaaaaaattgattattaaatacttactaattaagaataagtcaatgtctaaattataattatctccatatcgaatatgatcattaatttaacaaatatgattatttctata

SEQ ID NO: 194414 - DNA, 425 bp, Glycine max
agcttgtaatactacaatactccttaatgttgtttttgttggtacttcacatccagcattcactgtatagagcaacttgtaacttccaaattcatgtatttaagcatagctcccatgccattctaagttagatagccaacaaacaaagttgaatgtgcttttactcaattaagttcctttatggttgcaaagttaatagaacaatcctctttatggccactatcaaactcattaattagtgtaatcaagatacttctattaagaagaatggttttattgatgaccattcctctttactgattaggctaaaaacaaacattaagcatagaacaataacaataagaatctttaattgaaatagaaacaaggtacaaatcacacgaaagggaccaattacattaaatcccaacaaaagagaacaatta

SEQ ID NO: 194415 - DNA, 428 bp, Glycine max
  unsure (1)..(428): unsure at all n locations
tactcagcttacattcctttccagaaggatgttccagccacgaatgttgtcagcatagcggttcagggcgtccttagaggtgaatctataagtatcgtagtgaggctggggcctggaagctatgactttccttttcctataagccatttgcataaaagaaacagagaaaccaagttaaagcaagttttatttgaaatgactagctgaaaaataaaactaaaattcagattggacgcttagcgcgacaaatgcgcttagcgcgccttatgaaaaattactcaagcgtttagcgcgacagccacgtgcttagccagctgacacaaatctgaattttctgcagaattggcttagtgaattccncaatagaaaccaaattgcgcatagcgcggctagacacgcttagcgcaacaacactactggacataaat

SEQ ID NO: 194416 - DNA, 408 bp, Glycine max
  unsure (1)..(408): unsure at all n locations
agcttttaagcaaggtgatggagtatcacatttttctgtattaacagctcanaagcaagggagaaggtagttcaatttaacatgccgtatacgtgcagccatgcagggggattgaaatggtgggagtggactacattataattacgatgaccaaagttaaacacagcctaggtatggcttaacccattcaaataacatggcaataccttattcattatacatgtgtcatgaggatgaaatacaataacagtaaactctcacaggaggattattgccattaggactattagaatttcagccaaacctagaataagaatattatcaataggatgtggtaatctacttcttattttgtgataagtgataacgatgccgcttgctgaattacaaatttactagtcaggagga

SEQ ID NO: 194417 - DNA, 436 bp, Glycine max
  unsure (1)..(436): unsure at all n locations
agcttctagaaatactttgacattgtattctgttagatatatgcataaaattttgcttaaaagttgtactgaggattctgtataagtaggaagtataaaaatgtaagacataatcacacagaaacatatatactttttttttttggaaacatgaaatgctctctctctctgagtaggaagtgtaaaaatgttagacatacactattagaaattacactttcaacatcggttatttacgacattctacatcggttctaaaatcgatgttaaaagtatcgatgttgaatgtattgttattaacatcggttttgaaaaaccaatgttaacataaatacgataacatcggttttctaaatatccgatgttatatacaatgaactacagaaaaaaagtgtatgcatgatgaacgctgacatncgatttgtagtaaaacccg

SEQ ID NO: 194418 - DNA, 501 bp, Glycine max
  unsure (1)..(501): unsure at all n locations
tagtcacacttaanactctntgtccctctccaaggatgccatttgctatatggtgaggagtttaagtgtaactaggtctcagactgagaatcagtcccatggctgggacaaaagactaaagcttgcaggaatatcttgaggtctcatatgcacttctaatttgtataggtggggaaggaatctaagatcaaaattcaaagatagtatcaatagttgcaaaaaagagctaaatgagcttangcatagagatgataatgaatctgtcaaaaaattcaaccgtattaaggatgagctttcaaggtaggtagttcgtgaggaagcatcttggaagtagcggtctaagggttattttgcctctgtgatggagacaaaaatacaggttctttcatgcctncactactagtagaaggaagcacaatcgtttggagaagctcaccatagatgatgngcattgtgtacctctcaaaagggataaagcacgtgcgnggactacttcaaatt

SEQ ID NO: 194419 - DNA, 407 bp, Glycine max
  unsure (1)..(407): unsure at all n locations
agcttctgccacctaaatacttattgtttttttcttaacaaanagaatcattttaaatccctataaaatgtggctttaatgtttgaaattgccaagccatttgggttcctttttgtctcttttgggtatattcgaacctacgatctcatgcatattacctgaaatctcccaccagtaggccaaccttagtggttcatataacaccgaaaatggtgtcatcgataatcacccaatgtggtgtggccaatggagggaggtaattttgtgataaaagcattgttaagtctcgccatgagtcttgtaggtaagcaagaggctaaatgagcccttgttttcatgcaagtaaatacttgttctgctgacaagctgcacaagagtccacaaaatggtgagtatctttatacatg

SEQ ID NO: 194420 - DNA, 420 bp, Glycine max
  unsure (1)..(420): unsure at all n locations
cggcatgaatgagttgataattggttgattttgatccacaggtcactcaattgagatttgaagccaaggctccaattatgtggtaaattatgactattattgttggcaacacctaaaggacatgacaacttcacgacgagcatttaagatagatagaacaatcttggttcagatctggctggagagactgcagcagccatggtagttacttccattgtgttaaggaaaaccaacccacattactctcacttgcttctacaccaggccatgcaagtgagtcattactcaatggcttgtgtcctagagatcacaatngaatggcactattatacttgaattaaanataatatagattagtactgcaggtataattcaattcaccgatagtatatatatactactggttctaccactatatgc

SEQ ID NO: 194421 - DNA, 411 bp, Glycine max
  unsure (1)..(411): unsure at all n locations
agnncttttgtgaaagaattgactcttcactttgaatntgaanttcaacgttcaagcacactggtaatcgattaccaaaacattgtaatcaattacagctttttgaaatcaattggaacattgtaaattcagtttaaaactttttcaaaaacattttgctactggtaatcgattacaacaatctggtaatcgattaccagagagtaaagattctttggaaaacaagttttgagaaaaatccatgtgctattcagtttttgaaaaactttttcatacttatcttgattaagtcttctcttgattcttgaatcttgagtcttgagtcttgaatctaaatcttaattcttggaagctcgaatcttgaaacttgattcttgattcttgaaatcaaatttcctctcgaaccttgaa

SEQ ID NO: 194422 - DNA, 316 bp, Glycine max
  unsure (1)..(316): unsure at all n locations
ttgaccacagagtggtacctggagatatgtcgcggtggtcaagagaccttgtggacgtcaggtggggtgctattgcccaaaaccatgcttgaccaatcccgacccaacccgggcatagtcggtcagtgagaacctgtgatgtacctaaatangcgagctcctggcagtgaacagataataggaacaaagaccacaaagcaaggaggcttgtggtggctggccagctgtgaattttgtgtgatatatgggttgtggcctctggtaatcgattaccaatggtgggtaatcgattacaaggctttaaaatgaggacatg

SEQ ID NO: 194423 - DNA, 434 bp, Glycine max
  unsure (1)..(434): unsure at all n locations
agctttacaatattccacaatcttcaagcatctctgagtttattaaagtatanatgatgcagcaaattaacaaattcaggcactggttagattaggcaagaaatataccaaatcagaatcagaaaacaaataaacaaatcctcaggcaaatataacaccacaacaattattaaacaaatcaccaaaatgtcaagtgtgaactactagcacttgcatgcaaatgcaacaacacaattattaaacattatcacggtgctgagtgccaaatacctcttcgattgcctgggagtagttccggcggaaaccaccgctttatcctcgtcggagaacattcccggaagagaatttccgacgatctgctccaattgctcgaaccaacgccagtggctggtggaaatgcagccactgctcattctgtgccgctccaatttgta

SEQ ID NO: 194424 - DNA, 445 bp, Glycine max
  unsure (1)..(445): unsure at all n locations
tgttgcacacttaatnttaatgattgtcaagaatttcagtggcattcttaaccaaacagagaccttgctcctagaatatgttctcacctggcctcctactcgcatgccttgtactcctaaatccaaccctttaaggactgttcctctctcagattggcctacatcaaatccatatggctgcaataatttaagcatgtcctcatcaattgacaagtaaattntccaacaaaaaggtatcatggatttatgcataatgatcatcctgaattttctgtaagtgttatcaattatcattatgtaacaaggaaaagacatggaatcagatatcangtggacacacattccataccataagcacatatatttgggcacgaattatatgcataaagataatacattacatgaagcctacaattgacattgtgcaaacatactctatattata

SEQ ID NO: 194425 - DNA, 436 bp, Glycine max
  unsure (1)..(436): unsure at all n locations
cctgcagcatgcaagcttgaagagatgcanngctttaacaaagaatttgactttgttcaatcgngagaaggtaaactccttaattattaaatttaatatttctactttctataagaagtgataatgcatataagcttttaatttcatttccccctttttctttatcctttatttggtagttgttttgaatcatgtatccaaatcggggatgattgctcataatgtccattgaatttaaaatatgatttcttgctattgtctttgtcaacttatgtacttgtaccacatgaactgcttattaatggattaaaaatcattgcttaaataaaattgaagggttccatccaatgctattatgcgcttgtgctaattcaagtatgagaantctttgtactctgctaaagatgggtggcctttaactcaattcatgggacac

SEQ ID NO: 194426 - DNA, 419 bp, Glycine max
agcttacctttgtgagaatttgagccatccatcttcattatcttttggtgtgtttagccccattgattgcttgcacaataaccttggctaaattcttgttcatgcttcctaattcacatgcatatttggaaatgatttaggcaattttgttcttataagcttctagccaaatggacttaccttgaattaattcctttgatagcccctttgagcctatgttcccctttctttgttttgaagctcattacaagccttaagtgaaaaaccatgatatcaccttacccttaaggaattttggagctttggaattgttttgggaataagctgggaataagtgtgggggggtatgtttcattggaagatatgatttttggccatgcttaatgttttattatggtcatgcttgatgtatttgtata

SEQ ID NO: 194427 - DNA, 456 bp, Glycine max
  unsure (1)..(456): unsure at all n locations
tcttcgaaataaagcatcataaatcattacatagttcaatgctttntgctntatcttcttatctatgtttttggaaggtctcttatataccgaactaatttgtcctgccaaggatctaatttatcagcatccaacaacaaaaaatcgaactaaggatattcttctaattgagtaccttcaccaaatggtgtataccctaaagcaccatgggctaactcattggcttcttcattntgatatcttgatacacaagtaaccacgtcaacataccattgtaagaaatatgtttccaattgaaaccttttaaccaattccctatgttagtattcatactttcttttcaactacctaatcaccaattgagaatccncaagatatgtacatattgagctcccatggatatcaacactctaagccttaaatcaatgtatatatttggctgattatattgaataa

SEQ ID NO: 194428 - DNA, 427 bp, Glycine max
agcttgccgccacggagttttccgactatgctcttgtgttgtgtaacaagctacaaaaggagagagcaagaaatgaagagccaatggttgatacatggacggagatgaaaaatatcatgaggaagcggtatgtgccggctagttactcaagggacttgaaattcaagctccaaaaactaacccaaggcaacaagggggttgaggagtatttcaaggaaatggatgtgctcatgattcaagcaaatattgaagaagatgaggaggtaactatggctcgatttcttaatggtttgactaatgatatccgtgatattgttgagctgcaggagtttgttgaaatggatgatttgcttcacaaagcaatccaagtggagcaacaattaaaaaggaagggagtggctaagaggaagtttaccaactttggttc

SEQ ID NO: 194429 - DNA, 333 bp, Glycine max
  unsure (1)..(333): unsure at all n locations
tggaagaattcgaagagatcctacgatgccctctatgggggaggaaaccatacctcatcacagggttctatccctcattatctaggatctccaagatagtccaaatcttggcgcatgaattanaccgcaagaagcaatcgcaaatggggtggttgaataccgagaaaatatttggaggcaaaagcagaatcttggctgtaaatgcaagtgggccccgtcatagaattctcacactgtgatttcggagagtctttttcgatgtgatggtggggactgcaccatcgaccttttcgcttataacacaggagcccgttccttctaccactattaact

SEQ ID NO: 194430 - DNA, 402 bp, Glycine max
  unsure (1)..(402): unsure at all n locations
gacccanagcgacctgcggcatgaagcttgatctcctcaggaaagatgagagcgtggatttattttggattatccgctcgcagacatgacggatctttgcttagaacctgatgatgttattcccccgaagttcaaagtgccggactttgacaagtataaagggacgacttgtcccaaaaaccatctcaaaatgtattgccgcaagatgggcgcacactctaaggatgagaagctattaatacacttctttcaaaatagcttcgccggagccgcggtagtgtggtacactaatttggaagcttctcgtatccgtacttggaaggatctgattactgccttcctaaggcaatatcagaacaattccgatatggttcccggccgcactcaattgcataatatgtt

SEQ ID NO: 194431 - DNA, 347 bp, Glycine max
  unsure (1)..(347): unsure at all n locations
ctgtggaaactagatcttngagctctctattgttcaatgtattattttagccatggagttgtagcggaagataaaggagaagaggtgagaggaggcaccatccactanagaataagccatggaaagagaagcttcaccaccaagagagtgccttggataagaagcttatagaggaagctccaatggaggaaaagaatgagagaaagagatagtggcatggacattgaaggagaatagagagataagttgaactttgaagtgtgtcttacaagtttctcattcatcaaagttatgactagtggtacacatgtttctatttatatcatagcacatgggaagcttccttg

SEQ ID NO: 194432 - DNA, 323 bp, Glycine max
acccaacggaacatccgagtcaaaacttattgtcgcttggatttggtcaaagcttttgtattcaatttcgagcatctcgatatattacgggactcaatcgaacatttgaggaaaaagatattgtcatttgaatcttctcggagcttctgttttcaatttctagcatcttgatatatgatgggactcaatcggacattcgagttaaaagttattatcgtttgaatttgctcaaagcgtctgttatcaatttcatccatctcgatttactataagactcaatctaacctcccggttaaaagctattgtcgctcgaattcgctcaa

SEQ ID NO: 194433 - DNA, 423 bp, Glycine max
agctttcttagttttctggtttccaaactttgttctttcacagaaaacaaaactgtgctattcatcttttttattatcttttccctttgccaaaaagaattcgccaaggactaaccgcctgaattctttttgtgtctctcttctcccttttccaaaaaaacgaaggactaaccgcctgaattcttttgagaattcttttgatttttccctttcccttaaacaaaagatttcgaaggactaaccgcctgagatatcttttgtttacccttcacaaagtttcaaagggctaaccggctgagacctttgtcttaacacattggagggtacatcctttgtggtacaagtagagggtacatctacttgggttgttgtgactgagaacaagagagggtacatctcgtgtggatcagttcaagtggaggg

SEQ ID NO: 194434 - DNA, 458 bp, Glycine max
gtccttctgattctgttatacagttttgacttgataacatgagatgaaatacagagattggacctcctgttagttgttatcaatgaatagcttatacacttgtgcttgagtgaaacagctaccatgagactgtgggttgagctactttccttgaatctgtcttatgattaacctcatctaattgtattgttcacatcctgttctcctttttgtctagttgcatattctgtgaaaacaagggataggtacacattgcttcatctttctcatcatgcaatcaatgaattttgatgcatacacccctatacataatcactgcatggtttaccacttgaggacaagtgagttgttatcttttgctcgaagacaagctacactggatatttgggggagttgttagtcgatgaatacgactaacttttgtgtataaaacatgtggttgtgctgaatactaaaag

SEQ ID NO: 194435 - DNA, 415 bp, Glycine max
  unsure (1)..(415): unsure at all n locations
agcttgtgtaacccaaactaccttagggcttatagaatgatcatcaaaataattctccctagcataatcactaaatatgtttatattttgataatcttcaacatattgtgcaggtaatattgaaattactccacatatggcttccaacgaatcatcaaaaccaaacttgaaagagtgaattatcattttcttctctttttgttccttgcttgatattttctttttgaaacctaggggtcggccttcggttattctgtcaaagactgaaggtctgacaccacccttttgttgcattgccaatattgcatcccttttcatcctttgatgcctcctccactatgntttcaacatgttcccattcacccatggaggattctagtnagtatagtatgttttcctagaacctttagtagtt

SEQ ID NO: 194436 - DNA, 487 bp, Glycine max
  unsure (1)..(487): unsure at all n locations
tcgagaaatgcccaaactccctctccatatcagattataggcttaaatanagggcctcgtggtgcttgtgcgcctagcgcaactattgctcgctgagcgtgcattagtgaatttcaacttatcgcgcgtctgttcactcagtggatggactcaagtggtgcgcttagcgggattaaccctcgctcggaaaacatttacagcttatccttcttccagatttttactcgcgctcaaccgcaagaatggtgcgctcagcggatggctcgataagccagcagattgtgttatcgagcggatgaaaatcagcacttcacaaactngcctaattaacctgagatggagaggaaatgattattagacacacaaaatgggagtactaacgatctattacctatctnttaacaagagtgatgtcaacattacgaaataaccataactggaggaggttgaaccattacacaggtgtataccacaagtagtcatatta

SEQ ID NO: 194437 - DNA, 422 bp, Glycine max
  unsure (1)..(422): unsure at all n locations
agcttgatgatcttctcaacccaccatactcatattttntttttttactcttttttatatatacgcacggcaataacaaaattcatgaaatgatgacattntaatggttacattctatagttggtgttgagttcaagggttttgctcatatctagggcttcttctcttatgattttgttaatttaatgtaataatatatggtattaattagcacctgcaagtttcccccattgttaaatactccgcactctccttcttcgcccctctttacctcagngcgtaatcttccaatctctctctatctatttattgcttccttttcttttaatcattctataacgtcctctcatctcctaccaagtttcattaatgctgggcattctattacagctgtcacccagagcaccttgcagctgttcctg

SEQ ID NO: 194438 - DNA, 467 bp, Glycine max
cttgcatatgagttgtaacagacgatagcccaccaattaccttgtcttatttcactagaaagggggagctacatgtatcagatgacaccatcgtgcattctgaaaaccaacatctcagcatgatgggacttacaacataatttatatctccgtggaagctgcccatttcaaatcccttccatttaacaaattcatataccatacgcagaacacatggaacactgaaattatcatttgatctcacaatggctgacacagtctaaaaacacagactttaataagataaagctgataaatttcagactgtcacttgtgaatcaccaaaatgaacttcatcatacgaagagaacgggaagtacatccgaagaaacaaggacgagaataccatctctgatggtatgaccaactatgcgcttggagcaaactttcaaaacgcattcctcaagcattaaaacaaatacattgac

SEQ ID NO: 194439 - DNA, 420 bp, Glycine max
  unsure (1)..(420): unsure at all n locations
agcttgtaggattatggggtacccatcacatgtggtactaggcggcggncgggcgatggtgcacaacaagttttccacatccacaatgcgcgcataaatccaccatcccctgttgcccacctccaactgagctcacgtactcccacgtagcccatatcctcgtttctctcaacaccgggtccccattaatcctcccaagcttccacaacatccaagcaaaacaacattcaaacagcacaagctatcacagccaagcaaaacagagcaaaggcagaaaactctgttcaacacaccaaccaaaatcacagcttttctcacttaaagaccccagtaacaattcctttgttccggttcatcaaccgttggattaactcgaaactcttactggaagtctatagtacataagcctacattgtgacc

SEQ ID NO: 194440 - DNA, 351 bp, Glycine max
gaccttaaatactaactatggatcaatgcaaagtatttgagcgactaggaagttaagtgtagaatgatcccactcaatgatactatggtgtgaagtaaggaatagtgttgatgtctgtagtcaaccaaagatgaattgaagtggatcatgataaggttcgtgcaattctggacatgccacctccttccaacaaaaaagacgtttgaggtttcttatggagggtgaattatattgttcgattgataacccaactaacaaccatgtgtgatcctaccttcaagatgttgcgcaataatcaactaatgtgatggaacgctaattatcatgaatcctttgagataataaaactat

SEQ ID NO: 194441 - DNA, 423 bp, Glycine max
agcttctacttatgtggcagggcgggcttccttcaccttcttgtctccaacgcgaactttgaccattgttcttccttcccgcgatgcttcttttcatgtccgcctgagtgggcttatagcctaaaccatacttcccacgatttccttgggtatttatcaggctagttatgccgccgttgttttttcctaaacccatcccgggttcataaccgttccccaacataactcgggccatcattaccgctgcatcggacagacaaggctgcccaaagagggagtccacggaggaaatgctgaccacctcaaaagactggaaagcagtttctaacgattcttctgcggcttccacataaggcatggaggatgggcagcttaccaagatatcttcctcgcctgacacgatgaccaagtgcccctccacta

SEQ ID NO: 194442 - DNA, 458 bp, Glycine max
  unsure (1)..(458): unsure at all n locations
nttctcnttttcttttattgtatttaagttatgccacatgtctccatttgagtggagcaaaaggcccaatnttctcttgatgtgactcatgctcagccacataaagagaaaaatatgaccttttgaaatgccaaaatcctacctcggtttgtgtgtcgttcctctggttccagtccctcacgtttctctgcgcccgtcgaggccagttttcgaaagtaggcaatatatatatcaaaacgctcagaataaagccccgagcgtggttcagaggttggttgttgtaaatnttaagtcgcacgcaaaacgatgatttttagactaattaattaagaattaacctataaccttctagttatggatgtctcttccttaattagcctaacccgcgtatcttgccgcactattctacttctacaaaacattatgctatcactgaatatctttatatttatacttta

SEQ ID NO: 194443 - DNA, 426 bp, Glycine max
  unsure (1)..(426): unsure at all n locations
agctnggaggaagaaggagaagaatgaagggagatgtatatataccacgaaatttgtgctccaaatgagttttgaaatctgaagcttaatattcaaattatcaaagtttcaaaaaatgcacacacatgacctctttttatagcctgagtgtcacacaaaattggagggaaatttgaatttcaattcaaatttcacttgaatttgaaattgaatttgtggagccaaactttggagccaaaatttcactaattatgactagtgaattttatttatggttcaacccaataatccaagattcaattcaagatttctctataagtgtgactatgtgtaatgaggcatgtttagtatgagagacatgcacaaagcgtgactttatgatgtggcattgtggtgtagtaaccaaagctcacttcccctttaaat

SEQ ID NO: 194444 - DNA, 472 bp, Glycine max
  unsure (1)..(472): unsure at all n locations
tcatcaaactactagattcccgagggatattctataatagacctcctatctataatggagtgggttaccattattggaaaacccgcatgcaaatctttatagaggcaatagatttaaatatttgggaagccatagaacaaggaccttatgttccctctatagtggccggaaatagaaaaacctatagcagattggactgaggaagaaagaagattagtacaatataatctaaaggcaaaaaatattattacatctgccctacgaatagatgaatactttatggtttcaaattgtaaaagtgctaaggatatgtgggatacactacaagtaacacatgaaggcacaacatgatgtaaaagatctatgataaacactttaactcgtgaatatgaactttttaggatgaatgtanatgaaagtatacaagacatgcacaagaaggtcacacacatagttaataatctttcatctc

SEQ ID NO: 194445 - DNA, 437 bp, Glycine max
  unsure (1)..(437): unsure at all n locations
cttaagcacctgcggctgcagctatgatctatatcaccatataggggtgttctatttctactagagttgaataattatcttataacaaaattgtgttgcttctatatgtaatatgcttaagttaaagagattcattcctacattagataaggaggaattgatatgttttgctcaattttatccattaaaacttcctttcgttgaattttggatcttgatagtaaacttataaattatttgatagatgtatgttctgacaatatgtgacaccctctacctcaacatgtatataaatgggaaaaatatatataaaacatggaatttaattaaatcaatcttatccnataaaatcgcaagtaaatccacgtgggtaaaagattcacattcatttcactattaccaaataaaacttctcagaaacatttttgactcaaaac

SEQ ID NO: 194446 - DNA, 238 bp, Glycine max
agcccaaatcactgcctcacgaagggcacatctccgcatcaacgagtacataaaaccaacggggacaacgcaaagcgactccaaagggtgaaaaacaaaagagaccaacgggcaagaaaagggacataccttactggacagtctgaggactcacaaaaaaagagttcgaaaaaaaacaaacgaattgggaaaacaaaaacaaataatcgaaagaaaaatgaccaaagctcattaaaca

SEQ ID NO: 194447 - DNA, 467 bp, Glycine max
  unsure (1)..(467): unsure at all n locations
cttaacaccacttttgaggctcaatgtcactaatgagtgtctttttgaagcttttgctcttttaacgccaataatcaattccaaatctttcttataataattacttagctatttatctcaatgaaagagtatattgagaaaatgaatatgttttagcataaaacattgcatgacttcttaaccaacccttcagcataccataaggatgatgctgatgccattaacccttaagctctctctaatttagaattttcgctgtaacatgagagtagtttacttcaacctatggtttcgaatttttgataattctgacagcactagtatcctttgaatattataatgaaaagaagtctcatccnatgaaatctaatcatgcatacaatatatctatctcgaaattccctgaagaggaacactatatatatcatacatatgctgtcaactcatacttcctgataggaaacatt

SEQ ID NO: 194448 - DNA, 301 bp, Glycine max
cttaaacctccattagattttgttgctttaccttctcttccattgaggtttctatatatttttctccatgtatctcctcacatgtcttgtgccaaatgtttttaaccatgatcctttagagtttccaccgattaaactcgctatataagctaaatttgatattctatggttcaaatatcttgttcttgtcttgaaccatgaattgagtagagtaaaggtccctttgagtattgtcatggtattgtgtgtggctgaaacctcaaccataaaattcttaaccaaattataaagtagaataaaa

SEQ ID NO: 194449 - DNA, 372 bp, Glycine max
  unsure (1)..(372): unsure at all n locations
ccttatatggctgcangaggtgattataatagccttcatcttgtatcagctatggagccagtcatagtgatgcttcgacctcaaactgttaatgcatagcatattccatctgccagcatgagttcatctacttccggagtggctgccacttggtatccaactaatagtattgaagtcatgaagtccaatggctttatatctcatcctcctagtactagaagcctcagttcaaactatttcagttctaatcaactgtaccaccaacttctatgtcaaccgcctcatcagattgtggctggcaacacgcattcagtagatctcctatcaactaatcaatggaatagcttatgggataaaacagctgcatcttca

SEQ ID NO: 194450 - DNA, 375 bp, Glycine max
  unsure (1)..(375): unsure at all n locations
agcttgtaatcgattacacatatactgtaatctttttccttagcagattntcagaaaatattctcaactgtcacatctttttatgtggttcttgaatggctatcaaaggcctatatatatgtgacttgagacacgaatttgctaagagtttttcataacataaaggtcttattctcttataaagcaaaatcattctatcctcttacaaattccttggccaaattacttgtgattcaataaggaattatttgagtgttcaaattgttcaatcttatctttttcaagaaaagattcttctattcttcttcctcattctgaaaagggattaacagactganggtctcttgttgtgaaagaattctaaacacaaaggaa

SEQ ID NO: 194451 - DNA, 327 bp, Glycine max
  unsure (1)..(327): unsure at all n locations
cccggagtacgacagtcaccgctttatgagcattgtgcaccancagcgcttcgaagccatcaagggatggtcgtttctccgggagcgacgcgtccagctcagggacgacgagtatactgatttccaggaggaaatatggcgccggcggtgggcaccactggttactcccatggccaagtttgatccagaaatagtccttgagntttatgccaatgcttggccaacagaggagggcgtgcgtgacatgagatcctgtgttangggtcagtggatcccgttcgatgccgacgctatcagccagctcctgtgatatccgatggtattgga

SEQ ID NO: 194452 - DNA, 426 bp, Glycine max
agcttggaatcatccttcaaaagtatttgattttgcatatgaaagggattattccacgaaggtcagcaagtgtccacccaacgacctttttgttgcctctcaaaacatgcaacaacttatcctcatgctcaagtgaaaggctgctagatatgatgactgggagcttctaagcatcatctaaataggcatacttaaggtgctcaggtaatggtttcagttccaaggaaggtgattgaacggtggaaggaaaaggaaggctgacaaccgatggaagagaaataggaggatcagaacctgcgtctgcatcacaatcggaatgaattgcagaagaaatcttcttacaaatactacatagagtagtagactatcagaatcatcataggattagttaaaagaaccaatattaaagtcataaaaattagaaaa

SEQ ID NO: 194453 - DNA, 454 bp, Glycine max
cttcaaagagaagaaaataaagcttgtctcaagctctaatttgtgttatacatgaatctaatggatcaggaaactcttatggatccacatatgatgaagtggctctcatgtgtgaaaagctcatattgacgatgaagaatgttagtgcttaactctactgagttgtaaaagattggctaagattttgttaaaacataagcacttatacaatgaaggaaagctggagttgctgcacatgatgtccaacgttatgtcaaagaataagatcgggctgcacaatgcacaaggcaagataaagtgtcatatgaagaattgaagctgcaggattcacgatgtcggattcaatgtccaggacatcctgcccgacaatactggtgttgctgaaagcattgtgttgcacgatccacgatgtctgatacaatgtccatgacattctgcgcgaaatactggagtt

SEQ ID NO: 194454 - DNA, 426 bp, Glycine max
  unsure (1)..(426): unsure at all n locations
agctntgagaaacatgagagcctttggttttattatacattcagctggatcctttgtctacaatctccccctttttgatgatgacaatccctgaaatcaagacaagctatatacatgatgatagcacgttcacacaacccttactccccctatcttttggcatgtatgcctaactttaaggattgatttttaatgatagatttctaattgattttaattgatttctaacccaagttctctccccctttggcaacataaaaaagaactaagcaaaacaatcaatatctaaacaaagccatacattaaaccaaaataagtccatacattgtcataactaaccaaagcaaagtcgagatatataatagaagtgcaagattacgataactagagcaacaaaaagccaaatacatggcgataaaacaaagt

SEQ ID NO: 194455 - DNA, 389 bp, Glycine max
ataagcgcgggtctaggagacaaaagtcagggtctttttaccaatagacgtgcgagtacattagattggtacgaccatgccctccttatttccagctgggaaaatggcgaatggaggaacgccctcgcatttacgcagcgagcataatgtaaacctgtacggttttaaagctctatagttgggcctaagctttaaagatgttccttctgttaaagcgttggggtctttggttttgaatttataatacaacgatgcttcttcatctgttcctacgtttctacccattctcattcatgcgcatgtttacttccttttctgaaacggcagatccgatgacgagtcccccgaaggtactaatacttgggacccgcctatcggcttcgagcaag

SEQ ID NO: 194456 - DNA, 432 bp, Glycine max
agcttaaagaatgcccgagtcattcatccctattatatgttgttgaagtattggcgatcagaatttccattccttggattacggggttgaaccaagctcaagcttttacaaaaaggttcatcaagtcaagttgaaatatggaagtaaccatcctgcaaaattggggcaaaagatgaatcgagtcacatcactgcttcgtctactgccaaacatatttaggattattgatgtccttgttacttccagtttcaccttgacaaagatgtcatggaccatgttgaaaatctaaattgattcaaccccatatcctgcgtaaaaattcgcaatacttcgactgtacatcattcgcatgcatccatgctattcattgggtgcattgctcattgcattctttccttgaaaaatagaataaaataaaataacatgaactta

SEQ ID NO: 194457 - DNA, 271 bp, Glycine max
tccttgagaagctagagggggggctactcataccccttcttatctattctctccccatgccaatatacatgaaaatacaatgggaagcttccttgagaagcaaggaaggtagcttccttgggaagcaaggaagaacacttccttgaaaagctagaggtgggaggggggtcctctttccaccttttttttcataaggatgcgcctttgtcccacccatttgctgttttgaacttaatcatacatttttccttatgcacaagcgaggggagac

SEQ ID NO: 194458 - DNA, 330 bp, Glycine max
tgcaagctaaactctctaagaaaactcccatttacattatcaacttactaaatccacagaaatatgcatatgcaaaataacctaaaagattttatctgtcatgtatggataaagataaaacatcaatgaatacccagatcccgttgcctagccatgactcccatgttcttcctaaaagcttatatccccaacacatatcacaaacatgggtgttccaaaaaatctaagtcctataaactacaaactctaaagagtgctctctatgggacccactaaacaaaacaaaaatgaaaattgaagaagggtattacaaaaaccaaaccttgaaat

SEQ ID NO: 194459 - DNA, 498 bp, Glycine max
  unsure (1)..(498): unsure at all n locations
cttagaactcagcttagccaccgcaaccttttactttatttgtatgactgtgtcnntagggaagactttggaccataatatttaatacaagccacagatatttatctcttatgagtgcgcttttcactgatattggaagcgcggacgaatgcctgaaccaaatacataaagtgtgggtgaatcaatttatactcgtggctcggaaaggagagtctcttgttgctgcgtatccataggatgggtttcccttttccgtcagcagatacagatatgccaagaacatcaaccgcttggtgaatgaaattattcatatctcatacaggaagacatctatgacattgctaatatacaacgcgggaaacagaatgaatgcattgctgaataaatcacatttttccgattcatgtgctacctgataccacagactcgatctggcgaaagcatagatggtgcactgttcttgatgtaaacagagtgatatgaaacatcacaatctcc

SEQ ID NO: 194460 - DNA, 403 bp, Glycine max
  unsure (1)..(403): unsure at all n locations
agctngttgaagaagctaaactgtgatgcaagctgtaccacacattttgaaattcttgacaggagatatcttcatgtaaagtgtttgggtaggaagaatatattgtatgggttgagaccatgtaatttcagtcaatctctacatgacacattattaactctttctcctaaattgaaaaatgtatttaagtgtcacgtggagattgactgaaatcacatagtcccggatcatataataatttatcccaggcaagttgtcttcaaaggccaatggacacaaaccgtcttataagaacatctggttatgtcacacaagatcaacaagactattcccatcacttacagttaaaaaaaaataatataaaagaaatagacagtangatatatagtgctttgctggttga

SEQ ID NO: 194461 - DNA, 437 bp, Glycine max
tcgcgaccgacatgcccggtgacaagcggagatttacgttcatcttccgcgctcacaagatctgtcatactcacatttgagtcacgctgatgaacggaaatacccgagtggtgatccgcataaacattcttttttgctgtctgtaagactaaaagcctgatagcacgcagagactaacgtcgtctcctgcgcccttcgtcaatcgcaggcgacaagccccgttacacgcggagatatacgtcatcttccgcgctcacaagatctgtgatactgacatttaagtcccgctgacgggcggagataccctagttgttatccgtataaacaatctcttttgctgtcttgtagacgataacctgatacacgtagagactaacgtcgtctttacgccctcgtcaattgggcgacagcccgtgaccgcgagattacgtatcttc

SEQ ID NO: 194462 - DNA, 385 bp, Glycine max
  unsure (1)..(385): unsure at all n locations
agtctaacaagtngataatgtatttattcagatttcatactatctagtaagtatatatcattattgggcgggtatagcgttactcgaccaacaattatttttaagaaaaaacaattatatttccttaaatatatttctaaaataatctaatatcttataaattatagaaatttttatcgtttgaaatagaaacttttcggtgatagaaatttctcaactacttttttcagaaaaagttagcatttacaacaaaattatttaatacatttatgagtggggcaaaattataaacaacttatgaggcaaaagtaaccttcataaaaccttgtaaaattgtatagaaaaagctaaaaaagtagggcatgcaatatataaagctccagtc

SEQ ID NO: 194463 - DNA, 447 bp, Glycine max
ttctcctgactgagctcgaaactagtgttgtttgattcccttcggcagagactacgggaggtcgtcttctatctgcagctgcacggctcatagtgcttggtgccaatgacgactgattcacctttgtagtccttaaaactcgattacataaagatgatggttatgactttgtcactaacaactttggagttcctgttttaatcaaatatattatacatttagtttcttgcagtcaagtttagcataatatatctccttgtcatgcaaacattctattgaaatcttatcttatcaaattgcctgtcacatttatatatctctctttgtatgtatattagcactggttattcatgaatatcttttgatataaaaaataccatacttcaaaacaccaacatactcctattgcatcatatatcacatgttatgaattataaaatattgtat

SEQ ID NO: 194464 - DNA, 354 bp, Glycine max
  unsure (1)..(354): unsure at all n locations
aacacttccaacatccatcctcaaaggatgngaaagtaattttccactaattgtatcttaaaatgatactgaaagtatgcccacaatgttcaccacatattaacactaatttcgactataattgatatgttgggaagtaccattcttaacatcgacttggttataattaatatatgaaatatccctctctattttcgaatttctcaccacccatatgatatttacacgccttttaatgtagattttgtttttaaaaaaacataacccaattcacgtactacgcactagataaatatatacatcatcatacgtatatacatccctacctatatatccatatacatatatatatat

SEQ ID NO: 194465 - DNA, 296 bp, Glycine max
tgtataagatacgtcacgcggtttactttaataagtcatttgaagcaatttatgacggacatcttataagatactagttttttcttcttctcgaatttatccttattatttagcataacttattatttagcataattatatctctgatattatatatatatatatatactatgtatatatatatagatatgtatatatatattcgactcttgcatttgatccctgataatattgtccttcaaatcgaacctctgatattagaaaagaattgttttacatctctctcgtgcgtgttg

SEQ ID NO: 194466 - DNA, 442 bp, Glycine max
  unsure (1)..(442): unsure at all n locations
cttaagngacccgagcatgcaagctttgaggacttaccaactctagaattatttttgataaagacctatatataggcttgctaagggtagagagaggaatactagagatttggatcaagtaaagtgtgttaaggatgataaaggcaaagtcttagtgcatgaaaaagatatcaaggaaaggtggaaggcgtatttccacaacttatttaatgatggatatggatatgactctagcagtctagacacaaaagaagaggaccggaactataagtactatcgtcggattcagaaacaggaagtaaaggaagcgttgaaaagaatgagtaacggtaaggcggtggggccagacaacatacctattgaagtgtggaaaactcttggagatagatgtcttgagtggctcaccaaactctttaatgaaattatgaggtcaaaacgcatg

SEQ ID NO: 194467 - DNA, 347 bp, Glycine max
tactgaacatgaacaagacaacaataattacttctagcattgaaaagtaaatattgttattataaatgtgagcatggacctggtgtatggacatacacaaatgggaagtgttaacaggtcataccagcatccgtgcgaattgtcatctatacaagggaaccaacaccttgctctccttatctgattatcggtatgaagaagattatttctgaagtgtattcctgtctctgccttctctatccaatagtcaatacgaacaggtctgacattctgcacccaacatcaacctacatgagaaaacacaaatagtaaacctgaccacaactactcatttctcacatttcact

SEQ ID NO: 194468 - DNA, 429 bp, Glycine max
  unsure (1)..(429): unsure at all n locations
agcttgtgcatccaataccctgatgaggatgtcttatattttcttaaaactggactaatccatttgcttccaaagtttcatggccttgcaggtgaagacccatacaaacatctgaaagaattccatattgtctactccaccatgaaacccccagatgtccaggaggatcacatatttctgaaggcttttcctcattctttagagggagtggcaaaggactgactatattaccttgctccaaggtccatcaccagctgggatgacctcaagagagtattcttagaaaaaaaatttccctgcttccaggaccatgaccatcagaaaggatatttcagacattaggcaactcagtggagagagcctatatgaatactgngagagatttaagaaactatgtgccaattgccctcaccactagatttctgagca

SEQ ID NO: 194469 - DNA, 210 bp, Glycine max
atacgacagtcaccactttatgagcgctgtacaccagcagcgcttcgaggccatcaagggatggtcgtttctccgggagcgacgcgttcagctcatggacgacgagtatactgatttccaggaggaaatatggcgccggcggtgggcatcactggttactcccatggccaagttcgatccataaatagtcctttgagtttatgccaatgc

SEQ ID NO: 194470 - DNA, 385 bp, Glycine max
  unsure (1)..(385): unsure at all n locations
agctttccgcgaagagatctaggagagacgccttggcttatgggaccagtgccatccccgagtttgatagtcaccctttccggagcgccgtgcactancagcgcttcgaggccattaaaggatggtcattccaccgagagagacgcgtccagcttagggacgatgggtacaccgattttcaggaggagatagctcgcagacattggacgtcgctggctactcccatggctaagtttgaccttgaggtagtcctggagttttatgctaatgcttggcccacaaaggagggagtgcgggacatgcgttcatgggtgaggggtcagtggattccctttgacgtacatgccctcatccaattcctgggtgaccccctatttgtggagga

SEQ ID NO: 194471 - DNA, 420 bp, Glycine max
  unsure (1)..(420): unsure at all n locations
tagtgacatccgtgacttgatcttgagcgaagatgttcgcttgttatattcatgagaatcttccagtcatgtttccaattcagcattgaatactgaaggcaggggaaggactacctagaagggtcagaatggtcgaggcagatcaaagtcaagagggaaaggtcagagaatatttcaaagtgacgttacttgttggaattgtgacaagagaggtcactttagcaatcaatgcaaggcaccaaagaagaacaagtctcacaaaaacaagaagcgcgatgatgatgaatccgcanatgcagcaactgatgaacttgatgatgcattannattgcagttggatagtcctgttgattcatggatcatggactcangtgcgtcgttccaaactactncctctanaatttatcgctaactatgttc

SEQ ID NO: 194472 - DNA, 418 bp, Glycine max
agcttccaatgttcaatatcgagcgtctcgatatattatgcgcctgaatcggacctccgagtgaaaagtaatgtccatttgaattgctcaaaagcttccaatgtataatttcgagcgtcttcatatattatgcgcctgaatcggacctccgagttgaaagttatgaccatttgaatttctcgagagctttcgttgttcaatatcgagcatctcgatatattatgcggctgaatcagacctccgagtgaaaagttatgaccatttgaattgctaaagagcttcaattgctcaatttctagcgtctcgatatattatgcgcttgaataggacctccgagttaaaagttatgaccaatagaattttttgaaagcttccgttgttcaatttctggcgtcttgatatattatgcgcctgaatc

SEQ ID NO: 194473 - DNA, 424 bp, Glycine max
  unsure (1)..(424): unsure at all n locations
tctgatntcaatntcgatcgtctcgatatattactggactcaatcgaacatcagagtaaaaatntattgtcgttagaatttgcttagagcttctattttcaataagagcgtctcgctatattacgggtctccatcggacatccgtgtaaaaaattattgtcgcttgaatttgcaacgagcttacattttcaatttcgagcgtctcgatatattacgggactcaatcggacatccgagtaaaaaattattgtcgtctgaatttgctacgagcttccgttttcaatttggagcgtctcaatatattacgggactctattggacattcgagtaaaaagttattgtcgttngaatatgctcagagctacaattctcaaattcgagcatctcgatatattacggaactcaatctgacatccgtgtaaaa

SEQ ID NO: 194474 - DNA, 425 bp, Glycine max
agcttcatgatgttgaaaagagactatgtcgacttaaatgaagactgaacacgcatcgttgttatggattgtgacactcgtttatctaattttattcattatgtgatataatttgttgtcagaagtttatccttaaatattaagtaattcttgcgttaagaaataaatgagttggtgcaactaaaatcaattacgcatgtatgatacatcgttgtcatacttgacaacacattgtcaaatgcatgcgtattaaagtttgagtgtgacacgacattgactgacttgacaacacattctaatgcacgatatagcttgacacgacattggtttaattggaaagacaaacacaaagcatttgcacgcgtctcaatttttttaaagaaagagaagcaatggtagtgaaaaccatctatatatatgagaca

SEQ ID NO: 194475 - DNA, 447 bp, Glycine max
  unsure (1)..(447): unsure at all n locations
ggaccttaaaactcagctggcttcgtttanacatgattgatacatgatctgggactttgtatgaattgattgcgcaagattggatgagaggaagtgtgattntcgaaatctgcacttatgcagaatatttgctgtgaaattgtgcagcagaattttgctcaagtgcagaaaaatgcttgtgtgtggttggctgtggaaagtctaaggtagaatgagttctggatgtttgctagtagatcccaacggtcaaaatgtaggcttatgcactatagacttccagtaaaattttggagtcgatccaacggttaacgaattggatcgaaggaattgttactgnggtctttaagtgagacaaactgtgatctggttggtgtttggcagagtttctgccatgctctgtttgcttggctgtatacctgtgcggttgaatgttgtttgcttgatgtg

SEQ ID NO: 194476 - DNA, 282 bp, Glycine max
gacaccccccctattcgctaccatcccccataatactccctttcgtaggaattgtgcctatcttaaattaaatggatcacccgtggagtcttgagtaattaattatctccctctgggcttaacaaaagtcaagcgcattacaaattcgaatagtcaatttaaccagcttcctacacattcatggaaactactcctacctgagcaagagccagaccatgaacctgagcacatctaatagataacatcaaccattgtcaaaacatactatatgtcaacgtacca

SEQ ID NO: 194477 - DNA, 348 bp, Glycine max
tctttcaatatttacttaacattctagaacagattctatttatttggtttgaaaatttggccaatgcctccaagtatctaagctattttcgtgtgtcagctctctatgtctataacaggaaaccatcaagcatgtattgaatggatataaacgcacgaaatgggggatatatgtatcagatattaaagaccataatgagattccgaaaattacctgcatgatgacctaagctgtgatgaccatggcgggtcacagaacctacacttctgggagatgccacacaggtcacaagcacaggctctctacatacttacagcacgagctccactacacataatgtgcgttgcc

SEQ ID NO: 194478 - DNA, 367 bp, Glycine max
  unsure (1)..(367): unsure at all n locations
gacctnaagagacgcggcatgcagctgaagggaaaaagatccttctttttttcaacacaaatattcacactgatcatataaccacgtattgcctggctgctgaagctacctaggcctaaagataaatcacatacacgtatcgaatttattccctatcgacacgacaaatttgatacatactgcttgctcactctagaaaaactaatcttccctaacttcccctaccatgtaggacgacataattctaactagaacccccttctgcttggaagttacaaatagctccaaccatacagcaaaatataatttcaacttaaaaaaagtagcgaacggaaacataatataaaccagcatctgaagaaaccac

SEQ ID NO: 194479 - DNA, 129 bp, Glycine max
ctatcaatacctacccaaaccaagagatgaaacctttccttttcagtaatgccctgcctctcttctactctcagtgatggagaatccctattaataacagctttgcgaacactaataccaatatctact

SEQ ID NO: 194480 - DNA, 432 bp, Glycine max
agcttgaaatgaggaagtgtggaagggtgagacttcctacttttattcgttgaccacagagtggtacctggagatatgtcgcgggggtcaggagaccttggggacgtcaggtggggtgctatttcccaaaaccaagcttgaccaatcccgacccaacccgggcataatcagtcagtgagaacctgtgatgtacctaagcaggcgagctcctggcagtcaacagataaaaggaactaagaccacaaagcaaggaggcttgtgtggtggctggccacctgtgaaacttgattgatatatgggaagtggcctctggtaatcgattaccaagggtgggtaatcgattacaaggcttaaaagtgaagacaggaagctaagatggcctctggtaatcgattaccaaggggtgttatcgattaccaggcttgaaaatgg

SEQ ID NO: 194481 - DNA, 373 bp, Glycine max
  unsure (1)..(373): unsure at all n locations
tctggaggaagcctcttaatgaagcttctagagaaagctatatgaagctgtctcggtaaaaatgcttcccagcctttgttaaccgttggatcttctcgaaatttggtctacaacttcacaagagatttttccatgatctgaccgttgggatctttgagaagatgtctggagtgtgctagaggcctcttaataaagcttctggaggaagcctcttaatgaagcttctatagaaaactacatgcagctgcctcggtaaaaacgcttcccatccttcgtaaactgttggatcttctcgaaatttggtttgcaacttcanaagacacttttccatgatctgaccgttgggatctttgagaagatgtctggcatgtgc

SEQ ID NO: 194482 - DNA, 418 bp, Glycine max
agcttatgtacttgagagttttatcatttcgtgacttccaaagtttggattctttgcctgattcaataggtaaactgatccatctgcgctatttagatctctctcattcaagtatagaaacactgccaaagtcattgtgtaatttgtacaatctgcaaactttgaagttgtctgattgcataaagctgactaagttgcctagtgacatgtgcaatcttgttaacttgcgtcatcttgagatattttggactcctataagagagatgccgagagaaatgagtaaattaaatcatttacagcgtctggatttctttgttgtgggcaagcacgaagagaatgggatcaaagaattgggaggactttcaaatcttcgtggtcaacttgaaattaggaactcggagaatgtttccaaagtgat

SEQ ID NO: 194483 - DNA, 481 bp, Glycine max
  unsure (1)..(481): unsure at all n locations
ctataaatatctgaatattgtggtgaaattagtggaaatataacataatataaaagcttaggaatgaatgtgttaagacaaaaactcagagtaccacttattgatgaaagatgatagaatttcgccttagatggtttggtcatttgagaataaagacgaataaaagctccactatgaagatgatcaaagatgatctgatactaatatgctggatacctactaaacaatgtaagaatttgttacattggtcctatataaagactatattggtcctatatagcatagagcatagacaaatgaggactacccaagccatataaagactacccaagtcatataaagactacattggtcctatatagcatagagcatagacanatgatgactacccaagccatataaagactacattggtcctatatagcatagagcatagaccaatgaggactacccatgccatatnaagactacattggtccta

SEQ ID NO: 194484 - DNA, 403 bp, Glycine max
  unsure (1)..(403): unsure at all n locations
agctnttcgattcattctatgtacccgtaatggtccacattgtgtttcgtgcatttttattctcgttttgtttactttttatacccctgttgacgtgcttaagccattttacttaagtcatttctcgcttaacttaaaaataaaataaatttccaccgaacgtttgaattgcattatccattaacttcggttaaaataaattccgaccgttcggtcgtgccgtaaccacgttggaaatcaaaaagaggtaaaaaataatataataatcaaaaagacatcttttagtaaaataaagtagaaaatcaatcggacgttttctctttggaatttctcattcttaatcgaattgattaataactaaagtgaaactaaaggctaaaatcaattcgcctagtcaagctcg

SEQ ID NO: 194485 - DNA, 448 bp, Glycine max
  unsure (1)..(448): unsure at all n locations
aagcttcatacaaagaaaattcaacagtgtgagctgtgtagataaatcctaattggaatatccactaacgccttcttgaagccaatccaaaggaaaatcttttagtatatgattagatntagtaattaaatcctccagtggttttaaccatgaattatttccattgctagtagtcaaggatggagacctacagcaaagtcatccatatggctaccttaagtatatcatataaaattatctccctcaaaactataaaaacaaacaaattaaagctgtaagggataactcactcatttcctgaatcagttagtatcaaggtcaacacttctaattgaaattgaaccactaaggtgttttgtcctcgacgcaaaatttgtttacgtactaattctcgtaaaatggcatcagcttcttccttcttgagatcaagacctgattaaattataca

SEQ ID NO: 194486 - DNA, 430 bp, Glycine max
agcttgcttgtgggtcttatatggaggatggatctttgagcttcaatgaggtcctttaatggtgattttccaccatggagatgcagcagaagacaaaggagaataggtgagaggaggcgccatccactagggaataagccatggaagaaggagcttcaccaccaagatgagccttggataagaagcttagagaggatgcttcaatggaggaaaagaaagagggagagaaagagagagtggggagcacaaaattgaaggaagaaaaagggagagaagttgaactttgagttgtgtctcacaagactctcattcatcaaagttacaacaagtgttacacatgcttctatttatagactaggtagcttccttgagaagctttcttgagaaaacttccttgagaaacttctttgagaaaacttccttgagaagc

SEQ ID NO: 194487 - DNA, 364 bp, Glycine max
  unsure (1)..(364): unsure at all n locations
catcagaatgctagacgaaatatatatgggaatagaggtaacaatggcgggtatgacagaccgaggcagaaccgggttgagggagtaaagctcaatgttcctcccttcaaaggtagaagtgatccagatgcctacttggactgggaaatgaagactgagcacttatttgcctgcaatgactacactgatgcgcagaaagtcaagctagcagcagctgaattctccgattatgcccttgtttggtggcataaataccaaagagaaatgttgagagaggaacgacgagaggtagatacatggactgagatgaaaagggtgatgagaaanatgtatgtgcccactatctataacagaaccatgcgac

SEQ ID NO: 194488 - DNA, 429 bp, Glycine max
  unsure (1)..(429): unsure at all n locations
agctntcccattgtgaaaacctagccgtcgtttttctctctttccccaaaacgtcgtctcctctctcaaggtaactcccaatatcgttcattaacgcttttcatgcaggagcttgtgctgtgggataatcaattgaagcggcattttctttgcccattggtacctccatccatttcctcccttcactccttcccttatttacttaaacagcaatttgatgatgttgtttctttgtgtcgcagcgatttcgcggaggttctagacgtgtatgagaggggagatgggctctactagtacaccgaacgcaaaccttcctccgaagccatgcatttgggacacgtgattccctttatgttcactaagtgagtgagttctttgcgtttttcgattttaatttgaagaattntgaaatggaatttgacttttaat

SEQ ID NO: 194489 - DNA, 359 bp, Glycine max
  unsure (1)..(359): unsure at all n locations
ctaagcacttatgccataatgctcctgaggttggattatcaattctacgcttaataccacgcaattctgctttaaagggtcaacataggaagctaccatggcaagttaatatagattatcattaaccatgagtgaactagttctaacaatatctaaattaaaagacaacctgaacacatttgttccaaatgaacacaaataaccctatttgtccaaataagaaactgaaaccaaatnntttctaaatgacggtacaacaaaagtgtctttcaaatccaaactaaaaccagtacataataataatctaaagtgcctatagcttcactgcatcgattaccatctcaacatagatcatcttt

SEQ ID NO: 194490 - DNA, 380 bp, Glycine max
ttcaacttacacattttgggtgatatgttatgtagcacaaaatacatatgggaatatcctttttttttggttaaaatgcttgtttacaacgtggcagggtgtggtttacaacatgacacgatgtaggcctccctggtgtactatagacgctaatcatacgtcatgcaaaaattttaattactataatttatcgaacaaaaaattgatgaaaacgcatgtatttattttaaaatcattgatgtatatatcaatgtcaacagcatgactaatttataatacagaaatgtcttagaatattttacatagggattgaaatccattcaagtaattgcatacctaaatcacttctgattaaaagacttccaaccgcattattttat

SEQ ID NO: 194491 - DNA, 474 bp, Glycine max
  unsure (1)..(474): unsure at all n locations
actctnggcaatttcttcaaaactagtcaccttaaaaagttgtgacttttgaaaaaatcttcagaaacaagtcacttgaagaattgtgacttctggaaatgtattnttcgaaataagtcactggtgtgttatcgattacacatcaacagatgtgactcttcattttgaattttgaaaattaaaacacttataaactttggtaatcaattacaagtattgtgtaatcgattacacacgtttaaaatactttaaaactgtttaaacataagttgtaactattgaaatttgaaatcttaacgttttaaaacactggtaattgatactaccttctggtatcaattaccagagagtaaactctttggaatgatttgtgaaacttttgtgtactaatgtttgaaacttttgagactatctgatgagctctctgatcttgatctgatctgacttgtatcttgacttgattgatttgatttg

SEQ ID NO: 194492 - DNA, 326 bp, Glycine max
agcttaccagaagcgccaatcagtggttctttgttgttggcgactttgtctgagctatcatgagtaaagatcgtttacccactcattaatacaattagcttattgctatcaaaaacgagccatattcatagttctgatgctttcaatgttaatttccttattgtggtaatgcttcttttgatgatgagacggcttttgatctgaggatgaatcttcttcaccccgacaaggatcctgtattgcaagattgaccaaagatgaccaaaaaaagtcatccgtgtccatttttttacaaaggagctcactttttcgataggaaacgacct

SEQ ID NO: 194493 - DNA, 384 bp, Glycine max
tgaataccttcacgacgacatggtccatacatctgactgacacatgtagagccttgttggccctcttctctcaatgggaatctcttcttccgcgaacgcgatataattattggtggttatatgattaacaatgccttcataaccctcaactgagatgtcgtgtgtgggcttcgctgaggacatttatcaacaatgcacgatgaggctcagagtttatgagcaattcgagtaaagagattctcaccgcagttttattcagttgctcaactactttatactcgcttcgttggatgagacgcaagaactcatgagcctctccaaagtcactgtcttccttgaagaccttctttcttttcagctccctttacaccgaaggatctactt

SEQ ID NO: 194494 - DNA, 382 bp, Glycine max
  unsure (1)..(382): unsure at all n locations
agcttctacatgcttgtattgccgactttgcttttggaacctttncgaaaggatcataatctaatccttgatagattagagagagagccttcttgcctctctttcttgagtctctcaaattatccctttgagtttgagagagactaccttcattctctggctaagtgtgtccttttttataatatctctcaaacatcttgtgtgccaaggagagtcttcatcttgatgctcctattgtcatagttgctcttgttgagcattggaacttggaatggaaccatgccgctacttaccttctccttataaaggaccttctagctctactgcctatttgttggaatgaaattttagaagtgtaggaaatatctgagaatgggaggga

SEQ ID NO: 194495 - DNA, 484 bp, Glycine max
  unsure (1)..(484): unsure at all n locations
gctgtgcnagcgaatatgggattaaaggacagtgatatttgtcctgctttatcattgagctatcaccaccttcctccccatctcaagacatgctttgcttactgtgctttattccccaaggattatgtgtttgacaaggagtgtttaattcagttgtggatggctgaaaatttcctaaactgccatcaatgcagtaagagtccagaagaagttggccagctgtacttcaatgatctactatcaaggtccttctttcaacaatcaagcanatataaagaaggatttgtcatgcatgaccttctaaatgatttggcaaaatatgtttgtggngacatctatttcaggttgggagttgatcaagcaaaaagtacacagaanacaacccgtcatttttcaggttcaatcattaccaaaccatattnttgatcagttgaacttcatgtatgctaaaaagtcgtacattatgcaacaggtggagaatgat

SEQ ID NO: 194496 - DNA, 427 bp, Glycine max
  unsure (1)..(427): unsure at all n locations
agcttcaacatttaatctatcattcatgtcttataatatgnaacctttgttaagagtaaagactcaacctcagggaaataagacaagactaaataatatgtcaagaccttgtctctaaatgacttttgttaattatgccacagcatcttgaccaaacctatttaaacaacaacaacactgagtttaattgcaaaggtgaaagaatagtagtttcatgaatctaaaccctccattctccaaaatcattagttccaaccatattaacaagtagtaaataaataagaacttaaagctatgaatgactttctgaactaaatataaactacaatggcctttgtctgtcaccattntgaaaattacgaaaatataagtacatgttccctcatagtcactgtgttggtaagaaacaatatatcaccttctaagt

SEQ ID NO: 194497 - DNA, 429 bp, Glycine max
  unsure (1)..(429): unsure at all n locations
cctaaaattgagagaggatgattattattcacacanaatgaaaatactaagtatttattacctatacttaacagaanatacttataacattacaaaataaccatataatgggagagtttgatacaatttatacaagttttatacacaaaagttagtcatttccatcgactaacaataatcaatcattgatccttgcacgcttacaagaacacaaatgaaacaaattaaatatggaaagaaaaattcaattatcaattaattaatttgataatatataaactcttctcactctattttttgcttccctttttttctttagtgactagaattatgaggaaggtactcacatactacctcaagtaacagaaaatttgaaaatataaaattaattgagtgattaaacaaaggagaaatgtcactaaatcgatc

SEQ ID NO: 194498 - DNA, 422 bp, Glycine max
agcttggtaaataggactgcactgctgttctttttgagaataaggggtgaaaatgaagagttagcttcctggttactctatgaaggaatggcacgctacatgcatgatcacaaaactgaatgtaagtatgcttcagaaatgcaatcaagagctcatgcttattacaaatcagaatgaataaatactgccacagctcttgaaccaaatacattgaaaacaaaaagccaactagagattaagtccaaacaacttgaatatgtaaaaaggcacagggaccaagcttacctcaaacccaaacagtgacaatggcagtgagatctaatacaatggcgcagagacttgaagctttcctcgtaccttaatcagggcaccccaaaatgtccctagggtcaaacgaaacaacacagacctagtcggttaga

SEQ ID NO: 194499 - DNA, 362 bp, Glycine max
  unsure (1)..(362): unsure at all n locations
tgccacctagctctccaggcgagcagggttgcttcctccagaagcaacagccttctggaggaatcttctggagggcccangtgggcctggttgccatttgcacccccatttttactaagtacacccccctgcctctttttggtgattcttttttcgtaaagttacgaaaacttacgaatgtcgtaacgatacttgttttctttccataatgttacggaaccttgcggattacataaccatcctcttttttgacttacggaatgttacaaaacctcactaattgtgcaacgatgcttccatttgatttccggtgtgtcacggaaccttacagattgtgcatcaatattttcttttgttttctg

SEQ ID NO: 194500 - DNA, 276 bp, Glycine max
  unsure (1)..(276): unsure at all n locations
tggaattgactcntgaaaattttacctggagggttcctagtacaataagtctaccatcttgcaccgttgggatctgctagaaaatgtctagaacccaatatgtactaccttttcccataaaaccagcaatgcacaagcatttttctgcacacaatcaaaaatctgctgcacaattcaacaacatttttctgcataaattggatcctacaagtcctaaatccatcttgcccacatccaatttttctcacattggatcctacaagtcctatatcatgt

SEQ ID NO: 194501 - DNA, 394 bp, Glycine max
cccgcactagacgagtcctaccaaccaatcccaaacaaggtcatattccatcaactattttggtcatttaaggcatatattgatgtgtttgcattttgtaaacccattgtgcaaatcgatggaacatgactatatggaagatacaaagggacgttgttagttgcagttgcacaagatggaactaacaacatatttccattgccatttgccattgtcgagggtgagacagcaaatgggtggcactctttttgcaaaactcgagaacacatgtgacaccacaacatgatatatgcttaatctttgataggcaagagtcaatctaaagtgcatacagacgagttgccagtgggtggacagcaaacaactcatcacatgttgtttgtattctggacat

SEQ ID NO: 194502 - DNA, 409 bp, Glycine max
  unsure (1)..(409): unsure at all n locations
agcttttatttctcaactgtgtttcataagngtattatatatgcgtcatttncattcactagccttgtaccataaaaccttcttccttgagcttttctatcctcggctagtagtatcatctaaggatgtatcgggtatcattttgcaaataccaagaatatgtcaattgatatatacacacacacactatatatatatatatgctaaatcactaaacttttctttacaaaaacaagagagcatattataattatgagaaaagactacgaaatgacagtttctataattttctatttgttttaaatcattaatttataaaagaatagtctgttctagtctttaatattaaatatttcttggtgaattaaagactaaaatatataaagaatttacttgtgaaaataaacac

SEQ ID NO: 194503 - DNA, 330 bp, Glycine max
tttcggccttgaactacttgatcctgatgagtttggttgttgttctacttgtgcacctagaaatctgggatcgctgaagtcatgcatctaaaacataccatgcagcagtggggtggttttgatgatactggactttgctcatggtaaggacagtgtaacactaagattcaattgtctactttatttgagctggttcaaacagatttattgtcacagtatataatcatatattaatattatggaatactgtatatgctgtgatacttttataaactacgaatttgaacttacaaaggttgatacgtatatgctttcgccttgatattcttg

SEQ ID NO: 194504 - DNA, 419 bp, Glycine max
agcttaacaaccttagaaataagtgatcatattttccgaaatataggggagtaaacgcacattttatctatatacaattgtttgttgcttgcttgaatcttgatttcaagaatcgtattggcatcatcaaaaagggggagattgtagatgcaattgcctctgatgttttgatgatgatcatgatgatatgatgcaattgatgcaaatgggcttttcaagattaaattcaagacaatacttcaagattacaagtcacagcatcaagatgatcactattatattaggaagggaattcctaattgaattaccaaaaggtttggcccagtaatttaaattaaaaagtgtttttccaaagatttactctctggtaatcgattaccagaggatgtaatcgattaccagtggccaaatatgtttta

SEQ ID NO: 194505 - DNA, 388 bp, Glycine max
  unsure (1)..(388): unsure at all n locations
gttaagttcttcctgtcgatcanagataaatatgatgtgtttgcatcaacaagtagatatcttatggtgaggctcttggagagcttgcattaactgaaggttgtcattaagtccatgtagtctttggtctctacttcatcacctgcanagccaatgagtggaccggcgtgagggtggacagtgtcgacggagacctcaagtctctagaaagttttctaatacaggatatcaatggaacttccctggtcgatgaggacattggacacgatgaagttttgcatgatgatggagacaaccacaaggtcattctggttcatggtgttgataccctcgaagtccctatctgtgaaagtgataagagggagactttgcatcaatggtgcattga

SEQ ID NO: 194506 - DNA, 426 bp, Glycine max
agctttacagcagattttagtaatgacccacttttctataattaaaataacttaatgccattaacctagggaattaaaacaaactaaatggctgagtgtaactgaaattgttggcaaccaaaagtcacccccaacagccaacaagtcagccaccatttggtctcccaaaaggctgatgcctaggttgccaattgggcccttattacaacttgaactaaagcccttttagttgattaacccaaaacatatttttggtcagccaactttacaaggattgggccattatttagacaaactaaacactctaaaattgaaataaagtggtgtcatttagtcctccatttgggccatgatacaactcacaaccttggacttttctccttgaaacttgggcttgtattcaaatagtatggacagcacttgttg

SEQ ID NO: 194507 - DNA, 447 bp, Glycine max
  unsure (1)..(447): unsure at all n locations
tactcaagcttgcttgcggagcttctatggaggatggatctttgagcttattgtggtccttcaatgggtgattttcaccatggagatgcagcggaaggcaaaggagaataggagaggggaggcaccatccactatggaataagccaaggaagaaggagcttcaccaccaagaattgccttggataagaagcttgaagaggatgctctaatggaggaaaagaaagagagaaggggggagcacgaaattgaaggaataaaagagggagagaagtggaactttgaagtgtgtctcataagactctcattcatcanagttacaacaagtgttacacatgcttctatntatagactaggtagcttccttgagaagctctcttgagaaaacttccttgagaagctttcttgagaaaacttncttgagaagctagagcttagctacacacaccc

SEQ ID NO: 194508 - DNA, 423 bp, Glycine max
  unsure (1)..(423): unsure at all n locations
agcttaagcagtgatcaaacttgctctttggatctgtgtttgtgaacatattagccggattgtgcaaagtgttgatcttatgaactttgattcttctttctgaccgaatgaagtgatatctaacatctatatgcttggttctatcatgatgaacctgatccttggccaaacatatagcactaaggctgtcacagtagatgttagcatattcttgattaattccgagatcatttatcagacctctcagccaaattccttcctttgcagctntagtaagagccatatattcagcctcagtagttgagagggcaacagaaggttgaagtgttgccttccaactcaccaagtagccaccaagggtgtaagcataccctattagtgaccttttcttgaccagatcaacagcaaaatctgtatcagaat

SEQ ID NO: 194509 - DNA, 413 bp, Glycine max
  unsure (1)..(413): unsure at all n locations
taacttcatcacttttccatgccctagcttacagctctttatttcaagtaataaaacctgaaatcctcaataagctaaaggccaagataagatataagtgaaatagcagagacagaaatggtcaacatacactatactggaaaaatactgtgtctggaacattaacaacaacttcgaagagattcacaagtaaaggtaagtgttttcctgtggtcccaaccccattcctactgataatagaatactttgtagcagtcatttgttctgtttccatattatgtggcacatcagcatgtgattgagatgatgctggaggctcancagcttcttcattcccaggaatttcctccatcattcctctcttagctacaaatgacaccgtgaaacatgaatcacaaaaagaacagaacata

SEQ ID NO: 194510 - DNA, 174 bp, Glycine max
agcttcccatgtgctaggctataaatagaaacatgtgtaacacttgtcataactttgatgattgagaaacttgtgagacacacctcaaagttcaacttccctccctaatctccttcaattcccatgcccgaccccccccccctccaccctctatgttgcaaccctaccccctta

SEQ ID NO: 194511 - DNA, 402 bp, Glycine max
  unsure (1)..(402): unsure at all n locations
tcccgttcacaaacactacaaatacattgcaaaaggtcttaattaataaaaatcatcaatcacaataattctagacaacgtctatatatatgatgccaatggtacaaggattaatgtgtttacataccaccatctttttctttggctgccacacagaaatcttgcagaggactatgatcatatgcagagacaagagaggatgtcaaagccaagatggcaacaaggaagtacacaactttcattgtttttccttagtaatacactcttaaacaattgtgctatatgtaattgcttgtgatgattgaatngtgatttatgtagagcttgcgtgatgctatctataagtatgaagcattgaattggntngcattttatcttgaccgtaattgattatttatttga

SEQ ID NO: 194512 - DNA, 405 bp, Glycine max
tcagcttactcgtggcttctatgagaagagtgcgtatgatgcttctttgagaagctacatccttatctatccatccctctattaactaaattaccttccttaaaaataagtactgatgaaaataacgcaacaaataatcaaacatcaaacataattactaataatatataaatatatatatcagggtgttacacctcattttttgagacgctcgaaattgaccagtggacgctctctagaaattataaatgtcataaattttcacacggatgtccgatcacgcacattagacatgctgacgctcggaaatataatacggatttcgagaaatcagatgggatatacttcacacggaggccgattcagcacatcacttaggagacgcccgaattgatcctctgtgat

SEQ ID NO: 194513 - DNA, 288 bp, Glycine max
  unsure (1)..(288): unsure at all n locations
atagaataaacaatggccggtggccgtcgttatattggcccgactgatatctttcacgcgacaatgcgccaattcttttacaaacgcctagcgataatggttttntttttggttttacgggaaaagaagttttttggtttggtgttgcctacaaaaaatacaatgtaggtcggctaagtttttccgtacgagctcaaccgatggttcgttccaccgacactggcatgtatttcttctcatatatgaggacaagacaacgttggcccatcccggacaaaccaaaaaaaa

SEQ ID NO: 194514 - DNA, 421 bp, Glycine max
gcttatatttactgaagcaatattttttgtttacatgatacaagcgtaaactacttaaccttattttgcaaaaataaacgaataaaatgaaggagaaagggggttgaattcagctcacccgtaattgacacgaaccattgacaccctccttaagggggtctgaataagttttcacatggcattaggaataatagaaaacaatgtatatacatgaaaataaacgtagtgtaccaagccagaagcaaaaattttaagcgtccaacacaaacaagtactgaactgtagtgaatcccttcgaaatcccactcaacctcgggaatggactcaatggtgctcaccactttctcaattcttgaaaacaacatcagcaaagcaaaaaacgcattctcgttttatttattctttcgaaagcgcaagccaa

SEQ ID NO: 194515 - DNA, 303 bp, Glycine max
agacgaagtaagaatgaatccttctttctgtgatgataatcgccaacgtcgattctttaaaaaaataattaagagagaatagcctatggatctacagcgtgaatcaaaattagagtgatataatatattatgcgaaattattttaccgggtgaactcttatagataacgacgatctatgcttgaaaagctgagacctctatatactatgtgactcttgatgataaaattattgtatacgatttaacccgtttttatataataatcgaaactttcgttgtctaactattgcagaaactggatct

SEQ ID NO: 194516 - DNA, 413 bp, Glycine max
  unsure (1)..(413): unsure at all n locations
agcttcttantcatgcacaacttggttgttatactccttcttccttggcttattccctagtggatggagtctcccctctcctcttctcctttgccttccgctgcatctccatggtgtaaaatcaccattaaaggacctcattgaagctcaaagatccagccttcgtagaagctccacaagcaagcttccatcannnngccccgattacaacatttggtaatcgattacactctcgnngacagnttgtaatcgattacagtatngtagtaatcgattaccagagaacattttatcaaaacttaaatgctggaagaaatcttatggtgaaaggatttgagagggggtcaaaatactttatatgtaaaaactcttatatgacaataaatatatataatgtaatagatttttgaaca

SEQ ID NO: 194517 - DNA, 293 bp, Glycine max
ggagccccaaattgcatgacgaataaaggagatgagttgaaccttgagttgtgtcttacaacgactctcattcatcaatgttgaacaagtgttacacatgcttctatttatatactaagtatctctcttgagaagacttcttgagaaaactatcttgataagcttcttcgagaaaacttccttgagaagctggagcttagcttcacacacccctctcataactaagctcacctccttgagaagcttcctttagaagattcctaaagaagctagagctctgctacaccatacct

SEQ ID NO: 194518 - DNA, 369 bp, Glycine max
agcttatcggaagtgacctggcgggtatggtgtttgggcatggcgaagggaggatggcaggtcggaccacttgatagggatctcgggtgcaaaattaatgaagaaacgaaaataaattgagataagtttcagcctccttcattcattccacttattacatatttatactgaattttcactagattttgaatacaaatctttcataacagaattggttttggcgcctaaatgaattagttacttagtggagtgggtacttagtggaatctatttcacgagctcatgtctcctaactcccttgttgatggctttggtgctttttacatgaagtcttgcaggtaattgggcttccttgcaatcgactttggc

SEQ ID NO: 194519 - DNA, 498 bp, Glycine max
  unsure (1)..(498): unsure at all n locations
tcagcttgtcccaaagcanattatgcattgtctagatctgcttacggtagatggctagaaataactctatatatatgattaagaattgttactaaatcaaggtggagattgttggacaaaaagaagtgtttggacaacactacttgaaccatccaatctagttctcttctgtatggtcgccaatgtctatttggtggcgctcatccaattgtgctgcaagaagagcgtccaatcctcttagttatttgttagatggtttagataacaagttatgtttgtaattgtttttggttagttttactcttgtataagggagctacttggaaacacttcgtgagagagatttttgaaccctttcattgtattatgttnttcgtcagtgattacctacacaatgngtgctacatatctttttttcttttcttctatgataatcttttccctattgttgggctgtacgcatatccatatgacagtaattctgtactgttttctgtc

SEQ ID NO: 194520 - DNA, 424 bp, Glycine max
  unsure (1)..(424): unsure at all n locations
agcttatatattnttatttgagctaattataattaaatatcataaactaatatgtacattattttcataattttttaaaattaatatttatgtccaaattattttcactctaattatttatgcaaaattattcataaatacattaataagcacttgttttgtttaattaattataataacattattttctatatatcattagtaaaaaaattattaattttttaaaattatcaaaaaatatatattaaaaatattaaataaataaataaataattttagtcttacgtaaataatcagagtaaaaataatctataataacttgcaacatcacgcgatataatataaaattaacaaaaaactatttgatattaattattgtttaatttataaattctgaaattcgaagaaataataatttctaact

SEQ ID NO: 194521 - DNA, 408 bp, Glycine max
  unsure (1)..(408): unsure at all n locations
tgctagtcaagtnggttgattcctttgcctattggntgaaatgtggtcaggaaactcttcaacaaataggaagtcttcctgctccgcctttggcattgatgcaagtcaaccttgatgagaaagaaaggtttatggatctgatggctcataagagtcttaacaccataagccctagctcagaggaagtgaggacttattttcggaaggaggaggttctcaggtactcaattcctgacagagccttttcatatactgcagctgacggtaaaaaatctattgtggcacctttgagaagatgtggtggtaagccaacatcacaagcacgagaccattttatgttgaaacgtgatcgcccaccacatgttacgaatctctgtctattaagagatgcttgcactagattacctg

SEQ ID NO: 194522 - DNA, 340 bp, Glycine max
gatcttaagcgacgcggctgcagcttaggggggagtctttctgttctgatttattcaggggaccctttctccaagtattgtattctttttattacaataaaaaagctcgagataactctttgacatgccaaaattcaacttagtcctgagtttttaacttcacgacccgtcagataaaagatataattgaaagacaccattcaacaataagtagataagctccaccaaggatatcctagtggctaaaacgaactcccgggtcactaaagcaaggccaattaattattaatatagtatgcaaattattatgtatttcttacaaccgtcctgaacgaacaaa

SEQ ID NO: 194523 - DNA, 446 bp, Glycine max
  unsure (1)..(446): unsure at all n locations
tgcctataaaatcaagccaaacaattatctangatctcaatattaattcagatggctcactccttaattgggatcgacaagcttccttcaaatgaatctatgaatgttgatgttactctttcttgcaggaacccattaacaagcataactnttggcaaacttgtgttataatagaaatgtgcatgaatctgttatatcccactcagtacacataagcaaataaaaataaacccaaacaaacctttgttagtctttaatttctagttataggaaagaggagtttttaaagaatggaggaaaatttgagcagcttcgacaactcatnatattctcaagcatcatgcagtaagaaattaaacnaattgttctctattttttgatcaattacaacatatggctacaactattaactcaaccatcaatcacacacacatataaacatgaac

SEQ ID NO: 194524 - DNA, 421 bp, Glycine max
  unsure (1)..(421): unsure at all n locations
agncttcaacaagtttcttgacaaataactattttgaagcagaaaactagcaagactacccatcatatcttccaaaaccccatacccacgaaatttaagagagaaagaagtccacccaaacctgaattatcgaagtcccactcgtagccacgcacttcacgaccccgaaaatgccctcctttcgcgatttggggcagaaatgatggccaaaggttgaagctttgcttggagctttaatggagaatgaagaagaagaatatggcaacgtgagggagagagagagctgtctgaaaagtgtggtgggggctgagtgaagagagagaaaagcttcttggttttaaataaagggtgttctctttttctattattttattcaagctctgccacatgtccctatttgagtggagccaaaagggcccac

SEQ ID NO: 194525 - DNA, 329 bp, Glycine max
  unsure (1)..(329): unsure at all n locations
gtggtacctggagatatgtcgtcggggtcaagagaccttgtggacgtcaagtggggtgctatagcccaaaaccaatcttgaccaatcccgacccaacccgggcatagtcggtcagtgagaacctgtgatgtacctaaacaggcgagcttctggcagtctacagattaaatgaacatagaccacatagcaaggagacttgtgtggtggctggccagctgtgaaacttgatntgatatatgggttatggcctctggtaatcgaattaccaaggtgggtaatcgattacaacgcttatataatgaatacaggagactaatatggtctcttgt

SEQ ID NO: 194526 - DNA, 406 bp, Glycine max
agcttggatctccttatagtagggaatctatccttctttttttggttccaaacccagccaccctcattaagaactagctcttttcttcctctattgcctttagtagaatacacctttgtttggttctctatttggctcttaaccctctcatgcaacttctttacaaattttgacctatattccccttctttatgtataaaaaaagtgtccagtgggaagggaatgaggtctaacggtgttaggggattgaacccatatacaacctcaaaaggggactgcttggtggttctatgaacccccctgtcttaggtaaattttacatgaggaagatactcttcccaagacttatggttgcctttcacacgaacccttacaagggtggatatagacctattcactacctctg

SEQ ID NO: 194527 - DNA, 411 bp, Glycine max
  unsure (1)..(411): unsure at all n locations
attgaactgtgtacaatgtaaataatttgtttcgcattctttacactgcattctaagcacccacgggtttgagtaaaaaaaggggccctatacccgggttcatgggaatttaacgagtggaggtgaatctatcatcatgctaggtctccgacttgcttgataatagtgaaacctcgtctagagctttctctctatataatgtgttgtcgctggtattccataccgccacaatattattatcttgagtgatgatacctctagagaacagccgtgtgagttatgaattgttggggagtagttattagagacccctagatattgtcctatangttcccanataggggcaaagagcaaacacgctccgtgccattcgttctcatgcattgtttggaaatagcactagcttatagt

SEQ ID NO: 194528 - DNA, 288 bp, Glycine max
gatcaagatggaaacattgtttttacgataagtcaacgcttgtcagaagtcttattagaagtatgacaatacatgtgttctcacttctggagtatactgctatgtcttgtgggagattgccaatattctacctgtctagtgcaccagggagtcaagtatagtactcaaacggggttaactgagttttgaactcagggaacttgttcatttgataaatgtttgtttaataagcaagccattgctaacagaacatatgattgggaatgaaagtcaaagtatgttctattt

SEQ ID NO: 194529 - DNA, 416 bp, Glycine max
aactgtggcttgcaagctttatgatgatgaatcaagattgatgcgatgtattttgatgataacacagatgatgacatatagcccaatagaatacttgagactgatttcaagatcacgattctagatttaagagatgtttgatttcaagatttaagagatgatgaatgcacggttcttgaaaagagatcacgaatacttctcatgggaagtattgtaaagatttttcaaaataacaaatatagcacagttttatgtatcaaaatagtttttctcaaaatcttctacgttaccagagttgttattatctgggaatcgattactacgtggtataagtcgaataccaggtgtttttaaaacgtttaaattttcaacatacaaattgagaagtcacttctgttaatgtgtaatcggttaca

SEQ ID NO: 194530 - DNA, 255 bp, Glycine max
acacactccctctataactaagcctcacctcttgagaagcttccttgagaaactctcttgagaagcttccttgagaagattcctagagaagctagagcgtagctacacacatctctctaataactaagctcacctccttgagatgagaagctagagcttagctacacaccctctataatagctaagctcacccccatgccaaaatccatgaaaatacataaaagaaaagtccctactaccaagactacttcaaat

SEQ ID NO: 194531 - DNA, 371 bp, Glycine max
cctcaccaccaaatatctgagcaactccttctccaatatttctatgagggacttacctacatgaagaggagtatgattgaagccgccattggtggagctcttggtgatatgacccctgttgaatctaggaacttgattgagaagatgacttccaactccaaacaattcattgcaagaaatgaagctctcgtccttagaggagtccatgaagaggccaccgattcaccttcatctactgaaaaaaacagcttgaaggaaaacttgttgccttgtcaacctattaactcaacttgccatgaatcttagatctgcacccgtcgcaagagtctgtgacctatgtcttttgataacaccatacagatctttgtcct

SEQ ID NO: 194532 - DNA, 387 bp, Glycine max
  unsure (1)..(387): unsure at all n locations
cttttcgtttaaaaaaaaaaataggggnttcccttattttttcaatatattattcaagctctgccacatgttcctatttgattggagcgaaagggcccactttctctctttgactgtgacccatactcaatcnnnanagtgagaaaaatctgacctttgtaacgctaatatcctgcctcagttggcgtgacgtnnagctgatccaccttcatccgattctttgcgaacaccgatgccatttttggagatcatgcatatataatcataacgctccagataaaccccgaccgggttaaaagatgtttcttaaataatatccacccaaaaaanaatnatactattattcgactacccaacctccatatcccccctccccccccccccccc

SEQ ID NO: 194533 - DNA, 426 bp, Glycine max
  unsure (1)..(426): unsure at all n locations
agctnttaactaanctcttttgtgtttattatgaatgcatattaaaacaacatcccaaggcatatgaaaacaagacttcattacagaaacgtggatagcaaaaataaggaatcacttgcaacattgtctaatggtaaattcttcacctacatgttcaccacgtataacaactttgtcattcattgattgtttttcgcctgtaggaaatatgacagttgcaaacatattaggatttctaagaacattcaaatgattggaagtagaagtatattgaagagcataaatgcacaacaacattctgctccatttcattcaaaaactccctaagtatacattattttagttaaaaatttatagattatttcaaagctccctcaactaaaggtaagtctttgacagacacaggatgtgttcaatgtatttgat

SEQ ID NO: 194534 - DNA, 371 bp, Glycine max
  unsure (1)..(371): unsure at all n locations
ntcttggatatctcgcccaattaaatatttttgccgggtcttcgatcatgatgtacaccgatcttagacaagccattcatattgccaagaagaattatcatcatagatctaattctcaggctcaagatggtcagtggaattctctgtctcaagatgataattccatgtctcaatcttgagctgccaattctgataagaaaatccccaacaataattgagtttcataggttgcattaaacatggtggagttgttgcagcattacaggtttatgttgaactcatgaatgttgagtttcatacaagtccatcggatgtggcattcgtacatgaaagaaagaataacgaatgaagaaagtatatttacacgatga

SEQ ID NO: 194535 - DNA, 423 bp, Glycine max
tgcaagctttcgcaattttacggtaaaatctgggtttcttttcatggtagaagtccccacagaggccattgcctccctcgcccaatattatgatcagccgttgaggtgctttacctttggggacttccagctatcacccatggtggaagaatttgaagagatcctaggatgtcctctagggggaaggagaccatacctcttctcagggttctatccctcattagctagaatttctaagatagtccaaatttcggcgcaggaattagaccacagaaagcaagtcgaaaatggggtggttggaataccgagaaaatatttggaggcaaaagcaagaatcttggcaggtaaaggcgaatgggccccattcatagacattcttgcactattgatcttcggaggagtcctctctccaaatgtggatgg

SEQ ID NO: 194536 - DNA, 335 bp, Glycine max
  unsure (1)..(335): unsure at all n locations
gaacgtcgaagaancggttgataacctttgcgaaattcttcacgaaaacgttacggaaacgtttcggaagcgcctcggcttacaatatttttcacggaaacaattttcccaagcatattcgaaagagagagaagtgccaaaggggctgaacccctgtcttcttgccttcctcgcctatttatagcanaataggggaggtggttgccgcccagctcgcccaggcgagcagggttgcttcctccataagcaaccgccttctggaggaatattccggaaggcccaagtgggcctgggtgctatttgcacccccattnttactaaggacacacccctct

SEQ ID NO: 194537 - DNA, 410 bp, Glycine max
  unsure (1)..(410): unsure at all n locations
agctattcctctggatgctctgcttttgtttctatcattanagaaaaagagaagagattaaagtcttcattcactgtctgcatgcgaagagtatttctccctccacagacaatcccaatggtgggtgtgtgcgaaaataagttctgaacaacgtgttcaaatttcacaatgatccaactgttaacgattctgagctcatcgttttactaaaacaggtttggatgtatgcggggaaaatagagggtgttatgagagggagaatggaaaaccattttgtgaggaatacacaacgtatatacgtatcgctcgtctaataactgacctaaaatgtctctatctatagttagggtactctcagactattatctactctatttatgtcgtctataaaaaggaactctattttattt

SEQ ID NO: 194538 - DNA, 250 bp, Glycine max
ttatggaggggataggggtccatcaccaacgggtgaaccctatgtaataaatggagtaacgagtagtgaaggtgtcgcatggattatatatgtaatcctagggtgtgtaggatcaagacttatctaagacatgtggaccttagattgcagataaagatagatgctttatgctggaaaagtaatttcgtactaggttatgtgtttaatgcgatggaaatgatttatttgtaaaaatattaatggttatggt

SEQ ID NO: 194539 - DNA, 316 bp, Glycine max
gcaattgcatctaaaaacacacgctcacacaataaaaaactactccctcccacataccaacccagatatgtaagtcataattaactgaacttatgagcgatatcattgtaaatacataaattttctaaaacagagaaaagcatcctgagaaccatgatcttctctgattcttgagaggtggttggcgaatttagccaaccaaacaactcttggataaatgtatagccattctccaaataagatgaccatttaaaaagaacagaacctacaacaataaggacaatatcctctaccataaaatcctcacctacctcga

SEQ ID NO: 194540 - DNA, 221 bp, Glycine max
tcaagtgtgttgatctctctgctgactactattatatgtgggttgagccctctatctatcaaatctgagcgacccaagtgagtgacaagctgagatggtttatgaacggatccttcaacgatgaggtaatggcgcctcgataaacgtgcaattatacaattgatgctactgacccgcggaggcttgtaaatgatctcacactgcacgatgtctctccaccc

SEQ ID NO: 194541 - DNA, 446 bp, Glycine max
  unsure (1)..(446): unsure at all n locations
tatatgtnttgaacctttgctgtctttaattagtgatctttattgacaaagctaatagatntaccatcaggtcagaccatggttaggtaaagatgtttctaaaattaacgactctaacataatttctcttacaacaaagttcttctagttcatgttgggtataaactttatatatattggacaacacaaaagggctggctcctcactatttaataatctataaacttaaataaaaaaaaagtcattgagaggatttgaaaaataaggaaacaaaaagtaacaaattaaattatgggataatcatttccaaatgaagataactttcttatgacctcatcatatgggtcatcatacaccttttgcctcacctncttctctctatatttcactgactgacccccacctcttcactttcttttttcttctctctcctctattgcgttttc

SEQ ID NO: 194542 - DNA, 341 bp, Glycine max
cgcacaagagctccctcatataaataatggctctggggaaatcattgggaaggtgaaaaatggattctacattgttgtcacacttgtttccaagagagttaaacacattatcgaaggtttgttctaaaatgcgttcttgggatgcttttatgaacaacatgccaacgaaaatgttatatattttatggagtttggagtggccaaacccaggatcctctcctatcattgaccacagtggttgagcgaacttttgtgagccaaccatatgcaaaagaaatcgggtaaatgtcattcatagcataacccccatccaccacatcctgtggttcctgtctagatga

SEQ ID NO: 194543 - DNA, 454 bp, Glycine max
  unsure (1)..(454): unsure at all n locations
gctctacttcttttttcctcttctaacattaggttggcnaactccttacgagggacctgggaatatactcgtaagatatcgacaatcacactagaatgaggattgaatagtgtgttaatcaaagataataatttttcgcaaataanaacttttatcaccaatctaaaaagatggatataacagtgttgtccactgaataaaaaaacaaggtttgttcgtctaggtaatgaaaaaacaatattttcacaaaggaattttggtaaacacttggtgagcaattgtgtcaagataagcttaaaagaatactccataaaacttcttaaaagagacatagaaacttttgatntatattagtccactcaaatatagctacatccaattttctttacagaactgtaaatggttctactaatcaaaaatttgattacaaacaanatattttgcctatcactct

SEQ ID NO: 194544 - DNA, 328 bp, Glycine max
tctagcggtttctaatcatatggtccattaagtctatcatatgacgacaatagctgaaaagtccgtggatcttctcgggggcggaatatgtgtcccgcattgctttggccctggctatcaatgggggaagatcttgactcctgttcaaagtaagaacaaatcggcccgtccacattgtcgcctcttggtgcaatgaatcaattacccctttccttgcttccctatttgctgatatcttggcggactcaacctctagcccttgctcgagagatcccgataaattaccttctctttgactcattgatgacggcccacaatattccttcag

SEQ ID NO: 194545 - DNA, 434 bp, Glycine max
agcttgccgccacggattatgtcgactgtgctcttgtgtggtggaacaagtctttataggagagagcctgatatgaagagccaatggttgatacatgggcggagatgataaggatcatgaggaagccaaatgtgctggcttgttactcaagggatttgaaatttaagctccaaaaactatacccaaggcaacaagggggttgaggagtatttcaaggaaatggatgtgctcattatttaagcaaagatttgaagaatatgacgaggtaactatggctcgatttcttaatggtttgactaatgatatccgcgatattgtcgaattgcaagagtttgttgaaatggatgatttgcttcacaaagcaattttagtagaactacaatttaaaaggaaaggaatggctaataggagtcctaccaacttgtgtcttctag

SEQ ID NO: 194546 - DNA, 232 bp, Glycine max
taaaaataattcacaaaaaatcaaatcggacgtttttcttttggaagtttccttggatcaattgactaataaccaaagtgaaactaaggctaaaatcaactcacaaatcaagctttgtccgcaaagatcactaaaaaccgttttaaggtccaatgccttaaacagtcctctttgcttttatcggttaacatggaccattccaaaacatgaaatcaacatgtaactctaccac

SEQ ID NO: 194547 - DNA, 360 bp, Glycine max
  unsure (1)..(360): unsure at all n locations
agctatctaaattttctggtttccacaccttgtcttttcataanaaaacaaaagtgtgctattcatcttttgcattcttttctccctttacctgaaagaattcgacaaagactaaccgccttgaattttttgggtctcctttctcccttttaaagaattcacaatgacatagtctgagaattcttttgattcttccctttcccttaaacacaagatttcaaaggactaatcgcctgagaactttgtcttaacacattggagggtacatcctttgtggtataaggagagggtacatctacttgggttgttgaactgagaacaagggagggttcatctcttgtggatcagttcaagtggagg

SEQ ID NO: 194548 - DNA, 411 bp, Glycine max
  unsure (1)..(411): unsure at all n locations
agcttaatagcatcaatcctatttaacaagtcacatgattagcctcctagaagccttctgaccattaaaaggtccctttcttcttgggagtcaatttcttcactagaatcttccccttttgcttcttcactttcactagaggaaggtgaagtagtaacctcatcttggctactataaatgtcttggcccttcataatcatggttttctttagttgccaaacggtcatgtaaaagttttcatgaaaaagccaagactttattcggagagctgctcttccaaacaaacttaaacacagtttcattttaatcaacatttatgagaatcacactagttctaatatgataggctgaggctacacaaaatactcgacaattatatatgctacagtnaacacttgagaaacacacttt

SEQ ID NO: 194549 - DNA, 404 bp, Glycine max
  unsure (1)..(404): unsure at all n locations
agctataaaattgctngatgatctatccaccaattgctttgcaagctgtcccacttggatctcaagattctttacggcggactttgtgctcttctgattggacatagaaacttgcataaactgagctagagtctcttctagcttcgttgtgcgatcatagagactaggccctagttgttgtggccttatggatggtccaccttgatctctattgaattgattttcagggtggttcctccattggccctggtgttgattatattgttggccatgttggaatccagaaaattctcctgcattaaaattgtttctgggctgatttcccatgtaattgacttcacgagcggngtgttcttgaacagggtacaacatccagattcatgagctcctccacagatggtaca

SEQ ID NO: 194550 - DNA, 432 bp, Glycine max
  unsure (1)..(432): unsure at all n locations
acctgcggcatgcaagcttcctcttaaaaaatctgtatactcatcctcccttatctggacgcttttctctctatggagcgaccatcctttgatggcctcgaaacgctgctggtgctccgcgctccggaaacggtggctatcaaaactcgaggcggcactggacccttctgccgcggcgtctctcctaaacctcttcgtggaaagctttttcggagccatttcctgcgaggacaanacgttggaaagttaatttacaaggaaatgccattttaaagcaaaaacggcatactaatcttttcgacttagaacaaacttgggcacacatttccctgaagaagaacatttatgaacgtgcatacgcgcaaaatatcctgctatctatatcaatatacaaggatattcaaactatctagctcctatatcccaacatat

SEQ ID NO: 194551 - DNA, 457 bp, Glycine max
  unsure (1)..(457): unsure at all n locations
agcttctataatgttgcattctactaatatatggatttttctactgctncgcctgagtatgacaactggtggaccataacaatgatatcgacggtaaaggacaacaatcttttaaattaatctgtcgtacatgcaaaaataaataaacatcaactcaatcgtacacaactgatttcataaatataaaaaaatttatatctacaatgtacctgaataaaatgattgtcattgacgtgaccgatacaaattatgcgatgcaccgaaggatctcccggtggttgacttctaagaggaaagaacatcatgttntgttggggagacaaggatacaaggattacattatatccttgatgcaattatatatcccatgtcggttatatccatccacttatccatagtgacctgaatgaaacaaatatagacgtcaaagtttattttatatgtaagtcttaaaaat

SEQ ID NO: 194552 - DNA, 419 bp, Glycine max
agcttatactaaaagaaccttaaaataagcttaattaacctaacaaacttattaactcagtaacctggtttcttcgaagtgagatcaatgtcgttcttcacgaagtgccagttcgagtcgcgaagttgcactactaaaaaaggcagaatctacatcggtgattctaagacagttctaaacaaccatcttagaatgattggcggtggcatttttgttataaatgcgaacataacaacgacgtttgtagttgaccgtctttaaataatgtgtaaaggtttaaccaatggcaaagttgtaaatttttgcttttatacaaagacgggttttaaataaaactcgtctttgttcggtattgatttactttttattattgacttgcgagctcagccccaatttaggtcacaacgactcatgatact

SEQ ID NO: 194553 - DNA, 388 bp, Glycine max
agatcgatgaagagactagcccaccttttgcccaactaatccacatttcacaaaatatcatcatcctcatcatataaaagaagaaatttcaacacacaagagtcataagccttctcaaaatcaactttaaaaatcaatcaattcttcctcctcatgtgtgtcccatcaccacttcattagcaacaagtataccatccaacacacaccttccttccaagaaggcacattgtctttcatcaatgattttatccaaagaagagtgctagtaatacactctttaacacaatcttccatacgcactctctcttattggtaaaatatataaaaactataaatcaggagagaaatcattaatagatggaaaccacttaatttggatttctataaa

SEQ ID NO: 194554 - DNA, 392 bp, Glycine max
  unsure (1)..(392): unsure at all n locations
gtgtgacaattgagtatatgtttgaaaattatgtaaaaaaagtatgtttaagacaaagatatnttttttgtaaaagaattaaaattattgcttttactttactcttatttttatttgttgaattacattgaaacacacaccatggtaatttaaactgtaaataaaatatgtactttattattcgacccacttaaccccaaatcccatgaggacactattgttaaagcttgagacaaagtcgaacccgaataagagttgaatgaagctcaaggaaataaaaaattcacaatgcactcgtatcaaaaacctcaccaattaagattaatcatcgactgagattcttcaataaacttctttaaaaaaaaattatgaccttctctcgtcattggctt

SEQ ID NO: 194555 - DNA, 420 bp, Glycine max
  unsure (1)..(420): unsure at all n locations
agcttaactcatccaaacatggcaagttcaacatgctttcaacaaatnctttcacaaataatcatcatgaagcagaaaactagcanaactacccatcatatctcccaaaaccccatacccacgaaaatcaaaggagaaagaagtccacccaaacctgaaattttgaagtcccacacgtagagacgcgcttcacgactccgaaaataccctcctttcgcgatttggagcagaaataggcaccaaaggttgaagctttgttgggcaacaatggtggatgagaggagaganaaaaaacgctgcgtgagagagagaagagagcttctgaatttttctcttggtgagggaggagagaaacagcttttggtttttaaaaaaaaaaggttcctcttttctattatttatttaagctacccacatgtc

SEQ ID NO: 194556 - DNA, 389 bp, Glycine max
  unsure (1)..(389): unsure at all n locations
cacctattacntaatatttttgttgaatttgcagattctattttgattttaacatgacttatgtgggagcagggatgatttgcccccaccttgtaaatttgtctttgctccttggagccattctctcctttggagtgatatggccgctcattgatcgtcgcaagggagattggttcctacccatttagatgagagcaacatgaaagctttgtacggctacaaggtctttctaacagttgctctcatcctcggtgatggcttatacaactttgtcaagaatttagtttcctcaatccttagcgtacatgaaaaaattaagaaccgtanaaatggtatgacgtacatgtcaattcccactttctttttggatatttagtcatgaaaataca

SEQ ID NO: 194557 - DNA, 457 bp, Glycine max
  unsure (1)..(457): unsure at all n locations
agcttgttggatatgaaagtatctgaaaatngaatgtaaaagggcgattgtttttgtaaaacctctatttttgacaactttaaaattgttaaaaataaagaaatagcctcagttttggtcaattggatatctacccggtacccatgtgagtatactctgctaattaggtctcgcattagaaaattaattgtcacctttcaccttttctttctctataaggataggccgtttgtcaacaaggagtggcagtttatatcaaggagtggcagtttgtcaacaaggacattggagtcaagaaaccaggttagtgaaaaaattaccttcttttagtcaaattaaggttgccttagtgttcaacagatgtcgtgggttcgacataacttaacacttgtttgttgttgttgtttggtaatggtggttgcagggaaaatattcnaacaacaactgatacatactc

SEQ ID NO: 194558 - DNA, 470 bp, Glycine max
  unsure (1)..(470): unsure at all n locations
gtcacctgcggcatgcaagcttcaacatcagaccacttccaggtgctggaactacttcacatggatttgatggggcctatgcaagttgaaagccttggaggaaagaggtatgcctatgttgttgtggatgatttctccagatttacctgggttaactttatcagagagaaatcaaaaacctttgaagtattcaaggagttgagtctaagacttcaaagagaaaaggactgtgtcatcaagagaatcaggagtgaccatggcagaaagcttgaaaacagcaggttcactgaattctgcacatctgaaggcatcactcatgagttctctgcagccattacaccanaacagaatggcatagttgaaaggaaaaacaggaccttgcaagaggctgctagggtcatgctccatgcctataatctctgggctgaagccatgaacacagcatgctacatccacaacagagtcacact

SEQ ID NO: 194559 - DNA, 420 bp, Glycine max
  unsure (1)..(420): unsure at all n locations
gcaagctgtgtcttcaaatntactttgccacanacatttatctgctcaaataatttcgatatggtttccatcttcttagttatggtcacctcaacctcacataacccttgatctgaaaaactaagtctacgcaaaaaaatgtggattgtctctagtggtatggagcaaacaacatatttagacaactcacatgcacatggaagaccgtgggtagtccttatgacacattcacaacatgaagggtttttgccggcataaggtacatgctcatactcaacaacaatttcatttaaaacataccttgataccatgccaggtagttttttgtacatggtaactntaaacacatgcccaaccatgtgtgtacttgtcctaaaagatgctctaatttgggtgtgtgaagtggatcatgttttcatt

SEQ ID NO: 194560 - DNA, 440 bp, Glycine max
  unsure (1)..(440): unsure at all n locations
agcttattaccgatnaaccttttgttattactaattattttccccatggtgcagttgagattaaaaatgaagttaccggcaaagtcttcaaagttagcggtcaccaactcaagctttttcatgaaagccctcaagtgaaaaaggagtttgtgcagacctctctttagtcttgccaattntacgtgatgatgtgccttgaatggcacttgaggagtatccttctcccttctttatatgttggctttttgtttgcatctcattgcatgcttatattgaggacgatgtgcactgcaagtgtgaggggaagggtttagaanatgaaaaaaaatttctttattttctattttttctagctgtagcattttgtttctatttgtttntatggtactgaatttgtttttttacctgtaagtggctcgtatttctgctattttatattg

SEQ ID NO: 194561 - DNA, 474 bp, Glycine max
gatccttaagtcacctgcggcatcaagcttagttgataaataatccaaaaattcaattttatgggtgttaaaaagcataacaagattttctgtgattggtttaaagatacaatctttgtagaagagaatgcttcagaaacattaagaaatctagcagatgggtctaaaagaaatgttataacttggcaaggatacgacataaacaagtattcattttacacaaaagcacaagatgacaaaagtacaatgcagaacagcggggtcaccctaagggctgaatctcaacactttgcaagtgtcaatgacgccaatccctgtgtagcttccatcccttactttgggttcattgatgaaatttgggagcttaactatgtgaaatttacggtatgtgttttcaatgtaaatgggttacagcaacaccggtgtgtgcaccgatgatataggaattatgctggtagacctaaagaaacttgg

SEQ ID NO: 194562 - DNA, 426 bp, Glycine max
  unsure (1)..(426): unsure at all n locations
agcttagtcatccttttgagtgactcatgacaaccttgtgtttactttaactgttattcactataaaacttgtcttttctaaatacacataagcaaactcatcagtaggcataaactcataagtcttattgtttgtgttcaaaagatttatcataattaaaacacaaatagttttagactcaacactacctcggttggtgatgataagactcactcacacttgtttagagacactgataatttctcctaaaattaattagaaatcttaaatgattaagatttcacaatttattcgataaatttcacttatattttaatagttttcaataaactcatgagagtccatctaatggttgggactntagatagtatacatgaaatcttcaattcaaattttgctggtggcattatacatgaaaaaaaaat

SEQ ID NO: 194563 - DNA, 432 bp, Glycine max
agcttctaggtgaaagaacaggactaattagtttggtttctatggtcaaagagcatagaaccgaaaacttgactgtatttcttttttcccctctttaggagaacttagttcttaataacttttctccatgatgatgttcattttataacattgtgcaagtagacacaacaaatagacatacttacatatgctattagatacaaattcacataatatgcaaactatacatagctttattcccctagatacataatgccaacacagaatagaggcgtgtgaacacacacaccacacacacatattcaaattccagttagttccaaccaagtattatgtagtacaaagatgggaatcattaccccatgcagatattgatgaagtgttgcgaatctccagataaaggagctcccccacaaagcataaaccggagct

SEQ ID NO: 194564 - DNA, 420 bp, Glycine max
  unsure (1)..(420): unsure at all n locations
agcttaatatatcaccctgngcaatntatcaattttctgagcaaggacagcccccaatgcataatntgatgcttcacacataagctcanaaggggctgtccaatcgggtgcctggatgatgggggtggtagtcaacgctcttttgaggcaatcaaaagcctctttgcatctgtcattaaagtcaaactccacctccttttgcaacaagttggacagtggaaaggctactttgctaaaatcccttataaagcgcctgtagaatcctgcatgaccaagaaaagatcgcacctcttgcacacaagaggggtaaggcaattgtgaaataacaagaaattttgcaggatctacttcaatacccttattggaaataatgtggcctaaaactataccttgctcaaccataaaatgacatttttcaaa

SEQ ID NO: 194565 - DNA, 435 bp, Glycine max
  unsure (1)..(435): unsure at all n locations
agcttgcccatagaaggagtccacggaggaaatgcttaccacctcanaagactggaaagcggtttctaatgactcctctgtggcttccacatcaggcatagaggatgggcagctcaccaagatgtcttcctcgcctgatacgatgaccagatgcccttccactacgaatttcaacttttggtggagtgtagagggaacaactcccactgagtggatccacgggcgccccaacagacagctgtagggggggttaatatccattatttggaaagtaacttgacaggtgtgagggcctatatgtactgggagatcgatctctcccctaacctctcggcgggtgccgtcgaaggcacgaaccaccattgaactcggctttaagtgggaggcattgaatggtaatttctccaaagtgctcttaggcatcacgtttaaact

SEQ ID NO: 194566 - DNA, 395 bp, Glycine max
  unsure (1)..(395): unsure at all n locations
agcttancacttctgaggggttcaggactntctatcagctctgataaatctgccatatactcagccggtattaggcctcatgagctttctcatattcagcagcttactggatttaacttgggtgacttccctttcagatacttaggtgttccccttttatcatctagattaaatgtatgtcattatgctcccttgctttccaagattactggcctgattcaggatggagcaaaaagtctttatcttatgcaggtaagttagagttgatcagagcggttattcaaggaattgtgaatttctggatggggatttttcctttgccgcaatctgttctggaccggatcaacccttcgtgcccgtaatttctgtggggcaaagcggatattggcaacaca

SEQ ID NO: 194567 - DNA, 471 bp, Glycine max
  unsure (1)..(471): unsure at all n locations
ttaagtcacctgcggcatgcaagctngttaatccatggaagctcctaatatctcctacactttttggggggggtcattcttggatggccttgattttctcaggttccacttggaacccatttctaccaactacaaaacctaagaaaactatattatctacacaaaaggtacacttctctatattngcatagagggtgtttttcctaaggattgaaagaacttgcctgagatgtcctaagtgatcatctaggctcctactgtacactaaaatatcatcaaaataaacaactacaaatctacctatgaaatcccttaagacataatgcataagcctcataaaggtgcttggtgcattagtgagcccaaaaggcatcactagccattcatacaaaccaaacttggtcttgaaagcgttttccactcatcaccttttnatcctgattggtgataccacttttaaaacaattttta

SEQ ID NO: 194568 - DNA, 406 bp, Glycine max
  unsure (1)..(406): unsure at all n locations
ctaactgaatttcatggggggtttttttgtttttttacataagtaattaataaaacatagttctaaaatatcgaagtgtttatccttataagtatgagacatattttttaatataaatattatttctagttcaaattattcactcatcattaagtaataatataaatgaggagtgttaaaaatataatatttagcacatnttttcaaacattttagttaaatatttctttagcttcttaataatatcggaaagatacctgagatnttctttatttttttaatatgaatgacttgtggaatgttccgttgcccgtgagttgtcttacttataaaatgatgaaagggccattctatgtatagtaaatacggttgataacacctttctgttatttatttatgactttaa

SEQ ID NO: 194569 - DNA, 430 bp, Glycine max
ctgcggcatgcaagcttcttagtctcagatgatgcagctgagtttgtttctaccttatgcactcctctaatgactatagcatcatttctggcgctaaactgttgggagttgaaagccatcttctcaattaaattcctggcttcagcaggagtcatgtctccaagggctccaccactggcagcatctatcatacttctctccatattactgagtccttcataaaaatattggagaagaagctgctccaaaatctgatggtgagggcaactggcacataggtttttaaatcgctcccaatactcatacaggctctctccactgagttgtctaatacctgagatatctttcctgatggctgtggttctggaagcagaagaaattttttctataaatactctcttaagtcatcccagctcgtgatggaccttgg

SEQ ID NO: 194570 - DNA, 470 bp, Glycine max
  unsure (1)..(470): unsure at all n locations
agcttaagttgtaggtggagaaagcttgcaaatggtttttatatctaccatacctcttctcatgatctttttggacttgaagtgtagacaatggcgtgggcctattataacatctgctaaaaatcantttttattaaaagagtagggatggtaaggattgaatccttgactgcttaaagtatgttttgggtgagctgtaagcatttacaaacttgattttgaatgatcttgattttagaaaaattgttcttggttaaattgaaatggtttttatgttagaaaagtttttatctcaaaaagtttgtagtataacttaagtgtaaaattttgaactcaacacaaaagctataattttccacttctaggctattgtgcttttaattaggaacaaaatcatgtttaaaacaactggacattcttaaatggggatttgaggctaggttccccaccacaaatccaaacatgctatt

SEQ ID NO: 194571 - DNA, 411 bp, Glycine max
  unsure (1)..(411): unsure at all n locations
agcttatgcacggaaaatgttatttgaaactgagatgcccgaagaaacaccatttcctagttaaccatgcattaggtaccatgttcaattatnttgtttttaagtgaaacgggtttatgatcccaacacggttggctcgtggtgcctaacacatgaaactaagaatgtagtgtgaagtttcacgcttcccccttttttgtttttgttttgtagaggaaaacgcaaggatgagcaaacatgaaaacaaatggtatgcaattttgcagatcaaaaagtttgttgaacgcatatgcatgatgatgccatgactcatgcaaaatgtgaggctggaatatgataatggacaaatgcaggatatgtccattatgatgttatgaagagatgcttatgcgatgcatgatatgaatgcat

SEQ ID NO: 194572 - DNA, 355 bp, Glycine max
  unsure (1)..(355): unsure at all n locations
aattaataatcaaattgtattgataaaaaaatgtgcataaatcaagtacaaacgcttcaaaacatagtaagatcaaatagtaattttagttgaaaatagaaaaagaagggaaaaaaaggcataagaaactaaagttagaagctagatttaagaaacaaattcaaaccctttgaatttaaggtgtgtgagacagaactgaaccgaaggaattgtgactnttgaagagcaaatcaaagtgaaaataaatagaaaagggtgatggttttgaactaagaaatatatacttcatggcatgggttttgaacagacatatcataatcgtcctctcactactagaaaaatgactttttatgac

SEQ ID NO: 194573 - DNA, 453 bp, Glycine max
  unsure (1)..(453): unsure at all n locations
agcttttgcgattccaatgatagaatngcatanaatgatttttatgttcaatggggaaagggcccactctattgacccatctcanagcctcccaccataaattcctagtcattctgcatgagaacatgatgtggccaatatcttcctcttcactatcacataacgggcacctatacgaaggcaaagtgatgtgtctctttctcaagttagccttagtaggcaatctgtttctgaaaattctccaacagaaggcaatctgtttctttcgtaaaattagtcaataataatttaatatgtaatttctattttttaatgtgttgattaataacaatgaaaattctcttacagaaggcaattgctcttggggggattttcagattccaaataatcttaaaagctctgtcgtcattaacagatctgccatcattcttgaggatatcgtaggctgacttt

SEQ ID NO: 194574 - DNA, 397 bp, Glycine max
  unsure (1)..(397): unsure at all n locations
agcttgccacccagctcgcccaggcgagcagggttgcttcctccagaagcaacagcctactggaggaatcttctagagggcccaagtgggcctggttgctatttgcacccccattnttactaagtacacccccctgccttttttggtgattcttttttcgtaaagttacggaaacttacgaatttcgtaacgatacttgttttctttccgtaatgttacggaaccttgtggattacataatcatcccctttntgacttacggaatgttacggaacctcactaattgtgcaacgatgcttccatttgatttccggtgtgtcacggaaccttacggattgtgcatcaatattttcttttgttttccggcacgtcccggaatttcacaaatgctaatgat

SEQ ID NO: 194575 - DNA, 457 bp, Glycine max
  unsure (1)..(457): unsure at all n locations
agcttatntgtataaaattaaatttacttggaatgaaacatggttatcattatataaaaataaatatgatttattaagtacataattctttaattacgtagttgagatattaaagtgttattattaatagttataattacaacatatttatactttcatctcactcatttacaactaagtatcttcagtaataataaatactccattcgtccagttataattgtcatatcagaatacaaattgttaaaaaataattgtcactttagttatttcaatgtaacattagttacttttttcacttatatcccttatatattaatgatgaattataaaatctagaaatgaattaatgatgagttaaggttaattntggaaaattattatgttatttcatagaattattacttttcttgggctgtgtaaaataaattaggatgaataatttttcgggacaaat

SEQ ID NO: 194576 - DNA, 430 bp, Glycine max
  unsure (1)..(430): unsure at all n locations
agcttttatcaatatactcggccttcanttaactgtctctgcgcttggcggccacgctcaacaaagtactttcgacacctactgtacgtngatttgaccaacgctgttatgggaatgttgcgacattccttcaaaaccctattgatacattctgagaggttggttgacatgtggccatatcgacgtccttctatatcataagccatcgtccatttttccttgaaatgcaaccatccatgtcgttatggctggacttagttcacgaaatctttctaaatcttgatcaaaaatgtgcttgcaaggagtgtacgctgcatacaattagctatcaataacaattctaagtatatatggagagtaaataaacgtgaccattaaatatgaaatcttacccaacttcttcaacatttcttctttgttggcgtattga

SEQ ID NO: 194577 - DNA, 414 bp, Glycine max
  unsure (1)..(414): unsure at all n locations
tcacctgcggcatgcaagcttaagaggaagcttcaatggagganaagaatgtttttgagagagggtggcacgaaattgaaggagaaaaagagggagagaangtgaactttgaagtgtgtctcacaagtttcacattcatcaaagttatgacaagtgttacacatgcttttatttatagcctaggtcactaactaaatgaaagcttccttgagaagctagagcttagctacaccccctttaatagctaagctcacctctttgagaagcttccttgagaagctagagcttagctacacacacccctctaatagctaagctcaccctcatgccaaaatacaggaaaatacaaaaatgttcctactacaaagactgctcataatgccctgaaatacaaggctaaaaccctatactact

SEQ ID NO: 194578 - DNA, 464 bp, Glycine max
aagtcacctgcggcatgcaagcttctatggagggctggatcttgagcttcaatggtgattttatgccatgtgagttgtagcagaagatagaagagaagaggtgagaggaggcgccatccactagggagtaagccatggaagaataagcttcaccaccaagagagtgttttggataagaagcttagagaggaagcttcaatggaggaagagaatgagagagagagaaagaaagtggcgtgggaatgatagaagagagggagagaagtttaactttgaagtgtgtctcacaggactctaactcatcaaaggtatcacaagtattacacatgcttctatttatagcctaagcagcttccttgagaagctagtgttacaccctttcaatagctaagctcaccctcatgccaaaatacatcaaggaagaaagcttgcatgagacgcttccttggggaggaagtgttaca

SEQ ID NO: 194579 - DNA, 416 bp, Glycine max
atcaaaatttttacttcttttttcttagagaatggcgaaagaattttttgagctggcatactttgattgctgtacaaaaattaatttattatatattaaaataatttatgtaccaaattttaaatattggtaatccttagtaacaatataaaattattcactaaaacaaactaaaagcaatttaaattagaataattgcctatctcattcattatacaaaagattataaacatatttaagtataaaatctataatcagtgtaatgtatattttattcttaacaaaaattttgtaacaaaaaaaaatcttaacattgcctaaaagtcttaacgtaaataaaagtatctataaaactatttaaaagcaatccagaattaaaactctccttttactgaacctaaagacataaactatgt

SEQ ID NO: 194580 - DNA, 474 bp, Glycine max
  unsure (1)..(474): unsure at all n locations
aagtcacctgcggcatgcaagcttgatgtanatgataaagcttattcttgtattgtgattgaatntgttttattgcatattccttcacctagttagataaactaaaaattaaatactatcaagatacattatcaacaccaattgaagatataactaatattcaaatatataaataaattaaatataattgacctaattgtatactaaccttcatatgtcacctaagctcctcgtacttgaaccttcaacctttgatattattttctccttcttcagcgcaagggaaggtaacttctttgtgtgggtgcttatggttttaattttgacgcaagtaggtggaaggttataggtgagtctctgtagagaacggatcgtttaagagtgggtgagagaggttaattaataatggggaagttataacttccttctttatctaattcattcacataatattttagttggcgaggtggaatg

SEQ ID NO: 194581 - DNA, 354 bp, Glycine max
ttttactagaacaactgaataatggataaatcatggattgatatgccctgaaatacaactgaatatctagaggggttaaataaattcctagattttgcatatgagaaccgctctgtcaatggtgcaataaggtgtttgtgtcctaaatgtcactgcgatagatgggaaactagagatgtggtgtttaaccacttaatttgtaagcaattcccaaaaaattacaaaatctggatatggcatggcgaaacgtataaaacgatggaattaagggacactgaagcaattgatgaaccattacaagacgaaaatccagtgatagatatgataaatgatgcatttgggaacaataaacac

SEQ ID NO: 194582 - DNA, 409 bp, Glycine max
  unsure (1)..(409): unsure at all n locations
gcatggntcatattatattttaagagaaataatttaatttccactacaataataatattattagaatttaatgactatcgatgatagataaaaaataattacaccatcaatcaattaaagattacaagattatatttttataactcttaaagtaatcttaaaagttaataaacttattctatataattattttttattgaataatattataaaattattttaccctattttttcatataataatagtataaaattntaaatggtaacaaaataatattataagaaaaaatggacataataaaaatatcacacattggaatataattattattcttaacaatattttataaaatataaaagtttagaattattataacaattacaatangatatagatatactatttgtg

SEQ ID NO: 194583 - DNA, 392 bp, Glycine max
  unsure (1)..(392): unsure at all n locations
agcttcgaaatgggttttcatgtaacaaattaatatattatcatggtaaacaatgcatacaatatatcatattagttaattngattcattaagtatatttggtttctgatcgtatcccgaacacatttttcttgaaaaaatattagccaaattgatttcattaagtacattattgtttgagatgataaaagtgtctaaatgatgcagtgagacattccaaggaagagcattggtggaagaaacggaaaaggctcaaacagtccctagtggcaattctctcatcccaccatggatgcttcatatctgactagttaggctggcatgattctgccaagtatgtgacatgtgatattatgagcaaggctcaactttatatatatatgttataactt

SEQ ID NO: 194584 - DNA, 333 bp, Glycine max
  unsure (1)..(333): unsure at all n locations
tcgcggatgagtatgctcaagtatatgcggaanaagaggctaaaggaagggtgatcgactctttacaccaagaggcaaccatgtggatggaccggtntgctcttaccttgaacgagagtcaagaacttccccgcttattagccaaggccaaggcgatggcagacacctactccacccccgaagagattcatgggcttctcggctattgtcagcatatgatagacttaatggcccacataattagaaatcgttaggaaacttgtatggtctctcagaccttgactggatacgacttcctttttgaaataaaatgagttggtcccatgtttctac

SEQ ID NO: 194585 - DNA, 355 bp, Glycine max
agtttctttttgagcttaaattatttggagtatcctattaacccggagaatgagattgattaatttccttggtagtgtaccttcctctgtatcatagccagccaaaatttactttgcatttaacagcagctagaggatatatttactacagaagacaattataatgagaatgaggataataatgatgttggtgacaacccggatgctaaaaaagcaagagatgatgatgatgttatggacgaccatcaagaggaagcaaagtacttaccagagggtgatggcccaactgctacagaggtatactatctttctctaagaaatctcgcatgatatgcatcttactaattcatcatga

SEQ ID NO: 194586 - DNA, 458 bp, Glycine max
  unsure (1)..(458): unsure at all n locations
agcttggagaggatgcttcaatggaggaaaggaattatggagagaaagagagaggggggagcacgaaattgaaggaagaaaaagggagagaagttgaactttgagttgtgtctcacaagactctcattcatcaaagttacaacaagtattacacatgcttctatttatagactaggtagcttccttgagaagctttcttgagaaaacttccttgagaagcttctttgagaaaacttccttgagaagctagagcttatttacacacacccctctcataactaagctcacctccttgagaagcttccttaagaatattcctaaagaagctagagcttagctncncnnccctctctaatagctaagctcacctccttgagatgagaagctagagcttagctatacaccccctataatagcnnnnctcacccncgtgacaaaatacatgataatacaaaaaa

SEQ ID NO: 194587 - DNA, 432 bp, Glycine max
  unsure (1)..(432): unsure at all n locations
agcttcgccagccactcaaacacttccccgctacttctaccaacgaaaccaccgagagagcagcgacgagaacaactacgataagccaacaacaaacctgagaactctcgcttcgtcttcaacaagcttcgcctccttccgaattcctcgcatttgaactctgaagttctgaaatccgccgattctgggagcgtcgcaccaatatggagatttacaaaaatctagcgtaggagaatcactgttgcaagattaatcctaggagttaaaatcatgctccaatatggaccatatgttaaagtggtccactgtaataatcaccttatgtaagtaaaacaacttttacttataaaattttcatgcttaatgacaaanaatgtactcttatatatatattttttcattttacttgggattatttttaatctattatcg

SEQ ID NO: 194588 - DNA, 417 bp, Glycine max
  unsure (1)..(417): unsure at all n locations
agcttaactctcattgtcgtgagtttcgtgatgattttgtaagaanacaacganaaacacaaaaagcgaaataaaggcggtgaagttagtaaaaagggggggtgcataaggaatcttcctgagtaagcaaccatcttgctcatctcgcccaggcgagctgggcaacaagcacctcctcccattttgtgaaaatggctttggaggcctccgtaatgcttcagtaacatttccaaaacctcgagtaagcatatttcaatcaagattggtgaaagggaagagaaaaatagaagaaaatcaagtttgatatgcttccgtacactttcataacttttctgtaagtacaaaaaggcgtgtgggtgaattataatttggggaatgcttcatgaagctctctgaggaaccacctactctcctatg

SEQ ID NO: 194589 - DNA, 281 bp, Glycine max
  unsure (1)..(281): unsure at all n locations
tcacatgtagctatctntttcgcgcatataccaaaatctatcttagcaaaaaattgattccgtacttgttaaccgttggatcgtcaaaacattcgaacaccgtgttcggaattcatttggcatatcttcaccgctgggattagtcaaaattgtatgtggagagagaaacgccccttccatagagacagagaaatggaggcgctcgatgaggttttcactgacattgtaccatattgcatatacaattgaggcttatgggatctgtggcataacgaatgtgt

SEQ ID NO: 194590 - DNA, 340 bp, Glycine max
acacctcttcaagacctcataatctttgtgagcatgtgtacactctttccaaagaccataaatttctcctgtgagggttaccctgaagttcattgagttttttaacatgttttgttgaacttcaattttaccttccaaaatgtgaaagttcttcatcaaagtatctcatgtttaggaaacaatttttttttctagacaaagctccttttcaatgtttcaaagcttcactattttgagtagctctcgcaagaactgtatctttatattgtggctttgttaatcatatgaacttggacagttttaacttttcacaagttaggatcttttgaaaatggcagtt

SEQ ID NO: 194591 - DNA, 389 bp, Glycine max
  unsure (1)..(389): unsure at all n locations
ctccctctctctctcacgttgctattgccttcttcttcctcaccttatgaacctccatcaaagctccaaactttgctcaccatttctgctcaaaatcacaaaaggaagcaattttcggagtcgtgaagcgcacctttacattgtgggacttcaaatttcaggtttgggtagacttctttctcacatgattttcgtgggtattgggttttcggagatataatggagaggtctactaagtttatgccttgagggcannnttagcgaaggaatttgttgaaagcatgctaaacttgtcatgtttgatatgagctaaatatacccattctgtttaggggttattatgatgctttgtgatgcttgtgtgctgaaaacccttgtaaaaaactgat

SEQ ID NO: 194592 - DNA, 446 bp, Glycine max
  unsure (1)..(446): unsure at all n locations
agcttatgcatcancaatgctgtcttggcccanatttcactatgctcatagcccatacgcagagcgccaattatcaacccataaacatattatatatacacccttccattatcacatgagaatcatttgcactataatatactcacattcttttattttaagtatgagcatattaaccatttgtactataatgtttggagaaaaagaaaaaagcccctttgttttaatgagtttaacgtgagaatattatattaataaaccaaggagaattattcgctcccttctgctcccaagtatatatatcaatctgattcttgataaaattgatttggtatatggaactcttatcttcatattctatggggtgtagcgttatgtgaaagagtattttcctttatctggatatttatgcatgattgaaaataaataaatagtcgatttgtcat

SEQ ID NO: 194593 - DNA, 426 bp, Glycine max
  unsure (1)..(426): unsure at all n locations
agcttgcagggttccacaattactgtgtcatgtatgacagngggatctgtgtcctaattaagtttacaaatatgttttggttttattttccgcacacaggtatgtataatcgctagtagaatcgtatctgaagntgaaatttaaaattacaataaaggatggcgttggtgattcgacattggagcatatgtttctagggttgtactacactagtcttgcgtattatttctaaatctttgaatggtgctattctgatattttgaactttgatttaagaaaaattccagttttgaaaaatgtagtgtcattatgctttctgtgcagaagatgttcttttatttcacattgatatctatggcgatatctcgagaaatattaaatttcatttgtcgtcaaaattgaacttttgtattatggtttgttact

SEQ ID NO: 194594 - DNA, 474 bp, Glycine max
  unsure (1)..(474): unsure at all n locations
atcctcagagtcacctgcggcatcaagcttcacaacacccaagctttcaacatccaatctatcatgaactatcaaaaccaagaaaacagggcaaaggcagaaaactctgcccaaaaacacaaaccaataccgcagctttccttactcaaataccccagtaacattctcttcgttccaattcgttaactgttggatcgactcgaaaattttactggaggtccctagtacataaatctacattgtgaccgttgggatctgctagaaaacgtccagaacccaatctgtactactctttccacaaccagcaaatacacatcattttctgcacaaagccaaaattctgctgcacatttcaccagcaaaattctgcataatagtgaagattntcgaaatcacacttgccctcgtccaattntgcccaaattgaatcctacaggtcctaaatcatgtataaatcatgtctaaaccaaggac

SEQ ID NO: 194595 - DNA, 385 bp, Glycine max
  unsure (1)..(385): unsure at all n locations
agcttgagggtaatctcanaactgcaaaggcatgaccttgtgagaggtttaccaagaatgtcatagaaagatgatttactttgtgaagcatgtcaaaagggggggaattaaaacctccttttcaagcaaaaactttttttcaacctcaagaccacttgaactattacatattgatttgtttggtccaactagaatagcatttgccaatggaaagagatatattggttggtagtagtggatgactacttaagatggacatgggttacattccttgctcacaagaatgagtcctttgaggtcttcntttaaatttgtaaaagagttcaaaatgaaaatggagtatgcattacttcaatcaaaagggatcatggtgaagagtttgaaa

SEQ ID NO: 194596 - DNA, 449 bp, Glycine max
  unsure (1)..(449): unsure at all n locations
agcttgttaatggttntatacttaaaatattttgttggtccctagtttaaccaaattttaaattagttcctgttgcttaaaagtttctaaatggatccacggaattgctaaactttggtcccatgccaatacctttaacaactgttaggcatccattagttagtgctatggtagcatatggtgagttgatgtggcaatgattttgctagcatatatcattaggtaaccaaatcaaccaatttcatgtgcccaacaccgtcatgtgatttgattttcactttcccgagagaaaaatgggttaatttagccacctctgtagtccaagcgagcaaaattgattgccacaacctcacaccatttcccatgtcggctataataaacagatgccgtacatttggtgacaactgggagccaatcaaaaacatttggtaattntatgggtctaatgt

SEQ ID NO: 194597 - DNA, 433 bp, Glycine max
  unsure (1)..(433): unsure at all n locations
agcttctacgtntatctcttgtaatacatggggtgatatccaagattcggattttattatntttactccacattggcttattttcagaaagtgatcaggctccaatatccaaaaaggaacctgctntgcatattgatggttcttgtgagaccaaacagaagttcaatgagatctcaaatcacttagacgctcatattcacaatggggcatcttctcagtttatatttattttctcaaacaagcactttaattntcccaggttattaatcagttattatgattacaggtgaagtgaagaaattgcctatggacatgactcccaaattgtgcggttccatggataaattgaatgaaacggggattntctttcccattacttctgtggaaattggtatcactttatatctcattagtcattattcatgggtacatg

SEQ ID NO: 194598 - DNA, 265 bp, Glycine max
tttatctcgaatttagaatcttgtatactctctctctcctccttctcttgttcctttctttgtgattcttccttctgcgttctatttggaacattacctaaatttatgttgttgagtgagagaaccacaactcaagcatgtaactatttggtttttgaccacatctcttagtcatgttatcctattccaaatctatgcttaaattgcatgtaagagtgaccaccctaccctttattgatctggattatgtggaaacaagctccta

SEQ ID NO: 194599 - DNA, 447 bp, Glycine max
taagtcacctgcggcatgcaagcttggagaggatgcttcaatggaggaaaagaatgacggagagaaagagagaggggggagcacgataatgaaggaagaaaaagggagagaagttgaactttgagttgtgtctcacaagactctcattcatcaaagttacaacaagtggtacacatgtttctatttatagactaggtagcttccttgagaagctttcttgagaaaatttccttgagaagcttctttgagaaaactttccttgagaggctagagcttagctacacacacccatctaataactaagctcacctccttgagaagcttccttgagaagattcctaaagaagctagagcttagctacacacaccccctataatagctaagctcacccccatgccaaaatacatgaaaatttaaaaaaaaagtccttattacaaagactactc

SEQ ID NO: 194600 - DNA, 429 bp, Glycine max
  unsure (1)..(429): unsure at all n locations
ctccacctgtggcccgacggatttcatttcgattaaagcgtttctcttcatgtggtggtccagcagcaagcaacgactattcatggtagccaccagtggtcgtgggtggtggaagaggagtttctaggtgtgtttgggcggaatnttgaaagagagacgcgtgaaatcgtgtttttcatgctaaagaacgtatttataatcttgagatctcgcttagcaagctcatctcactaatcgagttgcaattgcgcttagcgtgcttgtctcactaagcgagatatccaaaagtgttattttgtaaatcctaatggtcaaagcgtgaagatgtgggttatgaacctacagcccaaatttgaaggcaatccaacagtttacgaattcacgattacagtnttactaaaaccaatttagataaaacttgaaatccca

SEQ ID NO: 194601 - DNA, 460 bp, Glycine max
  unsure (1)..(460): unsure at all n locations
agctntccttctttgaacaaatacccctcagccaaatagaatccatcttgtgctcttttcccacaacttcttgaaatgggagagaaatgttcatctaaagcattcaagtccctaatgttatcagatcctaaaatttgagctcctagggagcaaaacaatgtgtgtctcctagagagggcaccaactaccacatttgtttttccctttttgtatttgataacatatggaaattgctctaggtactctacccattttgcatgccttttgtttaacttgctttgccctctaatgagcttaagtgattgatgatcactatgaatgacaaattccttggaaacaaggtaatgttcccaagttcggagtgctcttattaaggcgtaaagctctttatcatagttcggagtgctctctataggaatgctntgatgagatgacatgacatacttgtattccaaacatt

SEQ ID NO: 194602 - DNA, 407 bp, Glycine max
catgcaagcttgtaccccttgtttgttcaacaatacagaatgtcatattcggtgtgtatgtgactacacttttacaaaaaacgaacttttgtatgtattacctaatttatttacctatttggttatgatataaaagctgaaattataatatgaactataaagtacccaattagcataacttcttccatatcgtccattttgtcatcggtgtcacattttggttgaattcctgattttctcttcctttaacacttctgccttgtgtgcactaagataatagtgtttctccctcataaatgttggacatatcttcttaaatgcttttttgcaaataagaagtatgtcactgcaatctcaaaagtttttcttcctcttaatttctctctactctcaatgtgttacaagta

SEQ ID NO: 194603 - DNA, 469 bp, Glycine max
cgggatccttaagtcacctgcggcatgcaagcttgtacagaacttatgataaatcaagaacaatcttgttcgcacatcgttcgcgtgtatgatattcactcgacaaggtttgaagtagaggagaccttcaatcctataacgcaacgtggcggacaaaaatgggcagttaacttgaatggccattactgtcaatgcggaaggtattctgcgctttactatccatgttcacacattattgcagctggtggttacgtgagcatgaactactaccattatatagatgttgtttacaccaatgagcacatcttaaaagcatactccgcacagtggtggcctcttgggaatgaagcggcaattcctccttctgatgaggcatggacactaatccctgacccaactacaattcgtgcgaaagggcggccaaaatcaacaaggataaggaatgagatggattgggtccaaccatctg

SEQ ID NO: 194604 - DNA, 372 bp, Glycine max
  unsure (1)..(372): unsure at all n locations
aacacaattttcactctcccttctcaaaatggcacccaaccctaacaccttcttcaccacccacgaccaccggtggccgccccgaaccgccattgtttgccaccaaacccctacaccaagaggaacatnttaatcggagcggaatcctcagaatcctccttaaggatttcagagagaaaaccattcggtggccccacgagctgccgttgcttgccttcaaaacccctacaccaagaggaaccatttaatcagagcacaatcctcctgaaggattccgtggagaaaatttccccaaccttccttttaaagcttctctaaggaatcttgattctaacccttctcctagtaggttgagttcctcttacggctctt

SEQ ID NO: 194605 - DNA, 430 bp, Glycine max
  unsure (1)..(430): unsure at all n locations
aattgaattccttaattaatatagctcaagtggagtatataaaagcatgaatttcaaacaaactcacccatgcatgtgtgcattatatgctttatatttaggacaaaatgtatatcaagttccttatattcctgtcatntaagtatcaaattaaataatgacatctgattttgttttttaatactataaatagtatttactaagaatatattgcaaaactctaaaaacatattcatgtatcattggttggaaaatcttagcattaaagatatatatatgtgatgtacatttgtccttatatttaatgtacactcgaattagttcattntaagatatttaaaggaaagcaattgttattaaagagccaaaatacgtaaatttaatttgtggcatcgaaggacctttggtagcaatttagatttagctgaac

SEQ ID NO: 194606 - DNA, 443 bp, Glycine max
agcttataagaacaaaattgccttaatcatttccaaatatgcatgtgaattatgacgcatcaacaagaatcaagccaaggctattgtgcaagcaatcaatggggcaaaacacaccaaatgattataatgatggatggctcaaattctcacaaaggtaaaatcatcactttcaaattgagctttcaaaactatcatgacatgtaaagaaaaatcaaggatttcaagtcacaaaatgtcaagaacttttattttcaaaacaattacccatttcttgaacatatcctataattcaaagaaaaacatgcaaactcgtacgtgcacacaaaattgacccaaaatattaaactgaaaatccgacgaaactaacaacattaacaaatttacacacctaacaaatttaccaaacccactaaactatcataaccaagaacaactcccccccc

SEQ ID NO: 194607 - DNA, 428 bp, Glycine max
  unsure (1)..(428): unsure at all n locations
gggatccttaagtcacctcggctgcaacttagtcacatgtngtaatgttgttccctctatctctaacaaccatggcccatggggaggagttgggaaatgaccatgttcaagtgcacaagcatagcacattggaatgcgatcaaggggagaatgagactcaagacctcaaatagacatatgtacataaaaaagaagggcggtctgcccgatgccaccctcaggaaaggaaagtcattgctcccacaagcctgaacgactatcttgcangagtccttanggcttgccaattttacctggcgttgcagagcaacaacacttgccacaaaagtgatgaaggacttgtacttcgaaacatcgtccctcacccattcaaagtcagcaacagtaggggggacgatggtgacctagcactatggctttgacacaca

SEQ ID NO: 194608 - DNA, 447 bp, Glycine max
  unsure (1)..(447): unsure at all n locations
agcttgtccctcaagtcatcaagttctttccgcacctacacaaaaaacaacaaanatcagaaccattaaaatacaaanaaaaaaaaaaaaaaaaccattaaactaaaactcaaaaatgcaatcaaataaatacatacttcaacaagacgggctttgctagccttgtctttctctttctccagagcatgaagttccacttctagctgcattctcttcctttcaaggttatcaatttcctcaggctgactatcaagttgaaccctaacatttgcacaagcctcgtcaaccaaatcaattgccttgtcaggaagatgacgccctgaacaatcacaaaaaatataagcacacatcacactaacaaaaccacaagctttcaaaacaaacgcacacacaccaaaagagtacagattccataccagttatataccggttagacaattgagctgc

SEQ ID NO: 194609 - DNA, 397 bp, Glycine max
  unsure (1)..(397): unsure at all n locations
tcaactctggccaaaaatgttgtgtggattaaaaaccattttgagtctccaaagaagtgctggttcatataacaacctattagagcntttgaattatgaccaagtaatctatgataccattatggctgccttaattcttgtccactcctaacagcttaagtttataaggtagaattgattcttgacaaaaaagtgttaaacatggaaagttctaaagccaaaattaaatatcacactaatataattggtaattatcaagcccaggaattccattaattaaggtgatctaattttattaacaagtactttatctatatcctatataaaactgtatacatgtgcaagctttttggcattctattagctattggctgaaatgggccaaacaaatcttgac

SEQ ID NO: 194610 - DNA, 338 bp, Glycine max
tccggttactgttcacgtggagggagagaattgagggtttcattctcagtttatccgggtactgttcacgtgcatggtactgttaacgtagcaactccattttctgtttctgcttcaaattctagttatgttgtctgcttttaattccagtttcattctcattcttgctttctaattgcagttaattttctgcccttgatttcctattcgtttctgcatttcgttccaattgcaatttcattttccgtttttgtttgcagatacattttcgttcctgtgttgcaactaatttcccagttttgtgttactttttgctggtaatggaaggcttaatctct

SEQ ID NO: 194611 - DNA, 357 bp, Glycine max
actctttttttcaaagtaataagttctgtatactcgcgagagaggtttgatttatttatggtactctcattctttcttttactctgtttataatatggattgttattttcaatcattcaaaataccactttggaaaataaattgagccacaaggcattgtcaattctatgttttgttgccttaaactttgtttgccttggattacccaaatctaattatgtccagtttttgtgtgttctcaacttcttatttgtgttgcgaaatagcattccaaagtaacatcacttagaaatattattgcatgggattgatcgttctcattttctaatccttaacatttgcccttccatgaaatca

SEQ ID NO: 194612 - DNA, 472 bp, Glycine max
  unsure (1)..(472): unsure at all n locations
gtcacctgcggcatgcaagctngatcgaaacanaatcttatataanaaataaaaggatttattttcttgtatttaaaattagaaaattgccattctaaggtgcaaattaattgcaccattctctntaattaatatttgttatttggcgattactatacaggtcttgattacaaagaaaataataagtgaattatatctttgccaaaattatctcattgttaacattaacagtaggttttaatttgaataagattatttctagagggtaaacagctttttatggagaatttttttaaatgatatacttagtcaaataattaaaattatataaagaaattttttcctatgaaaaaaaaatatttttatcataaaaaattattaaaattgatgttctaccaaaaaaactaatcatcaaaatatttgaaaatacaaaaccaagtattaaaaataatttcatattcatttttataat

SEQ ID NO: 194613 - DNA, 469 bp, Glycine max
taagtcacctgccgcatgcaagcttgacaaatataattatctactggttccttcttagtttcttgtatacacagcatgtctgctctttcctttctaaccattcttctaaccgccgcccatttcactcccctccctaacccccttatgttgtatgtgataatctttattattcaggcttcctgttacccaacttattggcatcctccttgtccctcagctccatcttcgtaaatggtgaccaccattgcatctcctccctcacatgtaactcccaaattctgcgccatctcccattgtgctgaggcttcctttgtattctcacttgtggggggctatctttttgaaatggggctgagtataatctgcacttcatctggggtattattcattcctcgtcttctaacccactaccactggttgctggtgaaaattcctcttggttctcagttaaataatgacttcctgctgg

SEQ ID NO: 194614 - DNA, 443 bp, Glycine max
  unsure (1)..(443): unsure at all n locations
agcttgtatagttccccaatttatggtcattttggtagtaaatttggaaataaatcttgttttatggttagcgctgtctctagaccattcccattggatttaatgatgaaatctgcgcatttttaggtgaaaaagaggctaagtttttaattgcaaaaagtagaagctgggctaagcgcttatccaccgctcagcgcagcttcaccgtgcttagcgcanaggagaatctggcaaagcatcagcatcaaagccatgcgctaagtgcgagatcagtgtgctaagcgcaacaagtgcctttagccaggctaagctcgagactggctctaagctcaaattcacttactcacgctaagcacgagggtggcgctgagtgcagcgtcgcgatttcaagcctatttaagcctgtctttgcagattagggtaccacctttatacactttatg

SEQ ID NO: 194615 - DNA, 379 bp, Glycine max
ataagatgaaagcccaaaaacaagaaatgaattacaaagtctcggatttggaaacttacccgttgaagaatgaagaacggacgaagaacggtaaagaacggaggaaaaccttcacggatttgcttacggaaacctctcggaagctttacggaagcacctcggcttggattttcttcacagaaacaattttttttacccaaaacagctgaaatgcatagccaggggaatcaggcacccttagaacaacccccttttgcctttttataggaaaaagggggaggaggttgccgcccagctcgcttaggcgagctgggttgtcttcacctttaagcagaaaatgcctagaaacctctagaagggcctagatttgaaaattact

SEQ ID NO: 194616 - DNA, 449 bp, Glycine max
agcttatgagacaggccaatgcattcccactgacgataacactcaagaaattcatttcatggggaatcagcagaggcaagggtacactcaaggaggatttttaggcttccagcaaggtccttataatcagcaaggacagtggaggacacaccctggcaaccaattcaataaagaccaaggtggatcctcaaacaggccaattcaacaagggcctaacatctttcagaggacaactaagttggaagagaccttgactgaatttatgcaggtaacgatgtcaaatcataaaagtactaagtcagcactaaagaaccttgaagtacagatgggacaactggccaagcagatagttgacaagtcatcaaacagctttggagcaaatacggaaaataatcctaaggaggaatgcaaggctgtgataaccaggagtaaaagggttatggaagctg

SEQ ID NO: 194617 - DNA, 295 bp, Glycine max
atataaagaaattgggaatgtaaggaaaactaatcatgcctaaatattatataatgggaccttccattaaaataagcccctatcagattatagcttacactattttattatacaataataaaaattttgattttcacctgtaagcataactttggaataatgaattttttttgttgaatgaataatgaaatttaaacttctttaatgaattataacattaatcatcttgaattgcccaacataaaatttcaaatgttatacacaagattgtaaaagtctacatgatttttaacgg

SEQ ID NO: 194618 - DNA, 445 bp, Glycine max
  unsure (1)..(445): unsure at all n locations
agcttctgcattttatacatttataattgntggtcatcagcggtgttccgtagagtatgttcaactattttgtttgatgctgggacggcatagtcttttagtctactgatgaaaaacttttgtacgttttttcatttgttcttgaataattctgtatatattcaactttatttctatgtacatattgcgggtggtgtatataaggcatgtcgagttaagctcttgaaagtttcgacttaatttgtatgaaggtgtcaaactttgattcatttggttaaatgagtcaaattaagggcaagtaaagcttccacgtggtctgtataatgatgttattaaaatttgacttatttagttaaataagtcaaatataaagctcgactcggatttgattttttctatttttaagaaatgaagtttgagtacgtttttcctcttatcaaattta

SEQ ID NO: 194619 - DNA, 407 bp, Glycine max
  unsure (1)..(407): unsure at all n locations
agcttgcatgcatttctctcatatcattagtcttccacacctttccattcttacactttgtcccttggattattttcatctttttagttgaaattactacatggtcgtacgtaacacgtactcagaatagccaccgaatggaaaccaacctttgtgtaggaaacacattggaattgtctcttcaaactaatattcccaccacctactacattgatgttaatattgtacaaaggttcgcgcatgccactcttgttcaatcaccaaaagcttgatcctggccccatttctatatatctttctcatgtgatactagtggaaaaagtgaacatgcactaacatctgccctacanaattcttcaagctaatccatttaggaatcttatgcctatatcataccatgtcactat

SEQ ID NO: 194620 - DNA, 329 bp, Glycine max
gatccttaagtcaccgcggctgcagcttcatacgaggagtccaccttctactgtggaggcgagggcacctagactaccctgatctggccaaatacgatccctttacagttgcaagagaaagacgtgcacctacacaggcatttatcaaggctaccgatccaccccgtcctgaagaacccccaaattgccatcctttttagattgggggcaaaaatgtagggcccaggcttgaggattgctagcagctttcacggtcattgaagaccaagaaactggttgttgaggaacacaaacaactgcctggctagagcggtgcgagctgactgaag

SEQ ID NO: 194621 - DNA, 353 bp, Glycine max
ttgtttactatattttaatcacctcgttaaaacattttctggcaacttataactactaaaaaattaatcattgtgaaatataattaaataataacaaaattattatcacatcattatttaacaccaacattttatggcaaaaaaccaaaatatcgaacaaaagacttcaggaacctaaactagtcaaattttttgttaagaagcctaaaatgaaaactcataaaaaattaggaaccaaaaacacaattaacctgatgttctttttaagccatgtttgacaagacatttcaattagcttctaggtttttactagctaaaaaacttatttgattggttagtaaataaattttttt

SEQ ID NO: 194622 - DNA, 232 bp, Glycine max
ttggctgaaccactataaaatccttgtgtgtgaggttccttcttccctactactttactttgcgctgcgcatataatttccgctattactttctgttaagtttctcttctactccatattctcttaacaacaaaagtaaaaaccttaaaagagtaatttttatctggtacaagtttaggaaaaattaattcaaccccccttcttaattttctgacgccactcgatctacaat

SEQ ID NO: 194623 - DNA, 296 bp, Glycine max
cccttgtatatgtgagctcggaagaaatcaagccagggccgcaaggaattttttgtgccaaacataattggtgaaaagtggcgaataagaaattggacaccattgccaatgtatgcaaagtggaatgggcgaggaaaagtggctataaaaggctcaaagtcaagcttccatacaaattgtcattaatcttccatctacaaatcttccttgaagcaaaatattcagaaacgcttaattgctccacgctgaggtcagagacatttatatggacatattctcaaacaccacgtcttgga

SEQ ID NO: 194624 - DNA, 348 bp, Glycine max
cctcataatccttgtgagcatgtgtacactctttccaaagatcataaatttctccagtgaggttatcctgaagttcatttgagtgtttttacactgtgtgttgtgtgaacattcacattctaacctttcaaaatgtgaaaggttctttatcaaagtatctcatggtttggaaaaattttctttttctaaacaaggctcttttcaatgttcataactcactttttgagtattttgcaaaaactgaatctttatgaggtttgttatccacatgatcttgacagtttacctttcacaagtttggatcttttgaaaatggacagttcaagacttcatattgctattaaagtt

SEQ ID NO: 194625 - DNA, 67 bp, Glycine max
aaaaaaggaaaacttgagccaagaaaaaggaaaacgggaggagcgaaacactacaccaagggggggc

SEQ ID NO: 194626 - DNA, 397 bp, Glycine max
  unsure (1)..(397): unsure at all n locations
atggcttattccctaatggatggcgcctcctctcacctcttcttctttgtcttccgctgcatctccatggtggaaaatcaccattaaaaaacctcattgaagaccaaagatccagcctccatagaagccccacaagcaagcttccatcaatgccccacattatttccatgacacaaatgcaacgatgacgattaggaaantttatgcaaaactggtcatgcatgcacctatgtggacactcaagcatcaagtttttatggtcatgtgacactagggcttangattcatgttccctatataagtcaacccagtgtttccaaaatatgttcttttatcaatncatgcattcatccgagtccattttgggtgttcgggaaaattttcaaagcattcaccc

SEQ ID NO: 194627 - DNA, 393 bp, Glycine max
agcttggttcccaacgctctgtgaagctctcccaaatctagaggtttattctaggatctctatcagatactatgctagaatgcacaccatgtaacctgacaacctcacttatatacaaggtggtcaacttctccatggaaaatctgatattaatgggaatgaagtgagcaaacttattcaatctatcaacaataacccatatagaatctaaacctctaggggttctaggtaatcctaccaccaaatccatggaaaagcttgtcccacttccactatggtatcttttagggttgtaacatacctgaaggtctctgatgtctatcttagccttgtgacagactagcgtgctacacaaacatactacctctctttattgtggcgcccaaaacatcg

SEQ ID NO: 194628 - DNA, 401 bp, Glycine max
agctttggaaagtgccatctttcaccttctctctatgccaatctactagcttagcgagcatctgctaagcgcaacactcctaggctaagcgtgaggaagactctggaagaagatgagttgtacaggttccctgagcgcaccgttttatctcactaagcgaaccgctttatttcacctgctaagagagaaaggtgtgctaagccaaaaatcactaacatgcactaagcggtccataagtgtgctaagggcacgagcacgaacaaggtcatcaatttaagcttgaaatcaaattttgtgaagagtttggactgggattcagagctttgtatgtctaggatttctagagagagaaaggtccaagttccagagagttttgagaagattctgttggtgaagatctg

SEQ ID NO: 194629 - DNA, 396 bp, Glycine max
  unsure (1)..(396): unsure at all n locations
agctttgacgaatatnacccacatcttcttcaatctgtgtgagacggatatccatttcggcaaagcaattatccaaagagtcaaaacgttcaccaacataagtacgaagacctcataactcggagagaacttcagtcataagtgctgaatcatctcgctgaggaggaggagaaggagtacgctcatcttgtggaggaagtgcatctttcttcagccattgaccattccgatccttacggaatccaaatgaagggctgcaccagcaccaatagcaaaggaacacttgacttgaacaaaaggttcatcatcaagcgaaatttgaaaatgacggagaaacagagtgaccaattgagggtgagggagaggtgcattggcccataatgccttatgcattcg

SEQ ID NO: 194630 - DNA, 410 bp, Glycine max
  unsure (1)..(410): unsure at all n locations
gcttgttcaacttatagactttcaactttgcttttagctacaattnttttgcaaccaactggggtatatgttcagttggatagaattctgatacgtataatatcaatggtgcttgcagaanagggaaagaacaaaagaagttaagaaaggaaatgagatatatgagagaaaatctcccctaagtgtgagaaagtctctactctcccaattctattactaatccttagatgatcccccaagttcctaacaatacaacctcccttcttataacagaaaggacacacccactaccaataataactaacaataatagatttagcaattcccttactacccttaaaccctctagaacaaccatacttattatgtttgggcctacgatcataaaccttgaagggctatcccattta

SEQ ID NO: 194631 - DNA, 432 bp, Glycine max
  unsure (1)..(432): unsure at all n locations
agcttacatcaatataaccctgtagtgtcaattcatagtcntcataaatgaggaatttgtctttagttcttcttatgtacttaagtatggtcttaaccactttccaatgttcctcaccagggtttgcttgatatcgactaattacacctagtgcataagcgacatcaggatctgtacaagtcatggtgtacatgatagctcccactgcactagcatatggtactctactcatgatagctcccactgttggacaattctccctactaagagtaattccaacacctataggcaaatagtccggtttggaattatccatgttatatctctttaagatagatcaatgtacatagattgggatgtagaagcaacgcttcatggtgaatgtgattcaaagggtgtttgatgataacaatgatgaccacaaaagatgat

SEQ ID NO: 194632 - DNA, 439 bp, Glycine max
  unsure (1)..(439): unsure at all n locations
agcttcttgcttcttgcttcttgttataacaactntgcattcttctttgggattattctcggtattttctccaaagctgatggatgacttctcagcaaactgcttagccagttgacccacctggatcttaaggtttttcagggctgactcagtactcttatggttggacatggtcacttgcataaactgagctagtgtctcctccagtttggcggtcctctgaaaaatatttggcctttgttggggtggcatgttggaaggtccaccctggtccttattgaattgatttctagggtgtgatctccattgcccttgctgattgtagggaccttgctagaaacctgaaaatcctccttggttgtatccttgcctctgtcgatttcccatgtaatgaacttccttagtgtgttctcaatgggaatgcaatgacctgattcat

SEQ ID NO: 194633 - DNA, 413 bp, Glycine max
tgcatcctgggtgcatgtgtgatgtgttgtttttttttttacctcgatgaagtgaatgctctagctcagctaatgacatggaaaacagatgtagcggacattccttatggaggagcacagggtggtattggctgcaacccaaaagagctcaacgtcagtgagttatgaagactcacttgtgttttcttccacaagattgaagatcttattggcatttacagagatgttcatgcccctgacatgggaactaatgcacaacgtctaatttaattatattccatttccttacataattttttgtttggggcaatttcttatgtaaaccaacatctagaactcttatctattattctatcatttacattagttcactatttcactgacaaaagcttgcattcttgatgaagtatcaa

SEQ ID NO: 194634 - DNA, 465 bp, Glycine max
  unsure (1)..(465): unsure at all n locations
nttcgcanagcttaccggtaaatctgggacttagccatttgagtagtctccacagaggccattgcctcccttgcccagtattatgattagccgatgagatgcttcacctttggggacttccagctatcacctatggtagaagaatttgaagagatcctaagatgccctctatggggaaggaaaccctacctcttctcagggttctatccctcattagctagaatttctaagatagtccaaatctcggtgcaggaattataccacagaaagcaagtaaaaaatggggtggttggaataccgagaaagtgtttggaggcaaaagcaagaatcttggcaggtaaaggcgagggggccccgttcatagatattctcgcactgttgattttcaggggagtcctttttccgaatgtggatgggttggtggacctagcagcgatcgacatttntctcgcctatcataaccac

SEQ ID NO: 194635 - DNA, 418 bp, Glycine max
agcttgccacccagctcgtccagcgagctttttttcttctcaagaaggcaccgccttctggggaacatcctggaaggcccaagtgggcctggttgctatttgcagcccctgtttattaaatacaccccctgcctttatttgttgaatctttttctgtaacgttatggaactctacgaattacgtaacgatacttgttttctttccataatatcacaaaaccttacgaattacgcaatcatcccttctttggcttccggaatgttacggaactatacgaattgtgcattaacacttcctcttgacttccggcatgtcacggaaattcaaggattgtcacagaaactcacggattgcctaacgatgggtgccaagtacctcgaagtggtcaaacgagggatgcatcccaacaaacggatg

SEQ ID NO: 194636 - DNA, 435 bp, Glycine max
  unsure (1)..(435): unsure at all n locations
ttagaaactcaagctnggactagantnatctagagattataaatatatggccttggcttgttattcaacaatcaataatctatctggcaatcttctctcaacatcattcaatatctttcaactctttctacacaacggtcggagtcattgctctccatttttctaaaaggttgtgttcaacacttgctcttccgagaaaagtggtgcgttcaaaaacttgcgggattcatctttttcattctcttctctctttgccaaaagaatagaacgactaaccgcctgaattcttttgtgtctctcttctgcctctgccaaaagaacaaaggactaacggcctgaattcttttgtgtctctcttctcccttacaaaagagtacaaggaccaactgcctgagaattctattgattcttgccttccccttaaacaaaagatct

SEQ ID NO: 194637 - DNA, 427 bp, Glycine max
  unsure (1)..(427): unsure at all n locations
agcttatcaaccaaaagctcaaactngaggtttttctatattattttcanacgccgaaggttttatagaaaaaaaattacacatgaaggaaaaaaatccacatattaataatctcttggtcaaagagaaagaactccatcaaatttttattttaagtctctcttactgatcagacggtatttctactgcatatctcctacatcacggctgccatatgcagcaatcattgcttttgaagatataatgtttttgcaaaagtataacttataaaaagttttgtcgcatgcaataatcatatttaagtggacatagatgagttaaatatctaacatcaaaaaaattgtaatttgtcaaagtcatattaacagtgtgtgtatctctttcacaaaggcaaaatataaagcctgccaatacttctatatggcca

SEQ ID NO: 194638 - DNA, 490 bp, Glycine max
aactcagctaatactttttcatatataagtaagagatattatcgatttatttttctttatctcacggaaacctcgagaatggagtaagattatggtccttctaataaaatgagtgattttgattttagcttttgtgaagaaaaaaatctttcactttcaccattcaaaatttaaaatcactatgctcgattcgtacaatatattttaaggtggataaataatttccattttatagatctagatgtttttttataatggctctagatatttctaaaaggtgtcacataacacaatagaaatacacacattggttagtgtcctcagaatggtcacttgacctctgttagtacaaatacatatataatttatacgtgacatgtgataattgagacaacatataattgatttatattcttttatagatagagacttattttaagaactatcaaaatacagatgactcatgttataagactaatattatatcttt

SEQ ID NO: 194639 - DNA, 326 bp, Glycine max
ttttttttgggccaccaggccataggtgtctctttactgatatctcaagaagctataaatagggtagcttctatatctttttatctttattcaacttacaattgacagcacttgggggttttatagatttaaacgtggtaacattctaggaggatggaccatcgtctcctttgggcagtcatgtaattcttatgggttctagtttgcttgacatgatggtatgaacttgataattactatccttattcaccttctttaaatgctcaatgttagctatatttcgactttggaaacaatggcttaaggttgaaatcggctttcgctac

SEQ ID NO: 194640 - DNA, 341 bp, Glycine max
  unsure (1)..(341): unsure at all n locations
acacacattggaagacgacgtatatcatggtgatgaaggctntgaaacataaatatatgagagctatagccaatgagagcattttatacttatagccgccaaaatattgtcatactgatgccgcacttgcctatgacaggtagctgcaaacgtctatatatgatgctaagacttctatctgcgatgttagatctccatcaccgcctgacttgacccacacatttatatgtataagtatgtgcttttgatgaaactctacctgctttattgatgaatgaacctatatctgcggctgtcatatccatagaaatttatttactaaccttgctccagtgactgtg

SEQ ID NO: 194641 - DNA, 417 bp, Glycine max
  unsure (1)..(417): unsure at all n locations
agcttcaggctgttcaattgcttctgtttgtttgttaaacaggcaaaggtctgtgtggtggttggcagaggagcataaaccacagagtctggcgataggtgtatattttttattcatggccagttgggttaccaggttgtcgcaacctacccttcggcgggagggcgacgcgagggctcacgggtgcgtcttccaagaaaggaaaatgcaaggagtcgccaccaacgtttattcgaggaaaacgtctgaaaaaccggaaaagacgtggtctacgaactttaagtgtgaaaggtttatgagttgtttttacgcacggggaaggtattagcaccccacacatctgtcacaagggacgacaacctntaatcaagtgtgcgaatatgactccaatttgtttattttcccttttacgtttca

SEQ ID NO: 194642 - DNA, 464 bp, Glycine max
  unsure (1)..(464): unsure at all n locations
tcacaagcaagcttncattaagtggtattagagctttttattcttctgtaggngctccttaaacctccattaattttcagctgtaccttctcctccattgttgnttcttcatttttctccatgtatctcctcacatgtcttgtggtaaatgtttttaacatgattctttagaatttccaccgattaaacttgttatagaagatagatttaattttctaggaaaggacatgttgtgccttggtataggcatcccatcgtctaaggcagtatatgttgagccgtactacttggttggtatccaatatggacccaatcaagtacattttcgagaagcccgctcttacggngtggatcgctcggtggcaaagttttctatctgangtggacatcgtctatgtcacccaaaaggcaataaagagaagcgcctctggagactatttggctcagcatcctctcaatgatta

SEQ ID NO: 194643 - DNA, 419 bp, Glycine max
agcttgtacctccaaggctccaactatgccttgttaatattatgatgatgcaaaaagcttcttttgtatatcatctttattctcaatgcaacattcagctgcattgttcaagggcgaaagttgatggaaacttctctttatgtattctgatagagtaattcttcctttgttagaggtgtgcttacactacacccttccacttttcaagagataattcttgtaatttataaaaaaaaattaggatgtaattaatagctaataaattatattatggactgaatataacataacatatatcagtggaatactgttaaaaaacaaaataatttagacacttgtataatgtataaaatgatggaaagaatactgctaaaaaaatttctatcattcaacttttttgtatatgtatctttcactac

SEQ ID NO: 194644 - DNA, 407 bp, Glycine max
agactctcacgaaggtatggaagatatctcttaatgaaaactataacctgcaaccttttgagtgcaaccattcccacttctgcaccatggggtttgatacctggtgggataaatattattcgacccgtgcaatgggagacactactatcatgatctccagacttgagagagggtgtacacaaccaacggtcgagaatatccgctcaaaccttcaagctcgaggtattaaactacttttgactgtctaaatagatacggatttttgcctgtgctaatattcttattgttaggcgaaacaatcataacaaagaaaagcaccgaagcgtctctagctgatgcgagacccaagaaacccactggggtgaagatccaagaatggaaacatgaagagaagggaactctctctg

SEQ ID NO: 194645 - DNA, 413 bp, Glycine max
agcttctcaaggaggtgaacttagctattatatgggtgtgtgtagctaaactctagcttctcaaggaagctttcatttaattagtaacacaagctataaatagaagcatgtgtaacacttgtcattactttgatgaatgtgaaacttgtaagacacacttcaaagttcaacttctctccctctttttctccttcaatttcgtgctcccccctctctctctctcattattttcctccattgaagcttcatttctaagctttttatccaaggcattctcttggtggtgaagcttatccttccatgacttatttcctagtggatggcacctcctctcccctcttctcctttatcttttgatgcgtctccatggttgaaaatcaccattgaaggacctcattgaagctcacagatct

SEQ ID NO: 194646 - DNA, 475 bp, Glycine max
  unsure (1)..(475): unsure at all n locations
tccaagattattttgatgatgccaaagattattatagattctttcaaacaagattaaagaatcaagaagattcaagagaagactcaagatatgcaagaacctcaagaaaagcatcaagataagtataaaaagaatttttcaaagaaaagattgaatagcacaatttgtccaaaagaatttttcacagaaaaatcttttaccagagtttttactctttggtaatcaattaccataaggcagtaattgattaccagaagccaaaaacagttttataactgttttacaaagtagtaatcgattaccatgggcatgtaatcgattacccatgttnttgaatgttgaacttcaaatctcaagagtcacaacttgtgacaaaatattntcaaaatagtgtaatcgattacacaatatttgtaatggattaccaatggtttttgaatgttggatntcaaacctcaacatgaagagtcacaac

SEQ ID NO: 194647 - DNA, 406 bp, Glycine max
  unsure (1)..(406): unsure at all n locations
agcttgctcctattgctctttatcttttgagtcatcaagcttacgtaaatgagctccactctttatactagactcgattcctctttattctcttgttctagcttccctaataccttgaaactatcattttttttactcatgaagggaaaaattgaaagaattgagtattcttcatcctccttcaatatttcatgagtttatcaagaggtaatgggggtctctccaactatttaatcatatgcttgttgctgaacttccttgaacatgttgtgctttgaaattttcgagcttgctgtcatgtcctgaatctatctactgangctattttctagaatttttgatgcagaaaattattgttccgcatgttaaaacatagaggtagccataaatttcacttaaatcagag

SEQ ID NO: 194648 - DNA, 490 bp, Glycine max
  unsure (1)..(490): unsure at all n locations
tctagccaaatggacttaccttgaattaatttctttgttttctcctttgagccttgtttccctttccttgttttgaagctcactacaagccttaagtgaaaaaccatgatattaccatatccttaaggaattttggagctttggaattgttttgggaataagtgtggggggtttttgtttcattggacaacttgttttgttggctatgcttcatgatgtattttgggccatacttgatgtacattgtatattggttaaatgttggacatgctgaatgaaatgttgtttctcagaggctaaagagttaaaaaaaaatgaaaaaaaaattcgaaaaataaaagagaagcaataaagttgagtgaataagatcttatatggcacaagaatgatgaaactcttggttctactcttcatgattaattgttatctntacttctttgtattttcttatatttttcttaatatgcacttattctcctttgctcctcta

SEQ ID NO: 194649 - DNA, 409 bp, Glycine max
agcttgctaacccatggaagcttctaatatctcccacactttttggggtgggccattcttggatggccttgattttctcagggtccacttggaccccatttctaccaactacaaaacctaagaagactatattatctacacaaaaggtacacttctctatatttgcatagagggtgtttttcctaaggactgaaagaacttgcctgagatgtcctaagtgatcatctaagctcctactgtacactaaaatatcatcaaaataaacaactacaaatctacctatgaaatccattaagacatgatgcataagcctcataaaggtgcttggtgtgttagtgagcccaaaaggcatcactagccattcatacaaaccaaacttggtcttgaaagcggttttccactcatcacc

SEQ ID NO: 194650 - DNA, 402 bp, Glycine max
  unsure (1)..(402): unsure at all n locations
agcttatgatacttgtgaaagggngcctatttattgtgtgttattgaacttgtattaatttcttttataataaactcacccctcgcaatttttgtaccgtgtggttggtacctataatgatcgcgaactctcgttcgtggaagcagaatgacaacagtatantaccagaagtaagattcttttgtggagccgccgagccgacatgatgacgttgggattattttgggagagagttgtgttttgttaatcaactcctccatagctggttccataattctttgtgttgaattgaggatgtaaatcatataattaattatatgtatgaacaaatttacttttcattatgtgaatgatgtgtattgagttactattcccatatatatatgtattcacttaagtaat

SEQ ID NO: 194651 - DNA, 507 bp, Glycine max
  unsure (1)..(507): unsure at all n locations
ctcaagcttgcattgcactgtgttgctatggctaaattcttttaattttgtctatttattagcactatttgggaatcatgttggagtaatgaatgtaactattgttttttctcaacagcttttggagagcaagatacaggaggcaaagtcaaataaagataccctcaaagcaagagctcagtctgcaaagtttgtcttaagctcacctttgattctttgaaagtcatgtattggtctctcacctttgttcttttacatagctaattctttttcttctcttcaggacttcaaccatagttagcgagatggtgggcaatatcaacacaagcaatgcccttgcagcttttgataagatggaggaaaagggttagttntttcctttnttaatatctatagactatagttacacccttttgaatgttccatatggaagaaatggtttccattcatgtatcaacagctgataacttggcgtgcatatatagttcttataccaattacttcaac

SEQ ID NO: 194652 - DNA, 419 bp, Glycine max
  unsure (1)..(419): unsure at all n locations
agcttatngagactctggtcggggttctaatcttctgtttaaagaacttgccaaattctcagaaaactatatcaagctctttggtggcatggagagatttgaggaattaaggatgtcactacttgttgatgggttaaccaaggtatgtaatttatgtatttgacttttaagacttaactttgaaattaagtttgacgtgtatatttgtttcattcacgtgactacggataagtggatagatataacgaacatgggatatgtcattgcatcaaggtataacgtaatcgttgtatccttgtctaaacaacataacatgacattctttcctcttagaagtcaaccgctagcaaattcttcattgcatcgtataatttggatcactcatgtgtatgacaatcatttcgttgacgtacattgta

SEQ ID NO: 194653 - DNA, 464 bp, Glycine max
ctcatgagtgtgtctttcttgggtatttactttctttaaaggttacaaatgtctttctcctactggaaaactctttatctctaaggatgttgttttcaatgaagacaaatttccttattcagatctgtctttgtcttcctctaagtctgattcacatcctaataaccccatctctttcattccctctacccgtattgttcctcaacctattgcttctctttccccctctagcatttctgttgctagtcctacttctattaatcctactacaactgattcaaattccatccctagtccttctgtccatgctgagtcctactattgatgctggatccacttctgtgcaagacaattcatcagatttgcttcctctgaagatctaacgtgcccattggagatagtcctacagtaattccatctatgctaccaatcaatctggaatattaccactaatcaacctgtct

SEQ ID NO: 194654 - DNA, 322 bp, Glycine max
ctacctcactcatattcttacttgagcgtctgagtccttagattctcaagtccccccctctgtcaaaggcacctctcctaaccaacgagtgaagagtgggacctcactcaatcacgttcaccctaacatggtatgattccggatattggcaagaacaatctccgtaaaagttatagtcttataaaatatacatctatatcaccacataacaacaacatgttatacatttgaccatatcatatcgaaataatcactttgaggagaatatatgtaatgttgcaataactaagttatgctacattaaatcagtattgagcaataa

SEQ ID NO: 194655 - DNA, 381 bp, Glycine max
tgccgcctttccactttacatgagacctgtttgtatttctttccaaatccgttatacaacgttcaaaatatcttgtatgaaacggcataaaaaggggtaatgatgaatacaagattgagaatattccctgtatttagccttcttttattctacatagctataacctgtcctaccttaactttcttttttctagaatctatcactgactaatggaaagaacaaaatactaacatttatttaacagatctaaaaaaaatttacttcaatcacattatttaacaaaaacttgcaggtctgtacttcatgaactatgagcaatacaacgaacaatatcaaatacatccccacataaatgactcaaatcatacttaaatacaaacc

SEQ ID NO: 194656 - DNA, 497 bp, Glycine max
  unsure (1)..(497): unsure at all n locations
tgtccttgactcattntctccttgaagtgacgtctccattcatctttcctccttctccattctgctgccattgatcttcaagaagcaaaggatttcattgatgaagaagatccaaggcctacaagctctacatggagctacatcatgtggtatcaagagcatcttcatctaagtgatgttcttttgcttcctctatcttttgtttggtcaattcactttaattccttgttcttcatcatattctccatgtatctcctccattatcttgtggtttggttctgtttatagtagattcaaaaatataaatcgattaaatcttagatctatacttgttcttgcatttctatggttcaaattttatagatccactcttgaatcatgtnnttgtgttgattttaggttctatcttcttttagtcataatcttcttgtgcggaacctttagatctcnaatttctttgcaaatattgattagaaaagaanacatataaatctaag

SEQ ID NO: 194657 - DNA, 421 bp, Glycine max
  unsure (1)..(421): unsure at all n locations
agctttggaaagggnaggatttcattttcctttctatgccaagctactggcttagcgagcctccagtaaggacaacactcttgggctaagcgcgagcaagactctggaagaacatgagctgtacaggttcgctaagcgcaccgcttcatctcactaagtccccctcttcagttcatccattaagcgagaaaggcgcgctaagccaaaaatcactaatgtgcgctaagcgagccatacatgcgctaagcgcacgagcacgaaaaaggccacctatttaagcctgaaatcagattttgtgaggggattttggattgggattcagagctttgcatgtctaggatttctagagagagagaggtccagagttcagagagtcttgagagatgttgttgtgtgaagatctgtagagaccatagcttga

SEQ ID NO: 194658 - DNA, 419 bp, Glycine max
  unsure (1)..(419): unsure at all n locations
agctntaaggtctgcttcctgttatgtatatctctttctttaangntcccataattataatacacaaccttttccatttgatgtgttccctctcgcactttcctctattttcattcttctgcatatttatttttgttgcgattaaatgatttttacctctcccttgtggtattttggtgctttatttgttattttctttgcaatgtttgtgagataaattgtttgcaaacccatgatcaaaaggcttggattggtggttgcaatagatggctctaggcctatctttgattctgttgtaaatttgcatgtcatattgatctctatcccttttttttacatgttttaacaagtgcccatcaactgtttgataaaatgccacaatgaccattccatgtgttgtcttgaaagttgaatgagta

SEQ ID NO: 194659 - DNA, 429 bp, Glycine max
  unsure (1)..(429): unsure at all n locations
ntctagnnctttcattggggtatttgatctccttttggtgctctaaattgngggagtgtgctcaaatatatggggcaattttgatttgttttcttgcttgattaggttgaattaggggttggtatgagatggccctaggcctataatgcattttgaaacaataggacatgccacattgtccccgttctcttgctattgatgcctaaacgcgcgcccaccaagtgttcggtgaaatgcctcaatggcattagcgcgtgacttttgtaaggagacaacccatggggtattttggtttgcgcatattttcttttttttggaatatgtattcattcccgaaaaggctagagtaattgccccacatatatcctagtcctagaaactgaaattntatgcaaaaagagcacanaaggaggtgcatattgggtaaag

SEQ ID NO: 194660 - DNA, 308 bp, Glycine max
  unsure (1)..(308): unsure at all n locations
aaaaaccagcggcgcgaacaganaaacaagagcaaaaatggttcaactccaggaagagccccgcggcgcgaacacccacaanaagcaaccactcagcaccacggacgagcagaagaggnggcagaatgccgggcgaaaagaacccgccggaatcgcaagcacacaatgtgcaacaatgccggggaggggagcgcgagacaccaacgacccgcagagcacaagtcgctcacgtaagagagcgggaagagtcacgataaagatggcagaatgaaaggaacgccaccacaaaggcgcaaggcgagacacgc

SEQ ID NO: 194661 - DNA, 181 bp, Glycine max
gaggtacaaaaacaccaaagaagacgaccagcaagcagggcggaggcacaccccacctacacggccccaaacacgaaccaagcaaaaagcaccacaacggcacgaaaacggccaaaaatcagaaaagcacgacaacgacggcgacaaaagaaaccacaccacacaccaccacacaacacac

SEQ ID NO: 194662 - DNA, 319 bp, Glycine max
  unsure (1)..(319): unsure at all n locations
agctttgagccaactcaaacgataatttcttttttctcggatgtctgattgagncgccgcacatattgagacgctcgaaattgaatgttgaacctctgagccaattcaaacgacaataacttttttcacggatgtctgattgagtcccgtaacatattgagacgctcgaaattgaatgttgaacctctgagccaattcaaacgacaataactttttactcggatgtctgattgagtcccgcaacatatcgagacgctcgaaattgaatgttgaagctctgagccaatacaaacgaccataactttttactcggatgtct

SEQ ID NO: 194663 - DNA, 447 bp, Glycine max
ggaccttgaaactcagctcaacattaatttcagcgtctcgatatattactggtttcttcaaacatccgagaaaaaagttattgtcgtttgaatatgctcagaggttcaacattcaatttcgagcgtcttgatatattacgggactcaatcagacatccgagtaaatagttattgtcgtttgaaatggctcagagcttcaacaatcaatttcgagcgtctcgttatattacgggactcaatcagacatccgagtaaaaagttattgtcgtttgaattggctctgagattcaacattcaatttcgagcgtatccatatattacgggactcaatcagacatccgagtaaaaagttattgtcgtttgaactagctcagagcttcaacattctatttcgagcgtctcgttatattacgggactcaatcagacattcgagtaaaaagttattg

SEQ ID NO: 194664 - DNA, 412 bp, Glycine max
agcatgccacccagctcgccctatttacttttttgcttcttccagaagcaacagccttctggaggaatcttctgaagggcccaagtgggcttggttgctatttgcacccccatttttactaattacacccccctgctttttttttgtgattcttttttcgtaaagttacggaaacttatgaatttcgtaacgatacttgttttctttccgtaatgttacggaaccttgcggattacataatcatcccctttttgacttacagaatgtcacagaacctcactaatagtgcaacgatgctttcatttgatttccggtgtgtcaccgaaccttacggattgtgcatcaatattttcttttgttgtccggcacgttccggaatttacaaatagcctaatgatgggagccaaacacc

SEQ ID NO: 194665 - DNA, 467 bp, Glycine max
  unsure (1)..(467): unsure at all n locations
actaagctttagccnaatccgactcaccataaccttgttcatggtgagaatgtcaatccttaccctcggaagcaaaaaaagaatagaggggaaatttccaatcaaagaaaaagagaaggaaaatttccaatgaaagcaaaaaatgaaaagaaggaaaattccccaatcaaagagtgggagaaagcaaaaaaagaaaagaaggaaaattccccaatcaaagagtgggagaaagcaaaaagaaaagaaaggaaaattcccaatcaaagaatgggagaaagtaaaaaggaagaagaagaaggaaagaaagctcctgatcaaggatcgaaagataacagaagataagtgcagagaggtctttggaccggacaatatctgaacaatacagaattgccaccaaatgaacgaaataagaaggagagggaccacgacctataatatcttcttcctttgataccaaccaaattccg

SEQ ID NO: 194666 - DNA, 416 bp, Glycine max
  unsure (1)..(416): unsure at all n locations
agcttaaaaagcagagatgttttgcgtagattttgtaaagnctgcaatccacccacaaagaaatgtattattggaattttttaagcaatataatcttgcgggtagggagcaagaaagagaggaagacattgtgctttttctctgtctctcttttgcttttttgcatcatgatcaactttttcttttttgcatcatgatcaagcacatgattcacgaattaatatcacttttgcttggattaacatgcatcatgatcattcacagtaatgtattatagggatctttctcaagtttcaaagttactcacgcaattgactcgttatactttatggccaatgtcatgtttccaccattgattattgaaactacttggaagttggaagaaaaacaagcaaaagtgacacgttaattttaag

SEQ ID NO: 194667 - DNA, 399 bp, Glycine max
tcatgtctcagaatagagcttttattcttgtaccttgaatctgtgctggaacaacatgtcaaaatctgaacaagatttcgatgtttaatatttttaagcgcattgcattctgctatgaaactcttgtgagctccttttctcttaaggtttatgacctttatggcaacaacattgttttctaactcaagagttcctttgtagacagagctaaaatttccagaccctatcaagtttgctgttgagaacccatcaattccattgtgtaagctttggtatgaaactttagccaccaggtcaaatgttggtgaatccaaagatgctttcttgctcctcctcatccagtagatagttataattattaaccgtattagaagaaaagcaaccacactaaccatcact

SEQ ID NO: 194668 - DNA, 404 bp, Glycine max
  unsure (1)..(404): unsure at all n locations
atctcggtacctaacaagtcattatcattttttcgttctttagcaangaatcttctaaactcttcaagacttattctgttggcgcttctaaagccacactttcttctccttatcttttgaagcctggctaattttcttgtatcccttctcaccttggcttgcattcatcatttcagctggagtatgattggccaaatcagcccaagtaattgattttcctattgtggctggtggatacttaccgaaagcctagtccaatgtatgagctacttgacccactaatggctctccttgcaccctagctgtcaaatttgcaatcatggctacgattgcttcattatgtttacaaccttggcctttacaacctactcttctaagtatacagtaatactctaagttgcgag

SEQ ID NO: 194669 - DNA, 451 bp, Glycine max
gatcaagagatggagtgctttctgtcttctccaccagaattctgagcgacttcttcttcaatatttctatgacggactcatcaacgcggagaggagtatgactgatgctgccagtggggaagctcttggtgatatgacccttgccaaggctaggaatctaattgagatgatggcctccaactcctcacaattcattgcaataaatgatgctattgctcttataggagtccatgaggtggccacagattcatcctcatctactgtaaataaaaagcttgcaggaaaactcgatgccttggccaacctaataactcagcttgccatgaatcagaaatctacacctggtgctagagatcgtggtctatgctccttatgcgatcaccatatagatacttcgtcgctctgtgctgcaatctcgagtctatgacaacctcgatactatatcttcaac

SEQ ID NO: 194670 - DNA, 494 bp, Glycine max
  unsure (1)..(494): unsure at all n locations
ntggaagatnatggngtacccatcacatgtggnactatgtttgttanctgtcgacggngcacaacaagacntccacatccacaaagcgcgcataaacccaccattctctgatgcccacctacaactgagctcacgtactcccacgtagcccataacctcgtgtctctcaacaccgggtccccatcaatccttccaagctttctcaacatcaaagtaaatcaacattcaaacagcacaaattaccacagccaagaaaacagggcaaaggcagaaaactctgcccaaaacaccaaccaaaatcacagcttatctcacttaaagaccccagtaacaattccttcgatccaattcgttaaccgttggatcgactccaaaattntattggaagtctatagtacataagcctacattttgaccgttgggatctactaattaacatccagaactcattctgcactactctgtccacagccaaccacacacatgcatttttc

SEQ ID NO: 194671 - DNA, 414 bp, Glycine max
agcttgtcatgacccgtctctttggtgcataattgatctgtccaaacttaacagctcattctttttgaacatactgaataatcagccaggagcttacaagcgtacaagtggaaaaattactcaactcttaaagtatgttctaagtctgagtaatggaaatacatattgcttagtatttaactacaatgtttacttgacggatgagcagttcatcatagctattgaaaggtaacattttctcttattcttaattaccccttaatttgtacatgcattattaaacaaccttttaaaacaaaaatacttcatcaatattagttctcaagtctaaattaaatgccatgtataatatttatataaaagttgtttccatatgggattgataagcgtgtgtgtgtcttgttttgttaggac

SEQ ID NO: 194672 - DNA, 438 bp, Glycine max
  unsure (1)..(438): unsure at all n locations
tagaatgaacaacgctngtatttggttgccattgaccacttgtctcaatgggttgaagcgacttcatacaccaatgtgactaggagtgtggtggtcaggttcattaagaaagagataatttgccggtacgagttgcctaggaagattatcacatataatgccaccaatatgaacaataaaatgatgaaggaaatgtgtgaagatttcaagatccaacaccacaattgtacgccttacaagcccaagatgaatggggcagttgaggctgctaataagaatatcaagaaaatagttaagaagatgaccgtgtcatacaagaataggcacgagatgctcccttttttgttggatggttatcagacctcggtacgcacatcgactgggctaaccccattctctttggtgtatgggatggaggcagtgctctcatttgaagta

SEQ ID NO: 194673 - DNA, 383 bp, Glycine max
  unsure (1)..(383): unsure at all n locations
agcttaataaaacattattggaccgcgggttatgtatatgtttaacatacacttaattgcgaaatcgcgttccttattttgcctatntcaccaaaatcagcccgaaaggagtagaaccatggtccttggagtgaatgtcacactcctttatagtacacccacgtcaccatttgaatatttggtacaaaatataatattaatataagtattgtgcaaaaatagttcaaaaatcaaaggttattattgttcaatcaagaatatttttacaaccttatatattatcctttacaatataatatatatgattaaaatttattttcacatagattacaacatgtatagttatactacgccttattttatcttatattttcaaagatatc

SEQ ID NO: 194674 - DNA, 430 bp, Glycine max
  unsure (1)..(430): unsure at all n locations
ctcaagctgggaagangcttcaatggaagataagaatgagagaatggtttattattaaattgaatgatgactagtacccttgacattaacactatatgaatgatgactcatatggttcctaagtcatggatcttttttgttggaggattgacaaccgaaggcataataaactctggttgacactagcctaaataaacactatatgagcgtgaaagatacggtacaaaactttgtggtgaaaggaaagctatctatgcggtttgacaatggaaggttaaggaaacaatctactgatagatgcaagagatgtaaactaactgaatcctaagagtgtctggatgactcacattctgggtcccaacaaaacactcgctatcctatggagaaattggctacaattactacacacaaacggtagtctcgtagccta

SEQ ID NO: 194675 - DNA, 384 bp, Glycine max
agcttgaatgcacatgtctcactaaatttctttgttttttgaaggaataacaacagttacaagagaacatgaacaaaagttaatatgctaatgagacagggaaaaagttaaggtggaaaactaaattcacatttatataaaccacacatacagaaactgaaacttttatccaagttattaaggaccaaaagcataagatatatcacatgacaagaagactttgttcaaaagaattcaagatgcaaagttatgtctggtgaaacccaaatattaccaggaaattgagctttaagcttatgacggatcaacatagaaacacattagtatataatattctcctgttcaccaatacatattacacatatacatggaacaatatgagtt

SEQ ID NO: 194676 - DNA, 255 bp, Glycine max
  unsure (1)..(255): unsure at all n locations
ccgcggcagcagctctagacgcctatgtgatttttatttttacgcctcctcgctactangtgttgatgacatttattactgagaaaggtacctttagccacaatggcatgccaatctgcctcaataacgataggcgcaacatactcaacgacaatgtggaccacatccttgctaccatcactcctactaagagtacttgcacatgtggctggcaaggttgcctattgccaaagcacattccaacatgtggcaaac

SEQ ID NO: 194677 - DNA, 285 bp, Glycine max
  unsure (1)..(285): unsure at all n locations
actaagctagacggtgnaggtncaacgtgtatcgagaattatatctttttgtattgatagccatagcaacagccaggatcagaagataacatagttcaattatctgacaaacagtgatactgagtgaagcataacacgagaaatacccatgaaactgtatctaattgctgtgcttcgagctaagctattatgtcttactatcttattagaaaatgtattacatgaaaaaatatattgaatatctcgaagatataaaatatacatgagattgaatatatcaaaaaa

SEQ ID NO: 194678 - DNA, 390 bp, Glycine max
agcttcttagtttcagctgatgaagattattttctttctacttcatgcactcctctaatgacaatagcatcatttctggcactaaattgctgggagtttgaagccatctcctcaattaaatttctggcttcagcaggggtcatgtcttcaaaggctccaccactggcagcatctatcatacttctctccatgttactaagtccttcataaaaatattggaggagaagatgcttataaatctaatggtgaggacaactggcacatagtttcttgaatctctctcacaattcatataagctctctacactgagttgtctaatgcctgaaatattctttctgatggccgtggtcctggaagcaagaaattttttttctaagatactctcttga

SEQ ID NO: 194679 - DNA, 436 bp, Glycine max
ataaaactcagctccgagggaagacagagaccaatcacgagcactttcttgtgtttgaaagaagagttaattgcttgctcaaggtccaaaggaaacttgtctcatcgtttatgcgagacagagaccaacatgttagccatcgtcagcaagtaccatgaagaactaaatctatccatagcccacgagcataaagtggtggacgagtatgccctaatgtatgcggaaaatgaggctataggaagggtgatcaaatcattacatcaagaggcaacaatgtggatggaccaatctgctcttaccttgaacgggagtcaagaacttccccgattgctatccaatgccaaagtgatggcagacacctactctgcctccgatgagatccacgaacttctcatctattgtcagcatatgatataatttatgtgccatattatta

SEQ ID NO: 194680 - DNA, 382 bp, Glycine max
agctttatacaagttaactacgatgcttttttttcagggaatatagttgggtttactgatgtttgaaaaaaaattgggtttactgtttttacaacatgtgatgcgcataagttaaggcccaatttattgtcttgaatttttttcaagaaacaagaccaatttctttggagttgactaatataaatgcagcctccaaagctccaactcagttgattttcttatcgatagcaagactttcaaaaattccaattctattagagggaaatatatgcccaaacattttccagactttcaacatcacgtttatctgaaacccaataacataatgagagaccctctttctcctaaactacgatatttatagatatagctataaattgct

SEQ ID NO: 194681 - DNA, 444 bp, Glycine max
  unsure (1)..(444): unsure at all n locations
ctaagcttcgaaaagtgataggtcaggcccttatgcagatcttgaaagagcccgagtagtcgaagagaagttcaagtccatagccatcaaagtctgaaaagagtatgatgaactaagggacgtctatatggccaccgctgatgccttggaacgagaaaccaagaaggcccaaaaggaagaacacgtgccatcaaagttttgaggggctttatagggcagcaatagtaagctcaagctccgaagaggtgaaaggaatcatcacgggtcaaaggcatgatcttgaaggacgagctaaaggcttaccttangtcgaaaagaaatttgtcccaacagttaagcgagactgaatggaatatgtgggccgtcatcgatgagtgcaaagagaatctaaatctatcggcgactcacgagcaaaggctagaggatgagtactcccagatatca

SEQ ID NO: 194682 - DNA, 412 bp, Glycine max
agcttgctcataacttttgaccgttgtttatttcttgaccttaaatctagtttgctcgaattttctccctgtctagattggtaaatagccacattcaattgaaaaattgcacatatctataaagaattggattggtgtatctgaatgctacacaccttaacattcaacccttttgttgagccaaattctgcaatctgcaaccaaggaggcaagctagattgatgcggatcagcagctgaagaagcacataacctttccttggaagcagcaaggacttcatgttcacacctttccccacactggtgacagtgtggaacacaataaaacgagctattcagtggagcttataaatcagactgtgacgaataatagccacccaacggtacatatgaatccatttaactgttaaaca

SEQ ID NO: 194683 - DNA, 278 bp, Glycine max
caacgctcaaagggactggtaaaccattaccaaaacaatgtaaccgaaacacccttttgaaaaaaataggaacggggcaaaatcaatttgaaaaccttctcaaactaaatctgctattggtaatcgaatacaacaatatggcaatcgagtaccagagagcaaaaacactttggtaaaggattagacaaaaacccatgtgcaattcaaagctttgaaaaatgttcataatactcaacccgatcgagacatttcatcattcatgaaacctgagacccgaa

SEQ ID NO: 194684 - DNA, 451 bp, Glycine max
  unsure (1)..(451): unsure at all n locations
gcgcgggttcnggagacanaggtcaagcgttctcgatatgttattatgatattccgagtactttggatttggtacgaccatgccctcctgatttccagctgggaaattggcgagtggaggaacgccccggcatttacgcaacaagcataatgtaaacctttacggttgtaaaagctctataattgggcctatgctttagagtttttccttttgttaaggctttgtgtcttttgtttttgaatttataatacaaggatctttcttcatctggtcctggtctctacccgttctcattcatttgcatgtatacttctttttctgaaacggcagatccgatgacgagtccaccgaaggtactaatacctgtgacccgtctatcgacttcgagcaagatatgaatcaaacggaagatgaatgatatgacgatgtgggacttcccccacaactagaa

SEQ ID NO: 194685 - DNA, 345 bp, Glycine max
tgatgattcacatacccgacttcactttaatatagtgcaatttatatacatgtttcttttgatatatcgtgaactaatattttcttgcacataatgtacactacaggagatgaacaaccttacaaagattggttcaattaagataagcatggtgctctataacacttgtgcgcaactagttgaccaccacaaccgtacacactattatcactcaccctcaattgccctggattaccatagatcttgtggatcttaagttatgccacctcctccatgagagacaactatgtttgaatacatagtatactttcttacgaaataacaatgacttcatttgcgaaacat

SEQ ID NO: 194686 - DNA, 437 bp, Glycine max
  unsure (1)..(437): unsure at all n locations
cgacctataaatactcaagcttgaactgttctttgaccacaataactccacacccttgttcattgcattatncatattannctttcttcacaaaatccacaaaccatggctctacaatccaataattacatatcttaaatggcctacgtccccaatcaatattgtaatgtttgacaataacgaggcaacaattagaaattgatctatctaaacacgtattgtgtaaagtttggcattcttgaaaccattccaatgagactaatgccttatccaacctattcatggctcctcctcccgcccttatccaagataaccttctccctaccaatggtaactcaattacctccatgttgtctataaaggcattgaactctacaagcatacaagatacttgttggcatccccctcctcttctcttcctttcctccctacttcta

SEQ ID NO: 194687 - DNA, 413 bp, Glycine max
  unsure (1)..(413): unsure at all n locations
agcttctgaagaaagtgatgaggtacaagcctctatatgttgatcttgaaagagcccgggtagtcgaagagaagtncaagcccatagccatcaaagtctgaaaagagtatgatgaactaagggacgtcaatatggccacagctgaagccttggaacgagaaaccacaaaggcccgaaaggaagaacacgaccaaagcaaagttttgaggggctttatagggcagcaatagtgagctcaagctccgaagaggtgaaaggaatcatcacgggtcaaaggcatgatcttgaaggacgagctaaaggttttccttatgttgaaaagaagattgtcccaacagctaagcgagactgaagggaatatgtgggccatcatcgataagtgcaaagagaagctaaatctagtggcgactcac

SEQ ID NO: 194688 - DNA, 423 bp, Glycine max
  unsure (1)..(423): unsure at all n locations
actcaagctgccacccagctcgcccaggcgagcaaggttgcttcctccagaagcttctgtcttctggaggaatcttctggaaggcccaagtgggcctggttgctatttgcaccctcatttttactaagtacacccccctacctttgtttggtgattcttttttcgtaaagttacggaaacttgcgaatttcgtaacgatacttgttttctttccgtaatgttacggagccttgtggattacataatcatcccttttttgacttacggaatgttacggaacctcacaaattgtgcaacgatgcttccttnttgatttccggtgtgtcacggaaccttacggattgtgcatcaatactttcttttgatttctggcacgtcacggaacttcacaaactgcctaatgatgggtgccaagcacctcac

SEQ ID NO: 194689 - DNA, 239 bp, Glycine max
actattactagacccgatatatgcattgcagtgaacaacgtccgccaattcatgacatattctttggaaacgcactggattgcagtaaaaaaaatcctaacgcatctgaaaggcacacaactacatggtcgtcatctaacgccatctattttgcgggcatccatacactattatacctctgagagacgacaactgggcatctgaaataggtgacaaaaagtctacgtccgctgcaacca

SEQ ID NO: 194690 - DNA, 418 bp, Glycine max
agcttttaatccctccttttcatatctactttctctgattagaaaaaacatcaattcttaataattaagcataaataactgctaagtaatcattttaaggatattttcattatattgttatcataaaaaacaacgcatatttatcagctatcaaaattccccaaattaagaactttgcttgtccccaagcaaaaaaataaaatgagagcagactttgaatgctccaacacttttaataggtgtaatttttcaaattccctcagctggaccttcttgcatttgctatggtccttcaatggaagcataaaaaacattgagatagaattggtcagtagcagaaaccaatcatgttggcttgcctcactctcctcacaaggttttagtgtttctctctgcgcacaaagtgttttgaatgagt

SEQ ID NO: 194691 - DNA, 422 bp, Glycine max
  unsure (1)..(422): unsure at all n locations
atactncagctntataagtgcgggttcgggagacaaaggacgaagcgttctcgatattctatgatgatattctgagtactttggatttggtacgaccatgctctcctgattttcagctgggaaattggcgagtggaggaacgccccggcatttacgcaacaagcataatgtataccgttacgggtttaaaagctctatatatgggcctaggctttagagtttttccttctgataaggctttgagtcttttgttgttgagattataatacaacgatcgttcttcatctgttcctgggctctacccattctcatacatttgcatgtttacttctttttttgagacggcagatccgatgacgagttccccgaaggtactaatacctgggacccgtctatcaacttcgagcatgaaatgaatccaa

SEQ ID NO: 194692 - DNA, 411 bp, Glycine max
  unsure (1)..(411): unsure at all n locations
agcttcttgggccattcctgcaatctttctattggaagttagttctacaagatatttcttatcttaacgcaaaaaatgtcatgctaatccctctgattttagaacaaactcatgtaatctatttatgcacacgcgtacgtgtggaatatcctaccatttatatcaacatagaggccatccaacacattctacttgtcacacgcatatatgcattngaaaagaacatacattcttatgctcaaggcattgcgtcaaaattcacacctaatttatatcctaaacatttgctattacaaactacctacatatatttgaaatatatatcatacaaaactttattgtttcactcacatttattcatattggcgagctatttacattatgcacacacttgcattcataaaggaattt

SEQ ID NO: 194693 - DNA, 436 bp, Glycine max
tagcgagagcgtacgcactaagcgcgtgctgctatgtgtctatttcgcgctaagcgagtgttgcacgcagagcgacaatgcgcgcatggcacattttgcatgctaaacgggcgttacaattctatcattatttgcatcaaggtaattacttccagtattagcatacatttttcctataaagcactagagaagttcttcttttaacattttctaatcacacatagcaaagacgttaatgacttcattatttcattaaaaacgataataaagtaaaaaattgcgcccacttattaatccaaattgactatcacagtagcctatatttcccaactattaaatggaaagagaattatctaaaaagtcaacgagaatggccgtgttctattaaaggtatttcgagtttatatcttatatacgattggactatattagccac

SEQ ID NO: 194694 - DNA, 411 bp, Glycine max
  unsure (1)..(411): unsure at all n locations
agcttgtagaatggctagacataatacatgtgttgtgtttggtttggttcaaggataaaagggatgccccacattatttccatgacacaaatgcaaagatgatgatttggaaattttatgcaaaactggtcatgcatgcacctatgcggacactcaagtgtcaaatttttatggtcatgtgatgctagggctcangattcatttcctctattttaaatcaacccaatgtttccaaaatatgttcttttatcaattagtgcattcatcctagtccattttgggtactcgggaaaatttcacagcattcacccttcaggtgtacacacattttttcaaaaactagttatgatcagtgaattttttcaaagacaagttggaagtcatctcttttcaaaagcatgttggtttttc

SEQ ID NO: 194695 - DNA, 376 bp, Glycine max
ttcctgctcgaagatctattctggcttcacctcggactcactatatgatgtcaccaggctgaaagctcgtgtttgaaccttcgtattatatctccttgctactcggagtttggcagcttcttccctgagcttcttcgtttcttggactttgtttgtggtttcaagttctaccctcatagtttcttcattttgttgttgttggaatgatagtctctttgtcgattattccctgacttcaacggggatcatggcgcttgtgccatatgtgagtcagtaaggagctttattgggtgtagtatggggtgaacaatggtatgctcggagtatgctggggagctcctttttccatagactctaagactttgttagtctatta

SEQ ID NO: 194696 - DNA, 406 bp, Glycine max
agcttgccaaggctgagctaagcccatttttatttgatctgaattcggctaagcgatggcctgctcgctaagcacatcatattcaatagctaagcgtgacatgtcgccgctaagcccaattccttgcggcctaaattggggttcattgagctaagcgctactcatgccagctaagcccaattccttgcggccatagcagcgctaagcgatccatcatccgctaagcacctgcccccttgtattcaagatgcattattttagctaagtcagcccggagccaggtttagcgagagttgcaggttttatgatctgcaaaattcgctaagcgccccttctgtgcgctaagcccaacttaaaaaaaaaattggattttgaatttaagcttgggctaagcacgcagttccgc

SEQ ID NO: 194697 - DNA, 461 bp, Glycine max
  unsure (1)..(461): unsure at all n locations
tctngttcctntcaaagtgtgcgcactggtttggatagtgtctctgaatggtattgctgtcaatgagaacttgagcaagcattggcttatatggtctgatggagatatcttgtgtcctctatgtcagatagaggtagaatctatttcacatctcttttttgcctattcatttgctacaaatatataaataaaatgaatagcttggtcggggtatcagctgccattggctaatgaggtatcatcttattttagacaattcagtgggtttgtgtttggacataagtatcaacacaaatggtgaggtatctatgttgtggtcctttgggttctatggattcaccttaatgagataagttttcagaatggtgacctcgattatgcacatgttatggtatttagctatattctgttattaggtatatgtgctcattctttaatgtgacatcagagttgtttcatta

SEQ ID NO: 194698 - DNA, 378 bp, Glycine max
agctagagctctagaagaaggagacatatgtttatcctgcttgcgatacataacggaaagaagttcccatagcggatattcaaagaacgggcagaacaaaaacctcaatcaacaaacaaagaacgatgggcctctatttggcgcacaagaagtttgacacgaccgcataggagaggaagaaaatagagcggagggaaacaacagaggtcgttcagcaaacaaaatcaacttagagaaagggaaaggccatctaaatgacgcccaccctgatggacttatctccacaataaggaacacacgggaaacaaaaaaaagttgcctcaacgacatggcacaaccttgaaacaagagacaatatcaatagggtaaatttgaata

SEQ ID NO: 194699 - DNA, 251 bp, Glycine max
caaaagcccagaaacagcaacttttctatttaaattaaggctaaccgacaaagggtggaaaaatcaccgttcgaactgtgacagtctgaaccgcaactagcaataagcttgcgacatcaagagattgagcagcaaccaccacgcccgaaaattccaacagcgatcatacattagtgggagctctacacagggcacaggaccccaggtatatactgaactggacgcacgaatacatatacccacagaaacag

SEQ ID NO: 194700 - DNA, 362 bp, Glycine max
agcttaacgctttatttttggaaaattgttttttctatccactagcttcgtgtgtactagacattccatgtgaatccactagaaggtcgtggtcctactctaataaaaccatccgagtcatatatgtcaaataataagcaatcaatagatatattcctaaaattcctttccgcatttctggcatatatagatgtgcatcgctagatcatgaacagggaaaggacgccccacaaatgagagcctatacgtttcataggcacatgaggcgttaaatggtaagcctaatacggacggcggagtacaaaaggaaataattgtgtcaatagctagcaacttagaatatgtgaaaaactaccgtgact

SEQ ID NO: 194701 - DNA, 415 bp, Glycine max
tgcttgtacaatctccgcttgtagatgatggcgtccttgatatctatagacacatacacattctttttcctagtcgatcactcgcttaagtctccatatgctccccctttgatgttgagtctaagcttcacttgagattaagttatttaattatgtgagttcttgatgtaatgcctaatttctctccccctttggcatcaacaaaaagccctagtgcgtaagacataaaaaaaaacattcacacggtattcaatgataaatctaaacccatcatgaggcatagacatgaataacccagattaatatataaaccacatagtcatataacataattcatatatgttcagtcatactaagcacatatgtaaagacatactaaatgttctaatgtcataataatatagccaaatacacg

SEQ ID NO: 194702 - DNA, 416 bp, Glycine max
agcttagggttcaagtcaatcaatcatattctcagctcaacatgggtgcaagggataaatcattcatgcacaaggtaagctctttggctaagtggctatttcaatcaatcatggccttcatcatcttcaaactcatgcattcattcagtaatcaaagattcatgcgaaaatcggtacccaatgttagtcattctctcacagttaaagatcacacactcaccaggtagtggctaatgattaccttcacaatttacttgtcaaaccaactaacattttcagtcaggctcctaattcatgttctttctcttctaattactgcatactcattcaaagcatatgatctacgcatcacaattcactcaattcatgccattgatcaatccaaatcattcacaaacacaagattttcaaatcaa

SEQ ID NO: 194703 - DNA, 411 bp, Glycine max
cttgagccaaaatcctgactcaccataaaccttgacctattttgagaatgccaatccttaccctcggaagcaaaaaaaaaaagaaaggaaaaatgagaaggaaaatttccaatcaaaggagaaaggaaaggaaattcccaatcaaagagtgggagaaagcaaaaagaaaagaaagaaaattcccaatcaaagaatgggagaaagaaaaaaagagagaagtaaaaaagaagaaagctcctggtcagagaaaccagaagaaatgtgccgagaggtccttggaccagacaatatctgaacaatacagaattgtcaccaaatgaataaaaaagaaggaaaggaaaccacgacctataatggtcttccccctttaattgccaaccaaaatcttgtgcgccctgcactaaacaaaaa

SEQ ID NO: 194704 - DNA, 180 bp, Glycine max
taaagatatccaatctgttatatactactataatgtgaatggcctatattatgggaagttgccagataaaatacaataataatgaaaactgtgatctacctgcagggacccatcaatgtttagtaagcatggtttctcctccgagaagaaccattctgagaagacctgaccatagatact

SEQ ID NO: 194705 - DNA, 218 bp, Glycine max
gtagccgcaagcccccgcactatctcacattactctttttttgttaacgttcggctcaatgcatactaagtcgtgagggcgacacggatcggatctctgctaggggaatcttgaatcaggatacggctgggggaattaagattggcgaggcatacggtatcaacgaattgcggaccaatccgtggcggcgggggatctagtcatgcgcaatgatcggc

SEQ ID NO: 194706 - DNA, 346 bp, Glycine max
  unsure (1)..(346): unsure at all n locations
agcttgctctaaatatacattgatgtttgtttttttggaggaggncgtatgtcatttttgttttaagagtagtgtcccactggtcaaactaactttccaaatgtttgccttctcaggatatggccccgaggaagcttgcctcaaagaggtccatgaaggacaaggcacccgaaggaactagctccgctccggagtatgatagtcaccgctttaggagtgctgtacaccagcagtgcttcgaggccatcaagggatggtctgttcttcgggagcgacgcgttcagcttagggacaacgagtatgctgatttccaggaggaaatatggcgccggcggtgggcatcact

SEQ ID NO: 194707 - DNA, 458 bp, Glycine max
ctcagcctattacacatgatgcgcacgctcatacagaagagagtatcttattatatcttaaccacacctgaatgcttgtcataatcattaaacaaataatctcttcaggataaattactttattctcatagattcaaggcttactagtcagaaccattatcaaagatataaaacttaaagcatacccaaacaccaccagccatatcccatggctctagacgatactcccaataagcttctacaattcccaatgcaacatgacacatgtccacggcagctgcgccaagtcgtcttacaccctaaacattaaagtctacaatatgaagtggaacgctcataaatgacgtgcaatttaatatatgtcaaacaaataccctgctgacattcggagagttcttgaataagtctatgttcgctacccaatcatcatcatgatcatacccaaagcctgtcactat

SEQ ID NO: 194708 - DNA, 372 bp, Glycine max
  unsure (1)..(372): unsure at all n locations
caggcacgcaagctgaacgcgnaaacaaaaagatgagactattgcttttttcatgaacgaacaacccacctcgaagaatgacgtaagacacacaaaacacggccaacaagagatagctagaatagcaatgtccaagccctaaacttagaggacgcaaccatacacaaaaaggaaaaagagaaagaccgtgcgtcgcgacccacactaatataaaacacatggctcagaagacaagatgaggcacaagggagaacaaaaaatctcaccttcaatccatccactgcgtataatgacggccaacaaaggcgccaaacgctcaaaatcatacacaatgcagagaccccaccaccgcccttacgtcaactataaacg

SEQ ID NO: 194709 - DNA, 368 bp, Glycine max
agcttcaaatcaaagaagattctataacatattatcttgttctccttctttcaaagacgggttttcaaactaaaaaatattactcactcattgcttcatacaaataaatagctaacaaaatgaaaaattatttataatgaatttttgtaaccatttttctggcaatttaattttttttaaccgacttgacttgttcatcatcaacctctttatttcagctctcacttcttgggttttcttgaccaatgacatggacaattcatgtgttctccacaaaataaaattatggctataatcagttttccattgacatgactaatatatttctacttcttcctatatattaatcagaatatgctagactcata

SEQ ID NO: 194710 - DNA, 404 bp, Glycine max
tgcttattcccaaaattctgacgaattgctttcttatttgtgcacaatccgaaaaatgtgagtgacatcaccttgaggttgggcaaccaaattcaagtgcctccaccagtattatcacctgctcctgaacctatcatgcttcattctacacctgaaaaagaggatgagatagttgcacaaaagagaaagcttcctaacaaaaattatcatgcaggtggaccttcttctgtgtattctgacttacagcagccccctattcctcttccattcccacctagagaaattctaaacataatgatggaagaagcggaatatgagatcttggataccttcataacagtataagtgaacatacctcttgtagatgccatcaaccaaattaccagatatgccaatctttcgaa

SEQ ID NO: 194711 - DNA, 210 bp, Glycine max
  unsure (1)..(210): unsure at all n locations
aaaccacaacaacacaanancgaggaggccaacacctcgcatttcaacggggcgncgaagcacgaaaacgggaacatcagaaagaggggaaagagaagcacacacacacctcacaccaggccataacagcgacatagacacggccaagcgggaaatacacctaaaaccccaccgaaacacaaatcgacacctcaacacccaaaacctgcc

SEQ ID NO: 194712 - DNA, 384 bp, Glycine max
ttttttcggcgtgcgccagatcttcaacaattcatgctctcataaaactgtaccagatggccgctcaggtggcattcttataaagcgacacccttataaatctttaccctcagatgaatgggtctcacgcataggaggggtctccttcttatcctcaaacagagctgcagcctgcataatgtgaaatgaagtccactacctcgatcaaaaaaaggacccgttatcagatagcatctatgtctgattccacgttgcaatcacatataagtcggctcaaagatgcctgagccggctggtaagtcgacgtttgcgcaaatatgtacacagttgagaccatattcctacattaccaaacctcacaatttcgtattttcatataatcag

SEQ ID NO: 194713 - DNA, 404 bp, Glycine max
  unsure (1)..(404): unsure at all n locations
agcttattattttttttgcgttttgttatatctgaaatgcatatctgcagtggttattgggtacttgaattgactaaagctttattcacatcatgtaattagacaattattggattcccttggcttcattgcaatatatgtatataaatttcttatttgttatatgtgtattatatatatatatatatatatatatatatatatatatataatacattattagttattattaataattaaatatgcttatctattggtactttgattatttgctgttattatatgtgcgtatatatttaatattacttgtagctttatactagtgtgctatatctatgtgatacatgtaaatatatttaaaagctcttaagttatatatatnttatttgtataagacatgctta

SEQ ID NO: 194714 - DNA, 359 bp, Glycine max
  unsure (1)..(359): unsure at all n locations
gggncactctctaggttaaaccttgagctatactcttgttatctacacataagatgatgttggatcataactctgtttatgattcaaacaaaggatctatgaaataggttttctcatacttcctttgttgcagagttatacaaagacggagtccttgtatggctcaaggagaacggaaatttgaatcccttgtatgtgcatggtgcgtataaactctaaattttaaaggcttctcacctaggtttgttgagaaaaatggcgtaacagcccattccttttggtttttcttttataaaatataaattaacaaatatatcagctaaaattaggacatcagtcttctcactatataaaggaac

SEQ ID NO: 194715 - DNA, 408 bp, Glycine max
agcttgcttgtggagcttctatggatgttttttttttatcttcaatggggtcctttaatggtgattttccaccatggagatgcagcggaagacaaaggaaaatacgtgagaggaggcgccatccattaaggaataagccatggaagaaggagcttcaccaccaagatgagccttggataagaagcttggagaggatgcttcaatggaggaaaagaaagagggagagaaagagagagggggggagcactaaattgaaggaataaaacaggtatataagtggaactttgaagtatgtctcacaagactctcattcatcaaagatacaacaagtgttacacatgcttctatttatagactacgtagcttccttgagaagctttcttgagaaaacttccttgagaagcttct

SEQ ID NO: 194716 - DNA, 409 bp, Glycine max
agctctaaactcaatgaaaagcttgttgattttttttttataaccactggcttttaaaggaggagctcccttgagagacacatgcattggatgataacttgggtgttgcatcttaatacatttgatatctgtggcgcatagctcatcatcatagttagtgtgaagaaaagtttctaacttacaaaaatgtcttccgaggccaacactctctgttttaaacaaaaacatcctcactgtgattgatcacaacaagttgtccgaaattttgcgagttgagtctatataatggttaatccatcaccgatatcctgtaacaattactttgttgtcaagacaaagaatgatttattccggactcttttgtttaattaattaccaaaaggattaatcgactacttctttctcattt

SEQ ID NO: 194717 - DNA, 479 bp, Glycine max
  unsure (1)..(479): unsure at all n locations
caagaacaatgcaattgattagattcttgatttaatttattatagngcgctngatcacttctaggaactctntcaagaacgatataattgattacaatcaccgagtaatcgattaaagtaaaaactcatgaaaaccatatatggtctcaactgaattgtgaaatcaattatgaataactggtaatcgattaaaccagaatgaggatctttctacgagcctctcaaaagacttgtgtaatcgattacggatagcctactaatcgattaatatggagacttcatgcactaaagaagtttctaactttagaaacaatccttttgtctctacatgatgatgcatgatatacatatggatagattaagactaagatgcagcaatctatacatatgtcactcaatgagttatgcatgtaaaagacaaaactcttcaaacttcaaagctaatcttatgttgctccccaatcttaacaatctccctt

SEQ ID NO: 194718 - DNA, 408 bp, Glycine max
agcttaccatggaacctcattattgtttatttgcagaacttcctgtaggggtggccacaatgactccatcaccttgtacctgaaagacatgacacgcgtcatacataaggtatgccattgcttcataaaggtgtttggagatatgaaatctcaaaatagagtgttctcattgtagaataaaaaaatgcatagatatctagagagcacataataaagacaatagaactcactttggttataagtcgatcatgttcatagcattcaatctttgaaaggtatggattaaaaccccgatcaacaaccacctcattgatgatgtcaaatactttccctggcattgctttacctcttacgaaaatttacatcggagacgcattctatgctaatatacacaccatctcgtgttta

SEQ ID NO: 194719 - DNA, 392 bp, Glycine max
  unsure (1)..(392): unsure at all n locations
ntagaaactactagcaaatatgcgtttaacatctgtcttttaacatcaattctagaaaaatcgatggtaaaacaagtgcaacggcatctttgtaaataatagaacctcattagcatcgatttgaaaaaatcgatgttatgtatcgattttaacattaactatgaactagatcgatgagggataatagcttgttaacatttgatttctgcacattaacaatgattcttaaaaaactaatgctatgtttttttattctaagaatactgaggtgattgtcctctcactcgtgctaactcttccactcgctctgactctcaatcttttcttctgccctcaccctcgtaccacaccatcatgccttgcagtcgcatttaaaacccaaacctatacca

SEQ ID NO: 194720 - DNA, 417 bp, Glycine max
agcttctattatttttggttagaggtgttcttcttaacaaaacaaaaaaaagcaaaagaaaaacacaaagaaaaaaaacaacaagaaagaaagtagaaaaagaaaagaaataatcaattaatcaaagaaagaagaagagcaaaggaaaatagaaaagaaaaacaagttttttggaccagacgatgtctgaataatgtgcagaattgttgaaaagaaaagagaagagcaatagtagcttggttaagacatgggggtgtaaagtgatcaccttctttagttacaaaccaaatctttgtgtctgctcttctgttccacaccaaacaaaagaggaaaggaaacagaaacagaaaaggctagaacaaccaaagccaacatttcccacaaaatccgaccttattgttggatcaagtgttctcg

SEQ ID NO: 194721 - DNA, 431 bp, Glycine max
  unsure (1)..(431): unsure at all n locations
cgtatctgtggattcactctcgatctcagctgtaccatattgagaaacattantcaccacaaaaggaccaatccactttgaccttaacttaccactcatgagtccgagcctatagttatacaattaaactttttgttcaaccacaaaggccttcttaactatgaatctgtcatggaacttccttgtcttctccttgtagaatatggaattctcataggcttctaaacggatctcatctagctcacttagttgcaacttcctttcttctctatcttggtgcataaagaagttgcaagtctttacagcccagtatgcttagtgctctatacaagaagatgacatgccttgccaaagatgtataaacaagcttcacgatgaagaatcaagaatgattcaaagaggtctgatgattacacaaatgatgagccaaa

SEQ ID NO: 194722 - DNA, 394 bp, Glycine max
  unsure (1)..(394): unsure at all n locations
agcttctatttttatattaacagtaaattattatttattttttttcaaaataatagtttacattttttcttttaattataaaatattcaaacaattaaatgccttttttatttctttccaattcattttctatcctcaatcaaaacatagctaaaatgattcaaaataaccaaccccacttccctgtttcatgtatattaattaaagaaattcagaactcaagaactatttaattaacttgtgtttgctaatctcaaactctgaggcaagctctattggtcaatttttttttttaaatactaacattctgnttcagaaaacttcaacaactntacatgaattgaatggaggtccaagtgattaacaagcatgtaaagaccataaagtgcacacc

SEQ ID NO: 194723 - DNA, 413 bp, Glycine max
cttatgtatgctagacaagggaccccttcttataagctattatatatactattgcttattattaggtggggccatcaaaagtcaataatatacaataaaaaccttgtgatagcttcttaaattctatttatgagccacataatggttatatgcttacacaatatccaataataattatagacaataattaaaatacgatatcaattaaaatcaattgatttaaattccatttaaaacatttaacgtcacattgctaatataaagatattatattcacgtgtgctcaacatgaataaatagtttattataataatgcttacatcacattgctaatataaatgtgtgtaacatgacataaagaaggctctgatagtaattgttgaacctcttatatgaatatcaaaatatattca

SEQ ID NO: 194724 - DNA, 421 bp, Glycine max
atgcagcttctagtattgaagagaagtttgtttattttctatagacatttgcaaaaggtattcctttccatttagtatcaagtactttggaaagcaatttaaagtaattagtgcatcctgcctcaatcccacctatattagcactataaatatcagaatctgattttgatgtaactatatttgccacaagtgaatgaacagccacagctgctgcattaggaggtagacaaccattttctttgagtgataaatttgtcggatgaccttcacctgtacatgcagcatctagggtatcatataaaatagccactaaaggagattcctcctcggacaaagccctccgtacagccccctctaactccacagaattagatttatcattgatattggcaccaccacacagagacagatcaaccttatc

SEQ ID NO: 194725 - DNA, 218 bp, Glycine max
acgcgcggacgaagaagccaagcctgacagaaagccccaaaggagcccgaaacccagcatacttgaagaggcgaagaaagagcgccagaaaccaccaccagagcggccaatcaacccaaaacaaagagcccctgagcacaccaagccaaaagaggcctaaaaaggcgagcagcacgagagagaagaaccaacacaacgagatgaacccgacgagagag

SEQ ID NO: 194726 - DNA, 406 bp, Glycine max
ccttgaacttgctgtgggttctggaggacaactagatgtttcttggtgaaaataaggtcgtgagagtgatactaagttgaattgctaagtctagccacattgatctaacggttgcatgtgaagagaacacttggtgcataagctcgctgttcgcacatatactcttgttaagcgcaaaaagccgtgccgagcccaaaaatctctatgcatggagacatattaaatcgggcttataacaacatatcctgcttagcacgccaaaactcttgctaaatgtgaagcgaagcgtgaagctcaaaatcccctaaggcagatatattcaaataaggcttagagccctaatacgcttagccaattcctttctggtggagcttcatgttcgggcttacgtgcaaacgccacttac

SEQ ID NO: 194727 - DNA, 420 bp, Glycine max
  unsure (1)..(420): unsure at all n locations
agctttgtcttctttggatgctgacttgtgttatttatccattataatgagatggattctttagaatctaacaagacctgacatttaatagacttgcctcctggttgcaaaccaattagatgtgaaatcattgatgtgtaacaactttgatatgaaagacctcggagaagcaagtgtaatccttggtattaagattactaggtcaaaagaggaaatttctctggatcaatctcactacattgagaagatcttaaagaaatatgattactttgactgtaaacctggtagtacaccgtatgatccaagtgttaaactgtttaagaacactggtgaaggtatacgacaacatgagtacacaagtatcattggcagccataagtatgccactgattgtactanatccgacatagcctatgttgt

SEQ ID NO: 194728 - DNA, 321 bp, Glycine max
actagcaaaaccatcattaaccccagctgctctctgctcttcactatcttcgagaacaacaccttcattatcattctcagacccactttcagaaccaccctcatggaacccagtatcactagaatcagacctactaacgacaacttcaacgcctacgacttcattcccaacaccttcatcctcaggatcaagagctacaacatcatacctactaaccacaatccctccatcatctgattatctcaacataaacctacacttcagcggcgcgactccatgcaaaatttatctactcacaagcatcactatcaagggcgaact

SEQ ID NO: 194729 - DNA, 382 bp, Glycine max
agcttccatagactcctcctctcgttgttcttatattttttgcaccaccctcaaccctcctcgacaactccctacacatacatgccgccaagtcctccttccttcgtaaccccttcgtctcctctgcctttctccggctctacgacacccgcctcttcctccccttcgcccaccaactcttcctccaaaccccaccgttgcaccgaaacgctgtcgtttgaaacaccattatctccctccacgcgcacaacaaaataaggggatgaaatacggcgtgaaaaacgtgctgaaactggcattatatcatttgggggcggctaagacagagttgttgctgtctctggggggtggcggcgagattggcgatgtcttcaaccaaaac

SEQ ID NO: 194730 - DNA, 348 bp, Glycine max
  unsure (1)..(348): unsure at all n locations
tngcattctagaactagtattcggtggtgaacatcttgttgctagttgcncagtgatgaatcatagtacttcgcatcatatatgcttctcgtctttgagtaatcgagtcaccatcgctgtactcacttcttattaggagtagagattgaaaatgagaaatacacaaaatgttgaatcatggcacatgttggaatgaaggggttgttctattcacctgccggccaacaaagataataaaataattttgttaaaatattcttgcgagaattagcaaaatgaaggtaatgtctgagtggatgtgccaaagatatgttcgtttatgtcagttgcttattcctctgtcatgat

SEQ ID NO: 194731 - DNA, 366 bp, Glycine max
agcttataagacactattccacgatttgactgttttgatctttgcaaggatgtgtggagtgtgcgcgaagcttccgttcccgagagcatttctcacttgagcgtttcagcctttgctttcgtgtagcttaggaaaaacatcatttcttctcctttctttcttccaaagccatttctaacatcccaagcactttctccatcacccataaccaccattagcaaccacaaactgtcattgttctccgttgaaaccccacatcgagaggaacccttcaaccgaagcggaatcttccaacttaccttgcggcttctggagagaacgaaaccctaatctgacctttcatcttttctttgaggtaaccatgat

SEQ ID NO: 194732 - DNA, 416 bp, Glycine max
agctttcaatgttcttaagcaaaagctatcttattgtcttcccatacttgcgttgccaaactttcaaaaatcttttgaaattgagtgtgatgcttcaaatgttgggattggggttgtgttgttgcaagaaggccatccaattgcttattttaatgaaaagttaagtggtcctacccttaactattcaacttatgataaggatttgtatgccttagtacgggctttgaaaacatgacaacactacctttatcccaaggaatttgtcattcatagtgaccatgagtcccacaagtatatcaaagggcaaggcaagcttaacaaaaggcatgcgaagtgggtggaattcctagagcaacttccttatgttatcaacataatagggaaaaggaatattgaattgatctcttctccgcgca

SEQ ID NO: 194733 - DNA, 405 bp, Glycine max
atgagatgaggaagtgtagaagggtgataccttctgtttttatttcttcgaccacagagaggcacccggagatatgtcgcgggggtcaagataccttgtggacgtcaggtggggtgctattgcccaaaaccaatcttgaccaatctcgacccaacccgggcatagtcagactatgagaacctgtgatgacctaaacaggcgagctcctggcagccatcagataaaaggaataaataccacaaagcaaggaggcttgtggtggctcggcagctatgaacttgattgatgtgtgagagacggcctctggcaatcgattaccaaaggtgtgtaatccattacaaggcttaaaatgaagacaggagactaagaagggctctggtaatccattaccaccgggagtaatcg

SEQ ID NO: 194734 - DNA, 416 bp, Glycine max
  unsure (1)..(416): unsure at all n locations
agcttaacaattttgcatggttttctctttttcttttatatnccgagcttccctaactacgtataatttatcgaatctttcccaaaaaattggtatgtagagcttctgtttaagaccacttccgcatctatctcatggtagattaagtcatcagtgatcaaccattctatttgttatctgttcctactgcgtcttcaagattgtatcaagaagatggtcaacacaatcaagattaagtcatcagtgatcaaccattctgtttgttatttgatcttgctgcatctttaagagctttggaagttatttatgtgtcaaaaggaatacattcagaaagtactgaatcgttttgggatgacatccacaaaactagtatatactcctcttacaacatccattcgtctatctgaactctatat

SEQ ID NO: 194735 - DNA, 411 bp, Glycine max
agctttggagtttccaagcgccaatattttttcttcttttgtccagtcttcttctggcttcaattcatcagtgggctttccttctgtgtccagcatcttgggatgttcccagcctttgatgacagctttccaggttctgctatccagtgatttgaggaaggccaccatccttgctttccagtattcatagttggttccatccagaattggtggtttgttcactggtcctccttctttctccatgttcatcagaatttatctccctagatctcactcggtgatttcgagtgcctgctctgataccaattgaaattctgatatcaatgacagatgtcgtaccggatgtcacgacatcacgcttcagaacatggagattgtatttgactgtatgaaccaagtaataacacaaga

SEQ ID NO: 194736 - DNA, 400 bp, Glycine max
tcttatccaggcaatctcttggtggtgaagcatctctttccatagcttattctctagcgaatgacacatcctctcaccttttctcctttatcctccgctacaactccatggctgaaaagtaccattgaaagaccttattgaagttctaagatccaacctccatataagcttctcaagcaagctttcatcacttcctctctctccttactttttcctacacccttaagcttttttttttttttttatctacaattgttagtttttattcgggggagaattaagctcacaatttagttctttcttctttctccttttaccatccacccttaaactcttattttcaatcacaagactagttttatatctccatctacatgcatttgttaatcttcaaaatttc

SEQ ID NO: 194737 - DNA, 412 bp, Glycine max
  unsure (1)..(412): unsure at all n locations
gcttgccgcccatctacccagcgagctttgntgtttttttcaaagcaacaaccttctggaagaagggtctgggaggcccaagtgggccagattgctatttgcaccccccctttttactaaatgcaccccccttctatttttttggtaattcttttttcgtaacgttacgaaactttacgaatttcataacgatacttatttcccttccgcaaggttacgaatccttacggatcatgtatttactcttttttagctttcgaagaagttacagaaactcacggattgcgcaaaaacacctcttttctacttccgccacattacggagattcacggatcgcgcaagcctgcttccttttgattttcgagacgtctcatgacttcatttatcgtgcaacataggacgccaagtacc

SEQ ID NO: 194738 - DNA, 389 bp, Glycine max
  unsure (1)..(389): unsure at all n locations
ttcactttggatactngatccatttatgtcttgggtcttatatgtctttctaccccgcaagggcattggatagaagactccaagaagattgggtcacagatgcaagagaatgccctatggttctcatgagccttatgggagatttcgggcccatgggctaagtatgagcctgcttatctttgtacatattatattaaggtttcattatcttctggccatgtatttagggctccataatatacataagataccctagaaatgtaggaattttcagcccttgtatcttagggcacctcaactagattttgattaggggtagttttttaatttcacatgcattaagtgattatttgatgtgtgtggttggaaataaatttaattgaattggg

SEQ ID NO: 194739 - DNA, 372 bp, Glycine max
ctgcagcatgcaactgcctaaagagtccatgaagatttttttttttttgaactagttccactccggagtatgacaatcaccgctttaggagcgctgtacaccatcagcgctttaaggccattaagggatggtcgtttctcctggagcgacgcgcccatctcatggacgacgaatatactgatttccacgatgaaaaatggcgccggcggtgggcatcactgggtactcccatggcctagtctgatccagaaatacgccttgagtttaatgccaatgcttggtcaacaaaagacggcgtgcgtgacatgatatcctgcgtaaagtgtcagtgtatcctgtttgtgccgactctatcgccaactctatgatatc

SEQ ID NO: 194740 - DNA, 417 bp, Glycine max
  unsure (1)..(417): unsure at all n locations
gtgaaacttcctgcttttattgtttaccacagaatggcacctggagatatgtcgcgggggtcatgagaccttgtggacgtcaggtggggtgctattgcccaaaaccaagcttgaccaatcccgacccaacccgggcatagtcggtcagtgagaacctgtgatgtacctaatcatgctagctcctggcagtcaacatataaaaggaaaacaagaccacaaagcatggaggcttgtggtggctggccagctgtgaattatgtgtaatatgtggattgtggcctctggtaatcgattactaatggtgggtaatcgatgactaggctttaaatagaagacaggaggctaagatggcgtctggtaatctattaccacggggtgttatcgattaccangctcgaatacgaggtctagaagcta

SEQ ID NO: 194741 - DNA, 375 bp, Glycine max
  unsure (1)..(375): unsure at all n locations
ctgacgcgtgcgagctttgantcttgaaatcaggcgggaccttattgttagttgttcctttctcttgggcaattccttctttcccttatacttaactctaaataatattattatttcatggtctatgttatagctcgttgaggctatgtttaactctatctaggatcacatatcttgttatctgctttatatagatatatacatggatgtatatatatagtatatgtatatatatatatataaacaacattcgcgccgaagaacgagcgatgagagaagtaaaaaaacagagagagatttacgtttcaaacttagaggctaaagtttattaccatccttatttgtgtcatcaaagcgggtaggaatataatgtgt

SEQ ID NO: 194742 - DNA, 337 bp, Glycine max
cctctccgtggtcatgttattcttacccaatctgcagggtggaaaacaacctttctgcgccccttggctgcttgtttagcatagctctcattcctctgttcaatttgggccttgactatttcatggagctttttcacatagtctgatttggctggtccttccttatgcttaagaactgaaatatcaggcattggaaacaaatcaagaggagttagtggattgaaaccataaacaacctcacaaggagaacaactagtggtgctatgcaccgccctattataagcaaattcaatgtgaggtaagcaaacttcccatattttaagattcttattcaaac

SEQ ID NO: 194743 - DNA, 418 bp, Glycine max
  unsure (1)..(418): unsure at all n locations
agcttataatgattgataatcattgtctatagtgatggcgtggggcaaaagaggctgcaattcacaatcagaattccaatgtccttaggtttcacagaagtctttgcaaacagctcatctattgcaccaaacataacagcttcagcctcttttcttgcctctttcattgaggggttgggaggatcattgagaacagcctcaggaaagtaagtgctttccccaaggccagccctctcaagaatctttcgctggaattcaagagtttcctctgtgaaaaaaccactcttccgggactggtccatgaatattttctttgagcatntgtgagcctccttcngcttgtaacaagagacatttacaaagtacacgggccgtggacagtcataatgtatanggtggacaaaaatacaatgagagt

SEQ ID NO: 194744 - DNA, 429 bp, Glycine max
cttaagcaccgcagctgccactttgatccacaatgaagtttgtgatattattatgtatgagtgattcgactcataccagtataaatcaatccctccctccctcctctttctctctctctctctctcacacacacacacatatggggttcgttaatatactctcactcttttttcataaagagtctgttatcaagctatacacatgtactgtatggatttcccatccagcacctgttgtctacaggcaattatttatcatgagttcatggccaattcatggagaaagtcccatctatatagtgcaaaatttttactccaaaaaccactagttcacacttttagtccatctctgcttaatccacatactttacacacacaaatactcacccagaaatgctttagcaaacacatggacagtgaacaatacaa

SEQ ID NO: 194745 - DNA, 319 bp, Glycine max
tcctctattgtcagatggggaatgcctctaacagcaccttagtcaatgagattcttcatgcctcttaagtgcagatgtccaaatctttgatgccatatcttgacttcatcttctttggaggatagacatgtggaggagtaactggcttcttgaggtgtccatagggaacagttgtcctttgatctgctgcccttcattagaactacactcttctcactttgcaccaagcattctgaccttgtgaaggatacattgaatccttcatcacacaactgactgatgccgaacaaggatgccgtcaggcccttcaccagcagca

SEQ ID NO: 194746 - DNA, 412 bp, Glycine max
  unsure (1)..(412): unsure at all n locations
agcctttcttaaatagatatcaatgattgattgngtttcttccaacgggttcaaaatcacaattgtgcttataaaatccagttcacaaaacttggatatagagtgtatagaagtagtaaagaaaatacaaagattttatactggttcaccctaactcttgggctatgtcaagttcatcttcaaactttgaagggttccactaatcaaatccttgattacaaccaagtattctctataccacttccagctacaacaagtactctttatgccattcctaacactacacttaatctccctatgagattaagatccaagaattctttgtcactaagccactactagctttcacaaacaacatatgtttgatagaaaaagtattctaatcactcaatgagtggttacacaatgaaac

SEQ ID NO: 194747 - DNA, 346 bp, Glycine max
tgatacaaagatgatgacaatggatgacaaatgctcaaatcatcaagaacaacttgtgtgatcagacaattccgagttcagatagaatcatgagaatcaagactcagaaaatgtttgagtcagaataagattcaggtcaagatctcagagtcagatcaagatcagactcgagattcagaatcagaaaggcttaatcagatagtatgaaagttttttaaaaatgagtacacatgttttctcaaactgttaccaaagagtttactttgtattgattaccaatgtgattcaattcaaggaaagcacaccttccataagcttgtgatcatcctattggaacattctgtgc

SEQ ID NO: 194748 - DNA, 415 bp, Glycine max
agcttcctcaatcacctcattaagaactagtatgtcttgcaggatgtgtctgttttttatgaaagttgtctgcctctcatcaataagaccagatatcacttgtctcaatctatttgctaataacttagctatcaccttgtacatacatccaatcaaggagattggtctgtagtcatcaaatgactggggatgtttagttttgggaattagagctatgaaagaagcattactgcctctagggaagctgtcatgcacatggaattcatctacaaatcttctgaagtcagttttcagcatttcccaaaattctttaatgaatttgaagttgaagccatcaggtccaggacatttgtccccatcacaactccacactgcttctttgatctccaaatcctaaaaaggaacaaccaaaaac

SEQ ID NO: 194749 - DNA, 409 bp, Glycine max
  unsure (1)..(409): unsure at all n locations
cttctaatttctggattaaaccttgtctttccttattactaagngcggtattcatatttttcattctcttctccctttgccaaaaagaattcgccaaggactaaccgtctgaattctttttgtgtctctcttctcccttttccaaaagaacaaaggattaaccgcctgaattcttttgagtctctcttctctctttgccaaaaagaattcgctaaggactaaccgcctgaattctttttgtgtctctcttctcccttttcccaaagaacaaaggactaaccacctgaattctttagtgtattccttcttccttgttaaagaagtcaataacacacagttcgagaatcttttgatcttccccttccttatacaaatattcaaagactactgctgaatatctttgatcccc

SEQ ID NO: 194750 - DNA, 403 bp, Glycine max
agctagtctcaaagagggccttttttgatttgccgccgaagaaactaattccgctccggagtatgacagtcaccgctttatgagcgctgtacaccaccagcgcttcgaggccataaatggatggtcgtttctccgggagcgacgcgttcacctcagggacgacaagtatactgatttccaggaggaaataaggcgcccgcggtgggcaccactggttactcccatggccaagttcgatccaaatatattccttgagtgttatgcccatgcttggccaacagaggagggcgtgcgtgacatgagatcctgtgtaaggggtcagtggatcccgtttgatgccgacgctatcgcgcagctcctgtgatatccgctggtgttggaagagggccaggaatgtgagtat

SEQ ID NO: 194751 - DNA, 482 bp, Glycine max
  unsure (1)..(482): unsure at all n locations
taagcctccagctggcctgtgcgagctggtgctgtagtttctcctccattttccctataaaatggcgttggaggctgaggggaaagggttcagcccctttggcaattagatttcacttaaaattagtgaggagaagaagaaagaaggagaaaatccaagctgaggagcttccgtaatgcttctgggacgtttccgtgatcaattccactaacgttcttcaccattctttgtcgttctttattcgttcttcatcctttgttgatcttcgaccggttagttttcgatttcgaagctttgaattcattctatacacccttaggggtcaattctcgctttgttttaaacgagtttcaaccaattgtttaagccgtaacttcacttaatcaacgtcaaaatgaatntcaaccgatcgnnttgtgtgaatctcattaatcgccttaaataaaataaactgatctttatgttgtaccttggtaatcata

SEQ ID NO: 194752 - DNA, 416 bp, Glycine max
agctttcctatgtgaaaggtgttttttttttattgagcaccgccgaagcctgaaatataagccttctgagagctgtgaactatccggatctctcacttcgcaatcaccatccaatggataggaattcttctcggcagagccaacggtttgatcacacagctggatcacttcctcatatctacatagctgatatttaaagaaaaagttatccagcacccgctccactagaataaaagactgctcgaacagccaaatgctgactgtgacaaagtttgagtaaagtgccatatattatgagacagaaatgcagaccataaaaagagcctccgctgtcatttcaagcactatttcacagtatgaacttatcaccaatgcctcatatataagctccaatgctctctctgcatcagcagccc

SEQ ID NO: 194753 - DNA, 428 bp, Glycine max
  unsure (1)..(428): unsure at all n locations
tcttccacatgttcattcttacaaagtagttntataatttctttgtatgtaaacacattaggcaaaagggtgtaccttctcattttatcaagaaccctgaaagctgattgcacatcatctgcatcacaatatgagtgaataaatattgaataagtaaaagcgtctggctcgactctttntgacaacatatcatgaaaaatatttttagcttcatccacacgacctcctttgcaaagagcctgtaacaaattattatatgcaagcaaatccactggacatccttgttcaagcattgcttgaaacaggtcacaggctttctctgaatcaccaatctcaccccatccacttatcataatgcttgtaggtttagcagttaacgagaaacgattcttagctcgatgaaaaagatgttgagcctggctgacatg

SEQ ID NO: 194754 - DNA, 422 bp, Glycine max
  unsure (1)..(422): unsure at all n locations
agcttgcccagagatggagtccacggaggtttttcttactttctcaaaagaccggaaagcggnttctaatgactcctctgcggcttccacataaggcatagaggatgggcagctcaccaagatgtcttcctcgcctgatacgatgaccagatgcccttccactacgaatttcaacttttggtggagtgttgagggaacaactcctactgagtggatccacgggcgccccaacagacagctgtagggggggttaatatccattatttggaaggtgacttgacaggtgtgagggcctatttgtattgggagatcgatctctcccctaacctctcggcgggtgccgtcgaaggcacgaacctccattgaactcggctntaagtggtgtcgcaacctacccttcggcgggagggcgacgcgtgact

SEQ ID NO: 194755 - DNA, 365 bp, Glycine max
  unsure (1)..(365): unsure at all n locations
ctcaagcttctagagaaaactacatggagctgcctcggtaaagatgcttcccagttctttntaaccattggatcttctcgaaatttggtttgcaacttcacaagacacttgtccatgatctgaccgttgggatctgtgagaagatgtctggagtgtgctagaagcttccgttcccgagagcatctcttatttaagcatttcagcctttgctttcgtgtagcttaggaaaaacatcatttcttcttctttctttcttccaaagccatttctaaagttccaagaactttctccatcacccacatccaccattagccaccacaaactatcattgntctccattgataacccacaccgagaggaaccct

SEQ ID NO: 194756 - DNA, 426 bp, Glycine max
  unsure (1)..(426): unsure at all n locations
agcttatccaatgaatgaatggcctttcgtggtnatgcttcgcatatatagtaatatattaatattcttcatcagataactcataacgaaacagtattacattttattttgaacactataataagctaactataactatattttagtataaaaaaacataggaacacgcatgaaccatagaaaatgaagaaatcggcactgacccgtttgcaacccagtacctgttgttcagaaaaggaagaaattccctgcaaccaacattacgaaacatcagccgtaaaagaagttccctcacacttggttattttcaacgccattcttaaagttttaccatttatnttataatttgacggcaattgttcgaaagtgtgaactacgcaactgttaaaagtgtgaacttcatattaatgtcaaatgagcgtatac

SEQ ID NO: 194757 - DNA, 366 bp, Glycine max
ctatgcattcaacatacaatggcgtctgcacatctatttgaagtatcttcgaaatatctgcatgacattcccgagagccctctcgcccaagatcacgtatcatgtcttccatgagatctccgctgtgtagctcaaccggatgaggtggacatgtcgctgtatgaccaaccaactcaccatgccatatccactttgtgtacgtcgggctaaagccatcacatattagatgcgatctaatgtcatccaacgaatgactcctcccgttgacacatttaacacaacagtagaaaaaggtggcatctgtggttgctgaacgtatttgggcaaatgacagaaactcttcaaccccatgttgatatgcttcac

SEQ ID NO: 194758 - DNA, 424 bp, Glycine max
  unsure (1)..(424): unsure at all n locations
agcttatagtttaaagtcagaagaaatatgtttatttttctgactttcngtctaaagatatgagttcttctttttcaacttagcaagtaattattagtaagggtgcattcttattgaagtaaaagtttgtataagcatttccttgcgctcttcttctgagtcttctccttaagaagagtatttcatccaaggttatcaaactcgagggtttacttagactcgtgagagttccatagactcgactcgtggactcaactcgtagactcgtaagagtccacttcatataaaaataataagacaatatctataaataacatactaattaaatatttcaacaatatataaagcaaaatagtaaatcataaattccacaatacttaaataaccgagtctaataatgcatcactactagataataacttac

SEQ ID NO: 194759 - DNA, 368 bp, Glycine max
atactcaagcttatgggtgcattacttgcaacccatgtgacgaggctttttttctttagccggctcggtagggtcgaagcgggaaccgaaacgaaccaacattcacaaaccgcatattccttaactaactctttataaaccggaattaaatcccgttcgaacccattcattaccgtcttcatcatcgtcgccggcgcattctttggcactgattgcctcccggcattttgggcaaagccttgcatggtcggtggcaatttactttgccggtgaggcttcgcttcaatgctctcacaagatttgctcgtacatgtcttggatctagtgacctgcgtccgggtcaacatataccgactggtccgagaatt

SEQ ID NO: 194760 - DNA, 426 bp, Glycine max
agcttatgctgcaaatatttacaatagacctcctttttctcagcagcaaaatcaaccacagcagaacaattatgacctctccagcaacagatacaaccctggatggaggaatcaccctaatctcagatggtccagccctcagcaacaacaacagcagcctgctccttccttccaaaatgctgttgtcccaagcagaccatacattcctccaccaatccaacaatagcaacagcctcagaaacagccaacagttgaggcccctccacaaccttccctcgaagaacttgtgaggcaaatgactatgcagaacatgtagtttcaacaagagaccagagcttccattcagagcttgactaatcagatgggacaattagctacacaattgaatcaacaacagtcccaaaattctgacaagccaccttctca

SEQ ID NO: 194761 - DNA, 468 bp, Glycine max
actaagctaagataagaggctcacgattcctattccttaggttattcttcaatagacctccaatctttaatggagagggttaccactactggaaaacccgaatgcaaatttttattgaggcaatagatctaaatatttgggaagccatagaaatatggccttatatacccaccacagtagagagagtttcaatagatggtagttcatcaagtgaaagcataactatagaaaaacctatagatagatggtctgaagaggatagaaaacgagttcaatacaacttataagccaaaaacataataacatctgccctgtgaatggatgaatatttcagggtttcatattgtaagagtgctaacgaaatgtgggacactctttgattaacacatgaacgaactatagatgttaaagattaggataaatgtctaactcatgagtttgattatttaaatgaatgaaatgaaatat

SEQ ID NO: 194762 - DNA, 330 bp, Glycine max
agctcgtctggacaaagacaaggacttttcattatttatctccaaactcgaggcatgggcttaaatgcattataaaactattttattctgatgttgatatgatgatctctgcacctaaattggccactctattgtcataatcactgatggcccttccggtctcaattttaacaatagaaattgatgtaattgtgcagcaactgttgatctctttgctgtacgatcctgatgcataatttctttgtgacaaggttacaggaattcttccgcctctgacacgtaagatcaccgaagtgaataatctgatctcacaagtctcgaacatattga

SEQ ID NO: 194763 - DNA, 415 bp, Glycine max
  unsure (1)..(415): unsure at all n locations
agcttagtttctacatcggtgnntaatttattattatttaggaagactagtttctacatcgttttttaattaagaaacgttgtagtaaaactagtttctacatccttttttaattaagaaatgttgtagtaagactaatttctaagtcaacaagcttagtttctacatcattttttaattaagaaacattgtaataagactagtttctacatcctttttaattaagaaatattgtagtaagactagtttctacatcattttttaattaagaaacattgttgatcccttattgtctacatcggtgctgatgtatgcaccgatgtagtaagctgcgctttctaagtcatttattaataaagcaacgatgtggattgaatatggtcctttgcttcaaatattagtgtttcggcatata

SEQ ID NO: 194764 - DNA, 422 bp, Glycine max
  unsure (1)..(422): unsure at all n locations
agctntgatgatatggtcttcaccgacgaatgtatcaaagtgggtctaaaaagaggcaaatctgatcatcatgctttgataaatgccaaaaaaactagggcaaatgaagagggtgagaatgagggagaagcccatgctgtgactgccattcctatacagccaagtttcccaccaacccaacaatgtcattactcagccaataacaaaccttctccttacccaccgcccagttatccacaaaggcaatccctaaatcaaccacaaagtctgtctaccgcacttccaatgacgaacaccacctttagcacaaaccaaaaacatcaaccaagaaatgaattttgcagcgagaaagcctgtagaattcaccccaattccagtgtcctatactgacttgctcccatatctacttgataattcaatgg

SEQ ID NO: 194765 - DNA, 487 bp, Glycine max
  unsure (1)..(487): unsure at all n locations
tgtggaanatgaagttgggtcaatgctnggcatgtcttatgcgctccaagcaaataggtcggcattgcttaaaagcacttgttctacttattttcgtattgcatactccctcttttttctaattttggtgcattgatgtgactccatgtcaattgggaaaggctcaatgtcttcaattgggattggtcgtcgatcttcataacttgatcgggggttcagatcctccaatggggtgacaacaacgttgatattgatacttttttgtatttcttctctttcaccatattgcagggttcaatgttgcaagtctttaaatagcattcatgagccatccacctaatcaacttgacaatgacaatttcccctgtggatgagggaaattttattgccaaatgagatgtagaaataattgctccaaatntgttcacaatatgtctgccatgtatgaacattacgaagtgtctgaatccaccaaaacatatgtaac

SEQ ID NO: 194766 - DNA, 417 bp, Glycine max
agcttcaacatcagaccacttccagggtgctgtgttttcttcacatggacttgatggggcctatgcaagttgaaagccttggaggaaagaggtatgcctatgttgttgtggatgatttctccagatttacctgggtcaactttatcagagaaaaatcagacacctttgaagtattcaaggagttgagtctacgacttttaagagaaaaagactgtgtcatcaagagaatcatgagtgaccatggcagagagtttgaaaacagcaagtttactgaattctgcacatctgaaggcatcactcatgagttctctgcagccattacaccacaacataatggcatagttgaaagaaaaaacacgactttgctagaagctgctatggtcatgcttcatgccaaagaaccttcctataatctct

SEQ ID NO: 194767 - DNA, 412 bp, Glycine max
  unsure (1)..(412): unsure at all n locations
agcttgaataggaagccatcttgagagctttttatgagcntatgagcgattgtgaggtcctaaaggtggaggagacatccccactacttgtatttctgcaatctttcatctttctcttctcttcgctgtaaaggaagcttcccagttatggaaagctaaatcctctgttggatcttccttgtaggtaattgatgtaaatatctttttatctatttaatcatgttttgtgtgttcattgtgctatcaaaacttcattctaccatgcttntgccttgatcacatagatgcatgtatttttaggatcattcaacagtggaaactggtctgattcttataacttgataggacagggctagtttgtcgtattttcacgaggaatcggggtacggtaacctaantgtatgtttgtctt

SEQ ID NO: 194768 - DNA, 384 bp, Glycine max
gaacaaaaaccagctgaagcggtacccacatttccatatttttatttgtgatgtgtctactatcattgttatcatctctctctccatcgttagaggtgctactagagctgcctaatccctatacctttgtgcgtattcttcgaaatattcatgctcctacttacacatgttcttgagttgcattctatcccgagccatatcataattatactgattccacctaatgaaggcaaccattatggtcttccaagaacggacttgggaatgttccagaatagtataccaagtcacgggtgccccaataatacttttctagaagatatgcctaacaactcttctttttcgagtatgccctattttctatggacatctcacgtgatcttg

SEQ ID NO: 194769 - DNA, 420 bp, Glycine max
  unsure (1)..(420): unsure at all n locations
ncaagcttgcacctttttggctaatcaaacgttttttagtnngaactctgnggctccgtctgtggtattcgactgaggaaccgtgccagcggaagttttcttagatgaaggggtcgaaaaaggttgggagtgaagcacattggaaaactaatagtagatttcaagaaaggtcaacttctgaagaatttcgtccagtttggtggagatggtttgatcagaggtgagttccacgatggcggcctcgatgtggtccatagtggacgtggaagaagcgaaggcagccattgatgctctctcaatgaaagcgccaaattgttatgacctagtattgaagaactaggagaaactctagaaagaagattaagagaggattgcctgcattctttacataatacattcatatttatatgcacaagaatg

SEQ ID NO: 194770 - DNA, 393 bp, Glycine max
  unsure (1)..(393): unsure at all n locations
actcagcttattgcataagtagcaatgaattatgcatgtctatgccctaaggaagagaaagatgggggaagaaaggtgttatacggtatgacaagaagtggccaagttgacagccgcccaattcatcatagaagtttactactccacttggctttccaatgtggtcatggtgaagaaactgaaccggaagtggaggaagtgtatggactacacaaacctgaatcgagcatgctcgaaggatgtgtacccactcctgaacatcgaccacctagtcgatggagcaaccgaacatatgatgttgagttntctggatggatattccggctacaatcagatnaagatggatcccatggacgaggagaagacgacattcatcaccaaatctgtgaactt

SEQ ID NO: 194771 - DNA, 374 bp, Glycine max
  unsure (1)..(374): unsure at all n locations
atgtctntctatgtgtggcttaataactctcataatttagtttgctatctttttttatgaaccctcaaaaagtggttgcaaagaatgtctctattcaaacaaatattctatggggaggtcaccttgaggccaacaagatcccttgggtgaagtgggacacagcttgccttcctaaaatagtggttataggtgaaaaccanatcagcaatcatcctttctaacacacagtcctagaatcattaatactaagctagctcattgtttaaccagtaaccaacaagtcacatgtaccaaacacactcaaagcatgcatggaacttgctctgttgcanggctcacatgttccaaacacacattaacaacatttaacatgt

SEQ ID NO: 194772 - DNA, 69 bp, Glycine max
ttctccatacacattctgctctttgaggatgctcatgaccctatttattgtacgtggttatcacaacga

SEQ ID NO: 194773 - DNA, 395 bp, Glycine max
  unsure (1)..(395): unsure at all n locations
tgcagggcatgcagccttggctcgagcatagacattagacacattgtatctattgcttagcgnaatcttagtggagttgactaagtttgtagctcgtgtatgtctgctaattgttacaaacagtgaaaaacagaggacccctcatttcaaagagagatatctttcaaattgctaccaaatgaaatgaagggaacacgacatgagatctcttaaggctatgtagaaaaagtgagggaaaaccagctatgaccaaacaggtgtttacataaaacaaagatagcacctggagattcatcgcctctatattcgggatggcactacaattataagctgacctaggctcggtatatattcgctaatctgcattgataaatatggatggagaaaatacaaaa

SEQ ID NO: 194774 - DNA, 502 bp, Glycine max
  unsure (1)..(502): unsure at all n locations
agcactcaaactaggtgacacccaagacactatactttttattgtctgtcanggcatctccctcctgattcaagtccaacccagataatattntagcacacagactctatctatgaactgtacataacacacgactcctcaattattatcaaaatatttctatcttgtcgcccttaaagggtcttaacattaactcgtcgcccttaaagggtcttagcattaactcttcgcccttataggaacttaacattaactcgtcgcccttaaagggttttagcattaactcgtcgcccttaaagggacttagcattaactcgtcgcccttaaagggtcttagcattaactcgtcgcccgtaaagggacttagtattaattcatcgcccttaaagggtcttatagtcgtgtgattgtacaattcataattcacaactcaatgcacacaacatcctcatgcacatatatatctcaatcacatacactcnatctcaatcacatacatact

SEQ ID NO: 194775 - DNA, 452 bp, Glycine max
  unsure (1)..(452): unsure at all n locations
agcttcttggttggggagttctgctgacaccntgatgtaacactctctcactatccatanaaagggaattttatgggttcattgcttctaactatgcttattttacatacttatggcttgatcacccatttgtatgtatagctaggatttttagcattggaaaatgccttatagccttaaaacttggtagagcaagctaaatatcttggtgtctaggattggagttagtgatcagttcatattatttgaacagtaattgcactcttttaactaattcgttgtggatcaagagaagttaaagagagtacgcttancactagagggtcttgggttgagatttctcagcttataaacttggattcgttaataaaaaaatctcatttcatctgagaattatttataaccaatgttttacttcaaaattaatattatttatatccaaaacttagata

SEQ ID NO: 194776 - DNA, 281 bp, Glycine max
  unsure (1)..(281): unsure at all n locations
tcttcgaacttcaacgggtaagtacctcgaaccaagcttttcgattcattctatgcacccggaggggtccacattgtgttncgcgcattttgaatctcattctgtttactttttataccccctggtgacgtgcttaagccattttacttaaagtcgttctcgcttaacttaaaaataaaataaatttccaccgaacgtttgaatggtattatccattaactntggtcaaaatcaattccgaccgttcggtcgtgccgtaaccacgttggaaatcaaaaaga

SEQ ID NO: 194777 - DNA, 441 bp, Glycine max
atccttaagcaccgcggctgcagctgctaataacctgaattgagagaaatgtttttttgacacaaaatgaaaatagtaagtatttattactgtcataccctaatttcgtccggggattattacttgttgacatgcaacctttggttagccactttgagatacttggcgtcctttgttgcacaataaatgaagtcctgtgacgtgtcagaaatcaaaaggaagcaggctggcgcaatccgtgaaatttcgtgatgtggcggatatcgaaaagaggtggttttgcgtaatccgtgagtttcagtaactccctcgaaagctaaaaaagagtaagtatatattccgtaagaattcgtaacctgcggaaggaaaataagtatccgtacgaaattcgtaaagtttcgtaacgttacgacaaaagaattaccaacaaaatagaggggg

SEQ ID NO: 194778 - DNA, 340 bp, Glycine max
  unsure (1)..(340): unsure at all n locations
tgcctcanagaggtccaggaaggacaaggcagccgaaggaactatttccgcccctgagtacgacagtcaccgctntatgagcgttgtacaccagcagcgcttcgaagccatcaagggatggtcgtttctccgggagcgacgcgtccagctcatggacgacgagtatactgattttcaggaggaaatatggcgccggcggtgggcaccactggttactcctatggccaagtttgatccagaaatagtccttgatatttatgccaatgcttggccaacagaggagggcgtgcgtgacatgagatcctgtgttaggggtcagtggatccacgtcgatgccgac

SEQ ID NO: 194779 - DNA, 446 bp, Glycine max
  unsure (1)..(446): unsure at all n locations
gctangacacatactcagtcgtggcaccacattgtactactgcaggccagcatgggagacactattgacggattgcgactgacgaaggggacgatgtctatcaggagggctgacaccgtatggtcattcgttagtcacgactagctagctacacgcaagtgatgaaggacccgcgagtactaagagagtatatgaactacgctaacgaagacggttctcttgactgaaccgcctttgaacacaacatgcaatatacaaaattgccattgcgtctctacctacaaagacggtgaaccacaaatgtcattgttctcgtcatgttaattacagtaatgcttcataanaatatatttcttatagtgttaaaattaaaaatgcttcaagaaaaattaataattagtgaacaaataattgttattttggctttgcttacaacgatatcacat

SEQ ID NO: 194780 - DNA, 466 bp, Glycine max
  unsure (1)..(466): unsure at all n locations
tacggaactataaaactaagctttatggggctgatcttgagcttaatgaggtccttctatgtgtgattntccaccatggagatgcagcggaagataaaggataagaggtgagaggagacgccatccactatggaataagccatggaagaaggagtttcaccaccaagagagtgccttggataagaagcttatagaggaagcttcaatggaggataagaaagagagagacaggggggggggagcatgaaattgaaggatgaaaagaatgagagaagttgaactttaaagtgtgtctcacaagactctcattcatcaaagttacaacaagtgttacacataattctatttatagcctacgtaacttcgttgagaatcttcatggagaaacttccttgggaagcttccttgagaagctagagcttatctacacacacccctctaataactatgctcaccttcttgagaa

SEQ ID NO: 194781 - DNA, 449 bp, Glycine max
  unsure (1)..(449): unsure at all n locations
aagccttctgatctgttatacatttntgactatatggcacgagatgaagtacaaagattagagcttttgctagtcgatattaatgaatagcttaaacacttgtgcgtgagtgaaacaatggccgtgagactgtggttttagctactttccttgatattcggcatatgcctaacttcatctaatgggtcaggttacattttattcttctacttggataactgcatgtcttgtaaaagacaagagatgagggcatattgcttcattctctcatcatgcaatcaataacatttgttgcatacaccattgtacatacgaactgcatgttattgtcacttgaggaccaatgaactgttcttatttgcttgagacaagcaaactataaattgagggagtgttagcgggaaacgacaactttggttaaactcggtaattgatacactccccactat

SEQ ID NO: 194782 - DNA, 407 bp, Glycine max
  unsure (1)..(407): unsure at all n locations
gtctatatatgctgaaccatcttatcaataatttcatgttgagttttattcagatnattagagagcatctctgttatcttagtgagagcgattctcctaaattcttgagtgattcaagaacaccttggctgtatcaaacgactttcacaacctttgtgtgttgccctcgctggaaagagtgattctttccttactttcatcatcacccttgttctttcaaaccacaattccagaaaatacacctctacccagaattatctcgtggccataactcccattntacgcactcaaattaagtgattcttgagcctaaattgaatatcaaaacgagacctttcacctcgtgttggaatcacctcatatcgagccctgtagcttcagctatttgcatttctatatttctgttc

SEQ ID NO: 194783 - DNA, 468 bp, Glycine max
  unsure (1)..(468): unsure at all n locations
agcttnctgctaataagacatactatattattcatcttcgtacaaaagctaacaatagagctagtgtcggtgtggataataagtggaatccatntttaataccggaaccaaatntccaattaaaaaaaccataggtatgattttcttacagagaaactatagttgtgattaattagatttagacatttatgttaattaaatctaataagtcaaaattggatttactcgactgtaagacaaataggcacttaatccctccaaggctccacccagatcttgtttttcacaatgttttggtatagttgccctacataatagacgggaattgtggggattaaatttaaatcgattcacaataatcatataaattgctaaaaaaatcaataagtatattaaatcaatttctttatgactntgtgctgnatctatcggttgggtcgattgtattggttgaactctgaactcatt

SEQ ID NO: 194784 - DNA, 496 bp, Glycine max
  unsure (1)..(496): unsure at all n locations
ntgtaagtcgcaagtcttgcctcattaggctntgtttgaatattctcctctattaacactgttaagatagaacataaaaaggtaaaatgcatcaaactatttcataagctaaaattaacttatgaatcttagctgtcgaagaagtgtgaaaaaaaaacttatataaaagttaagtatataagttgattttggcttatggaggctcaattcattttatcttcttattgtcttttcttataagtgtttatagagaaatttatccaaacaatgttactagctttcttcttgatgcatgcaacatagagtgtaatcacatgaatgacagatccaagtaccttcttgaacactccatcacgaacacggtcaagaattgctggtacagctgacattaaagtgggcctcagagctgtagcatccgccttagtcccttattaatcatgtatgaagtgtcagtaatggtcaaaggagatccatattctataagaaccctaacagg

SEQ ID NO: 194785 - DNA, 192 bp, Glycine max
gctatataactgttcaggaaatctgcagcagtgggtacttctattgtaagctaccacctcctgagacaccttttccttgttacctatcagcaccatagttgacatttaacttttttctagtgctcaatgcacactccaaattataaactcattcaagttaaatgttattggtgttgagcaatgttgtcaaat

SEQ ID NO: 194786 - DNA, 201 bp, Glycine max
  unsure (1)..(201): unsure at all n locations
tactcagctttagccaatggactaccttgaataattcctttgatagcttctttgagcctatgttcccctttctttgttntgaagctcattacaagccttaagtgaaaaaccatgatatcaccttacccttaaggaattttggagctntggaattgttttgggaataagctgggaataagtgtgtgtgtggggggggggggg

SEQ ID NO: 194787 - DNA, 458 bp, Glycine max
  unsure (1)..(458): unsure at all n locations
ggatccttaatcacctgggctgcaactaagatgtccaatgaactttaanatcagatgtttcttggaagcatattgatcaatngaatatttatagcaaaagtattatattattaaataaaatgtaattaatgtagtccaatattatattattaaataataaattaatagtatatgttcaatgttattgcttgtttgggtcaaaattatntaatgtaggtcaacattatattataagtaaacgcctataaaataaatacaacattatattggtttaattgtgttattggcccctatagttgaatcaaatcggtaatttaatcagttcctcttagtttgttactgaaattaagttcttatacttttaaaattaatggaatttagtccaacacttattttaccgtcaaatttctaacaacattaggagacatggatttcattatagatgatatgaaactaaa

SEQ ID NO: 194788 - DNA, 492 bp, Glycine max
  unsure (1)..(492): unsure at all n locations
tactcaagctttgcatatctcctagattgcaatcttaagatataaggatgatatntattactaaatgtcagtaagaaaatttaaagaatttttggaataatgttgatatcaagataatgatgaaatttgaactcaatgtgtgtaaagataaaattgtatttcttggtgtattattaatcttttgaatatttatagaagagggtggaccttgaaataaatggaaagagtgattttggtcatatactattagttgactagtcaaatattgactctaactaatatgacttattggcgatgacctttgaaatggtgcttatatgacaaaggaataaatggcgtgtgtaaaaaaaagattatttttactatatgataaaactaggaaaaagtcattctaaaatcttataattatgataactatagtcataaaggatgatatgctatcnatcaaacacacatgatcatgaatatttttatcttgattataatataaaa

SEQ ID NO: 194789 - DNA, 367 bp, Glycine max
aaactaaaatacttgaatatcctcccatatcaaatctttctgagcaataaagagaaatacttgatttagttaacattatttaaaaccatagtatgagtattgaaatcaatttactgaaatgaaatacataattagaaaattacattggacgatgttaagtaattctccttcatcatgatcattacgattagcatgaatgtcgtcagcttcttcttctcagacgatgttaggagtgattagtgtggacaaaggactaacataagtgtccgtgatgaatcatcatcttctaccatacaccaattatttcccgtgtagacccacaccacctttcatacaaggtcttgacattaatactggttagcttgtc

SEQ ID NO: 194790 - DNA, 370 bp, Glycine max
ttcaccccttaggcacttctctctctttcgaatttgcttagaaaaattgtttccatgaagaatatccaagccgaggcgcttccgtaacgtttccgtgaggaatttcgcaaaggttttcgactgttcttcgacattcttcattcgttcttcatcgttcttcagtcttcaacgggtaagtacctcaaaccaagcttttcaattcattctatgtacccgtggtggaccacacttggtttcatgtatttttattctcgtttcattcacttattataccccctcttgacgtgcttaagccattttatataagtcatttctcgcttaaactaaatataaaataaatttccaccgatcgtttgaattatattatccg

SEQ ID NO: 194791 - DNA, 455 bp, Glycine max
  unsure (1)..(455): unsure at all n locations
actggtgtcaagagagaaagcctcataagattacttgaagcctatcaacatgatgaagatttgtgcttctctttgagaacttgatcttggcaaagaacaagacaactacaaggccttacataaaaagatttatcaaaggctacaaagagcatctaacatcataatgaagttggaccaaagtctatgtaatgccctggaattttgataacttaaaattgatgttttatgtaattcttgtgttatttgattgatttggatgagttaaggtgttgtgtgaattagctatgtgcgattgcttgatgtgattgtaaggttatgtggagtttggctgacctatgtngatttggatgagttaaaggtgttgcgtgaattagctaagtgtgattgcttgatgtcaagtnttacctaaactttgttcggtaaaccatgatcccggtctcattaaccattggatc

SEQ ID NO: 194792 - DNA, 504 bp, Glycine max
  unsure (1)..(504): unsure at all n locations
agcttatgtcatatcacatcgtcttgaaattgtccatataagtagcttctttccaatattcggctatatccatcatatgttgcatgatataattgtcaacggcaagcctggaattagaattggttttgcgcttctgtctttatatttccttcttccttcaaaatattatgtgctataacttctcctttttctaacccatcctgtaagattgcagaaaagattcagtagtagagaagttatatatgaaaattacatatgtatgcatgtgtgtctaactgtctataatactaacaattggatcatgcaggttgccacatcatgtgcactggcagcacagaaattacagcgcccagttagaatgtatctatatcganagacagatatgataatagccggaggaaggcatcccatgaagataacttacagtgttgggtttaggaatgatggtatgattactgcactataacttcagatattgatcaatgcacggatatatgtggatat

SEQ ID NO: 194793 - DNA, 485 bp, Glycine max
  unsure (1)..(485): unsure at all n locations
gctattacgtgacctatgatactcagcttctagtagaagaataaatcatcagttgaacaactagtgttttatttagatctatttaagattattgcatctgatggaattcgtttaattgttttgcataaactccattataaagctaattagaagattgctttagaagtttcaccttcagcttatatagatttagccattttttgcagtttctcgaaactatcatacaaactntgtgatcatatattcagtttttcttgtaaccacatgcaaactttntgcaaattgaaagttatacaaattcttctggttcattaaatttacagggagatagtacctgttatatatatagtccgagattgctaaaaaacttgaactttctaagtgataaatnttcctacaaaatgacaattaaacagtaaaatagtttacctataaaaagtgctattagataaactataataactggatgtatanagacaagaact

SEQ ID NO: 194794 - DNA, 374 bp, Glycine max
  unsure (1)..(374): unsure at all n locations
caccagaatcaaacaacacaagcaaaggaatcccatttatgaaacatctaccttggattagatctttggattncgaagcttcaacaccattaagggtaaagactcttccccgggtctttggatgtctagtttggtcatttgagcctccaccattttgctctttcttgggtcgtgaacaatctcttcgagtgtgtcccttttgtccacaattaaaacatgttatgcctatatcgggacaattggaggagatgtgccctggtttaccacatctgtaacaaatgatatgagtggagaaagtatagggtttgctaccgttaccacctgcanatcccctagcaacaatcctttaattgtcatgtgcggtaccatgttgc

SEQ ID NO: 194795 - DNA, 464 bp, Glycine max
  unsure (1)..(464): unsure at all n locations
agcttagcgatcatgccgccgcttagcttaatttatatcgaatngaaattggcttancttagccttggccagcttagcggacccaatcagcttgagatgcaagggttgagtgctaagtgctagagactctcggcttagcacatgaccaaagatgcacttagcgcgaggcttgtgcttancgacaggactgtttttcagaaaaaaaanattgtaagttatttttcagtcccttccttaagaaattgaaacccttatatctatcattcaaaaacaagataatatactccaatgtactgattataaagcaagttccacatgatacgatgcatgaaaaacaaagataacagaaattataactgggttgcctcccgggaagcgcttctttaacgtcattagcttggatgctttacctcaatggggatatcatgttttggtcttaccttcagaacctcttaacctacttt

SEQ ID NO: 194796 - DNA, 428 bp, Glycine max
  unsure (1)..(428): unsure at all n locations
tacggacctataaaactcagctngatacatgctgaggtttctccttatcttcaaaacaatgtgtgtttttcacacatacttcttcattaatgaatccattcaaaaaagcactcttgacatccatctggtatatcttgatatctttgtgtgtagcataggccagaagtattctaatggcctttagtcttgctactgatgcaaaggtntttcattgtcgatcccttcatgttgattatatccttgagccactagtctttccttgtttctaactactttatcttcattgagatttctcttatagacccatttggttctgccataccctaattttgttcggggaccattgtttgatggcatgcaacctttgcttgaccgcttcgaggtatatggcacccattgttgcacaatacatatagttccataacgtg

SEQ ID NO: 194797 - DNA, 431 bp, Glycine max
  unsure (1)..(431): unsure at all n locations
agctgcttgtgctcagagaatagttacttgtatttcaggctaatgatgtctaactntgtcataatatgctgaatgntctgcccaacgaggagctctataactttcctatttaaacaacttattggatcaattcataaggtgcaaaactgaattataaacttgaaatacatcaaagtagctttgtgcctctcttcttcttcatatacgtttatgttgtatggtttatactncactactcttatgctttcttagttcgattgcatagtctaatcagatcattgctcagtttgatagctatttccgcttcagcctggtagcgcataagttgatagcatcagtctaaaagttggtttcttcagtctgataacatcttgtaactaaaatcacagttggacataagcatccttttagacatgcattcacacacccat

SEQ ID NO: 194798 - DNA, 415 bp, Glycine max
  unsure (1)..(415): unsure at all n locations
tagaagacattagagtgcgcagatgtcttgtctatatatgattaanagtactcggtaaagcacactaatttagagtctaaagaggtggaatgagaagacaattaaataacaagatataaatatatatggaaagaacgaaagtaacaacattatagatcttctaaaaaaataaatattatagataatgttggagagagagagaagagatgaaagaaaaataagattatatgaatataattattgatcgtgaaaattggaaaaaaatataaagtaatacttaattatgaaaagtatgcatgtgtgtatgcacgagtaatacagcgcgcaggttatacatacgatagagttactccgattcattcatatgattatacgctcatattgaaaagaaaatataaattcttaatgagataat

SEQ ID NO: 194799 - DNA, 512 bp, Glycine max
  unsure (1)..(512): unsure at all n locations
agcttcaagaaaaggctcaggcaagacctcattcttatcacgttgacgctgagaggaggaggaagaagcttcaaattgaccactacgggtggttctcctcgtactagggccagggatatcaggggcaacagcgtcatatggggttgaagaagaagttgatgatgatgatgatgacgaagaagaagtagaagacatgagggtgtgagtgaagtgtggaggctataaaagtggggaaggaggaccagaccagaccagaccggatagggaacaaggacaaaaaggttggagataaggacacaaagtgagggacccataaggaggaggtgtctgggaattcttccttatactatcatactatgtctatgtcttgcgtatctctaaatctctacacctacctacaactntaaaaccaaacctctgcatacaccatacacctttctccatcaaatntgtactattcaataaaataatcatatcgtcattaataacaatataataatacgtataatata

SEQ ID NO: 194800 - DNA, 449 bp, Glycine max
  unsure (1)..(449): unsure at all n locations
tgtcaaacattccactntaatgcactgattaacaagatacgattagccgagaaatgcatcatcatattctcattagttattggaacataatctcaaattataaaagattcattcatgtctaagaagctccttcgaagtcttttatatgtttacaactcttagactntggtttccaaatgggatgtatgttataacttacatcaattccagatgagcttatcaagaatgccaagtacatagccacacctgtgaagggcatcttggcagcagatgagagcactggcaccattgggaagcgcctatcgagcattaacgttgagaacattgaggccaaccgccaagctcttcgcgagcttctcttcaccgctccagatgccctccaatacctctctggtgtcatcctctttgaggaaactctntaccagaaaacctccgatgggaagcctttt

SEQ ID NO: 194801 - DNA, 379 bp, Glycine max
gcacgagctgcagctatgggtgtgaattcatcccttttgtgtatttcttggagctgaggcctatgatcttctttatcaatggattcctttgcttcttggaagatgaatggttttggaatggataatgaagagagagaatagatgccactttaaggagaagatgagtctagaagatgctcaccaccttaggaggccatgaataatagcttggaggaagaagaagggagaggaatagacagcacgaaatttgtgctctaaagaactctgaatctgagttaattttaaatggcaaagttgaaaaatgcccacatatttcttttatgcctaaggtccataaattgggggaattgaattcaatcaattccttgattgaaatgat

SEQ ID NO: 194802 - DNA, 426 bp, Glycine max
  unsure (1)..(426): unsure at all n locations
ntacagcagattntagtaatgacccactaacctagaataaaatatcttaattccattaacctanggaattaanaataacttaatggctgagtgtaactgaaattgtggcaaccaaaagtcacccccaacaaccaacaagtcagccaccatttggtctcccaaaaggctaatgcctaggttgccaattgtgcccttattacaacttgaactaaacatactaaagcccttttagtggattaacccacaacatatttttggtaagccaactttacaaggatnggaccattatttatacaaactaaacactctataattgagacaaagtggtgccatttagtcctcctncatttgggccatgatacaactcacaaccttggaactttctccttgaaacttgngcttgtattcatatagtatggacagcac

SEQ ID NO: 194803 - DNA, 433 bp, Glycine max
  unsure (1)..(433): unsure at all n locations
agctacctantctataaatagaagcatgttaacacttgttgaactttgatgaatgagagtcttatgagacatacttcaaagttccacttctctccctcttttattccttcaatttcgtgctcccccctctctctttctctccctctttcttttcctccattgaagcatcctctccaagcttcttatccaaggctcatcttggnggggaagctccttcttccatggcttattccttaatggatggcgcctcctctcacctcctttcctttgtcttccgctgcatctccatggtggaaaatcaccattaaaggaccccattgaagctcaaagatccagcctncatagaagctccacaagcaagcttccatcaagtggtaatcagagcacaagagcttcaagtagggtgctcttaaacctncatttaattttttct

SEQ ID NO: 194804 - DNA, 408 bp, Glycine max
ctggccaatcccgacccaacccgtgcatagtcagtcagtgagaacctgttacgtacctaaacaggcgagctcctggcagtcaaccaataaaagaacaaagtccatgaagcaaggaggcttgtgtggcggctgaccaactatttatcttgggtgttatctgaaaaataccctctggtaatcgattaccattcgtgggtaatcgattacagagtttaaaaatggagacatgatgttaagtagcttctggtaatcgattaccaattgtgtgtaatcgattatacagtatgatagggcactggtaatcgattaccagttatgtgtaatcgattacatggtgttacctgctactggtaatcgattaccatttatgtgtaatcgattacacagtgtaacttttagattccaatg

SEQ ID NO: 194805 - DNA, 344 bp, Glycine max
  unsure (1)..(344): unsure at all n locations
ttaaccacctgggctgcagctaccctctgacctcaatcagatgattgactggtgccgcacctatctggccaaaacgctgaaagttcccgtggagaatgtgcgtattatctccccgtatatcggcggaggggttggcggcaagctgttcctgagaagcgatgcgctgctggcggccctcgccgcccgagcggtgaaacgtccggttaaagtgatgctccnccgcccctctattcccaataacaccacgcaccgccccgccaccctttagnacttgcgtatcggtgccgaccagagcgggaaaatcaccgctatctcacatgaaagctggtctggaaacctgtccg

SEQ ID NO: 194806 - DNA, 426 bp, Glycine max
  unsure (1)..(426): unsure at all n locations
ccttactttcctaacatggctaagttataggcttatagatgacanaatttcattcctctgtgctcctttttcatagataaacgcgccagcttaactagtttatacccctcctagaactcttgtttgggcccaccaaaaagagttcaactctaatctcatcacccaaggaagagggggagcaagaaagtactcatataatatgatggaattgcttgacaattgatttgataagaacttctcttcctgtctttgagagatgtcttccagaccaatgaataattctctttcagattctatcttttaagtagttgaaaatagtctttttcttcctaccaatcatacaaaggactccaagatacttncttgtgcctaggctttttgaaactcctacagacatagaaaatatttctctattgtcattagggg

SEQ ID NO: 194807 - DNA, 396 bp, Glycine max
acctcagcagaacacttatgacctctccagcaatagatacaatccccgatggaggaatcatcccaaccttagatggtcgagtccttcacaacagcagcaacaacaacaacagccttattttcataatgctgctggcccaagcataccatacatgtcctccaccaattccagctaacaagcaacaacaatcaacgactctcataaacaacaaacagttgaggccccttcgcaaccttctcttgaagaacttgtgaggaaaatgactatgcaaaacatgcagtttcacaagagaccagagcctccattcagagcttaactaatcagatgggacattggctacacagttaaataacaacagtcctagaattctgacagaatactctttcaatctggcca

SEQ ID NO: 194808 - DNA, 501 bp, Glycine max
  unsure (1)..(501): unsure at all n locations
taaggctgctcaattgctccaggttgttgcatggaatgattattgtctgtatggtggtcagcagaggagcataaaccacagactcttgcgacaggtatagatttatgattctaggccagttgggttaccaagttaaccaaggcatctagtttaccttcacgcttcttagtttcagatgatgcagatgagtttgtagctacctcatgcactcctctaatgactatagcatcatttctggcgctaaactgctgggagttggaagccatcttctcaattcaatttctggcttcagtaggggtcatgtctctagggctcaacctctagcagcatctatcatacttctctccatgttactgagtcctttataaaaatattggataagaagatgctccgagatccaatattcatatatgctctcnccactgatgtgtctagtacctgaatatcctttctgatggttgtggtctcggaagcagacatatattttctagaatactcttt

SEQ ID NO: 194809 - DNA, 502 bp, Glycine max
  unsure (1)..(502): unsure at all n locations
gatccttaagtcacctgggctgcagcntanataaggtaaatcaaaatctattgttttctaacccatcaatttagtggattttcaaggtttgacaagagaaaatgagaaatggttaattttggggtaatctctcatctcaatcaagtctataacattgatttataattgctcaaactagttttaaggtgaaaaccccaaccattcaaaatntgacctctcaacacccaatttagcctagaaaaggctcttttctttcacattagtcactcatcttccttatttgctctgcccaagcttacctacaagtcctaattgacattctaaactagaatcaactcactttagactccaatttacactaaccccaaatttagctgttcaaaccctcanaatctcacactttttcactcacatcactaccattctcaaatttaaccctaggttaactctccccatcatttctaccagttttctaccaacaatttcagcatacatatatcac

SEQ ID NO: 194810 - DNA, 428 bp, Glycine max
atattttaaagagagagatgatttgtttattgtgcttggcgtgtgcgacaggagcacatatttgtggttgtgatccaaaagtcaaaagttgtaaagaaacatgttatattgggttgcgaacaaggcggaaagaagtacaaacaattcaaagacaagttattgcgcattgttggaataaatgggaattcagaaggcaggttgaataaattcttttcaaaatatttacctaatcattattaagatgcaattaaatcatacctttcattgtatcaaagggtttctcaaaaacttgttgtgaaacaatttctatcagtgagaacaatcaattaacacacaaatgaaaaatatagttttatggccctttcatatcaatgtcattaccaagattcattaacaaacagaggttatagaaatagagatcagactca

SEQ ID NO: 194811 - DNA, 477 bp, Glycine max
tctagccaaatggacttaccttgaattaattcctttgtttcttcttttgagccttgaatccttttccttggtttgaagctcactacaatccttaagtgaaaaaccatgatattaccatatccttaaggaattttggagctttggaattgttttgggaataagtgtggggggtttttgtttcattggacaacttgttttgttggctatgcttcatgatgtattttgggccatacttgatgtacattgtatattggttaaatgttggacatgctgaatgaaatgttgtttctcaaaggctatagagtaaaaaaaaaataaaattcgataataaaaatcgaaagatagaaaaagaacagccataaagttgagtgaataagatcttaaatggcacaagaatgatgacactcttggttctactcttcatgttaaaaattatctatattttttttatttcctattttttctaaaatcactatt

SEQ ID NO: 194812 - DNA, 469 bp, Glycine max
  unsure (1)..(469): unsure at all n locations
agcttgagccagaggagccagcagcagagggggatgatgagctcacccctcttaagcccttttgttttgatgcaggtgtacacatggctcaggaggaggagacttccacagaccaaatcctagagccatccccaacacccataactaatgatgccataccatctgcaccagcatctgagttagagcagcctatctctcaggattcaccagttgctcaagtgttggatcttaatgagcatgcacaggagcaaccacaggagcaggacatttaaatntgtgcattttgaacattntagtttaattttagttattttatgatttatgttcagtcattttaatttcagtttttatgtttcagttctttaaatatcagtactttgagttgtttgcttgtaccaaaagccgtgttgaatggtgaattggttgaaaatgatatgcagtggattgttttgaatgaaatcgagtgttg

SEQ ID NO: 194813 - DNA, 447 bp, Glycine max
  unsure (1)..(447): unsure at all n locations
tctcctgcggaggaaacataacagcgcttgtttgtgaaccctattttggcaaacatttcaagaatcagagtcttttaccactctcaggtaatttacaccatttccctaattgtcgttctctctttttcccctttttcacgcgttcttctaagtcttcgttgaatggaatttaaatggctcatattttgataaattgaacttgaaacaccattcagatttcacttatcggatctccgtcaaatatttcgattaggcctgcgaanaatttatattactatctatacattattatccctnttctattgtgacaaaatggagtataaattagtctatataggaacgaatattactaatatacatatctggttaggggacttgactnttgagataaatatgcactcaattatgttctcgaatgctgatactatgaatatcttgattggatgc

SEQ ID NO: 194814 - DNA, 469 bp, Glycine max
  unsure (1)..(469): unsure at all n locations
agctngccgctggagctgacccatcaactgccctatacttttaaggctggngacatctaggcccttaatcttgacttgatagaattnttttccgattngagttgtccccatcatttacctaaaaaggggtgaatcaaggctctgatatgaatgatgcaatgcacatgcatgaaatgaaaagaaaaacaagtggtaatttacatatacaagaccgaaaaagatccatctttttaatactatgttctaggcattgcggcgccccaacgtatgcattaaaaagtgacgtgttactctaaagagacacgatatcactagatatacagcaaaactataatttatgtgctatccgcagaagaatgcatgagaacaaatggtatagagcgtgcttgctccatgcccctatttgggaacctataggataatatctaggggtctctaataactactcccaacgatccatatctcacat

SEQ ID NO: 194815 - DNA, 507 bp, Glycine max
  unsure (1)..(507): unsure at all n locations
taattagaaacaactattacgtcctaccactctangctacaataatatcctctaggccactattggcacacctttagactcatcatgaatctaanaaactcaagtattgtttaacactaagccatttttggctttcacanaacaaataatgttgattgaatacacaaatttaaatcactcaacatagtggataaacaattaagctcgaatacaaataataactttgatatgtaaatgatgaactaattaagcactattatgtatcacccaatgacttgacaatttctcacttcaaaatgctcttgtttttcacttcgtattttcgtttnttttcttcttgcacttgataacgatgccttggtcactttttataaacttcatgaaagtattcattacgagattattgtntgtctctgatntgaaccgtgtcttacaatnggagtagtgctacctgatgtgcacttngtgagagagaaagaacaacagtacagataattgtacatgctc

SEQ ID NO: 194816 - DNA, 354 bp, Glycine max
aatctaagctaaccatactttacacttgcgagggaaaaaatctgttatactttagcgggactagaagcctttgattggaatcgcacctgatctatattgtcagaaaaaaatgatatttctctaaaaacagcattttgacgtgatgattttttgaatgaggatcctcttctaacggaccaatgccactatgacatgatatggctagttgaaaggatttgtcaacgtaactggtcgaaaagacgacatgatagacaagactctttaaacaggaggcggaaccataggcataggatacgtggaaaatgcatatgttcacaattctccctccagctgtggcactgaaaacattcttgc

SEQ ID NO: 194817 - DNA, 419 bp, Glycine max
  unsure (1)..(419): unsure at all n locations
agcttctcncncaattttctatatatagggggagttttgatttgtataagggttcagccccttaggcacttctctctctttcgaatntgcttggaaaaatcgtctccgtgaagaaatattaagccgaggcgcttccgaaacgtttccgtaaggaatttcgcgaaggtttcgaccgttcttcgacgttcttcatccgttcctcatcgttcttcagtcttcaacgggtaaatacctcaaagcaagcttttcgattcattctatgtacccgtggttggccacattgngttttgtgtatttttattctncgtttatttactntttatacccccttttgatgtgcttcagccattttagttaagtcatttctcgcttaacctaanaataaaataaatttccaccgatccgttgaattgtattat

SEQ ID NO: 194818 - DNA, 444 bp, Glycine max
  unsure (1)..(444): unsure at all n locations
tcatagttgatatatgtagaaagaagctggatatgggtnttgttgatcttataatcngatttgattcgnttgttgaagacaagcctactccagaatgaaatgtttgcttacaggtaatggaagtgggtcaagaggttctggaggtaagaaccaaaacatgatatcacccattgaggtaaaatcgtcaagctaatgacattaaagaagtgcttcctgngaggcaacccagttataatatttgttatctttgtttttcctgcattatatcatgtggaacttgctttataatatgtacattggagtatatcagcctatccttgaatgttagatataagggtttcaatttcttgagaaagggactgaaaaataactcagaaaatattntctgaaaaacagtcctttcgctaagcgcaagcctcgcgctaagcgcatctttggtcatgc

SEQ ID NO: 194819 - DNA, 431 bp, Glycine max
  unsure (1)..(431): unsure at all n locations
agcttaatggtgaagcaaccagctcggctggcgagctgctgtgcaacctctacccctcanttgctataaataagcgtgagggggctgaaggaaaggggtcccaaagtccagaggtccaacattgagaagaaagaagagaaaggaagaagaatgaagagaaaacaaagccgaaacgcttctgaatcacatccgtgatcgattcctacactgttcgtcgttcgttcatcgatcaatcttngatcattcttcgggcgttctttgttctttggccggttagtctctatttttaagttttgaattcactctatggacccttagggtcctctctatttctttgtgcattngcatctccttctcatatcatcggggatcgcttttcttntgtaaagaagntntaaccgatcgttagtactgcaacgccttaatgactc

SEQ ID NO: 194820 - DNA, 505 bp, Glycine max
  unsure (1)..(505): unsure at all n locations
gatcttaagtcacctgcngcaatgcaagcttctttggaccttgaacaagctatcaacttctctttcagaaccatgctatgtgctcgcgactggtccctttcttcccttcgcaacttgagttcattattgctaccccatagagctccgcgaaatttgttccggccatactcttccttgcgagccctcttggtttcttgttcaagggctcttgcggtaattgcattctcttcccgtaacccggcacactccttccgaacgtgtgtagcagccaacttgaacttctccttggcgagatttgcctctcctaactcgctttngagagcttggacttcttcgtcctcttccggtgcttcaaaattctcttcgctgacgacttttaacttggcgagccaatctatacctcgtatgcgaactttcagccattcgtggtacccaccaatgatgccattacgaatgcctctagctcttgatctttcttaacggggttccatgcttatggttcttt

SEQ ID NO: 194821 - DNA, 507 bp, Glycine max
  unsure (1)..(507): unsure at all n locations
tattctctaatggacataanggtatatatattntggatcccttttgtttntgtcttgcataagctctggctctgntattatttattcatacatatgttggctgtgttgactatgaatattgtattatgtgtggcaccactttttgtttctctattatagtttaaccttttccatatcgttggtgattatcggatatggctgcaatttagtataaaggctaaaagagtgactcaactaggcatgtatcgtgtacattaaaaacttggtgtgcgtttgaattaatttatatttgtatctagaaatgctgttagcaaactactagagaacttctatccgaaagctattttatgaaagaaatatttgcacaaccacagaatgttcttactaatntgttngcattccacaatctagtaattaactagttatgctaacgatggttggttgtgatgctaatcacgtcccaatatgaaacaataagattacattagattctggatttcattttgt

SEQ ID NO: 194822 - DNA, 184 bp, Glycine max
  unsure (1)..(184): unsure at all n locations
agcgacgcagcagcacgcnagacaaagcaacagccatttgattttatattccgcacaccacaacacactaccaccgaaaaagagagggggagagacagggaagatcttccatgacatggcctgacaattatgatgcggcataacgacatcgactattatttccatctgaatgtccatgcatcag

SEQ ID NO: 194823 - DNA, 473 bp, Glycine max
  unsure (1)..(473): unsure at all n locations
agcttctagagaaagctacatgaagctgttttttactaacactgcccagcctntgttaaccgttggatcttctcgaaatttggtttgcagcttcacaagacacttgtccatgacctgaccgttgggatctttgagaagatatctggagtgtgctagaagcttccgttcccgagagcatctcttatttaagcatttcagccattgcattcgtgtagcttaggaaaaacgtcatttcttcttctttctttcttccaaagccatttctaaagttccaagaactttctccatcacccacaaccaccattagccaccacaaaccatcgttgttctccacaccgagaggaacccttcaaccgaagcggaatcttccaacttggcttgcgggtttggtagagaacgaaaccctaatctaacctttcatttctttcgaggaacaatggtctatgcttgttcttggtagttcatctggcttg

SEQ ID NO: 194824 - DNA, 483 bp, Glycine max
  unsure (1)..(483): unsure at all n locations
ntggcattgtcatatccaaatntcattctgtgacaattgtttatcgacatgcggattattgccggtcacgttgagctgcttaaagccaattgccgtgcgatccataagatttcgtgatgtttcagaaggaaatgaacaaaaaactcaaaatgggggtgaaaagatcattntagggggtgttcttcagccctgggcccatctaggcccattatgaagcttcaacatgaagcaaccggctcgccagctgttcgcactctgggatactacttgcttgtgtggatgcgaaatctaccggcaagtgcaccgggttgtcaagtatataatttaaatggtgtgaactgagtatcgaactcanggaacttgttcatttggtaaaggtttgttcaataagcaggcatttgcaaacagaaatcatgattgtgaatgaaagtaatagtatgttctattctatatacaaagcaataaacgtgagcaattagtgtg

SEQ ID NO: 194825 - DNA, 463 bp, Glycine max
agccttatggtgaatcaaaggtgattcatttgtgttttgatgataacaaaagatgatggcaaaggtgatgactataagttcaaagatcaatgaagaacaattcaagagttcaagattagaatccagaagaattcttgactcaagaaattcaaggttcaagatctcaagaatcaagaacaagattcaaggctcaagattcaagaatgaagagacaactcactcaagacacgtattataaatgtttttcaaaactttgaatagcacatgagtttttgacaaaacctcttaccaaagagttattactctctggtaatcgataccatattattgtaatcgattaccagcagccaaatgagtctgaaaaagtttctaactgaattactacgctccattatttcacaagactgaatcgactacatgtttgatattcataccagtgccctgacgttgaattaaattcaat

SEQ ID NO: 194826 - DNA, 414 bp, Glycine max
  unsure (1)..(414): unsure at all n locations
agcttgagccagaggagccagcagcagtaggggatgatgatctcacccctcttaagccctcttgttgtgatgcaggtgtacacatggctcaggaggaggagacttccacagaccaaatcctagagccatccccaacacccataactaatgatgccataccatctgcaccagcatctgagttagagcagcctatctctcaggattcaccagttgctcaagtgttggatcttaatgagcatgcacaggagcaaccacaggagcangacatttaaatttgtgcattttgaacattttagtttatttttagttattttatgatttatgttcagtcattttaatttcagtttttatgtttcagttctttaaatttcagtactttgagttgtttgcttgtacaaaaagcgtgtttgaatg

SEQ ID NO: 194827 - DNA, 475 bp, Glycine max
  unsure (1)..(475): unsure at all n locations
tctcctgcggagganacataacagcgcttgtttgggaaccctattntggcaaacatttcaagaatcagagtctcttaccactctcaggtgatttacaccatttccctaattgtcgttctctctttttcccctttntcacgcgttcttctaagtcttcgttgaatggaatttaaatggctcatattttgataaattgaacttgaaacagcattcagatttcacttatcggatctccgtcaaatatttcgattaggcctgcgaaaaatgtatattactatctttacattattatcccttttctattgtgacaaaatggagtataaattagtctatataggaacgaattntactaagataaatatctgtgtaggggacttgatctttgagataaatatgcactcaattatgttctcgatgccgatactattaattcttgatggatgctggtggatagaaagttatataagcatggtgc

SEQ ID NO: 194828 - DNA, 461 bp, Glycine max
agcttcttcacatagtccgcctttgcttgaccttctttatgctctaaaacagaaacattaggcataggcaaaagatcaagaggagtttgtgggttaaaaccataaacaacttcaaaaggagaacaatatgtggtgctatgaacagctctattgtaagcaacatcaacatggggtaaacaagcttcccaagattttaagttcttcctcagaactgtcctaagcaaagttcccaaagtcctatttaacaacttccgttgcccatcggtttgtgggtgacaagtggttgaaaataacaatttattgcccaactcgctccacaaagtcctccaaaaatggcttaggaacttatagtccctatcactaacaatgctccttggcaaacattggagctcacaatcttcttgaataacacatcagccacatgggaagcatcatcaactcttttacatggaataaaatga

SEQ ID NO: 194829 - DNA, 440 bp, Glycine max
  unsure (1)..(440): unsure at all n locations
cttcttgagaaaacttccttgagaagcttctgtgagataactttcttgagaagctagagcttagctacacacacccctctcataactaagctcacctccttgagaatcttccttaagaagattcgtaaagaagctagagcttagctacacatacctctctaatagctaagctcacctccttgagatgagaagctagagcttagctacacaccccctataatagctaagctcacccccatgacaaaaaacatgaaaataaaaaanaaagtccttattacaaagacaactcaaaatgccccgaaatacaaggctaaaaccctatactactagaatggccaaaatacaaggccttgacgaaggaaaaacctattctaatatttacaaagataagtgggctcatacttagcccatgggctcgaaatctaccctaaggctcatga

SEQ ID NO: 194830 - DNA, 383 bp, Glycine max
agctacacccctactatgcctttgttgttgccgtttaaaaatccctggaaatggctctctactcctttgaggtggtaagcaacactatcatagattccctctcgatgcggacccgcatgtctggctgcggccaatgattggcggcactgtgtgatgatagggcataactatgagtctggaatgggcttgggaaagaataatgatgacatgaccacgcttagtggacatcaaggaaaaccgcggaaagtttgggctaggctataatcccacgcggactgatgtgagaagaagcattctataaaggatgaacatgggcgcatgcccgcaactaaggccacaagcgagggaggaccctccttgacatatcaatataatcttcgtga

SEQ ID NO: 194831 - DNA, 432 bp, Glycine max
  unsure (1)..(432): unsure at all n locations
acactattaaactaagctttaccaatgactacctgactaatttctttttagctcttttgagccttgattccctttccttggtgtgaagctcactacaagccttaagtgaaaaaccatgatatcaccatatccttaatgaattatggagcattggaattgttatgggaataagtgtgggggtttttgattcattggataacatgttatgttggccatgcttcatgatatattntgagccatacttgatgtacattccatattggttaaatgttggacatgctatatatgatgttgtttctcataggctacagagtacaaataaaaatcattattaaataaaaatcgaataagaaaaagacgagcagtaaagttgagtgaattagatcttaaatgacaaaatatngatgagactccttggtctactctatatgt

SEQ ID NO: 194832 - DNA, 310 bp, Glycine max
  unsure (1)..(310): unsure at all n locations
tcagtgataaataacgagaaggaggagctaattcctactcgggtgcagaaacagtggagagtctgcattgactataggaggctgaaccaggttaccaaaaaggaccattttcccctgccattcattgaccagatgctcgaacgcctggcaagtaaattccactactgtttcctngatgggttttctgggtatatgcaaattactattgctcctgaagatcatganaagaccacattcacctgccccttctgcacttttgcctataggaggatgtccttcggcccgtgcaatgcccctgtgaccttccagc

SEQ ID NO: 194833 - DNA, 459 bp, Glycine max
  unsure (1)..(459): unsure at all n locations
tgagctcgttgttgctgccccatagagctccctcganacctatttcttgctccattcttcctttcaggccctttttgtttcccgctctaatgcttcgatcatagtcatgttgacatctctcagcacatcacactctttcctaaccctagtgactgtcgtctttagcttttccttgatcactcttgtttctttgagctccactttcaaagcttgcacttcttcgctntcctcagggactttagcttctttcctacttacgcactttagctttgggagccaagttatcccttgtgtcctagacttcaaccacttttgattgccgccgatgactccattgctacttcccctaagctctgtatctttcctctccactatattccatgctttacaaattctctnaagtatctctgcatttggttcatatgaacctcatgcgatgaaaggcacgatgatatcctt

SEQ ID NO: 194834 - DNA, 410 bp, Glycine max
  unsure (1)..(410): unsure at all n locations
ggaccttaagcaccgcggctgcagctgctcaaattacatagatgttgatnttgggatttgtcgatgccattttgtctaagagtagtgtcccactgtgaaaactaactttccaaatgtttgccttcgcaggaaatggcctcgaggaagcttgcctcaaagaggtccaggaaggacaaggcagccgaaggaactagttccgctccggagtatgatagtcaccgctttaggagtgctgtacaccagcagtgctccgaggccatcaagggatggtcttttctccgggagcgacgcgtccagctcagggacaacgagtatgctgatttccaggaggaaatatggcgccggcggtgggcatcactggttactcccatggccaagtctgatccagaaatagtccttgagttttatgc

SEQ ID NO: 194835 - DNA, 450 bp, Glycine max
  unsure (1)..(450): unsure at all n locations
tactcagctattacactgtgcgcaccctatgaattgataatattttctttatccaacatatgattgctngncataatcattagacaaataatctcttcaggaaaaactactttagtctcaaagattcaaggcttactagtcagaatcattatcaatgatataaaactcaaagcataccaaaacaccagcagccatatcccatggctttagacgatattcccaataagcttctacaattcccaatgcaacatgacacatgtccacggcagctgcgccaagtcctcttacaccctatacatcaaagtcaagaatatgaagtggaatgcacataaatgatgtgcaatttaatagatttcagacaaataccctgctgacatccgtaaattctttgaataagtctatgttcgtagcccatgcatcatcatgatcatacacaaagcctgtcactat

SEQ ID NO: 194836 - DNA, 346 bp, Glycine max
aacacatggatgcgattcttgaagtctaccttagggatttgactcaaagattgctctaattgagagtcgcctaccacacatcaccattgaagaagctgaaggttacattcttacgcaagaactatgaattctaaaaatacactacactcgaatctttgagttattccttcacaccaacagtgaatcttactcaaatgagctcttcgcattccactgagaatgattactcatattcgtactttgacaccaatacaatgtataccaatcagtattcctctgattctggaggttctggtggccataattggccgcggcggaggaaggttcaactgcagtggtgatcatg

SEQ ID NO: 194837 - DNA, 424 bp, Glycine max
  unsure (1)..(424): unsure at all n locations
actatggagattagtgtgtcttataattacctcaacagtggccatntggaatgctaagagggaatagtataatttgatgaagtatgaactgtgaaggaaagctaagaataaaatagagtggttgtgagttgatcgaagtaagagaggtctaaatttatagttgtagagtcttcagcactaatacctctttagagagtgtgaggaatgcgcacttccaagaatcttcttcatcacacatctcttgccactatataccataagaataaatatatatattaccgagatctccatcttcagttgtaaatgatttgtgtttcctttcatttattttaaaaattttctttggcaataactagattagagaacacgcaaattattatataatatatattatatatattatgcactctttatgcaatattta

SEQ ID NO: 194838 - DNA, 369 bp, Glycine max
  unsure (1)..(369): unsure at all n locations
acactatgatactcagcttggtntaaatttcgagcgtctcgatatattacgggactcattctgtactttctagtgaaaagttatagtcgctagaatttgttgcgagcttcggcttaaattttgagcgtctcgatatattacgggactcaatctgacatccgagttaaacgttattgtcgtttcgaattgctacgagcctctcgttttaattttgagcatctcgatatgttattggactcaatcaaacttcccaatgaagaggtgttgncgtcgtattagctacgagcttcggtttcaatttccagcgtatgaccggactctatcggacttccgagagaaaagttattgccgttgaaatcgctggaactt

SEQ ID NO: 194839 - DNA, 435 bp, Glycine max
  unsure (1)..(435): unsure at all n locations
agcttcaaagggccgaaagagacgagttgagggttgattgaatgatatnggaggacaaattgaagtcttgtcaaaggttgaagaggaacttgaccgaacagttgagtaggacgaaagagaacatgtgggcaatcattgaccaatataaaaagaagctaaatctagctacaacccatgagcaaaggctagaggatgaacatgncaaagtatcagtcctgcaagcggaaagggaagcaagggagagagcgatagtatcattacatagagaggctatgatatggatggattggttcgctctcactttgaatggaagtcaagagcttccaagacttttagccaaagccaagacaatggcggacgtgtactcggttcccgaggaagttcatcgactttttgattattggcagcatatgatcgagttgatgttccacataa

SEQ ID NO: 194840 - DNA, 474 bp, Glycine max
  unsure (1)..(474): unsure at all n locations
ntggacanaggaagtgttcatccttggtttntgtgaggcctattaaggacataccttggatttgtcaagcctttggagaaatgacactcacctagggaggaccttgggtttaatgagctnttagagatacgagactcaccaatggtggaccctatgtttgacaagcctttgaagaagcgagactcaccaagggtggaccttgggtttgtgagctntttggagatgtgagacttactcaggcagaccttgggtttgatgcacctttggagaagcaaaactcactaagggtggaccttgcgtttgacgatcctttggagatgcgaaactcaccaaggttagaccttggatttgacgagcctttagaaaagtgagacccaccaaggatggaccttgngtttgataaacatttggaatagcaagactcaccaagtgcacaccttgggtttgatgagccttataagatactagactcac

SEQ ID NO: 194841 - DNA, 336 bp, Glycine max
  unsure (1)..(336): unsure at all n locations
agctntggaaaaggatgctttcaccttctctctatttcatctgctggctaagcgagcatccactaagtgcaacactcctgggctaagcgagaggaagaatctacaagatgatgagttgtacaggtttgctaagtgcaccgcttcatctctctaagtgcaccgctctcagtcatccgctaagccgagaaaggcgcgctaagccaaaaatcactaatgtgcgctaagcggtccatacatgcgcaaagcgcacgagcacaaacaatgccttctatttaagcctataatctaatttagagaagggagtttggactggcattcagagctgtgcatgtctag

SEQ ID NO: 194842 - DNA, 332 bp, Glycine max
gtggggaacggttaccaacccggtatgggtttaggcaaagccaacgacgacataactagcttgataaatgccaaaggaaatctggggaagtatggtttaggctataaacccactgaggcggatataaagagaagcatcgcggaaagaaagagcggtggtcaaagctcgcggttgaggcaagaaagtgaaggacgcccgccctgccacataagtagaagctttataagcgcgggtctgggagacataggtcaagtggtcacgatagacgaagatgatgttccgagtacattggatttggacgaccatgccctcctgtattccagctgggaaat

SEQ ID NO: 194843 - DNA, 459 bp, Glycine max
  unsure (1)..(459): unsure at all n locations
tacggacctataatactcaagcttgatatggtaagtaatgcctcanaacttctattatatntcttgtttctgaagtaccgtttttctcactaacatctctntttataacattaatctctttaatcctctcatttgtactaattactttatcttacanttttcttccttttcttctcatctccttttctattaaaaaagttgcccgattttgttatataaatgcaatttctcttttcattttaccaaactttatataaagatattntatttgtttcaccaggacatatttgctgctggaactgatacttcagcatcaacactagagtgggctatggcagatatgatgagaaatccaagagtgagggagaaagcacaagctgaattgagacaagcttttcgagaaaaggaaataattcatgagagtgatctagagcaacttacttatttgaagttggtgat

SEQ ID NO: 194844 - DNA, 492 bp, Glycine max
agcttcttatccaaggctcatctttggggagaagctccttcttccatggcttattccctaggggatggcgcctcctctcacctcttctcctttgtcttccgctgcatctccatggttgaaaatcaccattaaaggacctcattgaagctcaaaagatctagcctccatagaagccccacaagcaagcttccataaataaacatcaagttcaatgatactaagcaaatattaaaagaaatactaagtgttcatatgtcataataatatagccaaatacacggctagaaatcaaaatactaataataatagtaatgtctaaaatgatggtggtggtggaggtaaatcaaggtagtcgcgaatgatggtgacatcttcttcaacctttgtgatccatgagtccatttcgtcgaatcgcatgtccacttgtcgttccaaagcatcaaaccttttaccaacatagggtttgaagtccatcaaacctgtccaaaatac

SEQ ID NO: 194845 - DNA, 488 bp, Glycine max
  unsure (1)..(488): unsure at all n locations
gtgttatgttgctcccctatctcttacatagatatcattagccacaacatcattcttagccaaatcaaatcccgaggagaagctggtcatatacctctnggtctccaatgaaattgtgagtgcggccgtcgtttaggagcatggagaagttcaaaaaccaatttatttaataacttgagtccaacacgagactgagaccaaataccaactcatagagaaagttgtgctagctttggttcatgtggcaagacgactttagaaatatttccaaagtcgcttagtagttgttagaaccacatgttctatttcaaaggtgttaaggaagcttgagctagtaggaagaatgatagcatgtgattgaggccgtacccgtatcaaataaacattaaaaatgcaatatctaggaagtgatcctaggtcgtctcccaacgagtaatggtcaaccaaatgttcataacagattgggtataaacaataacgaatggggg

SEQ ID NO: 194846 - DNA, 512 bp, Glycine max
  unsure (1)..(512): unsure at all n locations
gcttcttataattatagggtcttcttcagcaagtgtccattatctctaaacagtctcatttcttcgttaaaggcttacgtctgaagaagtgttcattggggtatttaatagtcctctccatgctaggagactctctttagctttcttgaagcatactttcaacaaaaaaccatgttgctttgctcatagtaggtctattataacaagcataatagggcacttctttngagatgnttgaacttataggcgttaattattttctccttaggactttgacaatcctaggaagaatggttttaaaacaactcctgcaaaatgaatctcaaacacagaatagtaaataacgttgtagatgctctaccacaaattaacattngtctactcttgtctgatgtatcagacgcagattcaatgtgttttatctgactacatataagacacaactcttaatncttttaattatttccatctaatcaaaatattaagagctagattcccttatgactcacata

SEQ ID NO: 194847 - DNA, 485 bp, Glycine max
  unsure (1)..(485): unsure at all n locations
aaagagggagagaatgtgatttgtgggagcacgaaattgaaggaagaaaaagggagagaagttgaactttgagttgtgtctcacaagactctcattcatcaaagttacaacaagtgttacacatgtttctatttatagactatgtagcttccttgagaagctctcttgagaaaacttccttgagaagcttctttgagaaaacttccttgagaagctagagcttagctacacacactcctataataactaagctcacctccttgagaagcttccttgaaaagattcctaaagaagctagagcttagctacacacacctctctaatagctaagctcacctccttgagatgagaagcttgaacttagctacacacnccctataatagctaagctcacccccatgacataatacatgattatacaaagaaaagtccctactacaaagactactcataatgcctcgaaatacaatggctaaaccctatac

SEQ ID NO: 194848 - DNA, 411 bp, Glycine max
  unsure (1)..(411): unsure at all n locations
agcttggatgctncttctccttcctctccaatttctaaatttgctaaacatccctcgtagaatatatgataaaagagccaatccctacttgaagtttataatccaaccctgcaaatcaaattcacatgaccaaacatcacaaactgtctaagaaaataatgttacttttcagataaatattgagggtcattcggtggtcaggataggatacgataggataatgctgtaatccgttggttgttgtgctgatacgatatgataatgttatcttgtatgtgatcctatcctcgtggttcgtatttcttaccttgaaggcgatttggattatgatcaacaaaatacgaaaagtattgacataatcacctcttcatgttgtaagaaagccttctggaggtatgtatgtcttctcta

SEQ ID NO: 194849 - DNA, 468 bp, Glycine max
agcttgtacaacgttagtactcagcagaaccatttaatcaactcaatgggtatcttagtggataatagatgggagtggaagtttcaatggaggagaaacctttttgaccatgaagttgatatggcagtagcttttatggcagacattgctgagtttcaaattcaaccagcaagcagggaccttctgctatgggggcttgatactggtggaccatattccacaaaggcagcttatagcttcttgaaggatggtgacagccacgttactgaagatagtgacttcaagtcaatctggaatctcaaaattccacctagagcaagtggcttttcttggagaatattcaagaaccgaatccctaccaaggttaacttaaggaggagacatgtggagctgccttcctataactgcccgctgtgcgatgaggaggaggaaacaactggtcatatcctgtactcatgtataaaaact

SEQ ID NO: 194850 - DNA, 431 bp, Glycine max
  unsure (1)..(431): unsure at all n locations
agctnttcagagataagagcatnnttattaatctattcaactgaatgaaactaatcagcagatagatntcaaggaaggatgcctaaccagtgcctcacggtcattgttccactcaagctcaagtgtttaagctaatcaataattaacaactaacacgaggtccaacctttgcacttcatctcatggcatacagttaggaatgcataaattgaatcagaagtacttctataggcttgtagtgaggttgggctgcaataaacaatgcgttttctaagattcanaagcttaaattatgcgagagcacaaatcctanaattaaccatttttttccatttacattcttntcaactcaactcacttgccctttgtacttagctntattctaatagcacacgcaccttntatttaaaacttacatgtgttttttttaa

SEQ ID NO: 194851 - DNA, 451 bp, Glycine max
  unsure (1)..(451): unsure at all n locations
cattacgcgacctatgaaactaagctataaattcgttacacttaagatatctacattntgtatgttcttgtatgtcatgaatgtaatatgctatacaaacaattggtactttcatgttagatccattcgttaaggttattattgttttgatgaagtataaagtatcatggcttctgcaccctgcctcgcctcctcctcctcctcctacttccgacgcatcagctttgtcgtcttccgtgaagcggacacgcaaagcctcacgtctacgattcttgtctactagaccacctggtgctgagagaccagtggtacacgttgatcctgctttcagcaaggccgacggtccccacatgaagaaattaaagacactattggcgattgtggcacctgataaggtggacatcacgtacgagaacttgaacaagatccctactgttcagaaggacttgat

SEQ ID NO: 194852 - DNA, 435 bp, Glycine max
  unsure (1)..(435): unsure at all n locations
agctntaaactcatcgtctctcacagtctttagatttgggagccaatccaatccttgtgtccggactctcagccacttatgatagccgccgatgatcccattactgcttcccctaagctctctgtcctttcttcacaccgcagcacatgccttgcgaactccttggagtacctttgcattggggtcactgaaaccccgtgtaatgaaaggcatgatgctttcgtctaatggcgctcctctcatggggtagccaagctgtcttatggcgaggacaggattataatttatacaaccccttgttcccattaagggaaacattggaaatccttcgcatgaagatagaatcctgattcttccttccttctagcgagggaaccaattaatagacgcccctctatgctagccaagagttggtcccaattcgtctttcttttt

SEQ ID NO: 194853 - DNA, 489 bp, Glycine max
  unsure (1)..(489): unsure at all n locations
nttgtgctctgattaccacttgatggcagcttgcttgtggagattctatggaggctggatctttgagcttcaatgaggtcctttaatggtgattntccaccatggagatgcagcggaagacaaaggagaagaggtaagaggcggcgccatccactatggaataagccatggaagaaggagcttcatcaccaagatgagccttggataagaagcttggagaggatgcttcaatggaggaaaagaaagagggagagaaagagagaggggggagcacgaaattgaaggaagataaagggagagaagttgaactntgatttgtgtctcacaagactctcattcatcaaagttacaacaagtgttacacatgcttctatttatagactangtagcttccttgagaagctntattgagaaaacttccttgagaagcttctttgagaaaaacttcttgagaagctagagcttagctacacacacccctctcattac

SEQ ID NO: 194854 - DNA, 261 bp, Glycine max
ctcatagtaatcgcattgactaccagctcatccacatctcagaggatgggtatgtaagaattcaattacacttgcgcctctcattcataacacttttcttctaagactcatctgtgaaatactgataccccaaagtgatttgatgtgatataaataaggctatttacgcaaaataaatgataattcgcaccgatgctattgattgcatgttatgataattacgtataatgttcaaccgcgtgattggtgatagaatcgatt

SEQ ID NO: 194855 - DNA, 455 bp, Glycine max
  unsure (1)..(455): unsure at all n locations
agctataaatgtttttaataagcttaagcctgttctatttaatntaataggctnttaaaaatcctgagcctaaccttttaattaaataggtcagttcaggccatactttatgtaggttaggtcgtaggtccctgtatgccagtctggcctattcccacccctaatgcctacccatgttttaagatgtttcttttattttatntttcatctagcaccattcaattcagttaatttgaaccatattttacttgactaattgctttttaaagataatattaacgtatctcttaacttgctagcattgtgctctcgatttaattaagcccccaacaaaaagagagaacattatcaagattntgttatgggtaaagtttaatttttgacaaaggtgagtaatatcaacaaaatttcattaccatttattcttacatnttgatagactaatctttttactt

SEQ ID NO: 194856 - DNA, 288 bp, Glycine max
ataatcacactcatatagaatatataaatactaatgatcatccagcgcacggactcctatgcctaccaatgacaatcatccatgttgttgacgtaaacgaggtaggcgacatacatgtgagtcaaggacttgtccacaaatattgtaatgtcgaccaatcgctaaatattagttatggaagctcatacgtaccattctaattggatcacggtgatataggtctactagacacgacaacctaaccctgcacccacggtggacgttgctatagcgttttctctattgaaa

SEQ ID NO: 194857 - DNA, 389 bp, Glycine max
tcttctcatgaagaagacgaggggcttgaagaggatgagggaggacagaggaatgatatgtatacggagagacaaaatcatataatatatggacgtacgcaaagagaggaatggattgacggagtgaaggtgaacatccctacttttaaagggattgatctagaagtgtatcttaagtgggagatgaaggttgagtatgtctttattcgctacaactaccatgaagagaaaaagatcaaattggcctccttggagtttgagggatatgccttagtatggtggaatccaatgaggagtgatgctgataggatgagaatgcctttagataatacttatcaagacatgaagagggttctgagagagagaattatgtcttcctattatgggag

SEQ ID NO: 194858 - DNA, 456 bp, Glycine max
ggatccttaagtcacgcggctgcagcttagggtgagacttgaacaagctctccatttataataactccctctcaccaaatcccttcaaggaagatatccaagtcatgaagaacctctccttgcaagaagaatgagaattgttgaagaatgctttgagtctggcatggaaaaatggaactgggaagtgagattctgaacgcacgcttctgaggccacgcttgtgcttcttgactcttctactaggcctctgaatagttgaaaaggaaaagctttcagtgggagtttgaagaaggcgcaagtgggggttcttgaagagaggtgaattgagggaagaagagaacttggagttggagagggtggtggtggttggggatttatggacatggacagagaagacggtgaaagctgtgtaagataaatggaggagaagaaagagagcgaataattgtgtgggta

SEQ ID NO: 194859 - DNA, 472 bp, Glycine max
  unsure (1)..(472): unsure at all n locations
ctaagctgagctgccgcaaccgagagtgcctggccttcttttcctagcagctgccctttttactttnttctttaaggctttttctttaagtttttgcatcgattttcttccaaagcacttgtaatttacttctgaatcctgctagttaaaaattcacatgatattaaattcattattatttcattaaaaacaacactaaagtaaaggaattctaatcattcttagttaaaattaattatcaattaaacttaaattttacagttatcagtgacgttatgcaatgagtggtaaaatgatgtgaattgtggtaagttgagcttgttatacttatattatatgtatgtgtgtgttttcgtttatctttacatgtttaggaatgtgataactcactcccctatgtgttggttgtgtttaaatattgtgatgatctcaaccttatgtttgtgagagcagataactagatgaattgttt

SEQ ID NO: 194860 - DNA, 383 bp, Glycine max
  unsure (1)..(383): unsure at all n locations
attccacagcacaccacagtgcctatttttggaaaaaagctctggatggcatcagggcaccaactttttgcaagatacctatagtttgtaagctcattattcgtagggcttcttctataatggtgtggtaaacacccttgttggggattnctagagaacagcttatgtaattaattaaatatcttattgactatgtttcttgtgttcaatgcttctttcagtgctcaaattaccgatgctctatggctgatcacccatttgtgtgcatagttaggtaactttaccattggacaatgtattggtgacttaaaactttaatgaagcagaatntaaacttactcttacaagacggatctgcggattaagttatgggtttaaatatg

SEQ ID NO: 194861 - DNA, 470 bp, Glycine max
  unsure (1)..(470): unsure at all n locations
acttgattagtctaaatgganatacataaaggaatataattaatgttatctttacagtaatatgcacatgagagcttaagatataaatttgaccatgaaacttattggaataagcaaaaaagagcttgttttgataagctttaccgagaaacttattgaaatgagtaaaaaagagattataagagtcataatttacattttatgctaaatatgtttttgatccctaataaatacacgaaatttatgtatggtcactaataaattgtttctttgcattgagttcctaataaaacaacaatttctgtttatttcccttggcacttcttttagttcatgataaattagtgaatatcgtgcttactccatgataaaatctctcatgtgatattagtcttttttcaaaggaactaataacaaataaaataaactactatggagcaaacacaaaattcgttatttatcanggactg

SEQ ID NO: 194862 - DNA, 377 bp, Glycine max
  unsure (1)..(377): unsure at all n locations
agcttctatctaaaaaggcaaggaaagatgctgctgtataattatccanngcgaccccacaagtaggtatggagtntgatggacatctgttccgaagcgaggaacaccaatgccattttgaagtaatcaagggttggtttttcctcaaggagagacgggtccagttgagggaaggggaatatgctgaattccaggaggtagtggactcaacttgcggggcccatggctaaatatgatccacaaatagtcatggagttctatgccaatgcatggctcacagaggaaggtgtcagggataagcgctcctgngtgcggngtcaatggatcccctttgatgaagatgccatcaataagttcttggcgcatccgctggtctt

SEQ ID NO: 194863 - DNA, 461 bp, Glycine max
  unsure (1)..(461): unsure at all n locations
gcagcagatgccactctactctaaattcttgaaagatatgttttctttgttgcataaatatattcattaggaaaacatcatagtggaaggaaactacagtgttgngatccaaaagatccttccacccaagcataaagatcctgagagtgtaactattccttgttcaattggagaagtcaatgtgggaaaagctcttattgacctcggagccagtttcaatttgatgccactctccatgtcagaagattgcgatagttggaaataatgcccactcgaatgactttacaattagttgatcgctccattaccaggccatatggagtaattgaagatgtgttagtcagagtaaaacattgtatcttcccggtagactttgtggtaatggatatctctaaagatattgacatccctgtaatattgtgaatgccattcatgttgatcgcatgctacatagttgatat

SEQ ID NO: 194864 - DNA, 360 bp, Glycine max
tgggactcattgtgcttaaaatatattattctattttattacaaaatcctctttacttacattttatgggctaaagcaaatcaagttaccaataagtccgaatttgaagggtgacattattattggtgaattgtcatatccgaattgcatgatacagattaatgctatattcatatcgaaattgtcaacttacaaacaacactatattcatatccgaattgcaccagttcagaatgttggattaagtggcctcaaaaataattaaaaaggagggttgaattaattattaatgtgtcttgactaatataaaaaattatctttcttaatgtactagattcactatgcttttactactaagtt

SEQ ID NO: 194865 - DNA, 464 bp, Glycine max
  unsure (1)..(464): unsure at all n locations
taagncacctgcggcatgcagcttgtatcgatacacatatactggaatcgattaccattatctatnttcagaaaatattctcaacagtcacatctttntatgtggttcttgaatggctatcaaaggcctatatatatgtgacttgagacacgaatntgcaaagagtttttcataacaaaaaagtcttatcctcttataaagaaaaattgttttatcctcttacaaattccttggccaaattacttgtgattcaataaggaattttttagtgctcagattggtcaatctatctctctcaagagagaattcttcttttcttcttcttcattctgaaaagggatttagagaccgagggtctcttgttgtgaaagaattctaaacacacagaaaggggtgtccttgtgtgttagaactcgcataggaattaacagatagtggactctcaagcgggtgcttgggactga

SEQ ID NO: 194866 - DNA, 345 bp, Glycine max
  unsure (1)..(345): unsure at all n locations
cttgcattcatcttgcaatccaaatgccagatactcattggcgtcttcctctttgttcaangatgcaaatcccatgtctagggatattactcagatcaccacacgacaccaaaatgggatcaaatatcttattcaaaggatggacaaataaccatatatacaatagctgaagctgagttaatgtcaacagccaacaacactcaagcaatcagccattctgaccctcatataactgactgcttgattcatgataagaatccttgtcttgaatgacgcgtcctaaaagggttctcactaaccaaacgttggtcccagtgagtcaagatccgcaatatgaattccatt

SEQ ID NO: 194867 - DNA, 453 bp, Glycine max
  unsure (1)..(453): unsure at all n locations
agcttcaagaaaaagatggcctcacatattccttattttcagaagggaattctatcaatagacctccaatctttaatggagagggttaccactactggaaaacccgaatgcaaattttcatcgaggcaatagatctaaatatctgggaagccataaaaatagggccttatatacccaccacagtagaaagagtttcaatagatggtagttcatcaagtgaaagcataaccatacgaaaacctagagatagatggtctgaagaggatagaaaacgagtacaatacaacttataagccaaaaacataataacatctgccctaggaatggatgagtatttcagggtttcaaattgtaagagtgctaaggaaatgtgggacactcttctattaacacatgaaggaactacagactgtatagatctangataaatgactaactcatgagtatgaatta

SEQ ID NO: 194868 - DNA, 334 bp, Glycine max
ttaagcactgagctcagcttggtaaagaattggctaaataatgttttttacaatgacacagctcataatgaataccaattaacgaatgatatttaagaacatacaaccgaaatagatcatgtcactctgataattctaccgtgaatctgaaatgagaaatatgcaattctccacaaagcttacgtaaagaaaattggcttaacatatcgctggttaatatatgagaaagcactaaatgaaataaataaattatgcgtagattattaggagaaaaaatggagacagatcttatcaatttaatcaatctacctcgccccaaataataaaaatatta

SEQ ID NO: 194869 - DNA, 465 bp, Glycine max
  unsure (1)..(465): unsure at all n locations
agctcactgaaggtgacaaaactaacctctattgtgttgtngaaattatgggcttagcgtggtagcttcatctcggagacatataaatgattcggaaagaaatcccgtcccgtgccccataacaatggtatgcatgctgacggtctctatttccacagcacattacggccagttattcactcataaagcacatgctatcccatccctatatggtcgcaataacatcttttcccttattccgaaactcctctgcttcaaatgatttagctattgcccaatttcaaaaggtcagagaccccaaaacaaattggattaagaggtcgctgttccttataaaggagaagcattcaactcactctcatgtatattaaacaagtgactgcatgtggtgtgctggcctaatgcactactgaaaaatacaataacgcataaataataacatataaggtgagtgtaatgggtata

SEQ ID NO: 194870 - DNA, 227 bp, Glycine max
  unsure (1)..(227): unsure at all n locations
cactanttaatactcacgctntnngatctgtatcgcttagcataggcaggatatcatttgtcttttatcgacaacggacggacaggaactggaggtaccatggaactcaagcgcccaccatatggctcaacgcatatgctgaatgaggtagatggggctctacgtgtgagaacagatcctgctgtagctgaatctatcaacgaaatggtgtcgagtggcagagcact

SEQ ID NO: 194871 - DNA, 469 bp, Glycine max
  unsure (1)..(469): unsure at all n locations
gcttgtactcttgcaatttctttaaaactagtcatcttaaaagctatgacttctgaaagaatcttcataaacaagtcacttgaagaattgtgacttttggaaatgtacttttcaaaatcagccactggtaatcgattaccattaaggtgtaatcgattacacatcaacagatgtgacttcattttgaaatttgaaaatcttaacattataaaacactggtaatcgattacatgattatggtaactgattacagctttgtaaatcagtttgaaaaaaatgctggctactggtaatcgattactaccttctggtaatcgattaccagagagtaaaacacttttggaaaaaatttggtgataacttcatgtcctactcaatgttgtgaanaaggttatagtacttatcctgattgagtcttctcttgattcttgaatcttgagtcttgaatcttgatcttgattcttgatct

SEQ ID NO: 194872 - DNA, 460 bp, Glycine max
  unsure (1)..(460): unsure at all n locations
tctgtaagataacttccttgagaagctagagcttatcttctctctcccctctcataactaagctcacctccttgagaaacttccttaagaagattcctaaagaagctagagcttagctacacatacctctctaatagctaagctcacttccttgagatgagaatctagagcttagctatacacaccctataatagctaagctcacccccatgactaaaaacatgaaaatacaaaaaaaagtccttactacaaagactactcaaaatgccccgaaatacaaggctaaaaccctatactactagaatgaccaaaatacaaggcccagacgaaggaaaaacctattctaatagttacaaagataagcgggctcatacttagcccatatgctcgaaatctaccctaaggctcatgagaaccctanggccttccctggatctctagcccatctacttggagtttc

SEQ ID NO: 194873 - DNA, 444 bp, Glycine max
  unsure (1)..(444): unsure at all n locations
ggatccttaagtcacctgcggcatgcaagctngagacataattgctntgttcttcccataatctgtagtcagcaatgcactctcacccatctccattacaagcctttcttcttcctgaacacacatggtcattaattcattgatagaccatttatctttatgtgtgttgtaagaaatcttatatggcccatattcatgcggaagggtgttcaaaatgaaatgcactatataggactcagacatatcaacctctagtttcttaagttgagctgaaatatctcgcattttcatgatgtactcacgcacacctttcacactggtgagccgaatagaagaaaacttcatgatcaaggtgcttgctaaagtcttatctgaagtgatgaactgatcatcaatggccttaagcaagtctcggaccttttcatgctggtcaacagaaccacg

SEQ ID NO: 194874 - DNA, 485 bp, Glycine max
  unsure (1)..(485): unsure at all n locations
tgttatgagagcacgagatatatgnnnaaattggatttacgattattanaaangcttagctacacactcctaatgcaccctcttgaacacactttatgttattggctgaattntattagataacccacaatatgtaggtcttggtccttatttaatgattctttagtgtaattagcattgcaatatcctacgaccttatagttcacacatttcttgtataatatataataattaaatgtactcttaacacaccttaatatccaatgtactatgttgaatcaacacactataattgcataggagtaatatcttggtgtacacaacccattttatctctgtcaagtacaaaagtgaagaataaagtagcaattatggctcaagagtgtatgtgtaacattactgatttttacttcttgacngctccacattantgcacttcacgcagtaacacttcactcaacattcttgatggtcataatcctcca

SEQ ID NO: 194875 - DNA, 440 bp, Glycine max
  unsure (1)..(440): unsure at all n locations
cgctggagttgaccgatcaactgccccaattcttttagacgggtggttcctaggctcttgaccttgacttgatagaacctctttntaagcgaaggcgcttgactcgatcccatgtntactaaagtgaaacaaaacccagtgcgaatcaaaactccgacatctatcatgggtggaatggatgaatgcatggagaaatgtatatgacacagatgcaatttgtgaatacgggagcccgggaaattgtccccttcttagatacaacatttgggcagcatggcgcccgacatatgtatttaagaaggtgacacgaaccttccgtcggttngacaaagtgaggggatcaagatggaatctatgcatgatgcatatgtganaggcacaacacggggatgtacatagcacgacaatatccacaaacaaaagacatttangactacatg

SEQ ID NO: 194876 - DNA, 484 bp, Glycine max
  unsure (1)..(484): unsure at all n locations
taacanaaggcatgcgaagtgggtggaattcctaaagcaattctcttatgttatcaaacataaaaagggaaaagctaatattgtagctgatgctctttctcagcgtcatgcattacattctatgcttgaaacaaaattgattggtcttgaatgtttgaaaagcatgtatgaaaatgatgaaacttttggagaaatttttaaaaattgtgaaaaattctcagaaaatggtttctttagacatgaaggctttcttttcaaagaaaacaaattgtgtgtgcctaaatgttctactagaaatttgcttgtttgtgaagcacatgaaggaggtttaatggggcattttggggtccaaaagactctagaaacattacaagaacatttntattagcctcatatgagaaaggatgtgcagaaattttgtgaacattgcattgtatgtataaaggcaaagtctaatggtaagcctcatggattgtatactcca

SEQ ID NO: 194877 - DNA, 272 bp, Glycine max
  unsure (1)..(272): unsure at all n locations
taatatngatatcttcttcttgcttatatttntctgatacattacattggtgattgttcagatatgtatcatgctatgtgctgaccatggtccttgtgtctctggtgctcacaattctatagtaacagcaagggctgggaaggaccttgtctcctgtcttgtttcaggaaaatacaggcttctagtctttctactgctgaaagatgcttggtatctgactaagtccccgtgtctgtacactattatttccattaaatgattcagaatgagct

SEQ ID NO: 194878 - DNA, 360 bp, Glycine max
  unsure (1)..(360): unsure at all n locations
aatatatacgttcatgtgacctcatnttatcattctggaaagtttgtatttttagagagaagtgagttatcaagaataggagtcatttgacttaacccgtcaactgaaaaaatccttcaactatttctcgtccttgaaaaattctttttgcgagaatcaactgcttctttcattcatccctgctacaaggtcatgacgaaagacaatgattggtacctcaaagccttacactggggcaatgaaatgcaccatgcataaaccttaagtgaacctaggggcagattagaagttctcaccaaaaaggttccctgctacaaggtcatgatgaaagacaacgattggtgcctcaaagccttacac

SEQ ID NO: 194879 - DNA, 433 bp, Glycine max
  unsure (1)..(433): unsure at all n locations
ctctaaagttntctggttntctaaacactgaatacttgtgctattctatcttttcattctcttctccctttgccaaaaagaattcaccaaggactaatcgcctaaattctttttgtgtctctcttctcccttttccaaaagaaggaaggactaaccgcctgaattcttttgtgtctcccttctcccttgtcaaagaattcaaaatgacacagtctgagaattcttttgattcttcccattccctaatacaaaagcgttcaaaggtttaaccgcatgagaattcttttgtatccccattcacaaagtatcacaggtgtaacagcctgagatctttgtcttaacacattgtagggtacatcctttgtggcacaagttgatggtacatctacttgggttcgactgagaacaagagagggtacatctcttatggatc

SEQ ID NO: 194880 - DNA, 379 bp, Glycine max
  unsure (1)..(379): unsure at all n locations
taaaacttaatgaggagatcgatactctaagtcttaatgtcaatttcggcccattatattttgtagttgcttcgctttggaacatttaagttttaaaagtttcattatggttctttacgttttcgcaatgtatcatattggtccttttttataattctctgatagaaacattaatgttctgtctagttttaaatattaaaatgagtgaatgtcacttttggtccatcatgtattaaaagtttcattcatcctctgtgttcttgaattgtatcgctntagtcattttcgtcaatttttgttagaaacattagtgtnttatattctaaaatagttaaagtaacataatgacagctaagaaccactactatcnttttcatat

SEQ ID NO: 194881 - DNA, 463 bp, Glycine max
  unsure (1)..(463): unsure at all n locations
ntaattcagaaattattntntaaataaaagaaatgtntacttattatatatacttggaatacactaatacagtgacaaatgagagataaaatagtgatgaaatgtggagtgcaatcgcctcgattaaagggcaaaccaaccgtggttagatattttactctgtcgctatgcaggtttttgacataagagtgaatataatttttaagtaggccaccaccattaaaaacttcccttttccctggaatcgtngtctacttaaatatagtagatgaaaaaaataatattactaaaaactacatcaaatttaaatagatgatattgtaatatgggtcataatctatatctaccaattgtattcacaaagagaaattaatataaccatttatatntaattagactgctacatgtcacaatatgtaatcttgaataactgaatattacacatagacttaattatgttcac

SEQ ID NO: 194882 - DNA, 418 bp, Glycine max
  unsure (1)..(418): unsure at all n locations
cgaggtactacccgtngaagatcgtttaacgttgaagaacgaatgatgaacgtcgaagaacggttgaaacctttgcgagattcctcacggaaaacgttatggaaacgtttcggaagcgcctcggcttatatttcttcacggaaacatattttccaagcaaattcgatagagagagaagtgcctaaggggctggggtccctttcttcttcatttcctcccctatttatagcaaaataggggaggtggttgccgtccagctcgcccaggcgagcagggttgcttcctccataagctacacgcttctggaggaatcttctggagggcctaagtgggcctgggtgctatttgcaccccctattttactatagacacccccctctgctgtttttggtgagttctctttcgataggtaccgaac

SEQ ID NO: 194883 - DNA, 369 bp, Glycine max
  unsure (1)..(369): unsure at all n locations
ntgagccataatcctgactcaccatanaccttgacccaggtgttattaccaatccttaccctcggaagcaaaaaagaatagaggggaaatttccaatcaaagaaaaagagaaggaaaatttccaatgaaagcaaaaaagatatgaaggaaaattccccaatcaaagagtgggagaaagcaaaaagaaaagaaaggaaaattcccaatcaaagaatgggagatagtaaaaaaggaagaagaagaaggaaagaaagctcctgatcaaggatcgaaagaaaccagaagaaatgtgcagagaggtctttggaccagacaatatctgaacagtacagaattgtcaccaaatgaacataaaggaaggaaaggaaa

SEQ ID NO: 194884 - DNA, 285 bp, Glycine max
gcctggcctggagcccgaccttctttagtgggggataatgaaagttttacagcccaggcacctcaacaacatgagctagaaccagaacacgatcactcattggaagccatcatcccctgagctgggagttttcaaaagaaaattagagacgagatccaatgacgctgcttatcccgcaccagtgctagtaccagttgatgtaccacttccagggatggatccatctacacctcaacatgcacaagacacttccactcctatcatagagatcttgagggacatacc

SEQ ID NO: 194885 - DNA, 474 bp, Glycine max
  unsure (1)..(474): unsure at all n locations
cggatccttaagcaccgcngctgcagcttctagatcttatgcttacaggaaattctcttttggttattgcactacaacatgcttccaacccaatgaattgtttttcctttgtcaagcattcctttaagaacatggcatatcttggtatttgcttcaaggcttccgagaatgaatgtggatattaagctgtttgaaaatatccaagaatcatttaaactactcttcttgcaatcttagtggattcttacataatgaagcttattcaagaaagatttggtctaactttccttttgggcttgaactctaaccttttacttgacttcctcattgttttttttcacccactcccatatatctctcaccattaggtaagatacctacatttctttagataactgagtttgctgtaaacactctatgtgtacaactggtacctacttcgactgagcttaaattttaagaagtctatccaat

SEQ ID NO: 194886 - DNA, 412 bp, Glycine max
  unsure (1)..(412): unsure at all n locations
agctngcactctcatcttattctcttcttcaatttctttgaactaaacctagggtaagggggtgttctttgtgatgaactcagcccatggttctctttgtggggaggcaaccatggtgtagtgaacctccattgcactacatgttggaaaaatgggattcttttaaaggtttctatcaatttgtttttgtaaagttgtgatgttttgcattgcatgcatgtcttattcatcctttttttactttgttgggccttaaaaaagctccaaatacataatttactctatcaaattgttcttaggatttctaaacaagcttttgattttaaaatttggggctacgagaagggatgggctagctagaagacttgttctctggaccagtctcggtgattcaagcctataataaaatata

SEQ ID NO: 194887 - DNA, 489 bp, Glycine max
  unsure (1)..(489): unsure at all n locations
agcttagcgcatcaaccgcactaagtgcaattctatgaatntcaaaacaatgaaggatnggtgcttagcgcatcctgttgctaggcccaattcatgaaagttcaattccagggaggaaattgagcttagcgcgcttagncgctgctacaataattttcaacaaagaaggaattgcgcttagcgcatcatctccgctaagcccaaatcagtgaagttcaattctagagaagaacatgggcttaacgcagtgatgtgcgcttagctgaaccatctagccaattggtgataggtcaaagcgcttagcgcaagcaacaacggcttatcgcgtgaagacatggcgcttagtgcaagggttgtgcttagcggatggacaactganaaaaaaaattaagtcttttcctgccatctcttacaagaacttgaacccttgtaccaatctaaccngcttagtacatacatcacagcattaactactaatgaaaaaacaaa

SEQ ID NO: 194888 - DNA, 313 bp, Glycine max
tcaaagaataagagaaggaaaatttccaatgaatgcgaaaaaagaatagaatggatatttccaatcaaagaaaataaagaaggaaaattccccaatcaaagagtgggagatagcaaaaagaatagataggaaattcccaatcaaagagtgggagaaagcaaaaaggaaagaaagaaaattcccaaccaaagaatgggagaaagtaaaaaagggaaggaaagaaagttcttgatcaaagaaactataagaaatatgcagagaggtctttggaccggacaatatctgaacaatacataattgtcaccaaatgaac

SEQ ID NO: 194889 - DNA, 476 bp, Glycine max
  unsure (1)..(476): unsure at all n locations
agcttcactggcatgtgaaatgatgtanacattatggcctactgaacaatggcttctaactaccatgcgtttgggatgtcaaacattatgtgaaattgtattaatgtcatgttctcttctctttcttttataaatcatacactgtgttggatttggagttggagtaggaccacctacgttagtgctacttcaataacttcaaaagagtatacaacaacaaattatatttaataaactgcaaatttcagcaacaaatttcaccaacaaattatatctaattgaaatgggtaattgactgtagcaacaaattactttctactacaaattcttcagcaaaacaacaattacaatatcagccactaccatattagccactttctactacagaagttgctattacaaagacaaaacaacaattacaatatctaccacttcctactacanaagctgctattacacattgttacctaaataca

SEQ ID NO: 194890 - DNA, 443 bp, Glycine max
  unsure (1)..(443): unsure at all n locations
tacgtgaactatgaaactaagcttaataatccttcacattcaatntgtgtgtttatttttgtatgttatgagatgaaatgcacagggtgcgacttgtgttagttgtttatgatggaatgagcctaaacatttgagtttgagtgaaacaatgactgtgaggctttggttgatgatgcttccttgatttctgccatccttactagcttatttcagttgtgaccctaatgcgtatgttcctatctttgaaaagctgcatgtnttttaaaagcatttgattgaagcattccatgatattcagttcatatggttgaatatctctgtgaagcaaacaccatctttgagtgaccactgtagtttgtcacttgagaacaagtgaactattctttctttgttgaggacacgcataactgtaagattgtgagagnttgttatgtcgcttatac

SEQ ID NO: 194891 - DNA, 471 bp, Glycine max
  unsure (1)..(471): unsure at all n locations
agcttgtccctataccttacaattcaatctctctttgccgctnttcaatccgtttcactttctaagcaatcctaaacagctttgaacatagatccaacaatttttttcctttcacaacaaattgcattgaaaaaaagtaggaggatgacaatacatacatactagtagttgagtagctatcacattgaatcaaatgttagccataatctatgggaaggcgcagaacaagagataagaccctttctggacaaatctgacaaccggaaataaaaagacctaagcctcttccggtttgagaagatatctttaaagagttggccagagttgtatatgctcctcttcaaatctccaccagtattctcctctccaaataaacctatacccagatgaataacaataataagaaaagcaattatatgtaccacacattattctacgaagattcaagaaccaataccccacaaataaatt

SEQ ID NO: 194892 - DNA, 460 bp, Glycine max
ctaagctgccaacaatcggagatctcaccaccaaattttattgtttatctatgtagtgagatgttgaagattatagtgatgatggaatctcaccactaaatttagtcccaccaaggtccaagggttatagttgcatgagattagataaacatagagaaataggtccttcgaagtcagatgattcaaaatccaaatagttaagggggtatttggtttggttgttttctgtttttattttcaccggaaatagaaaatggtgatggaaatgtgtttggttggatttctattttcattttcagtgaaaatatattcccaaatgaaccaaaaactggaaacaataaaatcttgtttttagttgatgtcacgaacctcattttgggtaaaatgaacatgcggtggcaaggatgtcacttttatgcaatctataaatcattttcttttgaaacacattttagagttt

SEQ ID NO: 194893 - DNA, 467 bp, Glycine max
  unsure (1)..(467): unsure at all n locations
agcttttaattgatatgtgactaactcactttattttgtttcggncctattaagctactggctaagtatatcgagtgagagatcctgagattgagcaaaatgagtaaataggaatggatgattgggaccaataacgacgcatatgtcgtaggatttatgaatgttcctccatactgcaattggatgcattaccttgtgattttttttccctacaatatgaatataaaatctgttgcacataaacataatcgaatccaatgttcctctttgtttttcgaatcttggtagtaaagtcgtggaggcttcttcttgtactatattgcaaggtcctctcatcaatgatcaactcaacatttgtattattaatttcaaatttctattctactatcttngactaccgcttaatacctcgtctggttcgacgtatcacttcatagtgagtggctacttgacaaaacacccaaact

SEQ ID NO: 194894 - DNA, 397 bp, Glycine max
  unsure (1)..(397): unsure at all n locations
aagctgacgccattntcnttgagatatgataagaaacagtctatagtgtcagccgtttttcggccgcgcccactgacagccgagacagacggataaattaacgncattgcgccatcgatgttctcagatgttgccttgacatacattggacttgtcacatctacaatccactatgaccttgacgctatgaaccctatcatgtcgatatcttaagaatgtgcattagcacacctgttgaatcatgccacctatgaagcgaatccaccttattaattacattctctgccaccagccttccgtcgagaaatgtcactccttctcccatgtaagcaaaacgatgacataatcgcttgtctttctcaaaggttaatgcgatgaatagaggttctagaaagac

SEQ ID NO: 194895 - DNA, 226 bp, Glycine max
cagtgtgagttacatgatgagttggaagcacatcccaatggatgcctttcaaaacacagtccaacaacactagaatggcggtgtgccctgtatacacccgccagctcacgatgaagccaatggagaagaccttccctggctagaaaggaacaagtaaagagcataccaacctaacttgctttctgggtacataattcatatggtcataatcaacacaagccgctat

SEQ ID NO: 194896 - DNA, 462 bp, Glycine max
  unsure (1)..(462): unsure at all n locations
nttcgattcattctatgcacccatggtggtccacattgtgtttcttgcatttttattctcgattcgggtactttttatacgccctattgacgtgcttaagccattttacttaagtcatttctcgcttaacttaaaaataaaatcaatttccaccaaacgtttgaattgtattatccgttaacttcggttaaaatgaattccgaccgttcggtcgtgctgtaaccacgttggaaatcaaaaagaggtaaaaaataatatagtaatcaaaaaacatcttttagtaaaataaagcggaaaatcaatcggacgtnttttctctgtgggatttctcattcttaatcgaattgattaataactaaagtgaaactaaggctaaaatcaactcgcctagacaagctcgttcataagaataagcttttgaagttggtcatctcatgttctcactagagaaaatggatcatt

SEQ ID NO: 194897 - DNA, 469 bp, Glycine max
  unsure (1)..(469): unsure at all n locations
catgcaagcttaacatatataactactgcgactaattcttttgccaaagctcctgtcactttatcacaatagttgggaattgaaccacatatcggcttccaataactgtttcctctccgtcccaccatagctatagcaatgctgcagagaagctcgagatgagtgccatggataaaatctgctcataaaatcaacccagttttataaagtttttgcacgaaatcgactcatctataataaatagagctgatattataattaaatatttacacatatgttaaattgcacaataataatagctctatctnccaagtaattaaatgaattatacggcaccattcactatgnttaaggacatgtaccaaatccaccgacaccatgggttgccagagcaagctttccttgggaataaagacgaccaaaaatccatatatagtggcacagagttacaaccagaaagtcctatgta

SEQ ID NO: 194898 - DNA, 437 bp, Glycine max
cgcctttaattacttaattgatacacaataaaatatgtctgttaacttagaaacaaagtaaaaaatttagacactctagataaaatttgaacaacttgattatcttctcttccaactaaactcaaagtagaattatgagagggagttttggcttgcagctggagagttaaaatagaagccattgtagatgcttccatacaaaacaggtgttcgggttttattaattattactaatattactttagtaattcacataaaaaacaacggattattttttgttacaaaaacaacggggtttgatttaacgaaaacattaatttctcatgaagtattgaattatgattctaatacgttaagaataataattgagcctataataaaaggtttacctgataattctctggaggtaaacagattattaaatatcataatctgta

SEQ ID NO: 194899 - DNA, 267 bp, Glycine max
agctcgttccacctaaatagcataggttcttttttttaatcagcctaggctatggttgctaatttgataatctctcccacacccaagtttggaccaagtagtaaaacgtgtgcctcatacttcactactattactatctttcgttaccaatctattaaaactttgtgttatccactacaccaatatcattttattatgatcgtgtaaaactgtgggtgctcagtatagttctctcacctgctatacaacatttagatccctactttt

SEQ ID NO: 194900 - DNA, 259 bp, Glycine max
  unsure (1)..(259): unsure at all n locations
tgtgccacctacatagcataggtttttcatggttgatcttacctangttgtggttgcaaatttgagaatctctcccatacccaaatatgaaccaagtagtaaaagggtgtccctagacctccttctattcttatcagactaactatagttttcttcatatgaacctatctcattctatttattggcttccactatcggcttcctaccttagtctcaccatctggtattccaactctttctctatccgtgttctaggaat

SEQ ID NO: 194901 - DNA, 464 bp, Glycine max
  unsure (1)..(464): unsure at all n locations
agcttcaagatatttacaatgtaatttcatttctagttaagagaatgatttaagtctttcaacactaaacaaaaaatccaaaaatttcccacatgtaagttatactgcttaaatcttcttttaagtgagccaatttcttatctacaatctataaaaaagggcttcaatacattttcaatcgttggaaatttagcactttttagtttttcgtccttacaatttttaatatacaatatataaaaaagccaacgtagttagttgatgacaaagtgggcgtcggtagcaatcaactgacaagattagccaatattgtgatatctatattagctaacagggcgataaagggcaaaattgttaaagcaattgggaagagcctattatttgaacatgctatgacttangggacatgataggcaatgtntgtgacaagggaagtggtaaataaagtaaccatgatttctata

SEQ ID NO: 194902 - DNA, 467 bp, Glycine max
  unsure (1)..(467): unsure at all n locations
tgtcctcataaaatcactataaaaacgntttaatgtcctacgccttaaatggtcctctttgcttttatcggtcaacatggaccgttcaatagcataaaatcaacacatcactttactgccttttgtgagaactacgtaggtctgatttcctcttcgatgggggatacgtagtagcaaaagccccgcttttgtcgacctcgtgagatggttagtggtccaacgccttagctttctcaccaagtaaaatggatcattttaaggtccagcgccttaaatgaccaccttccaagtaaaaagaatcacttgattcgccccttttgaaagaactacataggcccgattttcttttcgatggaggacacgtaggagcaaaagccccgcttttgttgaccttaaaaaataaaaagagacaaaanaatttaggatacatgatttacacaactctgaatctaaggtattgtcttttt

SEQ ID NO: 194903 - DNA, 390 bp, Glycine max
ccctctgcattcatattatattccctgccacggatacatagacgggttgccatctcctgagggtctaaccataatctacataacctggagtatgcacgaaggctctcccctagctctatgaccatcggagtctccagaaataagtttagggaatcaacatcaaatattatccatttccctctaaccctgacctgctgtggagatttattcttctgattatataaatttgcatagaattccttcactagagccacataaatggtatcagattggttaagtgcctattccagtttctttgttcaagatgcctcctgaagtcatcatactctgtcacatataatctaacatttctcttcaaaagaatgttctgggcgagaacgttgtctgcat

SEQ ID NO: 194904 - DNA, 418 bp, Glycine max
  unsure (1)..(418): unsure at all n locations
cgcttgagccanaatcctgactcaccataaaccttgttcctgggtgagaatgtcaattcttaccctcggaagcaaaaaaaaggggaagaaggaaaatttccaatcaaagagaaagcaaaaagaaaagaaaggaagatccccaatcaaagagtgggagaaagcaaaaagaaaagaaaggaaattcccaattaaagaatgggagaaagttaaaaaaaaagggaagaagaagaaggaaagaaagctcctgatcggggatcgaaggaaaaacagaagaaatgtgcagagaggtctttggaccggacaatatctgaacaatacagaattgtcaccaaatgaacaaaaaaagaaggaaagggaaaccacgacctaaatggtcttctccctttgattaccaaccaaaatcccgtgcgctagcgac

SEQ ID NO: 194905 - DNA, 478 bp, Glycine max
  unsure (1)..(478): unsure at all n locations
agctntacatgcaaagctgcaaactttttattacanaaataatttatgatggaagaaaataaaaatagaagcgttgttcctacatcggctacatgagtttatgttcaatgctgagaaaatgaaacaaaaatatattagttaaataaaagataaagtaattattatattgtaataacaacaacaatggtgttaaaattccagcaaaaaaaaaacaacaacaaaggtattaactatattttataaataattaaaaatagagaactgttatttcccacgaaagacaaattgcttaacattgaatcaaaattctctgagttaatgctaaaacatgatttggaagttggaacaatagaaagaatgttgcacaatgtccacacatttctcaagtatttcagtgtatatttctntacaaattcctacttggatcatttgcttccaccaatggtatanaataataattcaaccaataaataattag

SEQ ID NO: 194906 - DNA, 456 bp, Glycine max
  unsure (1)..(456): unsure at all n locations
tcacgttatctttcagtaaaaatagacatttaatgcctttttatctcacattgataattcacaatcacttagatctctcaaattgaaatatcaaaatgtcatttaagttcttaaaagtataaattgtttgtcactttaattttattattaaaaaatttcattaaaattaacgttggtgcctaggtgacatattatctactgaggtaacaattgataatgataagatctaatgcatattggacaactaacaatattaagtaacagtttaactagagaccaaaataataataattagcctgtcatgtgcatcatcaattattacgtaagcatatgacatatcaaatacacatanaatgttaatttaacaaanatccctttagtcgaataattaaagttacagatanattatactntcacatacttcaatgatattttatatgatactgaatatactat

SEQ ID NO: 194907 - DNA, 463 bp, Glycine max
agcttgacataccttgtctatcacttgccttttagtctcttgtagacataacatatttattctttcttttttcactagttttctaattgaggcccactttaacccctccccagcccccttatattgtatgttataatcttcattatttctttgggtccatttgtctctttgggtccaacttcctttttgcacctccagtttctagaatataccttccacttagggtcagacccatttatgtcagagcccaccatctaatatttgtctccctttcttttctcatttattttctttgtgggccttgtaatagacatagcttcttctttttcctttgaaccagcacgtgcctccccctttaattcaaaattatgggtcagttgtgggtccctttcttctctatattttcctttggtacatctttcttcgatctactcttcaacagccacggtaccatttaccattc

SEQ ID NO: 194908 - DNA, 430 bp, Glycine max
tctctcccatttgccataaataggggaggaagtgagtatggaaaagggttcaaccccttagacacttctctctctttcgaatttgcttggaaaaattgtttccgtgaagaaaatctaagccgaggcgcttccgaaacgtttccgtaaggaatttcgcgaaggtttcgaccgttcttcgacgttcttcatccgttcttcatcgttcttcgatcttcaacgggtaagtacctcgaaccaagcttttcgattcattctatgtacccatggtggtccacattgtgtttcgtgtatttttattctcgttttatatacgttttatacccccttttgacgtgcttaagccattttatttaagtcatttctcgcttgaactaaaatataatatatttccccgatcggttgaatgtatattccgctacttcggtaaaat

SEQ ID NO: 194909 - DNA, 437 bp, Glycine max
  unsure (1)..(437): unsure at all n locations
agctntgaagatttggtctttgccagtgttttgatctatgtgggtatgaaaaaaggcaaatttagtcatcctgcttggacgaatgagaaaactggggcaaatgaagagggtgagaaagagggagaaacccatgctgtgactgccattcctatacggccaagtttcccaccaaacccaacaatgtcattactcaatcaataacaaacctcctccttacccaccacccagttatccacaaaggccatccctaaatcaaccacaaagcctgtctaccgcacttccaatgacgaagaccacctttagcacaaaccaaaaaaaacaccaaccaagaaatgaattttgcagcgaatagcctgtatgattcaccccaaattccggtgtcatatgctaacttgctcccatatctacttgataacgcaatggtagccataacccct

SEQ ID NO: 194910 - DNA, 445 bp, Glycine max
  unsure (1)..(445): unsure at all n locations
tctcggctcatgctgngaacgcctctagttcaacacctgtgctttctaatgttctccacccagagggaagctccccaagttccaactccaaacacgactcgaccggccggtaattccaacacgacaaggaacttccctccgaggccattgccggaattcaccccgctcccaatgacgtacgaagatcttctaccatccatcatcgccaatcatttggccgcggtaactcccggaagggtcctcgaaccccctttcccgaagtggtatgaccctaatgcaacttgcaagtaccatgggggtgtcccatggcattccgtcgaaaaatgcttggcccttaaatacaaggtccaacatttaatggatgccggatggctgactttccaagacgatcgtgccaatgtgaggaccaacccgctcgccaatcatggacggggagcagttaatg

SEQ ID NO: 194911 - DNA, 355 bp, Glycine max
ctgactggaagtattgtgacagggaaagctctttcacaccactgttctgcgggctgctttcatagtacatgctggacttgatcgaccctttcgttcaaagaggatagctgatgccatcttcttccctcctcccaatcaaactagcgttactatgcttatgatgtttttctagattgaataaacttcaggtttttaatcacaatcttcatgagtagtattcacattacttttgggctcgcaaggaatcgattattgttgcctagattctaaaaccatagttattctaaaccttccttataccttgcagctactctttaatgatcttagttaggacgcactataataaatcattcat

SEQ ID NO: 194912 - DNA, 484 bp, Glycine max
  unsure (1)..(484): unsure at all n locations
acctgcggcatgcaagcttctactgaaatatttctagatttcattttgatttggngaggaagccttgcaatctcttccggtgaaagctggatctcacgtgcatggtgactttctcttttaaattctttagttgatatagtttttatccaacaacaactcttttgtgaaagcaagttccaatttccaaaactattgtcatattatgggcacatttttttttatgttggatcttgatcataatttgctatatgcaggacgtcaatgatgaactcactgctattaatcacatcataacttgtgatagttgaaccttggatttataataaagttatttaaaaaggtctttggcacataattatttgggctgaagaataaacaatcatgaaattagtagtttatagtgctgagggctgcttatctatctttagcaacagacatttgttaattgtttgactgatattagtatcacaacttcaacataata

SEQ ID NO: 194913 - DNA, 435 bp, Glycine max
tgaatgtttcatagctgtgatgacatccatgtcaaggtgtttttgattttgaacccaatggtttgagatgttgatgaaacatgcttttttcctatgtgtgattctcactgtgactactcctttttcctctaccaatataacattgggctattttatttactttgcaggtgataaataaatctgttaaattgcataaaattacccgtcatctagtgaagcattgttctttattttcatggttttcgtctctcatctccgttgccagacagaggcttaatggaaatgaaaataaactttccttaaagcatgtgttggtagcattgaacgtaagtaagcgcttgattctcattcggtttgtatctcctgttggatgcaggaaggtcccttttgattttcctttgaaatgtggtgggattgttctaaaattatgacttt

SEQ ID NO: 194914 - DNA, 445 bp, Glycine max
  unsure (1)..(445): unsure at all n locations
acctcagagtcacctgcggcatgncaagcttgacctaagcagttccaaggctaatcacttttctacaggacgntaggaaactgcaacatgtccaggatgcattggacaagtgttcccacttcgaccacccatttggtgaatcttgtgcagattgcaccggtgcaatattgagcttgagagatggtttacataatcaagtggccaacaacaacaacaaccacactgagctagccatatgtgaggtagcagctattgttgctgctgcagctgggaaaccaaacgatcctgtcgttgacaaagtcttacgctgtttgccaccttcagcttcaggatcagacacgagtagacattctcagcaattttattttctcatctttcttcaagttctagacatatggagccaaatataactgacaaaacgttgtataatttgtgttcccacgat

SEQ ID NO: 194915 - DNA, 408 bp, Glycine max
  unsure (1)..(408): unsure at all n locations
tcattagctgtttgaacacagccctcacccgatcattttctttttatacgncccaccactctcgctctgatatcatgacttatcacgagagtgcgatagcgaagaaagctatggatcctatctattgttatcgctagccgtgcatgaaacccgggtttagtcaactaggtgtagaatgatcgggtttatcgataaacaaaactaacatgctcaagcctattgaagtcgcaggctcatgcataaacattttactccgtcagcgtgagtatgatatcctcctaactaatatatagttcttaaaaaataatgattccaatttatttaacaattgattatgaatttaatttcttctacatttatcaccaactctttcactcgaacattaattaaatagctctgtacaaaata

SEQ ID NO: 194916 - DNA, 461 bp, Glycine max
  unsure (1)..(461): unsure at all n locations
agctnttntattttagtagatgaagatgttttcttggtccctcatggactcctctaagaacaatagcatcatttcttgaactgaattgttgggagttagaagccatcttctcaatcaaattcctagcttcagtaggggtcatatcaccaagagctccaccactggtagcatcaatcatactcctctccatgttgctaagtccctcatagaaatattgaagaaggagttgctcagaaatctggtggtgaaggcagcttgcacacaatttcttgaatctttcctagtactcatacaagctctctccactaagttgcctgatgcctgaaatgtcttttttgatggcagtggtccaagatgaagggaagaatntctccaagaacaccctcttaaggtcatcccagctganaatggacctgagagcaaggtagtatagccaatcttttgccacttccttcagagaa

SEQ ID NO: 194917 - DNA, 423 bp, Glycine max
  unsure (1)..(423): unsure at all n locations
aacactcagctgtatctgtataaggttgaaacttgtaacacatttcatatttcaagcctctgcgatgctcacggatcgaccggttagtacaatgttctcaactatttattttttctatagtagagtaaatcatttcaatgatatcctcttcttcctatgacatcttcttctttcaatatctttttcttctttctataacacttttctctttcaatgtctctttcttttttcttagcatattttatttaatgcatattattattttgtttgattatacttacaatcatatattctagattgaaccgaatattaaaaatttaatacattgacccatggtaaaagacctatgaagagaggatatatggcctccaaatgaagaattcttatctttctcanatctctataagactatgtttgttgatg

SEQ ID NO: 194918 - DNA, 479 bp, Glycine max
  unsure (1)..(479): unsure at all n locations
acccagagtcacctgcggcatgcaagcttgatgatatggggacccatccatgttgtactangtggcggacgggcgatggggcacaacatagttttcacatccacaaagcgcgcataaacccaccatcccctgttgcccacctccatctgagctcacgtactcccacgtagcccatatcctcgtttctctcaacaccgggtccgcatcaatcctctcaagctttcacaacatccaagcaaaacaacattcaaacagcacagtctatcacagccaagaaaacagagcaaaggcagaaaactctgccaaaacaccaaccaaaatcacagcttttctcacgtaaagaccacagtaacaattccttcgatccaattcngtaaccgttggatcgactccaaaattttactggaagtctatagtgtataagcctgcattctgaccgttgggatatactagcaaacatccagaactcattctgcact

SEQ ID NO: 194919 - DNA, 415 bp, Glycine max
tgacccactaacctataattttataccttgatgccattaacctagggaattaaaaaaaaacttaatggctgactgtaactgaaattgtggcaaccaaaagtcacccccaacagccaacaagtcagccaccatttggtctcccaaaaggctgatgcctaggatgccaattgggcccttattacaacttgaactaaacctactaaagcccttttagttgattaacccaaaacatatttttggtcagccaactttacaaagattgggacattatttagacaaactaaacactctaaaattgagacaaagtggtgccatttaatcctcctccatttgggccatgatacaactcacaaccttggacttttcttcttaaaacttgcgcttgtattcaaatagtatggacaacacttgttga

SEQ ID NO: 194920 - DNA, 458 bp, Glycine max
  unsure (1)..(458): unsure at all n locations
agcttaatgatcgaatntcaattgcagtcttgtctatttggaaagcaaaacaaaaaaccttttccaaaggaaacatggagagcatcaagaaagttgcaattgattcacacagatgttgtagggccacaaaggactccttcattaaaaggtaatatttactacattatatttgttgatgacttcaccagaatgtgttggatttttttcttcaagtataaatcagaggtggctgaaattttttggaagtttaaagtcaaggttggtaatgaaagtggtctaaaaattcaaattctgaggtcagacaatggaacatagtacacgtcttanaaatccaatctaatttgtgaagattcaggcattgaacatcaactcacgaatccctatactccacanaaaaatggagttagtgagagaagaaatngatatatactagagatgacangatgcatgctatatga

SEQ ID NO: 194921 - DNA, 440 bp, Glycine max
  unsure (1)..(440): unsure at all n locations
ntaagagcaattcccttcttctttttctcattcttcttatgttgattgttcacatcttggtactactacttattttttgtggatgtgaaatctaaccggcaagtgcaccgggtcgtcaagtaaataattaaaatggaatgaaccgagtatcaaactcaaggaacttcttttacttggaaaaatgtcattcaaaatgcaagtgtttgtaaaaagaattaagtgtcatgaattgaaaacaaaggtattttctattctaatcaaagaaacagtaaatgtaagcaattgaatgtgaaaacaaataagtaaaagcgttgggtccttctaccgagatacttgatgcaattagagtttttctcgatttaaaattatttttgtgttctatactgaggacaaaaataccaaacattgatgtctcgtgagtttggactanactataaata

SEQ ID NO: 194922 - DNA, 485 bp, Glycine max
  unsure (1)..(485): unsure at all n locations
agcttattatgaacaaacacgtggcatatctgttagcaaactacaaatagaccaaaacaacagtcaacctggtatgcaacagaattactttgacgatactttcctataaatatagtttggtgtgaagcgatagttttattgtgtcctgatcaactttttttcctaattagtatatagtactatattagttcaaaactcgctttcaaatgtattataaactttgttaaggacatatcccagcacctactttacctaggaagattcaaattcccagcaagacaacctttccaaggcgaatatcacggtcacctataatcaaatttctgtctatgacattatatatccatgttcaaagaatatatatgttcatattgaaaatggccgtttattcgataatggtgaatattttctttttgatgtccttatctttattgaaaatggcctaattngattgatcataanagggaaatattgtcttacaatat

SEQ ID NO: 194923 - DNA, 462 bp, Glycine max
  unsure (1)..(462): unsure at all n locations
ntactacaataaagagatgccctcaataaaaattaatgtggagattgtcaatttccctcacatctagagctcattgtttagtaggaagaagttgattcgcacttctgatgccaagaccttatggaatcagattgtgtggatggactctcaaaaggcatccacttctagttacgattgaagtgacaatgatgagcattgcgatgtcgttcaagtgttacatcctgttaggaagtatcactttgatgatgcatgcgtctgcttcaaaaaggatgttggcaactactcatttattcaatgttttatcaaacttcctactattcacaatgaaggcacttataatctaaagaagatgactgaagaccagatgctagctcatgtgactcagctccatgaagctcaataaaagaaaaaggctgaagaagaagaagaagctagtgttgctgctatgaaagaagatgttgc

SEQ ID NO: 194924 - DNA, 467 bp, Glycine max
  unsure (1)..(467): unsure at all n locations
agcttgtgatgtaaaatggtttcaactccttatatatgactgcaacagattgtcggtaacaagtatttgaaatagtttagcacaagattaaacaaatctatgtgcggtacagttacttctaatggagcagatgattttgaaatgactgtctagaacttcataacctttattttatcacttaatcagggcccaaatcatgtatatcaatttttagattcttaactagtattagttatagtttcttcattacataagaggtcttacaaatttaatctttcattcattatatttatatcaagtttctgactgaaatcaacaggaaaactcacggtccttaaaacaccttgcggatgaaatgagtggtccgttatctccaatgtcgcttcctgcaccanagcaactcanattcactcctggagttgttaattggtcaggcanggagtcagctacatttttagatgaagcac

SEQ ID NO: 194925 - DNA, 407 bp, Glycine max
  unsure (1)..(407): unsure at all n locations
gacacnacagaaaactcaagcgtgagcaactaangactggcttgaaagcggaattttttatgcaatgtggacgccagcaactatgtgtattacttttagaacaatgttattccaattcaagatattatatataatccatcagagtaatcgagttatataaacatcatacgtctgaagcctactactcatgttttcatataccaagcagcgaactctgttattacctgcgaaaaatatatcgttacacacataaacggcaaaagggagggctaccacatgctcatatacttctctttttacatccatctaacagatacccatctcctcaagatattgatagaattatttcaatagaaattcttgaccaattgaatgatcccgaactatatgagtgtgttaaaaatcat

SEQ ID NO: 194926 - DNA, 375 bp, Glycine max
  unsure (1)..(375): unsure at all n locations
agcttcgtgtncaagcaaacaaacaactttttcttttctggaaagcaccgaacggccacagaaaagctgaacatgaaatgacactcactataagccatctgagaataaacatgaattgaccgaatgctcaaagaaaaatgtcccgctcctactgtggctgaacttcattaagagccagtgtggagcagctgatgaatcctatataagctgctcatgctccatgactggtgtggcatcatcaagaataagtgcataggctatagatggcttacgtataaactcaagagaagttcctcctaccgagccatatgtacacctgcttcaaaatcaaagggctcaagaggagtcagctcatgctcaccctctactggtgct

SEQ ID NO: 194927 - DNA, 394 bp, Glycine max
tgtaagagtactgcgctagattctcgagacggtttgcttgctgtcctcaccaccctatttctgggccactccgtcattattatttctactagggactaaccgacaagcacaggagtacaactgatgctgctcatggtggagcacctggtgatattacccctcttgacgctaggaatttgattgagaagatggcttacaacttcctacaattaattgctgaaaatgatgctcttgtccttataggactccatgagggggccacagactcatcttcgtctactgaagacaaaaagcatgagggataacataatgccttggtcaacgctaaaactcagctgtgcatgaatcataaaactatacctgctgcaagagttagagggctactgtcttctgc

SEQ ID NO: 194928 - DNA, 463 bp, Glycine max
  unsure (1)..(463): unsure at all n locations
agcttcttagtttcagatgatgcttattgtttngtagctacctcatgcactcctctaatgactatggcatcatttctggcgctaaactgctgggagttggaggccatcttctcaattaaatttctggcttcagcaggagtcatgtctccaagggctccaccactggcagcatctatcatacttctctccatattactgagtccttcataaaaatattggagaagaagctgttctgaaatctgatggtgggggcaactggcacatagtttcttaaatctctcccagtactcatacaggctctctccactgagttgtctaatacctaagatacccttcctgatggttgtggtcctagaagcagggaaaaatttctctaagaatactctcttaaggtcatcccagctcgtgatggaccttggagcaaggtaatacaaccagtcctntgccactccctctaatgaat

SEQ ID NO: 194929 - DNA, 438 bp, Glycine max
  unsure (1)..(438): unsure at all n locations
ttaaaatttgaattaaaacgttcaaaatatgctggtaatcgattaccatatatgtgtaatcgattacacagtgcaaattttgaattcaaattttaatagctgttgtaaatcatctttggccactggtaatcgattacatcctctggtaatcgattaccagaaagtaaatctcttgaataaagctttttaacttaaatttcttggccaaaccttttgctacttcaaataggaattcccttcctatttaatatacccttcctaagactctataaactgtcttgatcatccatcttgaatatctttaatttctttgtcttgaataaatctttgagaaacaagtgatcatccattggcaagtgatcatccattggcatcatcaaaacattcagcttgatcctttgtctancaatctcccctttttgatgatgaacaatcctg

SEQ ID NO: 194930 - DNA, 480 bp, Glycine max
  unsure (1)..(480): unsure at all n locations
agctntcaacaagtttcttcacatttaactatcatgaagcagaaaactagcaagactacccatcatatctcccanaaccccatacccacgaaatttaagagagaaaaaagttcacccaaacctgaaattttgaagtcccactcgtagccacgcacttcacgactccaaaaacgccctcctttcacgatttggggcataaatgatggccaaaggttggagctttgttggggtttcaatggagaatggaggagaaggaaaaagcaacgtgaggaagagggagagcttctgaatttttctgctttggctgagtgaggagagagaaaagctttttggtttttaaataaaaagagttctctctttntctattattttattataaactatgccacatgtctccatttgagtggagcananagggcccactnntcctttttgactgtgacccatactcagccacaaaagtgagaaanatctgacctt

SEQ ID NO: 194931 - DNA, 453 bp, Glycine max
tcaggctgctcaattgctccaggttgttgcatggaagggcaaaggtctgtatggtggtcagcagaggagcacaaaccacagactcttgcgacaggtacagatttcttattcaaggccagctgggttaccaagttaaccaatgcatctagtttgccttcaagcttcttagtttcagatgatgcagatgagtttgtagctacctcatgcactcctctaatgactatagcatcatttctggtgctaaactgctgggagttggaagccatcttctcaattaactttctggctttagtaggagtcatgtctccaatggctccaccactggcaacatctatcatacttctcttcatattactgagtccttcataaaaatattggagaagaagctgctccgaaatctgatggtgagggcaactggcacatagttttttaaatctctcctagtattcatat

SEQ ID NO: 194932 - DNA, 459 bp, Glycine max
  unsure (1)..(459): unsure at all n locations
aagcaccgcngctgcagctgagttaggagtcgaagtgatgtancttattttgtaacttgttgaagttagtaaaacttgatggtttgtcaagaactggacgtagtctcggtgaatgagataaactaatataattttcttgtgtcttgttcttattattttctccttttctatttgaattgacctacgatttgaatttgatctttgtgtttgaaaaacattgtttgttttacaaagatatgaaactatcatctaattcactttgcaaaaagtctaatatctattttcttaagtcttaatttatcagaggataacttcattgtttacgaaaaggatttaaatngagtgaaaatcacaatttaacccctcttcttgtgatatttgcatgtacatctcgctacaacgagatatgattttgccatagaanaatacgacactngatcggctggaattgatagaaaa

SEQ ID NO: 194933 - DNA, 461 bp, Glycine max
  unsure (1)..(461): unsure at all n locations
ctcttagaacactcaagcttgtcttctctatatttcaaggcacaagatgtccattattacatttctacctctatagcaacaatgaaatcacatattcaagcacttgaagagcgtgcaaatacagcaacagttcaaagtactgtgtttgctcaaatatcagctgaagcactacccaagagtcttcattgctttaatgtgaaacttatggctgattggctgaagatgccatccctgcaaaaacgagaacatgagagtagaatctccccccggctcacagataacaatctatatcatttctgcattttttcagataatgtactggctacatctgtagttattaactcaacagtcatgaatgctgaccatccaaaacagttagtctttcacattggtactgatggtatcaattatggagcaatgcaagcatggttcttcagtagtgactntaaaggggctacctt

SEQ ID NO: 194934 - DNA, 474 bp, Glycine max
  unsure (1)..(474): unsure at all n locations
agctnggngtaaagcttcgctggtaagagtcattttggttatgacgaatacatgtatctttgaagaatatagtgaaacttggtggtttactaagaattggacgtgtcttgagggttgagacgagtcaatataaatctttctttttatagttttcttgctctctttgtgtttaaactaacctaggattgaaattttgaggtctcggattctggtcctacccgaatcaaataggatttttcaaagacaacatgtttggttcaatgatcattagtactatttaattaaaattaaacttgaaatgttcaaattgaaacaagatttcgattatagaagaatgtggaaaacaataatttaaattcattatctttttggctcctaaactttgtcaacattttatttttagttcctaaacatcttttaagtggttttcgccccaatatttctttctataaataatttaagtctttattatta

SEQ ID NO: 194935 - DNA, 465 bp, Glycine max
tatggcagaggagcatcatttgtctaaaactgaccttttttttatgactacgatgttaatgcaatagaacatcaccacaaccactcccttacaagtacactacatagtaaatgaacctacatccttctctttctgtttatgtttttcttaactaaaccctattagcttctagagttatagaaaattactaacattgtgaaagtgtaagtttctaagtctgggtgataacacattaatgtattcaaccaaatacattatcaaactcaagcatcccactaaaaatataacgggattagacaccccaatacaagcaaaaacacaataacaagtacaaacaaaacactaagggaagttaaaataatggcaaccaaaagcaaaacttaccaagacacagtagacgcaacagacacgagaagagggagcaaaagtgctttggtgccaatggctgcaaggaaagcaacgtca

SEQ ID NO: 194936 - DNA, 454 bp, Glycine max
taagcaccgagctgcgcttggcaatcaacgaccatacatttgttctggtgtacgattgaggcccatgatgtatcaagacactcgcaattgaaaaacaaaagttctagggaaattcaaatggtcatagcattttactcggatgtccgattcacgcccacaatatatcgagacgctcgaaatagaacacggaagctctggtccaatttatacggccataactattgacatcgatgtacgagtgagtcccatgatatatcgagatgctccacatttaatactagaagctttagggaaattcacatggtcataaagatttgctcggatgtccgattcaggttcacaatatatcgagacgctcgacaatgaacacgaatgctcttgtgcaattcagacgaccataacttctgagatggatatacgactgacgcccatgatatatcatggtacttgaact

SEQ ID NO: 194937 - DNA, 470 bp, Glycine max
actcagcttaacattcaatttcgagcatcttgatataatacgggtttatctctacatccgagttaaaagttattgtcgtttgaatttgctcaaagcttcaacattcaatttcgagcgtctcgatataatacgggactcaatcagacatccgagtaaaaagttattgtcgtttgaattgcctcggaggttcaacattcaatttcgagcgtctcaatatatttcgggactcaatcagacatccgagtaaaaagttattgtcgtttcaattggctcagaggttcaacattcaattttgagcgtcccgatatattacgtcactgaatcggacattcgagtaaaaagtgattgtcgcttgaatttgctcaaatcttaaacattcaatttcgagtgtctcgacatattacgggactcactcaaacatacgagatataagttattgtcgtttgaatatgctctcagcttcaacattc

SEQ ID NO: 194938 - DNA, 465 bp, Glycine max
  unsure (1)..(465): unsure at all n locations
agcttaataatctaatttgactnggtcatttattacatacactatcggttncgatatcactttatgggttttatcttggcgatgctcgcgcacagatacattataaaagaatgagatatattatgcaaatcaaagagcttcattgatattctattcatcttcactacaagtatactgcacaaacttatataccctcgcgttacatgaccctctctcatctagagtaccaaggtgagtagagttttctcatatcaataatttctcttatagacctcatatcttaatcttaaaaggtgaaacagatcttatacttattctactgataatatctttacatctaaacaatattttagagataagataatatcctttntaaatcagaataatatcgcacagaattgaattatcttcacatagaggagtcattaacttccatcatggtgcattntatactgctacacatgt

SEQ ID NO: 194939 - DNA, 427 bp, Glycine max
  unsure (1)..(427): unsure at all n locations
tgaccaatcccgacccaacccggtcatattcggtcagttagtttctgtgatgtacctaancaggcgagctcctggctgttaacagataaaaggataacaagaccacaaagcaaggaggcttgtggtggctggccagctgtgaattttgtgtaatatgtggattgtggcctctggtaattcattaccaatggtgggtaatcgattacaatgcttaaaattgacgacaggaggctaacatggcctctggtaatcgattaccaaggggtgtaatcgattaccactcttgaaaacgaagtcaggaaacttagggagcctctggtaatctattaccagcctgtgtaatcaatcacacaaatgaatgggtcactggttattattaccatgcatgttgtatcgactcacagngaatattgctatttcatgtctg

SEQ ID NO: 194940 - DNA, 463 bp, Glycine max
  unsure (1)..(463): unsure at all n locations
agctngcactaactagatagcaaganttttgttttatgtgctgaagagactaatgctctctttatttctctctcacacataatatttgtgcttcctattttcacttctgttgtttgaatgatacttcctatattcaaataatcaattaaaatacaatatttgtgtagtatgatattgatctgtattatttttaaaaataacagtaacggctcgtgatcataatactagagtagagaaagtaatggcacattccttttcattttcataatgtgaaactgaatctaagatatattatgtaatcaataatcataatatattntaagtaaaaaacctacatctagaaaactaagtgaataagactctgtttattttcttctatgctaaggcctaaggccaatatctgctatttggtatttgctcatttcatttagatntttccaaggccatacagacatactgcttt

SEQ ID NO: 194941 - DNA, 436 bp, Glycine max
  unsure (1)..(436): unsure at all n locations
tctccatactcccatagactcccactgcacccaaatgatgttctttgacactctcataaatcggtgttgatccacagattaaagttaggtcacatgcaagaatttgttagacctttctttttcgtaagggaagtagataatgaattgaatgaaccagttatatgaagctcggtttgagccaaaatgtttgaggttaagtgttctttgtctagtatatgtcagctcttaaatgtaaacattagactttggtattggaagtaattttaacattaatgcacacaaatcaagataattaaacaaaatgatgaatgtgatgcaacatcccaatattttacattcccatcttatgagatctcattaactctctaaagaggacaagaatngaaataccgtttaatagaactatgagcttggaaaaaaagcgtagtgtggtcgc

SEQ ID NO: 194942 - DNA, 473 bp, Glycine max
  unsure (1)..(473): unsure at all n locations
agctntatattntgtggatagtttgcatagttatatatatatatatatatatatatatatattaattataattctgtttattatgatcttacacacaatacataatatcagtttttaagagtcattttaaatgaatgattttaaatacacccacccacccactcacctatctaatgnccaatttctagagtcattttaataggatgattacaaatgttattaattttaaatgttacaaagtgaaaaaaaaaaacatttttctacttattgagtatattttaaattttaatgtagtataatggtgattttcaagtgggagacaaatatggttagggctcaaccagttctttgtatcgagaattatgcaaagtgattttggttgacttaaaaaaaattggaactcttatccattttacttcagattnggacgtgaatcatatttcctgtattgagaatgtcccatgccacgcatg

SEQ ID NO: 194943 - DNA, 465 bp, Glycine max
  unsure (1)..(465): unsure at all n locations
tattttcaaaagaagtntagggaggaaggggttgtattcnctaactagatgggggggcttttgatagaatattaagtgaagataatactatgttaacctctaagtttgaagagacagaggtcaagaatatttataggattgtgatagcttaaagagcccgggactagattaactttaatttcatcaagaatttttcggaggttattaagaaggatgtcctttactgtggttgtaggtgtctccctcctagcctcccttgctaactgactcttggtcttaatgagtaagagcttttcacccctctccttgctctcttcatcaccttcttttctcttattattctctcctttctcattattgtcatcacattctccaatactctcttaactctcctgtctctctctgaattctctcttctctgactcctagtaatggaggtgggaaaaaatacgcgatggaaacatt

SEQ ID NO: 194944 - DNA, 421 bp, Glycine max
  unsure (1)..(421): unsure at all n locations
agcttgtagtancttattcatagttggaatttattgtttgaaacagtatagtcaaaggtgcacctgaggtgaggcagcacagtgggtcactgaggcacacagggtgccttttatcctgttgagtgcttgatgcttcttttggtaattgtagaacaccctatgaggcgttggtttaacttgctaactgtgattctaaaacagggtaataaagtaagaatggtaaaaaaaatgttggtatattccntaaaattaaggatatttaataaccattattacaggtattgtatgattcacaaaacgattccaattccatcaatatgattcaattcaaggccttggtgttggaaaaaattcaattcccacatcagttatggatagcgtcaagataagagtatattagtggtggacaaccctcacccta

SEQ ID NO: 194945 - DNA, 463 bp, Glycine max
  unsure (1)..(463): unsure at all n locations
tgagaaggtcgtcttcacatttactccatgcgctcttttctcacacttgatggtccttccatgagaccaggtgtttaattgcacatgtagggcaccggtatatatacaatttatggacaaaacagaaacacgtatcttactgtcaaaaccaccaatccatacgtgggctagagagttctttatatcataaaaaaagtcatggactcactcaaataatacaaatactctattaacacttctctttaatttcctctttctgatgttatctatcatatcactagttatatatgtctatctctcactacaaggaaaataacttttatcaatagacaaaatctatcattaagagcctaaaatctaagtgaatagatgtatgaaggactctgttcttcagacattttcaaattaattttgaggggatatataatgacaantaataatctgtccttataaggccttataa

SEQ ID NO: 194946 - DNA, 472 bp, Glycine max
  unsure (1)..(472): unsure at all n locations
agcttataagaacgaaattgcctaaatcatttctaaatatgcatgtgaattaggaagcatcaacaagaatcaagccaaggctattgtgcaagcaatcaatagggcaaaacacaccaaaagattatgatgatggatggctcgaattctcacaaaggtaaacttatcactttcaaattgagctttcaaaactatcatgacatgtaaaggaaaaacaaggatttcaagtcacaaaatgtcaagagacttttattttcagaacaattacccataacttgaacatatcctataattcaaagacaaacatgcaaatttaacacaacaaaactaacaaaattaaactagaacccaacaaaactaacaaaattaaactaatttaacacgactaacanaaccaaaaccaaagaacacactccccccatacttaaacaacacattgtcctatatgtggcacaattaaaaagataaaagcaat

SEQ ID NO: 194947 - DNA, 388 bp, Glycine max
ggaccttaaaactcagctttcccttttgcttaatggggggattgattatataaggttcaccttttggccttctctctctctcaaatgcttggaaaatgttttcggaaaaaatccaagccgggcgcttccgaacgtttccggagtaattcgcgaaatttcgacgtcttcaagattcatcgtcgtcttcgtttctttagtcttcaacgggtaagtcctcaaccgagcttttcaattattctatgtacccgtggggccacatttgtcatgtttttattctcgtttcattgcttttatacccctttgcggcttaaccattattagcattttcgtaattaaaataataattccccgacgttgatgatatcgtattctgtaaagattcgacgtc

SEQ ID NO: 194948 - DNA, 480 bp, Glycine max
  unsure (1)..(480): unsure at all n locations
agctntntattaaaaaattgtaagcatacttttgttccaaattaattntaactataaatttatatttaagtgtatttttattttcaaaaaatgcgtttttttaaataaaaaaattagggaccaaattaaattattgacaaacgggttaaatccaaccatccaaggttctaatacatacgagactatgcaaattatctccgtaacctcactagcctactagaattgcaattcttagagccccaagtgtcatgttatgcatgatgatttgataggtttggttaaaaaatgattttttttgtttaaaatttattccacgactttctattatggaatgaatggaaggggaatatttccccaacccctttcaagtttcaatatcaaaaaaggtgaaaatgtcaattcaattatagaagtgactaccctgcacctttggtagtgatttaggcttagcaatctttagtgttgggattaatctgaaaa

SEQ ID NO: 194949 - DNA, 433 bp, Glycine max
taatcaaggggggtttaatcttctggtctgattatcttgctttagatgactcacagtacattattttactagttttcttttacttttatggttttatttatatatatttttttttgcagattcagaacaacctgtttgcccaattactggtttgcctgccaagtaagagctcagttaccaatttggtggttcttgctttgttcttctcaattctagtttggatgagagacaatgtgtgtgcaaattggaaatgcttgatagtttttttccctactatatctgatggttttagattttggtttcctctgtaagtgatttatgaattggtatgaatgttagttgattatggtttggagatccacgtttgaagattgttcaagagattgtaactctaatgtatacaaagttactagaatgtaacactagttggttc

SEQ ID NO: 194950 - DNA, 456 bp, Glycine max
  unsure (1)..(456): unsure at all n locations
agcttattaacatgcataagtcaaaggggtggtgccagnnntatgtcagaaataaaaaccaatctcaatctgcatacattatggaatatatagttttcaatgacagtactgtagagtgaacttgaagctgacacacaaatgcactgttactgccaaatggtttaaggaaatgtttgacttccaaaatgttcctttaaaggttatgtacttgaggggcaaggaaaggggaagccatattctcttcctatcataggagagaataagtccaaatcacatgagattctgtttttttggatgtgggtttcgccaagaatggacatgtaacttctgattttcactagatatcagatgaaatatgttattttggaatatacattacaatacagtgaggactagaaccaccacattcaactcaggtaattttcatcaattcaaaatatacatatagatttaagg

SEQ ID NO: 194951 - DNA, 280 bp, Glycine max
ccacccttccgcccgcccaagaagatcatcagcataagggggcgcaataataatgtgagctaaaataaacacacaactcacctaacaatctagaaaagtgacacacgtgataatacactcaacaactttattttttctcggcaaaatgcacatcttcactgtggagggaccatactacaaaacttctcacttagcaatcgaccgtgagtgagaataactcaacacattggaagacatacattatttccaacctacgacaaaaaataaacccacaaagact

SEQ ID NO: 194952 - DNA, 458 bp, Glycine max
  unsure (1)..(458): unsure at all n locations
agctttctccgcgaggtacgtagtttatattcgtttatgctaagtttccttgtgagtggtttgacccgaattgagagtggcatcggataataaacaaaaggtttttgtttgcgattctacaggctccgctgacgcgcgtgtgttgttgggttcttttgatcaaggtaacactaacttgtatatttcatttgacctattctattttntatgggtagtaataagtaatgttgcatgatttttagtaacgtgttattctgtttgcactataacagagaatgaaccatgatttctgtagatggatccacaggggtcttgcaattgcctgcaattgctttaacattctactatccaacagagggggcttgaatgttgttgtttgaacatattatttgtttcttgagcaagtaatgcttaagtatagataaagctccctccagttcttagaagacacccctacc

SEQ ID NO: 194953 - DNA, 435 bp, Glycine max
  unsure (1)..(435): unsure at all n locations
tcctcggggccattcctgcataggcaaacattcggaaatttaggtgtaccagtgggacattactcttaaagcaaaaatggcatataacctcctcccataaatacaaacatcaatgtgaatttagagcaagcttatgcgcatatttccttacaaacgttctcttgcacaggacattctattaaccgaaaaaaaaatgcacccatgtacaatcaaagcagcttcgttacctagattatttacacgtacttccaaggtgtatttgttacttacatcacacacatctccttggctaaattcacatacatgcatactcaaagcattttggggtaccaaaaatngcacatgtgcacctcttggtatttctaatacctaaacatacacaaacttcatgatgaatcttgactatctacacaattaaggtgctacattcatgct

SEQ ID NO: 194954 - DNA, 444 bp, Glycine max
  unsure (1)..(444): unsure at all n locations
agcttgtagaatggctagacataatattgttggtgtttggtttggttcaaggataaaagggatgccccacattatttccatgacacaaatgcaaagatgatgatttggaaattttatgcaaaactggtcatgcatgcacctatgcggacactcaagtgtcaaatttttatggtcatgtgatgctagggctcaggattcatttcctctattttaaatcaacccaatgtttccaaaatatgttcttttatcaatttgttcattcatccgagtccattttgggtactcgagaaaatttcacagcattcacccttcaggtgtacgtacattttttttttccaaaaactagctatgatcaacgaatttttctttatagaagaggtggaagtcatctcttttcacaagcatggttggttttctgctagacaacatttttctctntttttt

SEQ ID NO: 194955 - DNA, 441 bp, Glycine max
  unsure (1)..(441): unsure at all n locations
nttctttgagcaaagcgaaggcttgctcttgtttttctccccaggtaaatgccgcattcttcttcactagctcattgagatgtgatgcaattgtagagaaattaggaacgaaccttctatagaagcttgctaacccatggaagctcctaatatctcctacactttttggggtgggccattcttggatggccttgattttctcagggtccacttagaccccatttctaccaactacaaaccctaagaaaactatattatctacacaaaaagtacacttctctatatttgcatagagggtggttttcctaaggactaaaagaacttgcctaagatgtcctaagtgatcatctatgctcctactgtacactaaaatatcatcaaaataaacaactacaaatctacctatgaaatcccttaagacatgatgcataagcctcataa

SEQ ID NO: 194956 - DNA, 338 bp, Glycine max
accaagcccctacttttgaggggcaactcccatcttatgtaaactattccgggcaagacaatgatgaaagagatacccatcttaaccccctgcttcaccttaaagatacgtccccccatgaactaacgcaaccaaacatagtccggcatatcccgacttcacccacacaccgaaaagaatctggtcccttcttggaagataaaggaaagattgaagcgcttgaagagaaggtgagagcattctatggcctcaacaattacccattctcggatttagcggatttatgtctcgtgcccaacatcgtcattcctctccaaatcaaagtactggactttgat

SEQ ID NO: 194957 - DNA, 463 bp, Glycine max
  unsure (1)..(463): unsure at all n locations
nngcattggaattgcgaaagccccactccatcattatgtttattacctgacatctcaaacaaacaaatcaaacgtaacaagacaattatagttgttgtttgaatacctcacccactcaagtgtatcacacaattatggcttttctctaatgaaacactcttgccttttaccactctaattccccttgagttcttaggcaattcaagagattatggccacaacaaagaacaattcaccaatatgtgtcaggtaaggctagagagacaaggaaaaggttaaccaagaaaaaggctaacaatgtttttaggcacaaatgaaggaaataaaattcagaatttaggaattcaagtaacaatccttcatgcaaccaatatattaccttanagagattttttttaaagttcttcaagcatgaaccattcagcccaatttntntttttttaatttgcttatacgaaattct

SEQ ID NO: 194958 - DNA, 481 bp, Glycine max
ggaccttagagcaccgcagctgcagcttgggaaataactgagttatttccattaacacatctttagaaaggggataattggattttacttaggttcgccttgaaaattggtactagcaagtagaaaaaacttactctaattatgacctaccgatagaattaaagttatcaaagaatgtgtgaccgtaactgggtcctgccagtaggactaacaattaaagttattaacccaagaatagaggaaaaactttcacaaatgaagaaaaattcaatttttttaatctccaaaatttgtaggctaagctaaacaaactttgaagtacaatagaattcctactaacatttgtaataaacactaattacccattagcaattacttcccactaagcttttatttctagaagttgcactaacctattaaccataatagtggtttggaaagtttaacaacactaaaactttacctagacaatatcacaata

SEQ ID NO: 194959 - DNA, 451 bp, Glycine max
  unsure (1)..(451): unsure at all n locations
tgaagaagttntatcttttacatgcccaactctcttgtgtgacttttgtatttattggtatcttgaatgttgcatctcaatctctatcttatcatatatgcatcacgcatcatcatgtgtgagtaagaagaaaatttctaaatttattaaatttcttcagaaggcaaaactctctgttttaattgattacagccttacagtaatcgattgcacaagttgttttaagcttatagagttatgtctcgtatcgatttaatcaattacaaccttatcgtaatcaattacacagttgttttttggacaatgactgattcattcaagagtctctattttaatcgattaccatgtgatataatcgattacttctctctctataagtggtttagaagtaatcaagaacaatttaatcaattacattgaggatttaatcgattacattattcatgaacta

SEQ ID NO: 194960 - DNA, 490 bp, Glycine max
gtcacctgccgcatgcaagcttgtgtgttctgattgtggggagcaaatgctttcttcatgtccttgctctgatgagatggcctcttctcaccgcaactcatgcactgttgaggtggggagtgttgggagggtctcattcctcattgagaatgagaataacaatgagagtaccccagtggttcttcagcgtttgaatcacaataacaaggccaaggaggataataataatgacgaggatgaggttgtggtgctgaggaggagcagcatcagctgtgttgagatcaagaggcatcatcatggtggtggtgggtattggagaattgggaagctttttcggaagagaaacgatcataatggttgtcgcatatgtgtagttgggtttgactagaggaatagagagatgtgggtggtggatcatcaacgcggggtgtctatgtcaacgtcactatgcagcttcctgtgtggacggctatttggatctgacgatggt

SEQ ID NO: 194961 - DNA, 379 bp, Glycine max
  unsure (1)..(379): unsure at all n locations
ctcagctnttatgttgtggtgaggtttgattgttatactcgattgtcttatcttccgcgcgatgactttcccattgtaattttgtgttagtgatatatgttttggatttcgaagtttttgtatttaacactttggttgacaacttttgtttctttatgttgcaggtgaatcattataatccgctgcatctgtgatatacaactacatcacaggtttgctctgaatgacttggttttggtgtgctaaacgtgaagacaccatatttctgtgatatcatattctttccagattggattggattgatatcctttttctcagtttggattggaatgtaagcatggctctgttatttctcttggtataatgctaatacgttgat

SEQ ID NO: 194962 - DNA, 437 bp, Glycine max
ggaaccgccagtgccaatggcgggataggggctgactttgattatggggaggggtgccgccattgctgttggcgggatgggaagagataggagagagagagagtgtcccgcccttggagctggcgggataagagagagagagggtgtcccgcccttggagctggcgggataggaaagagagggtgttgcgggaggtggtaccgccagtgggtgttgtgggacagggggagagagggatgccgccactggcttctgcgggataggcttctgtgggttcatgtgttcaagctttgcacccatggttcgcgtgttagctttgtttcagttctgaaaagcctcagcctgcacctacggttcacgttgaaggctttcatggtctgcaccttgcaatatgtttagctctcaggttctcgaaaagctatactctatagcatatt

SEQ ID NO: 194963 - DNA, 479 bp, Glycine max
  unsure (1)..(479): unsure at all n locations
agcttgtgcaaatcaaatcactcctacattttatctctagcatgcattttctttcattacccactcctcacgtttggttgtttagggaaaacaccataactaaacgcgccgcacggtatccctatcgcaccaaatccaaatctagaacgatgggtgatcaagaggagacgcacgaacagatgaaagccgacatgtcggctctgaaagaacaaatggcctccatgatggaggccatgttaagtatgaagcagctcataaagaagaatgcagccaccgccgccgctgtcagttcggatgccgaagcagacccgactctctcggcaactatgcaccatcctccctcaaacatagtacgacggtgaagggacacactcgggcacgatggcagccctcacctgngatacaaccgagcggcttacccttatggatcgtcgcccaactattcaccaccacgtgtgcaagaagatgcgggccacatt

SEQ ID NO: 194964 - DNA, 455 bp, Glycine max
  unsure (1)..(455): unsure at all n locations
nntgaaggcttgcacgataatggcctgccctctgtgttatctctagagcatagaatgaagcatctctggagtaaacaaaaaatctgagggtccaaaagatgaacgagttggaagtggtatctgagtagatgaagtagaagaaaaaggtactataggagtggatgaagaaggtgcgactatctctagtgctactgaagtagtaggggcctctgatctcttgcccctggtcttcttaggccctctgaatgctactgttggatcatctagattccaatagttcttcttaatgtacgcgaagttaatgacagggctgaggctctccacggatctataatctgatgtgactcctctacctgtacacaaagttgtgatttaggctggaaatccaagcctagaggggtcatgctgtgctgtaatagagatctggtgagagatgatgtaacccacattcatgt

SEQ ID NO: 194965 - DNA, 411 bp, Glycine max
agcttgcggaagttgtgacaggctcaagtttcatttactgagcatcggaaacggcccacacctccatctatcaatgcactcgaacatattttgccaatcacgtaaaacaactctctctctaatgacccagccatcaaaactcgattgccgatgaccaaactggttgacaaccaaattgatacctagactacagagtttctcttctaaacaaataacagacaatgctgttgtccgatatctaaaccaatactagtattttcacccttaaaaataatatgctagcactactacacatcctgaacgagttgcaacgatactgaattcgttatacctctctatcatcttgaacgattacttccccctaaatctataacaatcagcgctcacacgcagccctccacatagatgatc

SEQ ID NO: 194966 - DNA, 417 bp, Glycine max
  unsure (1)..(417): unsure at all n locations
agcttagataggatattggttntgatctcttctggaagattgctaatcatatctggattcaccatcattttctttgttattctgctgccctccatccaactcttgcgtttcaaaagaacatatgacagggataagagtgaagattagtctgagagagaataattatgaagtcacggtgcctggttttatgtttagttttttatttttttattttcatggttttgagcactacttgtgaatatcgtgacacaaatgaaaccgtcgagtgcatgaattttggctctatatatatgtacataatgcgttttgaatccttntatcttttcattntttggagtcacatgtttttttttttttcatgtaatataaattaattgtatcagttatatantttgccaaaacatgactctcgtgaat

SEQ ID NO: 194967 - DNA, 452 bp, Glycine max
taaatgtttaataaaatgtgctgttatgcctacaataatagtttaattataaaaatttatatctatagagtgtcatttaaaaaattgatctggtttgatattgatttatactgttttggttttagaaaaacaaaatccttttagaatctttatttggttagtaaaattattcaatgttttaaacctcgcaatgacttcaataagaatgcgtttgattttactaaaagctttacacattggagaggtccaataagaaagagaaaaaaagtcatgaatcttgtaaggcttacctgttttacatggcaattctctgtataccgttttacacctcacttttatagttaaaatgccaatatattttaatcaaaatatttttacaacactaatattttttaaaataaagttttgtaatgctgcttctacacagacactaaatttattgacatgtgaat

SEQ ID NO: 194968 - DNA, 418 bp, Glycine max
  unsure (1)..(418): unsure at all n locations
agcttatcaacatcaaacttggagaaagagttcttgtggtcaagacatgagaagcaatcaagtataatgttacttccttcactaaagcggngatccatctccacacatattttatcaatagcaacataaaaaatctctgcacggtaatgatgaagattagtgatagtcctcccttctgctcttgaacgaccccgaactggtatttcgtcatccatatttggtaccagaatacttttagcaacacaaaatccttggacatcggcaaaaaaattattccagccactctctctcattgtgcccaaccgagctgtgacaacatcaactaattccatgacattcacaatattaagatcttttctttgcaatatatttgaaagctcgtttgtgataccaaacaactctaacattaacctcaaaa

SEQ ID NO: 194969 - DNA, 486 bp, Glycine max
acactactagaaactcacgctggcccaggtgagctgatgcttagccctgaaggaatgatctcgcctattcaagctgggtgcttatgcatgaagctatttcatggcccaggcgagccacatgctagcctaagcgagctagggtctagaaaaatccaaagaaagaccattttgcccccttccattgtatctttttgttttcttgagcaaaacactgagtgattccttgcttcgcactgtaactggcgccacatatagtaattcaactagcaagaatcaaaatatcataatgaacgatattcctcggacgaaattagggtctgacaacagactttagtttttctatgtgagaattagactttttctaatctcctctaactttatcacagaactcaaacaactccttcatctggataaaactgactgcatgacgtcgcgactcatccatgctagcctacctcttcttgcacattctatctacaaatgctc

SEQ ID NO: 194970 - DNA, 474 bp, Glycine max
agcttatgaatctgcatgtattcaagcggttctatttctaaagggccatatatgaaaagtaacacgcttctggggttcctatgcattacctgaactgaagagaaaaagaagagataccaaatgaagagagtcaagattctcaatctaaaaactatggctctgacatttgtggcatttgtgccaaagatggagagccatatcatgccaccagttattccttttccaccaccatctcttcacccactgtgtttatcccaactagcactagtaagctatgcttgtgcaatgttgcctccaaccacaacaccaccaccttcaccactcacatctccaccctctccttcatcctcaagtgatgatgagggacacaagaatgaccataatcatggtcaccaccaaacttctcaagaagaaaactgttgtcggtgggctaatgatatggacaaccaatgtgtatgagaattcctacttcta

SEQ ID NO: 194971 - DNA, 456 bp, Glycine max
  unsure (1)..(456): unsure at all n locations
agctntgcataagacaaagatgattgncttattcatttcaggatatattttcactttaaatggtggtgcagtaagttggaaaagttccaagtaagctacggtagcagattcaactactaaagcagaatatatagcggcaagtgaggtcgttcaagaagctgtttggatgaaaaagttcatatttgaactacgtgtggttccttcaatagaagagtcagtcccattattgtgcgataataatagggctattgctcaagcaaaggaaccaagataacaccagaagtccaaacatattttgtgaaggtatcacttgattagagagataatagaacgtggtgacgttaagattgaaaaggtagatggaaaggagaatgcaatagatcccttcacaaaggcgcttggcataaaagagtttgacaaacacaaatggaaattaagaatgaagttcatanatga

SEQ ID NO: 194972 - DNA, 467 bp, Glycine max
  unsure (1)..(467): unsure at all n locations
agcttgngctgagcaaatggngattatgtgtgaccaaagtgaaagcaagagtcatttctagggtaaattgggtgttgagaggtcaaantttgattcggtggagttttcatcgtaaaaccagtttgagcgagtttagattaatgttatagactttttgagatgagtgtttgctccaaaattaccccattctcattttcacttctcaaaccttgaaaatccattaaattgaggggttttagatacctagattttgaattgctttggtctgaagcttgtctttggtttagatgtggtttataaatgatttaggacttgtaggatccaatttgggcaaaattggatgagggcaagagtgatttcgaaatcttgcccaattgtgcggcacatagctgtcaaattttgtgcagcagaaaattgtgcttgtgcacgaaatgtggtgtattgctggttgtggaaagggtcgtaca

SEQ ID NO: 194973 - DNA, 470 bp, Glycine max
  unsure (1)..(470): unsure at all n locations
gacctataaaactcagctgagttatgcaattaagctagatgaagattattacatagatggataatattcataggaaagcaatggtaagtgccattacaaaggttaatatgcatataaatttaaccaaagattgcaatctttaaggttcatataagattaaattcatagatgaaccatgaagcatgataaagtttaatattcataagagagcaattgttcaaacaacaaaattaacaaaacatctaggccaaaattcacaaaatacaaaatgaagtttaatctccatgattgaagtcgctctcgatgagaaagtcatatcacanatttccttaaaattatcatatgattaccatattcattgatatgtcttgctgcagaggctggaatttcctgcagattaanaaaaacanattaattnttttcaacagcaatgaaaatgataggaagaaaagaaataaaattaaagtatg

SEQ ID NO: 194974 - DNA, 482 bp, Glycine max
  unsure (1)..(482): unsure at all n locations
agcttctacttatgtggcagggcgggctttcttcactttcttgtctccaacgcgagctctgaccactgtccttccttcccgcggtgcttcttttcatgtccgcctgagtgggcttatagcctaaaccatacttcccacgatttccttgggtttttatcaggctagttatgccgccattgtctttgcctaaacccatcccgggttcataaccgttccccaacataactcgggccatcattaccgccgcatcggacagacaaggttgcccaaagagggagtccacggaggaaatgctgaccacctcaaaagactgganagcggtttctaacgattcttctgcggcttccacataaggcatggaggatgggcagcttaccaagatatcttcctcgcctgatacgatgaccaagtgcccctccactacanatntcagctnttggtggagtgtagaaggcacaactcccactgagtggatccacggg

SEQ ID NO: 194975 - DNA, 465 bp, Glycine max
  unsure (1)..(465): unsure at all n locations
tcanaccacagcaacacanaatctaggtatccaaaacctttctatttaatggatttcaaggtttgagaagtgaaattgagaatgggataaatttgaagcaaactctcacctcacacaagtctataacatcaatttaaacttgttcaaactggatttacgcctaaaatttcaccgaatcaaaatatgactcccaacacccaaatttaccctagaaatggctctttgttcactttggtcatttgtttttctctctagcacagcccaaactttctcataagtcctaaatggcatttcaagctaggattaactcactctaacctccaaataccactaaatccagatttggccttccaactctcaaagtctcactctttttccacttacaacaccatactctcaccttctaaccctaggttaactctacccttcatctctaacaatattgcataagcaatttcagcacat

SEQ ID NO: 194976 - DNA, 292 bp, Glycine max
tcaaagagttaaacttaacacgaacagggtacgtttatacctcagggactctgggtggaggagacagaccacatcaattcatcataggacatgtctagcaaatcaagacagtcataaacggcgataaaagacctgaatcgcccaaaccaccaacccaacttggagagaatataagtgactacttgtaacacataaacgacagatctcactgtcccctcaaattcagaaagatcaaccttcagcaactccgtaccacactgtgcaggtgctttcgagcgatgtgcacaggctc

SEQ ID NO: 194977 - DNA, 452 bp, Glycine max
  unsure (1)..(452): unsure at all n locations
tcgctatgctactcacattctacctctcgagtatcatattctttattcttacatcatgagagaacaacaacaagatcaatcactcaatgtacgcagcccttattactntcatccgggagaaaatccagggatagctttgggttctccgggtcttgattcatccaattataattcatggagttgatctatgctcattgcattaagcacgaagaacaaatatgagtttgtcgatggttctattcgaagacctgcatcagatcatgaacttcatgtagctcggaagaggtgcaataatatggcggatctatggaaggntcatttaatctctctctcaattagacaaaacatactgtggatgaatgatgcacaacacattcggacagactcacaatcacgatattcacaaggagaccttntgagaattacgatcgcagcaagacatgcatcaatta

SEQ ID NO: 194978 - DNA, 479 bp, Glycine max
agctcggacaatggcagagcaaacttacttaaattctgtatgaatctcctataaaaacctacatgtccaagaaaagaacgcatttcctgcatagaagcgaggtaaggtagagaagtaataacatcaatcttggccttatcgacctcaatacctctaatagataccaaatgccctaagattatatgtaaccacatggtacaaaaactattgctaagagtaaagacccttcccgtggcctttggacgtctagtttggtcattcagacccccaccattctgcttcttcttgggatataggcaatctctttgaatatgccttttctgtctgcaattgaaataagtcatgtcttcatcgacataatttgaggagatgtgccctggcttaccacacttgtaacaagtgatctgaagtgagaaagtaatgggtgtgctaccactaccaccagcaaaacccatagcaacagtcctctgaatgtaggg

SEQ ID NO: 194979 - DNA, 420 bp, Glycine max
cccttaaacactagcttgaacaatatactggcttattaactatcctgttttttttgcttctacaaagactttgaccctactgtacgttgatttgaccaagctgttatgggaatgttgctacatccttcaaaccttattgatcattctaataggttggttgtcatgtggcatatcaacgccttcttatataagccatcgccattttcctttaaatgcgatcaatccatgttgctatggctggacttagttcacgaaattttctaaattttgataaaaatgtgcttacaggagtgtaggctgataaaattattatgataacaatttaagtatatatggaagtaaaaaacgtgaccatataatgagatttaccacttttcacattctttttgtgacgttttaatttcatgaagtgctgctatg

SEQ ID NO: 194980 - DNA, 441 bp, Glycine max
agcttctcgtcctttgctataatatgtttttatggaacaacataaatattctaccctcctggtatctgagattcacttaaaattagtgagaaaaattgtttccgtgaagaaaatccaagccgaggcgcttccgtgacgttctcgcgggtgatttcgcgaagattttcaaccgttcttcgtcgttcattgttcgttcttcgtcgttcttcagtcttcaaccggtaagttcccaaaatcgaacttttcaattcattctatgtacccttagtggttctcatttgtttcgcatgtttttattttcatttcatttactttccgtacccccttttgacgtgctttagtaatttatttaagtcattttctctcctaatcaaaaataaaatacatttccaccaatcattcgtattgtcacatcctttaatttctggtaaaatgaattcc

SEQ ID NO: 194981 - DNA, 462 bp, Glycine max
  unsure (1)..(462): unsure at all n locations
ggaagtgccttgaacctanaagttcggattaagtatttctattttctcaataagatattgggctctctcttgttcccatgcacacaatttaacaaattcaacatatttctttcctcgtcttctgaattttgaatactcttcaagattattttttatcgattacctaataaattacttaatgaaaataggctttcttttcattcatttgtaaggaaagagctcgtagccaagtgagagctcttgtggtccttaattagaatttactaactataatgatatttttatttattatgatattaatataaaataatttttgtcgaaagtaataactaattttagttaggaacctcaacgtgcataagatactaattctctctttccatcactatctattctatatttaagggtcaatcaatattaattatgaaccaattaattaagaaacacagatcgttatcacct

SEQ ID NO: 194982 - DNA, 479 bp, Glycine max
  unsure (1)..(479): unsure at all n locations
agctntaacctcatcgtctctacagtctttattattgggagccaatccaatccttgtgtccggactctcagccacttatgatagccgccgatgctcccattactgcttcccctaagctctttgtcctttcttcacgccgcatcccatgccttgcgaactccttggagtaccctcgcgttgtggtcactaaaacctcgtgcgatgaaaggcgtgatgctttcgtctgatggcactcctctcatgggacatccttcgcatgaagattgaatcctgattcttccttccttctagcgagggaaccatttaacaaactgcccctccatgctagccaagagttggtcccaattcgtctttctttttcgacgcacaagcggtgaccttgtagcagatagacgggcctaccttcttagagataaaggtgtgaaaccagccccacatagagagctggagtacagcaaacaatccttgcattgctttct

SEQ ID NO: 194983 - DNA, 394 bp, Glycine max
  unsure (1)..(394): unsure at all n locations
tgcttctacaaaacaaagcgaagttggctgtgttatctacaatgtcatcgatgtgnggcaaggggaagttatccttgggactagctcggtttaggtcccgatagtccacgcacattcgtaccttcccatctttcttagggactagcacaatgttggccacccattccaggtatcaagccacagccaagaagccagcgtcgaacttctttttcacttcctctttaatttttagggacatctctggcttcatccttcgtagcttttgctttaacggcgaacacttgtgtttaagaggtaaacgatgttgcacaatgtccgggttcaaaccagacatatcttggtatgaccaagcgaagatgtcttggttgttccgtagcaagactaccaattcatc

SEQ ID NO: 194984 - DNA, 385 bp, Glycine max
ggaatcggacctcagtgtgataagttatgacctttacttatttcgagagctttcggtgttcaatgtcgagcatctcgacatgttatgcgctcgaatcggacatccgtgtgaaaaggtatgaccatatgagtttctcgagagctaccgtggttcaacttcgagcatctcgtcataatatgtgcccgattctgaccttcgtgtgaaaagatatgaccatttgaatttctcgagagcttccgatgttcaatttcgagcgtcacattatattgtaagcctgaatcggagctcagtgcgaaaagttatgaccatctgtatttctcgaaagccttctttggttaatttcgagcatctcgacatattatgcggccgatttgacccccgtgga

SEQ ID NO: 194985 - DNA, 479 bp, Glycine max
  unsure (1)..(479): unsure at all n locations
agctntatgaattataattaagaaaaatattattttttaattaatgtgacaaaaacatatttaagcttattgttattgcagaatcttggttgtcgctgtttcgaagcacagggaaaaaaggggttgccaaagctgcaagtcatttggagatgggtgatggactgccattttctttttttagagtttaacaacttgtacgttttttatctgaaaatcttactttaaatttattaagtatatcatatcatcaagggataaaatgatattttttttacatatcaaagttgtaaaaaaaatattattttataaaaaaaaagttgtaataaaatttggcagcttgtatacataaattagaaaagctattttaactaagagcatatttaaaagttgttgtttaacgaacatatcnttaaatatctctattttgacaatagtatcgtttggaaagcattcttaataatatatctctttatttatca

SEQ ID NO: 194986 - DNA, 461 bp, Glycine max
  unsure (1)..(461): unsure at all n locations
taaggcttaggccattagtgttagggtgtagctcaatttcatggtatcttccccaacctacatccttcccttgttggcaattgcttcttgcacccatttttttgcttcatgcatctcgataaacccaaacagacaacaatgcctcttcatccaaccacccaacaccactgtgtgctacctccacgtaatcacccaacacggttgctacacacaaaaaccaccaccaaacaccaccgttgaccactgtggtgcaagaaagaagtcacgcatggcattagggacacaaaaaaggtgcaaaacacaacaaccttccaaaaaaccttttttggaatactgattatttnttagcattccggaatatgaattttaccattttggaaaggggtgatggacaaagatgcaaactgcanacgtagcattcattatcgtatctcaaatatatgtgaacatgtttcgttttt

SEQ ID NO: 194987 - DNA, 420 bp, Glycine max
gatctgcatggcgatctgcagaagaacatataccacagactcttgccacaggtgcaaatttctgatttatggcgagctaggttactaggttgaccaaggcatcaaggtttccctcaagcttcttattttcagcagatgaagatgaatctgtggccacctcatggacttctctaaagacaatagcatcatttcttgcactgaattgttgggagttggaagccatcttctcaatcaaattcctagcttcagcaagggtcatatcaccaagagctccaccactgtgaacatcaatcatactcttctccatgttactaagttcttaagatgattatgaggttcttcacctgcaagaccatgaaacttgtgcagcaaatgtattagtccagtcttgagaacatatggaacaccctcatcaggata

SEQ ID NO: 194988 - DNA, 395 bp, Glycine max
  unsure (1)..(395): unsure at all n locations
agcttctatataagggtcgttcctaatttttctcttttgcatcatctctcaatgaggtggtgaagaataatgtggcatctacctgtggtgaaaaacaatagcaagcctttgtgttgctcaaagaaaagctnactaaggcacttgttctatctcttcctgacttttctaaaacatttgagctttaatgtgatgcctctggagtgggagttggagattgattgttacaaggtgggcaccctattgcttattctagtgaaaaacttcatagtgccaccctcaactaccccacctatgataaagagctatatgccttaataagagccctccatacttgtgaacattaccttgctctccaaggaattgtattcatagcgacactaatcactatgtacatt

SEQ ID NO: 194989 - DNA, 327 bp, Glycine max
ctccccttacgaagaggtcagcacttgccactatgggccctatgctctctcctagagaactgctaggcatgacggagtcagcatcagagggactattgctgggactcaggtggtaatctctccaaccaccaatattgctggatctagatgtgctctggatggcttgacaattagcaaagactggtagaaggagttaacctacagaaaccgcggattagatgctctatggaatgcctcatttatacagacgtgacaaataggttcgtaacaccttctggaggacatccaacttgatctacatgtgtaggatgatccacagtgtgttat

SEQ ID NO: 194990 - DNA, 475 bp, Glycine max
  unsure (1)..(475): unsure at all n locations
agcttccaggttcaagtatggccaagttatatgtttcatatatgtccagtaaagatcttactcgtcttagagtagactctagtgatgatagctcttgatttgttgttgtggaggaggtgaaggtggttcacctgggtcttcttcctcagcttcttcttgaggtagtngagtagttataagaacgtctttctccactttttcttcatcccaattccaagaagcgtactcatcaacttcaacatcttgacgatgacgagtttcttagtttgcaagttgtagacacggtagcccttacagatattgctatacctaacgaagatacctcgtatagtcttgtcttcaagcttgtgcctcttcatgtctggaatatgaatgttcatatagatccacagaaccttaggtgctttgctgatggcttattcccgctccaagcttcaattggcgtcttgcttttacagacttaattgacatctgt

SEQ ID NO: 194991 - DNA, 460 bp, Glycine max
tagcaaatggacctgggtgttgcccaatttcattatatcttccgtaatactccccacctctatcatatctaataattttcacatttatgtctaattgcctttttacttcattctagcatatttctaatcctgcctaggttagctttgctattcttagccggtcccaagcccggataaaaggagagggttgtgttatgctttcgacagccaacgtaaaactttgtcgaatctctatgacatggatcaattacgtaataatgtgaatgctaggtcgttgcccggaagcaacgcactgtatggctcgagtacagtgtcaaaagagcaagggccgctgcatcgccgcccacatgtagtgaaaagtaagcaagggttcccacattttcgtgaacgggtgtgggtaaagaagctatgtcatgacaggaggattcgctttggtacatggaatatagacacacttact

SEQ ID NO: 194992 - DNA, 336 bp, Glycine max
acaaccttaacgccattaacctagggaattaatatcaacttaccggctgagctgaactgaaaatgtggccacccaaagtcacccccaacaggcaccctcacccaccatttggactcccaacaagttgatgcctaagttgccattgggcccttattacaactagaactaaacctatctaaagccgttttagctgattaacccacaacatattttggtcagccaactctacaaggattgtgccattcattagacaaactaaacactctaaaactgagacaaagtggcgccattcactcctcactcattagagccatgatacaactcacaaccttggac

SEQ ID NO: 194993 - DNA, 376 bp, Glycine max
  unsure (1)..(376): unsure at all n locations
ntggttntcaattacgagtgtcgttgatttgtacgggtcacaataggacatccgagtcaaaagttattacgtttgacttttcctagagctcccgttttcaatttctagcgtctcgatatattgaagggctcaatcggacatccgagttaaaagttattgtcgtttgacttttcttagagcttccgctttaaattttgagcgtctcgatatattacagggctcaataagacatccgagttaaaagttattgtcgcttgacttttcttagagcttgcagtttcaatttcgagcgtcttgatatattacagggctcgattagacatccgagttaaaagttattagtcgcttgattttgtcagagctttcgttttcatta

SEQ ID NO: 194994 - DNA, 481 bp, Glycine max
  unsure (1)..(481): unsure at all n locations
agctgtaagccttggatcttgttcatcattggagtcctttgcttcttgaagattaatggtagcggaatggagatggaagaatactgattggaaatgccacttcaaggagaagatgagtcaagaagaagctcaccaccataggaagccatggataagagcttgaaggtaggagaaaataagaggagggagagggagagaaggaacacaaaattttgtgcctcanaacaggtctgaactttgaagtgtaattctcaaatgatcaaagttgaaaaatgcacacacatgacctctatttatagcctaagtgtcacacaaaattggagggaaaattgaatntctattcaaatttcacttgaatttgaaattgaatttgtggagccaaaatttcattaattatgattagtgaatttcagttatggttcagcccactaatccaagatcaagtccaagattctccactaagtgtgcttaggtgtcatga

SEQ ID NO: 194995 - DNA, 469 bp, Glycine max
  unsure (1)..(469): unsure at all n locations
actaagcttgattttttgctattatgaaatataatnntctatttttttntaatcacactcaaagntnttatatccccctaaaaatgtgttatgtgggtatctctattaggtttatttaatgtatataaaattacaatttaaaattgtattttcaattttattctgttagaattgaaaatgatttttttaagaattaaagtgtaaagttttaatttttagttaagttgtaattttattttatttcaatacctttaattacaggtaattgtaggtgattttaggttttggttaaaaaatttggagtgaatagaggcttgaatagataaattntttattgacttttagtataaaattattgaaattaattgggttagatcgattttagagtgatttcaattcaaactgacactattagaaaataatttttttaaatcgattattaaaaacattttacaccgatgttaaacta

SEQ ID NO: 194996 - DNA, 394 bp, Glycine max
  unsure (1)..(394): unsure at all n locations
agctngcttctacaatctccccctntnattggtgacaatcctganatcaagaaacacatacacatgcttctttctagtcgattactcacttaattctccatattctccccctttgtttttgagtttaagctccacttgaaattaagtaattctattatttgagtttcttgatttaatccttattntctctcaccctttggcatcaacaaaaagccaaagtgcataacaaatataaaacattcacaaatgactaatcatacataagtcatttctttgaaaaattaacccattattgancaaaaaccttaatagaaatgactagtcatacataagtcattcattctaaaaatcttaacccatcctgaaactcagaagatggatatacccaatatta

SEQ ID NO: 194997 - DNA, 451 bp, Glycine max
  unsure (1)..(451): unsure at all n locations
tctatataagctgaaccattntatcaataaacacaagttgagttttattcagaaaattagagtttatctcttttatcttagtgagagtgattctcctaaattcttgagtgattcaagaacaccttggctgtatcaaaggactttcacaacctttgtgtgttgccctcgctggaaagagtgattctttccttcctttcatcatcacccttgttctttcaaaccacaattccagaaaatccacctctgcccaaaattatctcgtggccataactcccattttacgcactcaaattaagtgattcttgagcctaaattgaatttcaaaacgagacctttcacctcgttttggaatcacctcatttggagccctgtagcttcagttattgccatttctatatttctgtccagccaccacttaacctacgtgtaccatcccattcatgcatttatg

SEQ ID NO: 194998 - DNA, 470 bp, Glycine max
  unsure (1)..(470): unsure at all n locations
agcttanccaaattcagatcgaactgaattttgcttatcttatccttggctagcttagctgaccaaatcagcctcagatgcaagggttgggcgctaatcacttgagactcgtggcttatcgcatgatctaagatgcgcttatcgcgaagctcacgcttagcgaaaggactatcgatgtgccattattttctcctatttcttaacctattttgcaccattctaaataccgattattcttaattgtcaaatttattacgcagtcttattatctgggcccattcagctaattgatgtctttaatctaattgcacgaattaatgaagcattgtgcttgaatctataactgggcttggacttgaagaaggcagactaatctattctacaacattagatcctatcttaacttatccatatagtatctagatttgatctcatctagatatgatttcatctagatcttatcttatcta

SEQ ID NO: 194999 - DNA, 469 bp, Glycine max
ctcaagcttctcctaatcggcgactcttccgacggaaaatcctgcttgcttctcagattctttgtgagtcatcactggattcgcttctcctaatctatctttttgcttactttctatgattcttcgtttcatttcaagatgactcctagagtcaacagctacgtaagtactattggagttgatttctaaattatcactcttcttctctgtgggtatttctatttacaccttgatattggtgatttaaattttaattcaatttagctattctttgacgctttggtcgaattttattggcttatgaataatcgatgtacgttgtggatcgggacttaacagcgagacaatctcggagaatggacaccattggattgggcttgatatttcagcatcgatgcctatatactttcgaatgttatatatacggtgctcattctatctattcctgttaaatgtataaaatgttgcg

SEQ ID NO: 195000 - DNA, 477 bp, Glycine max
  unsure (1)..(477): unsure at all n locations
agcttctttnggaccttgaacaagcaatcttctcctctntcagaaccatgctatgtgctcgcgactggtccctttcttcccttcgcaacttgagttcattattgctaccccatagagctccgcgaaatttgttccggccatactcttccttgcgagccctcttggtctcttgttcaagggctcttgcggtaattgcattctcttcccgtaactcggcacactccttccgaacgtgtgtagcagccaacttgaacttctccttggcgagttttgcctttcctaactcgcttttgagagcttggacttcttcgtcctcttccggtgcttcaaaattctcttcgctgacgacttttaacttggcgagccaatctaaacctcgtatgcgaactntcagccattcgtggtacccaccaatgatgccattacgaatgcctctaagctcttgatctttccttaacgggggttcccatgccttat

SEQ ID NO: 195001 - DNA, 474 bp, Glycine max
  unsure (1)..(474): unsure at all n locations
taggctaaattaggctacacntttgtgagctacttgatctgattctagtcttacatgagggatctgcggacaaaactcaatttaagtaagtctaaacctaagagggctgtctaaattgggtgtagtcttacatgagggatctgcggtcgaagcttggatattcgacttgatgagggatcgagggtttagtaatttaggctacaacatagaacaaaaaagcacggttgattggagaaatatatttccatgcatcagcttgtttgttaaaaagacccaacatatctacctactactatcattttatttactttgcactttatagtttttatcatacaagtttagtttaaattctggttgaaattatcacttctacatgttctctcaacaatgcttcacttctgaacttaattaacctaaaattgagagaaactgattattaaacacacaaaatgaaaatactaagtatttattacc

SEQ ID NO: 195002 - DNA, 454 bp, Glycine max
  unsure (1)..(454): unsure at all n locations
acctgcggcatgcaagcttatgaaagaaataatggatcataatantttcaatgcgcttcncnttatgactagacttcatttccaaaacattaataattgctgccacacttaattctgccaacttatgttggagcatgcctaacaaagaaaatcaagtttttatatccattcaaatgttcatctgatttttttacccgaaatcactccaagtttagactcacattcccgatttgactttgttctggaagcgcttacatttctttgcagcgcattactgactctataattaagggcagaaccacattatgtgttcaagatatattacgttgccgggctataacaataatagtctactgcatctgcctgtctatgaacaagctgattttaaagatatcaattcttataataaggttatagcaagataagcttccatgatagacaacgcacctgtgca

SEQ ID NO: 195003 - DNA, 461 bp, Glycine max
  unsure (1)..(461): unsure at all n locations
tatcttaatagagatgtactcgttttgtcaaagaaatttatatgtctcatgtacatattcattttccctatcttttatatgtatgtgcgcttgcctttaattagatgtagatccgggtatcaaattaacatgatacatgtatacaaacacatttatcttcatacattactctatgttaacaaataacaattgatccgaagtgttacttataagcattctagtatatatatgctggactcattntattatcgcataggggtatatagggtacacgaaatctcactgtcttcacgctctatgtttgtgagcaatattctgattccttggaatatattatataatattcgnttttctatatataatatacaatatactattacatttgttttatgacaaatggtagcaacttagatgcatgcttgatatggataaattaatattaatattttacccgaatctat

SEQ ID NO: 195004 - DNA, 457 bp, Glycine max
agctttaaattatagaatacatataagagttcttatatatataaaggactaagatttgagagcaatagatacattagggtgcaaatacatcccaaaatacatgtaatggaaactaatgactgaatatacaagcaaaatgtttggaacctatgcttacaaatacatatgcatcaaaagggaaaacacctagtctttgagtaatcaccactaaactcaaccatgtttgtcagactaaatcaagtgagatatgatgatactggagatctctagcaaaatccctgagaagaaatctcatggtctcatagagatcaagtcagactaagttcgtctcacaatcgtctaaatctcccttaaaatccttatagtagttctttgccttgttgaccccaacgcccctaactaatggtggatcttcttcacgggcataagaccaggcaagaaccagatttcgaatata

SEQ ID NO: 195005 - DNA, 434 bp, Glycine max
tatgcttaatgggtgtgatcctttgcctagaatatagtttttacaagggcctcaaaggagtaccaaaagcctcaccccatcaatgagtcactttggagactaccagatggaagaaatgtgaggtgggggaattaccaatgcagaaactttgagtgcttatctagcaagaatccaaagaggggttactcaaaatgcattggatgttttcaaatggaaaaagaaaagttgaaatgggtcactaataataataataactcacttgttgtggactttttgatcagtgatgtattggcaattaagcaaggagaggttaggattggactatactatggcattggcactggcacatttgctgcaagaatgagggagcaaaatgtgacaattgtctcaacagcactcaaccttggtgctcctttcaatgagatgatagcact

SEQ ID NO: 195006 - DNA, 468 bp, Glycine max
agcttccacaatatccaagcaattcaatttctattcatcatgaactatcctaaactaagaaaacagggcagaggcaaaaaactctgcccaaaacacattccaataccacaactttccctactcaaataccccagtaacattctcttcgttccgattcgttaaccgttggatcgactcgaaagttttactggaggtccctagtaaataagtctacattcttaccgttgggatctgctagaaaatgtccagaacccaatatttactaccctttccacaaccagcaatacacaaacattttttgcacaagagccaaattctgctgcacaaaatttgacagctttttgctacacaaattgggcagatttcgaaatccctcttgccctcatccaattttgctcacattggatcctacaagtcctaaatcatgtataaatcatatctaaaccaaagacatgcttcagaccaaag

SEQ ID NO: 195007 - DNA, 465 bp, Glycine max
  unsure (1)..(465): unsure at all n locations
tatgctgcaaacatttataatagacctcctctttagctttaccaatttttgcagaagaattatgacctttcaagcaatagatacaatccaggttggaggaatcatccaaatctaagatggacaagtcctccacaacaacaacagcctgtccctccttttcagaatgctactggtccaagcaagccatatgttcctcctccaatacagcaacattcacaacaaaaataaataaccccccctaattcgttactattttattactatctgttatgaacgtttggttgaccattgctcgttaggagatgacctaggatcacttcctagatactgcatttttaatgtttattagatttgggtgcggcctcgatcaaatttggcgacaaagacaacaagcaactaaggctcctcctcaaccttccttagaagagttagtgaggcanatgaccattcagaatatgcaatttt

SEQ ID NO: 195008 - DNA, 476 bp, Glycine max
  unsure (1)..(476): unsure at all n locations
agctttangctgtctctttgttaaanaaatataataataaacnattcaatgcgctatctgaccgataaactggtggttgttccgtcgagggacaacagtatcacatcacattatcgtgggaaaattattatacgtgccgatatttgataaaatcatattataaataaataaacatttttttatgatatatgttaagaaatactttaaacatattaatattaaacaatatatttttttaataaaataaatactttcttcttgaagaaatttaaagacattttaaaaaacataacaaaataacctagagaaattgaacttacttggatcaagctcatcactcacaagctccaatacaagtgtgtttccagccaactctttgatcccatcaaccgctgaattaatgagattcagcagaagtccaccattacctcgtgcaatagtcacaatagctctcacattcacgttcacattctgag

SEQ ID NO: 195009 - DNA, 450 bp, Glycine max
  unsure (1)..(450): unsure at all n locations
ntatcatagatgatcaacccatgatgaatgattcttgttcaacttgactctcatgaagaaatgcagaaacaactccttagatgacttttagattgtattttcaaaagatcataaaaagagtcactagtgagaaagaacatgtgagagcatttataattttttactgacaaaacaactttaatcaattaccaaaacatgtaattgactattttgatcaaaatacccttgttatgcattttcaaaatcgtggtattcaattaaactatgtggtatttgattatctcaattaacaaagagcttttattgctctgtgacccaaagtaatcaattacaataactggtattcgattattttgtcttccaaaaagtaatctaagcattttcagacgcactgtaatcgatataataagtgtgaatcagttatcttatacacagaacctatccttctct

SEQ ID NO: 195010 - DNA, 471 bp, Glycine max
  unsure (1)..(471): unsure at all n locations
agcttctttggaccttgaacagcaatcttcttctctttcacaaccatgctatgtgtacgcgactggtctctttctttccttctcaacttgagttcactattgctaccccatagagctctgcgaaatttgttccggccatactcttccttgcgagccctcttggactcttgtcaagggctcttgcggtaattgcattctcttcccgtaacccggtgcactccttccgaacgtgtgtagcggccaactagaacttcttcttggcgagttttgcctttcctaactcgcttttgagagcttggacttcttcgtcctcttccggtgcttcaaaactctcttcgctgacgactcttaacttggcgagccaatctatacctcgtatatgaactctcagccatttcgtgtagccaccaatgatgccattacgaatgcctctaagctctcgatcttattcaacggngtacccatgcttat

SEQ ID NO: 195011 - DNA, 475 bp, Glycine max
cacagaaactcaacttgccaacaagaactatctattttccattttgtttaactatcttactaactaacttccactaatatatagagcgactactcataaagaagggatgagccttaattaatcccatctaatatacctaattaaactaattacacaaaacaaagcccaaattcgcagcccaattatataagtgcggagattctaacttccaacggtaatttgaccctctaaatggcagaattggccaaagcttattggtgaaaaaatagaatatctttttgttatctttctagggactacccacaatctccattttgaggtatgtagtgtcctctacgatctacacaaggaaaataggtcaagtaaccaccaaaatccaacaattagctacaattatcaattaagctcaatcatttgcctaagaccaaaacacactgtatatgagaaaataccgggtaaagacattctgattgag

SEQ ID NO: 195012 - DNA, 451 bp, Glycine max
  unsure (1)..(451): unsure at all n locations
agctttctggtggcccaggcaagccagatgtttttctgagcgaaccacgtgtctgaagaagtcaccaaatgaccattttgccctcccttttgtgtaatttccgcattctttttctaaacgtcaaaaagccttatggattgtgcggaaattggtgttaagtagctgaatttggcttgcaagaatccaaatgtgtgcaaatgatcatccccaaacaaaattatggtatgacacaaatcaaaatcaaatcacaaaaatatgaaaggatgtcatgaacattgtacaattttccattgcttttcaagaaaggttgcattcatctgcatcccaaaaatcatgttcatattaagtgcatagatttccctttatatatcaatttcctaaatctaatgtcctatctttcataggactcanagtcctcacttttatangactcaaagacctcaccaccatc

SEQ ID NO: 195013 - DNA, 493 bp, Glycine max
  unsure (1)..(493): unsure at all n locations
acactactagaaactcaagcttatgagaagaagcatatgaagaagttagaggtttttgttctactattcaagatgcaattgaaggtgaacgaagaaagtccagaaaataagagaagtcaacgaggccgaggtagaggtcaaggtcatagtcgaggacaggttggacgtggcaatagtgaatgatgttcaaatttcattaacaatagttacaagaaaagaaaaaacaacaagtttgaaacccgatgctataactgtcaaaaaattggcccctatgcttcaaaatgtagattcaccaagaataaagttgagaaggagactaactatgtggagcaaaaagacaagaagtttgaaacagtgctcgtagcacgtggaggcaatgaaggtagtcaagaaaacacttggtaccttgacaatggtgcaagcaaccatatgtgtggaanaagaagcatgtgttgtggatcttgatgaatcaataagtggcaatgtcttattt

SEQ ID NO: 195014 - DNA, 465 bp, Glycine max
  unsure (1)..(465): unsure at all n locations
agcttacttatgtttctggcctttagntttgtttttcatctatgtggcatcttataattttcattgcttcttatttagttctcttctaagatgggctgattgaaatatttgggctttttagtaacgaagcactttaactaggcacagtgccttcctctgtttggctatttttttttttctttccctaaggttgcaaccaaaatatcctacctgccctcacggattaaaactataaataccaaaaagtttagagattgaaaaatataacttaaactaaaggattgtaataattaatgggataaatcaattgtggtgtcaacaaaggttggtttcattaataaaaaaatgaagtcatatctcaaaagcatgtgaatttaatttctacattcatgtgaggactctattggtgatactctntaagtctatatatatatatatatatatatatatatatatctatatata

SEQ ID NO: 195015 - DNA, 458 bp, Glycine max
  unsure (1)..(458): unsure at all n locations
tcacggagtttagagaagggggttattgtaatgccatttaatgaanggtatcaagtataataaaccaaaaccttgaggggggtcaatgtaatatactcatttttttaaccaaaatacattctcaattattttaacatttattatgatcaatgtgacaccctttacccctcacatatatattaataaaggaataaaaaaatcaaatattaattaaaagtatttttaaaacattttaaaatacaagcctttcaaatgggtaaaaggttcacattcactttcttcttcatcatattcaaacttgtccaaataaataataaagtcatttcggctcacagaagaccatctaagtttcatacaattaatatagaacctatatcctaatgtcacatcctatcagagcatgngtgttcccgtgtcctctagcatgagattcttcataatcatncacgtattcatct

SEQ ID NO: 195016 - DNA, 462 bp, Glycine max
  unsure (1)..(462): unsure at all n locations
ttaagttatgctggagtcaaacattaagatgaagactttcctctatgaaattgcgttacaaagattaaaaaaaagtgtaagtggtactagttatggaaattataaaattaaatgcaaattttgttatgtacctttttgtgggtcttacaatagagtgaaagcacacttattgaagatgacaggaaaagagagttatacaatgtcaaaaggtaacaaatgaaaaacttataaaattgaagaagatagataatgagctgcattgaagatggaaaagtcgaaatcaaaatttgtctctttaactttggtttcttatcaacacaaaaaattcccatcatcaatggatacgaacgttggtggtgttgatccaaaaaagagaaagactaatatatagactaaaagagaaaggcanatgaaaaactttgatgtcacattactagaatgtttattctttggggtgcattt

SEQ ID NO: 195017 - DNA, 477 bp, Glycine max
  unsure (1)..(477): unsure at all n locations
agctngntgaaattgccatgtttggatagttattcttacccattctgttttagggtttttgtgatgatgtttgtgatgtttatatgctgaaattgctgatggaaatcagttagagacgaagggtagaactaacctaaggttagaaagtgagaatgtgatgttatgagtggaaaaagagtgagactttgagagttggaaggctaagtctgaattctgtggtaaatggaggttaaagtgagntaatactagcttgaaatgtcatttacgacatgtgagaaaggttaggctgagctagagagaaaaacaaatgaccaaagtgaaccaagagccatttctagggcaaaattgggtgttgaagagtcaatatttgatttggtgcaattntaggtgtaaatccagtttgggcaagtttagattgatgttatggacttgtgtgaggtgagaagttgcttcanatttacctcattctaaatttca

SEQ ID NO: 195018 - DNA, 439 bp, Glycine max
  unsure (1)..(439): unsure at all n locations
tntgaacaacagtcaatgctcatggaaactcaagtgtttaaataaaggttttataccaattcaatgaaagttagaaaatcatgtcattcactcaccgtattaaaagcgcaactgctcgtgaaccatgcctatgctcaaattaaagataaaagcaaataacatgtgtatcctataattttcaaagaatctagttaaacaaaacttcatgggaagaaaatagaagttaccctaatggcactagggtgtgtagcaatgcatacaatgcgagcaactcaaagtctatgaaaaactgtatcttgacattgctcacagaatttcaatgtcaactaaaccattcctcataccaaaacaaatactaagcattgtcaaacctaatcagggtacccaaacaagaccttatttcatcttacctgtaagggagtagtctctaacacggtga

SEQ ID NO: 195019 - DNA, 456 bp, Glycine max
  unsure (1)..(456): unsure at all n locations
agcttccaaaatataaagaaacctccaccctggtgcccttccaaaatttaataaaattagggagttctagtgagcagcaatgatcactgctggtatttatggggttgagtttagaataagggtataatatttcataacataatgattcaaagttgaattatgttaaaagaaatattcatatttaatgtctaaatatattttaatagaatcgtcaatagagaagaataatatgaggaatcaaaaacaatgatttcactgattagacaatcaatcctttttaatctagaccataaataatcaaaattacttggttacagagagacgtagtcgatctttaaagganagtgacataatctctaacaaattggatactttanaaatataacattatcccctttgaaaaggagaattcacaagggcattaatccaatcaatctcataggccagaaatacact

SEQ ID NO: 195020 - DNA, 475 bp, Glycine max
  unsure (1)..(475): unsure at all n locations
tctaatttgtttttcaaaacatacagccatacccttctttagattatatctatgatggtgagaaagtatgagcttccaccatgagttctcactctagaaggtccccataaatcataatgcacatactcaaaaggcctagatgaaacatgaataccagtgccaaagcttattctatgtgatttagcaagcacacaatgatcacaaaattcaagtttatctagtttatcaccacctaatagattttgtttctcaagttcatgtaatcccctttcactaacatgacctaatctcaaatgccaaagttttgttttatcaaacaatgtattactagctactgatgcatgtccaataatagtggaaccttcaagaataaacaagtcattacgtttattcttgttacccttggcaatgactaaagatccatntgaaaccttaagaaacaccatccaaagtctagttgaataccctagatcat

SEQ ID NO: 195021 - DNA, 476 bp, Glycine max
  unsure (1)..(476): unsure at all n locations
agctntaaggtcttccaaagtctccctattttttatttcaagcgtgtcaacttcatcaaaatttcatcaacatcatctttttcgcgtattgactcttatgatgtattttatgacaatcacattgttatgtttcttaaatatgttatattctatccttaaacacgattttaagagtatttttgaactattttgatcaaggtttgatcttagcatggccatgaaagagattgacacttaaaacatcacataagaaacattgaacatctcactaattgacattgaggaagacttgtaattgacttgtatttttttaagtattcgacctatattttagtaccatacttgtatttgatattatattagtattcgagtcttcttttttagtagcattgagtttccaatcttatttgtcaattaactttagttggataactatctcatccagggtataaatctaaattaatccaattctagag

SEQ ID NO: 195022 - DNA, 395 bp, Glycine max
  unsure (1)..(395): unsure at all n locations
ntactatagaagccaaaatcatctctatcacattcctttagtattatatgtgaactaaataaaaaggaagtgttgaagctcgaatacaaaatctgaagctttttacattgataatttttcctacattaaaagtctgagaaaattagtatatccatgcactttttccatctaaaccattcaaaacatgaattactagaaaatatatacatgtgacttattttctcacaatatctactaagttcgtaaaaaacatattcaaatgactatatatttaatccacgtgagtagtagatttatcataaaaacttaatagattgtagttgaatttgaatataaatgtgatttattattttttaattatctgattgataatctactaagtggtcttttccttc

SEQ ID NO: 195023 - DNA, 469 bp, Glycine max
  unsure (1)..(469): unsure at all n locations
agctttaaagaaactcctggctggacatatatgtgtaatatgttaacatataanttaactagtatgaattaacctaaatgttcaaaaaatcattagtatactggtgaaaaagaaatatgtgatgcatagccacatgttagcccatcgcaagtgatgcactttattacaatcccgagaatatagtcatcccaagcccatttgaatgactttatcttgatgtaacaaatgctatataaatgtaagaacaatgtttaacaacagaaatatgatagccatttccacaaattttctaagttttcttgttagaagagttcttccctgaaaggtaaatctatcccagttgccagaaactatgaacttggtgtntgactcatataagattgcgacaacctggctatggcttaacttatgattgttcttgaataattcaatggaacaccctctagttcagaaactttttttatatatg

SEQ ID NO: 195024 - DNA, 469 bp, Glycine max
  unsure (1)..(469): unsure at all n locations
ntcataattnttcataacttttaaagcctctaaaattttttattaaacttcgagatcacattttctaatgtaaattaaaaatcccaatgatgggtgtgtgctgaattaagattttaaccttgtgttcaaatttaacaatgatccaataattaataaatctaaaatcattatttttaaaacaagcttaagtatatgcaaaaaaaaaaaaaattttgaaaaaaaaaaaaattacagagacgaggtgaaagagagatcatacgtctcttattacatataagatactctcgactattatttatcctatttttttattatattattttatataataaaaaatttattttagtttctatcaaatgaataaataaaatatatttttttaaaaaaaatatatatatatatatattatttatctaaaattattattttagttaataaaattatttatttacatataaaacaattatta

SEQ ID NO: 195025 - DNA, 437 bp, Glycine max
  unsure (1)..(437): unsure at all n locations
agcttagataccaccagcatcaaggaattttgtcggttgatggaacctctccaaatgcaagctttccgcatgacttacggaaagatcttagaattgaccttagcagaggtatccatagaagccattgcatcactcacccagtactacgaccagcctttgagatgcttcacattcggagacttccaattagtaccaaccattgaagaatntgaggaaattctaagatgtcctctcgggggaagaaaaccatatctttcatccgggtgtctcccctctttgagcagaattgcaactgtggtcaaggattcagcaagaggtttggacagcataaaacagactcggaacggcatggcgggcctaccacggaggtacctataagacaatgcgagaggtatggccaattaaggagattgggtcccgtctatggatgtgttagc

SEQ ID NO: 195026 - DNA, 426 bp, Glycine max
  unsure (1)..(426): unsure at all n locations
tgtcaaagaatggatgtatctaatatgaagtgatacattataaagtaatgnccactccagtatacttaactctttctttatctattctttaacgcaaagacgctttagtttaataaaaaatcttaaattcttgtcttactatacatttatgctaaatattaaaaagagagttttaatatatatttaaacataacaaatctatttaataatcatgtaattacttttaaaaaaattgcataactgtaagatatagctttaattcttttatcattttatcctccgcctaattcactcctttaattatttggatataagctttgttaattatatgtctctctatatattaaatttttaaaaacttatatatatctttactaccatacactctataaattatccatatacatctgaaggtatactaattaa

SEQ ID NO: 195027 - DNA, 463 bp, Glycine max
  unsure (1)..(463): unsure at all n locations
agcttgtangattatggagtacccatcatatgtggtactaggtggcggtcgggcgatggtgcacaacaagttnttccacatccacaatgcgcgcataaacccaccatcccctgttgcccacctccaactgagctcacgtactcccacgtagcccatatcctcgtttctctcaacaccgggtccccatcaatcctcccaagcttccacaacatccaagcaaaacaacattcaaacaacacaagctatcacagccaagcaaaacagaacaaagacagaaaactctgctcaacacatcaaccaaaatcacagcttttctcacttaaagaccacagtaacaattccttcgatccaattcattaaccgttggatcgactccaaaattttactgggagtctatagtgcataagcctacattnggacgcgtgggatctactggcaaacatccagaactcattctgcacta

SEQ ID NO: 195028 - DNA, 474 bp, Glycine max
ggacctataaaactcagcttcctgataattgtaccgtacgaaggttttttttatattctggatcggagaaaagttatggccctctgtatttgcgacgggcttcatgttatcctagagcatctcgatatattatgagcttcaatcgggaatccgagtccaacgttatggctgtccgaatttgcatggtcagtctatttctacttccgagggcgatgatatattatgggcctcaatcggacatccgagtcaaaagttttgccggtcggaatacacccgagtcttccatgattaattttgagcgtcgcgataggttacttgccttattcagagatccggtggaaaagttatggacgtttgtatttccgatgggcttcatttttttcctaagagcgtcatagcaaattatgagcttagatcgagcatccgaggcatacgttatggcacgccgaatatgcatgggcattacgtttcaac

SEQ ID NO: 195029 - DNA, 415 bp, Glycine max
  unsure (1)..(415): unsure at all n locations
agctngcagactataccttcgaccaaacattgtcgtgtttctgtctcggcccggatttaaagcgggttgcaacaccggctccgcttccctaactgtactggaggcggttgccgtggctttgtcctctatggttttctggagttttaacatgacctccgagatggaagccatttgatcttttaaggccgatagatcgaccttcatctgttcctgctcgccctcttcattatccatttntctggattgagtgttataggggtgccttggtgttttcttagttatgatgaaattcctaaagaaataaacaacggtgagtatgccaccaaaacatgagtatgcaaatggatgatcggagcacttggatccacccgaaggttnttagataatgtgatgagtccagaacttctcattttat

SEQ ID NO: 195030 - DNA, 438 bp, Glycine max
  unsure (1)..(438): unsure at all n locations
taggagggatgatggngacccggcattgagatgaacttggataagggctacgtgggagtacgtgagctcagttggaggtgggcaacaggggatggtgggttatacgtgatttgtggatgtggagaatcgttttgcaccatcgcccgaccgccacctagtacacatgtgatgggtaccccataatcctacaagcttgaaatgaggaagtgtagaagggtgagacttcctgcttttattcgttgaccacagagtggtacctggagatatgtcgcgggggtcaggagaccttggggacgtcaggtggggtgctattgcccaaaaccaagcttgaccaatcccgacccaacccangcatagtcagttagtgagaacctgtgatgtacctaagcaggcgagctcctggcagtcaacanataanaggaacaaagaccacaaagc

SEQ ID NO: 195031 - DNA, 424 bp, Glycine max
agctttaatggaggctctggtctcttgttattctgcatgttctgcatagtcatttgcctcaaaagttcttcgagggaaggttgtggaggggtctcaactgttggttgtttctagggctgttgctgttgttggattggtggaggaatgtattgtctgcttgggccagcagcattttgtaaggaaggaacaggctgctgttgttgttgctgagggctagaccatctgagattatggtgattcctccatccacggttgtatctgctgctggagaggtcataattgttctgttgtggttgattttgctgctgaggttgaggaggtctattgtaaatattatcagcataagcttcgggttgctcaatagctccatgttgctgcatggaatggaaaagtctgtatggtggtcagcataggagcacaaacc

SEQ ID NO: 195032 - DNA, 423 bp, Glycine max
  unsure (1)..(423): unsure at all n locations
aactgccaccggnaggagataatattttgttggaacctgtgtatctatccaaatatttatacttctgcaaatattcttctttctcagatgcatcattctttattacacatttactgaggacaacttaacacctattgtactctgggaggggattaaattgtgttgggggaggttgtttatttgtccttggaaacaggcggagatgaagagctttcttcgttggaacttatactctttttgcaatttattttggggtggggtgatattgaattatgctttacgttcaatgccatctttattttcaaaaattagatgctctgggaacaaaccaaataatcattatctaatcccatatatcgaaagattatatattccttgttaccagacatgcacagttggaagttgagacagtggcatatgttg

SEQ ID NO: 195033 - DNA, 443 bp, Glycine max
tgtagtgcatttgtatcacgatttcttatttggattatattaagggccgaatcctcctcgtgaggcagagcacagcctcgggcaataaagatgtaaacattattttctctagaaacatgattgaagatcaatccaagtacttagaacctgatttcgttgtatctttaattcaacaaaaaaattactaaccaaggattatatgtcacgccaactacgagccaagaaatcaaattatgacatgtgcacatttatttaaagaaaattgtaatttgacagttgcagttgaagatgctgataagtgttaagcatgcaaacattggtgagctgcttactttaaccatcgcaatatgctcaatcccatccagaaatgactgatagcactaagctctgaaatgtccccacaaggttggtatcagtgcagctgaaacacactctaccaactt

SEQ ID NO: 195034 - DNA, 477 bp, Glycine max
  unsure (1)..(477): unsure at all n locations
agcttccatcattatcaatcaaattattgttagcttgatgaactggtaatgttccaaagtagaaaaatcatcaatccaaaatagaaataatgtgtaacataacctcaaatagaaaccaaaacaaatttacagtagtaaaattaagtcattgaaatgcacacaaatctccctatcgggcaccttgcaaatcaaaaccccaagtaaaaaaaatagtaaatagaataaatgagagaggaagaagaagganaaaaagaatacaaaaagtggaagtttaccatccctatcataaacagcgatgctccaccgtgcttagctaccggagtgattnttggcaacttccctcttcccattatcttctcttctctttctcttttgatgatcaaagggatttccaaattagattcaccatacattgttgcatcagagtccccacaccatcacactcctcttctctattatcttcctcacttgcgtctc

SEQ ID NO: 195035 - DNA, 385 bp, Glycine max
tcggaagaaagtgatgaggtactttttcttttgcagattttgaaagagcccgggtagtcgaagagaagttcaagtccatagccatcaaagtctgaaaagagtatgatgaactaagggacgtctatatggccaccgctgaagccttggaacgagaaaccaaaaaggcccgaaaggaagaatacgaccaaagaaaagttttgaggggctatatagggcagcaatagtgagctcaagctccgaagaggtgaaaggaatcatcacgggtcaaaggcatgatcttgaaggatgagctaaaggtttgccttatgtcgaaaagaaatttgtcccaacagttaagcgagactgaagggaatatgtgggccatcatcgataagtgcaaagagaa

SEQ ID NO: 195036 - DNA, 472 bp, Glycine max
agcttgctttgctattggcttcttgttttatttcaggaatatattgaggctttaagagaagcataccattaaggttatgaccaattcctaagaagattgtttataacaatgctcatattgaatagcattgagagaccaaatcaagtgtgggatgaaacatgggagtgtctaattgatggtattcttcatcaacagagaaggataagaaacatgtcaggtaatgtaaagtaaaccttgtattcttttattgaatgcaattgttgtttaaaacttataaattcaattgtttatttctatccaaagatttagatattgaaacaagagttacagaatttggcattgatcgaaattgaagagatattacaattgaacacaaaatcgttaaaggattatccaaccatgccttttccaagaaatatgttctagtcatgtcttggcatagatatatatgtgcttaacagaactatgacaa

SEQ ID NO: 195037 - DNA, 413 bp, Glycine max
  unsure (1)..(413): unsure at all n locations
ntaacctaccaaanatcaaaacattataaagatgctttttataatgaaaacaaaaggggatattcgtaaaaagggaaaaatagcaagaatgaaattacttggtgtagatcctagtttcaggcataataagagaagatgcccggtacaaaatgaaacagcatgtagttcatagtaagatagcaagaatcttgtaccaacaattttttttataaagatccaaatttcaaaaggtaataaacatagaaaatagacaagctgtgaaccaaggtatatgaaaagcattaggatatagttctataattattactagaattggagaaataaacaataaatgcttccctagataacccacaattaattcacaaaaaattacatgtcacctctttttctatttgttgagcaagttctctcgt

SEQ ID NO: 195038 - DNA, 423 bp, Glycine max
agcttctacttatgtggcacggcgggctattttcttcctcttgtctccaacgcgaactgtgaccattgttcttccttcccgcgatgcttcttttcatgtccgcctgagtgggcttatagcctaaaccatacttcccacgatttccttgggtatttatcatgctagttatgccgccgttgttttttcctaaacccattccgggttcataaccgttccccaacataactcgggccatcattaccgctgcatcggacagacaaggttgcccaaagagggagtccacggaggaaatgctgaccacctcataagactggaaagcacgttctaacgattcttctgcggcttccacataaggcatggaggatgggcagcttaccaagatatcttcctcgcctgacacgatgaccaagtgcccctccacta

SEQ ID NO: 195039 - DNA, 485 bp, Glycine max
  unsure (1)..(485): unsure at all n locations
ggaccttagaaactcaagcttataatatgcatttatatactttctgttagaaggctttgttttgttcatattcgnntntttttttgcggcaaatacagtcaagggttgaaacctcaggtgtcatgagcaaggatgcaacgactgtgttccatcaaacttgctcatttttttcatataacacttaattgagttttggggaggagtgaagagggaaagacaatttggtggcgtgcgatgtgtgttgttatttggtgcctaacttcctatggttgtggattaatttccaatatcaaactctttaatatcaatgttagtctttttcctttttttacaatacctttcttttaattcttacatcggaaatcaattggcgaacatgacccgtgcgtatgcacaggttaccgactagttntaaatataatttataatagatgaaagattatttggcagaagtagaagctaaaacaagctataaaaaattattc

SEQ ID NO: 195040 - DNA, 423 bp, Glycine max
  unsure (1)..(423): unsure at all n locations
gcaccgtataganncaatgacccaacttgaattctatgattcacatcatctcttatttctctggcatataatatgatgcacacaggatagtaaaactgtttttcttgtggtcagcgaaaataaatatatatttatagagtaccacaggtaccaagaaatataatttactaggcagatgccacatgattggatccatggcagccttaatgaaatctaataggagccaaagtccggcttcaaatatgagactaatatgtacagttagtctgcaatggggccacatctataggctaaaccctatgctaatattgctagaccagatattgtaatgagttacacagtccttctgcaagttcctgaaccatgtccagagtaaaaagactgtatctgccaccaattagttataactaaaggtatcctgtg

SEQ ID NO: 195041 - DNA, 350 bp, Glycine max
ctactatcaacggcaacattattttctccgtcattgaggtgccacttgagctgcaagggctctccacctttgggcgtattcttttgaaagaatcgtgccccctttttgcacatgttctgtagatgcatcctatccgaagacattatactgacactgcctaacgaaggcaaccactatgtcttttcaagaatggactccggaaggtttcaagttagtgtaccacgtaacagctaccccagtaagactttcttggaaggaatgtatcaacaattcctcatcttttgcgcatgcccccatcttccgataatacatctttagatggttcttggggcaagtagtccccttgtact

SEQ ID NO: 195042 - DNA, 365 bp, Glycine max
gacaagcggcctcagatatctcaagaaagggggggtcgaaccaagataccacaacttattcttccaactaaacaaatctatttaaccttctattcaacggacaaacaccctcagaaatgaccttctcaaacactgactcacacagaacaattcgacaacgagtatcaaaccgccaataaataaagacgtctaagagaagagaatatgcacactcagcactatactggttcggccacaccctcgtgcctacgtccaatccccaagcaacccgcctgagagacccactatctcgtgaatacttattacaagctctagacacacaacgaccaacccccctttgtgattagaagactgtcacaccaaga

SEQ ID NO: 195043 - DNA, 471 bp, Glycine max
tctatatgtaatgaatctatcactctctcacttacttttttttttgcttgtttaggcgatacttttgcatgctcatcctctagtctttgctcgtcgctagcaattagatttagcttctctttatactaatcgatgattgtccacatgttttcttccgtcctactcatttgtttggtcaagctcctcttcaacctttgacaagccttcaacttgtcatctaatatcatacttttcaccctcgactcgtccctttcggccctccgaagcttgagttcgttgttgctgcctcataaagcccctcagaacttgtttcggccctattctccttttcaagccctctttatttctcattttaatgcttcggctatggccacattgacgtccctcagcttgtcatactctttcctggccctgatggctgccgtcttgaacttttccttgaccattcatgttctgtcatgttccgctttc

SEQ ID NO: 195044 - DNA, 350 bp, Glycine max
aagatagaccacctaccggaaagctgtagaccagatacaatgccacagtactaacacaacgatgcatccattcaaatcaatcttgggaggggagggctctagtatacttaacgcagtactctaggaaggtatacaatgaaccatacacagcccaaaggtactgtctgcgactatctctataatgcaagcgaagacaccaacctctatgtagcctaatagaaaagaaatgagagaagattcctcccaccggactaacagaacataggaacaagttacctataacacatggcacaagccctcaatttattaaaacaagcaaacaaactccatatcttaagaagattaatcaa

SEQ ID NO: 195045 - DNA, 395 bp, Glycine max
  unsure (1)..(395): unsure at all n locations
ttttgaggcactgatgagaagaaccatggggaaaatacaccaaatggactctggagaagttgtttgggagaacagcatatctatacctgcgttaaaanaactgaacttcggaagtgtaaaactaataaatatagcatagtctctagtagagagatagaatttggtattctgaccattcgtagttataacgacattttacctaattggagtgcttttaaaaacataagaaaattagttagtcatactacatttgctaactatttatcatattattctaagagtctcggctattatctctctctatgtgaatgagtctcattaatattctgagagagaataatcgagggtctgtaagaaaaaaaatcattgatgctttacaagtgtgaatgagactt

SEQ ID NO: 195046 - DNA, 475 bp, Glycine max
  unsure (1)..(475): unsure at all n locations
agcttaataaatctatatatggttttaatttatcctcccgtcaatggtaccttaagtttcatgggataatttcttcatttggttttgatgaaaaccccatggatcaatgcatataccataaggttagtgggagtaaaatatgttttcttgttttatatgtagatgatattttacttgaacccaatgatcggggtttgctacaagaggtgaaacaatttctctctaagaattttgacttgaaggatatgggtgatgcatcttatgtcatcagcattaagattcatagagatagacctcgaggtattttgggtctatcataggaaacctatattaacaaaattctagagagatttcggatgaaagactattcaccaagtgttgctcccattgtgaaaggtgagggttaatttgaaccaatgcacaaagaatgactttgagagggaacanatgaanaacattgcttatgcttcagttg

SEQ ID NO: 195047 - DNA, 436 bp, Glycine max
  unsure (1)..(436): unsure at all n locations
tacatgtgcaaggttntcaccctatgatgattgatatttcctatttttgttttagagaaaatgtaatttcgtgttggatcaaatggtggcacttgaagggggagaaacaaggaatcttccaacaaaagatatgggagggttggtgtggacaatcacaaggaagtgcaaatgatatgtggaacaagatgtcccaagagattattaaagtggctaaagagacgttaggtgaatctagaggttttggacctaggggtaaagaatcgtggtggtggaatgaaaatgttcagagcaaagttagagtaaaaaaggagtgtttcaaggagtggtctacgtgtagaaattctgaaacttgngataagtataagatagctagaaatgaaaccaaaaaggcggtgagtgaggcaagagcccaagctttngacggactataccaagc

SEQ ID NO: 195048 - DNA, 481 bp, Glycine max
gatccttaagcacctgcggctgcagcttaaaggaagctcatggaggattattgagagagagggggggggggcatgaaattgaatgagaaaaaagagggagagaagtcaaactttgctgtgtgtctcacaagtttcacattcatcaaagttgtgacaagtgttacatatgtttctatttatagcctaggtcactaactaaatgaaattcacaaaagttaatttcattttcatttcatgtgaatctaagaggaatattataaggataggccaaaggcatcttagcatattccaagaatatacgaaaggcatcttagtatattccctttagatgccacaagaatggaaggtgtgactctagcacatgggaaatgaataagccaaaagaatatctaaaggaatattccaagaatatgccaaaggaatctcagcatattccttgagaaggagaggggggagactacacacacccctccaataacta

SEQ ID NO: 195049 - DNA, 421 bp, Glycine max
agcttataatatatcgatacgctcgaaatttatcatcggagactctcggaaaattcaaatagtcataactattcacacggatgtccgattcaggcttataatatatcgatacgctcgaaattaaacatcggaaactctcgcgaaattcaaatggtcataacttttcacacggatatccgattcgggcacataatatgtcgagaagctcgatattgaacaacgaaagttctttagaaattcaaatggtcttaacttttcacacggatgtccgattcaggaaaatcacatatcgagacgctcaaattgagcaacagaagctcttgagaaattcaaatggtcataacttttcacacggatggtagattaaggagcattacatattgatacgctcgaaaatgaaaaacggaagctctcgggaaat

SEQ ID NO: 195050 - DNA, 425 bp, Glycine max
tcctcggtgccattcctgcgaaggcaaacatttggaattttaggttttgtgggacattactcttaaagcaaaaatggcatataacctcctcccataaatacaaacatcaatgtaaatttagagcaagcttatgcgcatgtttccttacgaacgttcacttgcggaagatatcctattaaccgaaaaaatgcacccatatacaatcaaggcagctttgttacctagattatttacacgtacttccaaggtgtatttgttacttacatcacacacatctccttggctaaattcacatacatgcatactccaagcatttggggtaccaaaaattgcacatgtgcacatcttggtatttctaatacctatacatacacgaacttcatgatgaatcttgactatctacacaataaggtgctacatttcat

SEQ ID NO: 195051 - DNA, 466 bp, Glycine max
  unsure (1)..(466): unsure at all n locations
agcttggcatcatcgtatgtcaagggcagtatttatacttatacaagaaaatttgtgtaatataagcattgtattttagtttgtgcttaaagaataattatatttattataatattttgcatgactttgactgcaaatttagtggtctgttattagatgagtaaactttttgaatattggtgcaatggtaacattttaaatataatgtttttatggaaaaaaaaatcatttctaatattcttaaccaatgacttaaaagcaatggtttccataattatatttttacatttgtattttcctttaattactagtttataaattttaatgttattaaattacacaattttgtgatcttttgtcttatggcatgcaagcgcttatatattagttcttattggtattttgaatttgatacaatatattataagcttagaatggcttanattcaccttcgttctcaatctaa

SEQ ID NO: 195052 - DNA, 460 bp, Glycine max
  unsure (1)..(460): unsure at all n locations
ngaggaagcctgtgttatggtgaatggagattttatttattacctcccaaagaaggtggtaatttaaatactaaaaaggtacacactcccacccccctcactttatttggtacatattcatattcaactctaaccaaagtatttttccactttaagaaaaaggcacggcaaaccttttctttgtctaagaagtctgcaagaaagcaagagtataaggagcttgtagcatggcatatgaacagtgaaaaagtaaagggagattgcatgaagaatttagatccaactttaccacaagaacaaaacaaattactgcttcctagtatgtctgaaccagaatgggagcttctctaattctaaatgccaggatgatcaagttgtgttgatacacaaaagccaatcctancagtttggattcactcataagtccttgtggagattaagatgcccacactggaaatta

SEQ ID NO: 195053 - DNA, 481 bp, Glycine max
  unsure (1)..(481): unsure at all n locations
agcttataagaacaaaattgccttaatattttcaaatatgcatgtgaattaggacgcatcaacaagaatcaagccaaggctattgtgcaagcagtcaatggggcaaaacataccaaatgattataatgatggatggctcaaattctcacaaaggtaaaatcatcactttcaaattgagctttcaaaactatcatgacatgtagagaagaatcaaggatttcaagtcacaaaatgtcaagaacttttattttcaaaacaattacccattttttgaacatatcctataattcaaagaanaacatgcaaagtcgtacgtgcacacgaaattgacccaaaatattaaactgaaaatccgacgaaactaacaacattaacaaattaacacaactaataaattaaccaaaccaacaaaactatgcaaaccaaagaacacttccccccccatacttaaacaacacattgtcctcaatgtagcacaaat

SEQ ID NO: 195054 - DNA, 441 bp, Glycine max
  unsure (1)..(441): unsure at all n locations
tgtcgaaattgccatgtttgggtgagttagacatactctttctgttttatggatcttgcgatgatgtttgtgatgtttatatgctgaaattgctgatggaaatctgttagagatgaagggtagaactaacccaaggttagaaagtgagaatgtgacgttatgagtggaaaaagagtgagactttgagagttggaaggctaagtctgaattctgtggtaaatggaggttagagtgagttaatactagcttgaaatgtcatttagaacatgtgagaaaggttatgctgagctagagagaaaaacaaatgaccaaagtgaacaaagagccattgctagggcaaatttgggtgttgaagagtncaaatttgattcggtgagaatttaggtgtaaatccagtttgaacaagtctaaatggatgttatggactggtgtgaggtgaga

SEQ ID NO: 195055 - DNA, 398 bp, Glycine max
  unsure (1)..(398): unsure at all n locations
agctcttgcatgtttagagatctttatattttaaaggtccaagttccaaagagctttgagagcttttgttgtgtgaagactagcagagaacgaagcgtgaagaggaagtcatcctgagagcatgagatgagtctgtgagtgatcgtgaggttctagaggtggaggagacatccccactacttgtatttcttcaatccttcatttttctcttttctttgttggaaaggaagctttctagatatggagagctaaatcctctgttgggtcttccttgtaggtacttgatatanatacatgtatatctatttaatgatgntctatgtgttctctgtgctatcagtacgtcatttcagtgtgctcttgtcttgatcaccaagatgcatgctttgttatgatca

SEQ ID NO: 195056 - DNA, 321 bp, Glycine max
tctcaggaagttttctcaagatatcttctcaaggaatctacctagtctataaatagaagcatgtgtaacacttgttgtaactttgatgaatgagagtcttgtgagacacaactcaaagttcaacttctctccctttttcttccttcaatttcgtgctccccccctctctctttctctccctctttcttttcctccattgaagcatcctctccaagcttcttatccaaggctcatcttggtggtgaagctccttcttctatggcttattccctagtggatggcgcctcctctcacctcttctcctttgtcttccgctgcatc

SEQ ID NO: 195057 - DNA, 448 bp, Glycine max
  unsure (1)..(448): unsure at all n locations
agcttgtccttgtcgacacaaactttctactttttctgcgacgagatgctcgacctccaacacgttgccgccttcctcccccgcactaagatcaacgcctctgctgattcctttgtcactgttggcacccgccagatcgctggagagtcacgcctcaacctcctccaaaggaacctctcgctcttcggcgccatcattccgcctctcatccgttactcccccaacaccattctcctcatcatttccaaccccattgacattctcacctacgcgcatgcaagaaatggaggaaaaagaactcaagtatgcaaatttggagaaaaggtcgatgaaggagagggcttgngaggagtggccatgggaggcgaggcggcgcttgatggagtcgacgatggcggtggtggtggcgttaggggtgacanacgnggtgaaacggatggagaggatg

SEQ ID NO: 195058 - DNA, 459 bp, Glycine max
  unsure (1)..(459): unsure at all n locations
tgtgcttgttntatttaaattcctaggatcatgaacatctatatgtgtcctactatgactggagaaacaaaggtgatcaaataacaagcacagatttaaaaggtactaggttgcctcctagtagcgcttctttaatgtcttgagctggacgcgtgatgacttgtcggtcacggacctagtacttttgcttatctttggctttggacttggttgcctgctggtcgaccacaggtcataggcaacgctccagcttttgtagatgagctaaggggctttggaggtggcgacggtacgtctattgcctgctgccggccatccccaggctactgtggtgtctcaccctgcgcctgcctgngggagtagtacttcttgatgaaagatcggntagtagagggcttgatgacctttgctggggtgacaggcacttcctagaactgacagaggcccataatcagagct

SEQ ID NO: 195059 - DNA, 440 bp, Glycine max
  unsure (1)..(440): unsure at all n locations
agctttgaaccaaaccanaccctgttatgtatatgtctagccattctacaagctttgagccaaaatcctgactcaccacaaaccttgacccagggtgagaatgccaatccttaccctcggaagcaaaaaaaagaagagaaggaaaatttccaatcaaaggaaaaaggagaaggaaaatttccaatcaaagaggaagcaaaaaaggagagaaggaaaatttccaatcaaaggaaaaaagagaggaaaggaaattcccaatcaaagagtgggagaaagcaaaaagaaaagaaagaaaattcccaatcaaagaatgggagaaagaaaaaagagaagtaaaaaagaagaaagttcctgatcaaagaaactagaagaaatgtgcagaaagatcttttgaccagatgatatctgaacaatacagaattgtcaccaaatgaacaaaa

SEQ ID NO: 195060 - DNA, 378 bp, Glycine max
  unsure (1)..(378): unsure at all n locations
ntgcataccccaaggatccattaggaaattacttgttttttagagccatgagggtgggctcatgggccactttgggatagacaagacccttgtcttactcaaagaaaagttttattggccccatataaagaaagatgtccataagcattgcactaggtgtgtggcttgtttacaagccaagtctagggtgatgcctcatgggctatacacacccttacccatcccatctgcaccttgggtagacattagtatggactttgtccttgggcttcctagaacccaaagaggtgtagactctatctttgtggtggtggataggtttagcaagatggcacactntataccatgccacaaggtggatgatgcttcccacatctc

SEQ ID NO: 195061 - DNA, 273 bp, Glycine max
agtgggaccctgacgtaaattgaggatcaccgttacacattcgccgttcgaataataactggctcaggcacaccacttcaacaccctcatctacctctactccaactctgttgtcgacccttctttcaaacccgtagcccttcacatgttcgcccttggcatcctccccaacaaggccaccatcacgcacatcgttgcggtgaatggcatatgcaagtataacaacgccttcttcgaggctctgaacctacgaccctgcgttgttatgttact

SEQ ID NO: 195062 - DNA, 350 bp, Glycine max
  unsure (1)..(350): unsure at all n locations
aagctaaggatcacatcttgaggtaacctcacaatctgattgtagattctctcacaattgttctgatagttaatacacaaaaccatattgtcttagtttaaataattcttcctgataatttttatatgaagaaggaccaaaacacaattccaaaacccttttaaaagaaccccaatttgtaaactgagcattttgatgcatccacttaaaccaactaagagcatcaattttcatattaaaagaagccaagtggagtcgttgttcaacttgaaataaccaatctagagggtagatccgcaaanatggctacctgcaattgggtggcgttacgggttggtgataaaagaaag

SEQ ID NO: 195063 - DNA, 339 bp, Glycine max
  unsure (1)..(339): unsure at all n locations
tgcgatgcatgaaaacttaacttaaaaaatgtagctgtggcggtcttgaaattatagtgctcgttgactcgtcctataaatgtattctgggctatatttattgaaattctgatgccaaaaaatgagttctttgggtactaaaacctacagttagacttatggngcatttaaaatggaatcttctaaagaaatttatgagcaaaataagttaaagagaatttagcaagctacaatttgagcacgaatatgaactatctggtactgctgggtgggatgtctttcttgaacttttaacctccaaacatgagctttctagatatgacaatgcccagtaacaca

SEQ ID NO: 195064 - DNA, 402 bp, Glycine max
  unsure (1)..(402): unsure at all n locations
agcttggacttcctgtgatgtgggaacctctccttcctcaggggttcttcaacccaatcacctggttcaagcacgactttctttctgctnttgttggcttgccttgcatagctcgcatttttcttttcaatttgaaccttcactngctcatgcaacttcttcacatactcagctttagcctgtgcatccttatgcttaaacatagcaatggtaggcataggcaacaaatcaagaggagtcaaagggataaatccatacactatctcaaatggtgaacaattagttgtgctatggacagcccgattataagcaaactcaacatgaggcaaacaggcttcccaagaattaagattnttctttaaacaatcctaagcagtgtgcctaagtctattgactacctag

SEQ ID NO: 195065 - DNA, 314 bp, Glycine max
aggaataaaaaaactaatggccgagtgtaactgaaattgtggcaaccaaaaatcaccccccacagccaacaagtcagccaccatttgggtctccaaaaggctgatgcctaagttgccaaatgggcccttattacaacttgaactaaacctaactaaaagccctttagttgattaacccaaaacataattttggtcagccaactttacaaggattgtgccattatttagacagactaaacactctaaaattgaaacaaagtggtgtcatttaatcctccctcatttgggccatgatacaactcacaaccttggac

SEQ ID NO: 195066 - DNA, 363 bp, Glycine max
  unsure (1)..(363): unsure at all n locations
taccatcttagaagttggacttatatcctaattgatttattcaatcccacaaaactaacttgagggcaaggactgccaaacttctttataagctttatttaagtcatatctctagttgatgtggaactaaaccaccacctttgaggctgcaattaaggcagacctcaaagaggctgccacaactaaggcaactttccaacagttaccaatatcacattgtcaacctctgttctgaaactgtactatccaaaggacaaacattnttattaagatatatgtcatgaacacagagatatgatagcgagagacagagagagagacatagtgagagagagtgagagacaccaagactaagtgagagat

SEQ ID NO: 195067 - DNA, 385 bp, Glycine max
caactggatgcattggtaatttggtaacccacctggccttgaatcagaaatctgtacctgtcgcaagggtttgtggtgtgtgctcctctgctgaccaccatacagacctttgccctttcatgcagcaacctggagcaattgagcagcctgaagcttatgctgcaaatatttacaatagacctcctcaacctcagcagcaaaatcaaccacagcagaacaattattacctctccagcaacagatacaaccctggatgaaggaatcaccctaatcttagatggtccagccctcagcaacaacaacagcaacctgctcctttcttccaaaatgctgctggcccagcagaccatacattccttcaccaatccaacaacagcaacaaccc

SEQ ID NO: 195068 - DNA, 332 bp, Glycine max
  unsure (1)..(332): unsure at all n locations
gccatggaagaatgagcttcaccaccaagaatgtgccttggattagaagcttggagaggatgccttaattggggaaaagaaagagagagagaaagagagagggtggagcacgaaattgaacgacgaaaagggggagaaaagttaactctgagttgtgtctcacaagactctcattcatcanagttacaacaagtggtacacatgcttctatttatagcctaggtagcttccttgagaaacttccttgagaagttttcttgagaaacttccatgagaagcttctttgagaagctagagcttactacacacacncccctcctatactaagctca

SEQ ID NO: 195069 - DNA, 455 bp, Glycine max
  unsure (1)..(455): unsure at all n locations
agcttctgcacttttggctgagtgagtgaggtgatataancgcggctttgtgttttaagaaaaggctttctctttttttttttaaaagctgtgccacatgtcttcttttgagtggagcaaaaaggggcccactttttctcttgatgtgactcatactcattcacaagaagagaaaaatctgacctttttgaaatgctaaaatcctacctcggtttgcgtgtcgtttctctggttccagtccctcgtgtttctctgcacccgtcggggccagttttcgaaagtaagcaatatatatatcaaaacgctcagagtgaaacctcgagcgtggttcagaggttgngtttcattaaatttaagttgcatgcacaacgaataattttagactaattaattgagaattaatctataactatcaagttatggatttctcttcgttaatcagcctaacccgcgta

SEQ ID NO: 195070 - DNA, 447 bp, Glycine max
atgtaagcaactatagaactaaaagttataactacattttatacacgacatgatgcaaaccacacaacacaagcattactgcctcttacatacagctctgaattcaataattgagggccatgaaaatacaaaaacccaaagaacaattttatagaagaggaattattggtaaaatatgaataataaaaacttaattggttaactatattgaatgttaaataaatcgttaattaataaacattaaccagttaattggttgtgccatttgcatcgccaacagttgtcctcaaactctctgatagtgatcaggggaaatggctatggcacccaatgtggtattgatggaaataaaactggtagcacacaatggcaggtattgcgatactgataccactacaatgtagtggtcacagctctaatagttagcatcagtcatgatctaatgga

SEQ ID NO: 195071 - DNA, 458 bp, Glycine max
  unsure (1)..(458): unsure at all n locations
agctttctaacaagcttaagattgctcannattgatattccaagtaaaaagtttgttgccaacattaagtaaccatcgggtgtttattgggataatatcttaacggtcttattaaggattcaacttagtaaaagtttgttgacataaagtatctgatcgttaaataaataattcagaaaatatagatttgtatacaacatataagaacttatttcatgctagctgatccacttactagagatatgatacttaaagtttttcatgagcacaatgctcatatgagtgtaattcctgataataccttagttgagtggttgtcttacttatgttctatatcttatgaattaaatatattttgtagtttggattttctgcaaaaataaagttaaagttaatcatttcattatacgcttattctgtgtgcaatatttatgttgtatctgattgatctctataaa

SEQ ID NO: 195072 - DNA, 268 bp, Glycine max
gtaagaaattacccattccacgttccaacatcacatagaatagccactgtgacatttcatcaaacaggttggtgtgcgcatgctcaacatgcatagaaggggcgataggagcagtatcatatgccaaattcattaaagaatcaaggataggcctaaagccatccattacagccaccaatccaagcattttgatcatggggttgcacataactcatctcacaaatattgcaaagaaaacaacaaacaaagcactagacatcacaaggaa

SEQ ID NO: 195073 - DNA, 418 bp, Glycine max
  unsure (1)..(418): unsure at all n locations
agctttgagcaaattctaacaacagcnaacttttactcatatgtatgatttagttcggtgatatatcgagacgctcgtaattgaaatcggaagctcgtatcaaatgcaaaccgcaataactattaactcggatgtccgattgtgtcccataatatatcgacactctcgaaattctgaaccgaagctttgagcaaattcaaatgagaataactcttaactcgaatgtcggattgagtctcgtaatatatctacatgctcgaaattgaaaacataagctcttagcaaattctgacggcaataactttgtactcagattttcgattgagtcccgtaatatatagatacgctcgtaattgaaaatggaagctcgtaccacattaaaacgacaataacatttaacttgaacgtctgatcgagt

SEQ ID NO: 195074 - DNA, 358 bp, Glycine max
  unsure (1)..(358): unsure at all n locations
agcttgcatcattccgtttcagaatctatactacgattaatacagaaagtttgcattaatcggtgtattgaatcttgaattgtccgcttggacagtttgagaagactaatttntaatagtagattattatgtatagggttaattttcttttcttaaatttgtcaacatttcgggatagttcatttccctttgttcttcgagttcatagttgaatatggtggataatgatatgccaccactttcatgttgtgtacttggggacttagccgaaatgttgccgaaattttgacaaatttagaaaagacanataacttgtagtattcaatctactaataaaaaatttcttcttgaatgggta

SEQ ID NO: 195075 - DNA, 475 bp, Glycine max
  unsure (1)..(475): unsure at all n locations
tactcagcttttcgagcctttctgcaaacaacgttgttaatttattacaagaagngccatttaaggctgaccaagtaaaaatggcatacaattgcttccaacacaaacatcaatttaaatttatggcaagatgcacgcaagatgcttcgccacctaaaatctatattcatgcacattcaaagcatcttgctacccaaattagatacatgcatttctttgctaaacttatacacatacatacttgaagtattttgctacccaaagatcatatacacgcatgcctttgctaaacttgtacacacgcatattccanaaatctttgctacccaaaaaaaaatacatttcatgcgtatccaagtatcttgctactcaaattacatttcaattcaacaaggggtttttggtgaggtattcttgcacctacacatatgtttgtgtgaaggcacttttgctatctatatgcaacatacatata

SEQ ID NO: 195076 - DNA, 313 bp, Glycine max
  unsure (1)..(313): unsure at all n locations
tttggaataaagggatgagagattgccacacacatatcacagaaggtccaaacacttcaaaaaggagacataatggttncatttatatctctaacaagctctcacacacaagccatttgtgttttgaaatgtaataaaagcacaacacaaagaaattgaatgcaaactggtttcattttgtgctaaaatttactttattaatgcgaactgggcttataatatgaggatctgataaaggggtgcaagaaagaaattaaatatgattacatacacagttctaanaagtaaggggtaaatctaacatatagtaaac

SEQ ID NO: 195077 - DNA, 314 bp, Glycine max
atggaagtacccaacgctttcaagaattagactggcttaattaactgcatgaaccttaaacaatttcaattcgtcctccatctctgtatatactagtaaaactcgaacctcgaaaaacaccccgtatgattaagaattagtgtaatagggaattaaatatcaacgtattagcattaccgctttagacttcaagttaattaccagtaatgctaaattaattagatcatgacaaactctattaaaaaggtactatcatttaattagatgcgtgtatgcataacaagtgcgaatgcttactattggttcgccatgtg

SEQ ID NO: 195078 - DNA, 469 bp, Glycine max
  unsure (1)..(469): unsure at all n locations
tgcagcttaacctgtgtatcgatatgatatcctgtatcgataaaatagagtttaacttcagaagaaatttaaaaacttcagaaactttctccttactcctacgtgataatgcatgatgcacatatgaaatgatagagactaagatgtnacacataatacaataaacaatacaaataccactcaagcgagttggacatgtaaaagacaaaacttcttcaagcttcaaggttaagtcttcatgttgctgcccctatctctaacatactaatcttaattgtatgtttgaccaatgtaaacatactagaaaattgaatcttggtgacataaaaatatctgtggactaaatntttaattcaataagatacaattagactttatgatagaataatcaaattacatacctcaattcatgctttacaaatacaacatgaaaaataattaantttctatcacaaatatttactttatg

SEQ ID NO: 195079 - DNA, 361 bp, Glycine max
  unsure (1)..(361): unsure at all n locations
taagaattaaaaaagattactaaattactattactattggatacaaaatccacacatattgagtaaagaatgaaaagaaatgctcaactataaacattgtaagaaaaaaaaacaccttctatgaatngaaatattttacattgtcagctaaataaaaataccttctatgaatattttctttaataatatatagtatagttcctaatcttttattattcttattataataactcttcanaaaaatattntgtattatcctggtggttagaaaagagatgttattatacctcattatattttggttttgtttcttgtggttcatgttcagcatgtctgggagtgggacttggatcaaatcata

SEQ ID NO: 195080 - DNA, 359 bp, Glycine max
ctcagtatgaaaattagtagtcgaatgctcaaaatcagaatattcagaatcactagcaacataatactcaaaatgctcaaaatactcaaaatgcacagaatgatcaggatgcacactatgcctaactaatatatgaaaggttctatctatttcaggagcaaagggttgtaaatcacctggattacccctagtcatgcactatatgcagcaaataatgtgtttctcaacaagcacctaacaagggggtaaaactacagctatactcaaacgatatccaaatgagttgaaattttgtgaggaacaccctaatatcatgaaaaggtagcacaaacaatttaaacaaaaattcaaagtctaac

SEQ ID NO: 195081 - DNA, 417 bp, Glycine max
  unsure (1)..(417): unsure at all n locations
taccttacgttcctaccttctctctcgctttctggaggtntccttgggcctcgagtaccaagtataacagaagaggtattangtttggtgtacatataagatgaggacaattttacttgtttcatcattaaaatttaaaacaaaatatcataaatgattcatgtgattgggctacaaattatggacttttatacactaaaaaaaggaaatcgtgtttcattatttaagttccatgtcttcangttgctaaaaatggatcaaagtgtatatgctattgagagtgaaacttcagaaaattctgatattcaaaattacagttgtagattgtatttccttctctgttatctctctctgcttgatgtgaactcttactattggtctaaaaataaactctaattcattangacaataaaatcc

SEQ ID NO: 195082 - DNA, 443 bp, Glycine max
  unsure (1)..(443): unsure at all n locations
ctcatctcggnggttatgctccttcttccatggcttattccctagaggatggcgcctcttctcccttgtcttccgctgcatctccatggtggaaaatcaccattaaaggacctcattgaagctcaaagatccagccttcatacaagccccacaagcaagcttccatcacacaagctacatacaactgaaacacggtagaaaatattatacaacaggcatcaacgttttcttaaaccttatcatccttaccaatgattgaaaaaaaaaattaatgggagtctatatcatgaaactgtgctgataccgttaactggtcatcaggtctttcagcgcgttcaacactggaatactatattttgaaagacccaaaagaaagaaanaagtaacacttgcatatggaagaaaatgtcgattttgtttgatctttcatactggtcgaatct

SEQ ID NO: 195083 - DNA, 307 bp, Glycine max
  unsure (1)..(307): unsure at all n locations
tgaccacaaagaggtacctggagatatgtcgcgggggtcaagagaccttgtggacgttaggtggggtgctattgcccaaaaccaagcttgaccaatttcgacccaacccgngcatagtctgtcagtgagaacctgtgatgtacctaagcaggcgagctcttggcagtcaacagataaaaggaaaacaagaccactaagcaaggaggcttgtggtggctggccacctgtgaattttgtgtaatatgtggattgtggcctctggtaatcgattaccaagggtgggtaatcgatacaacgcttaaaattg

SEQ ID NO: 195084 - DNA, 378 bp, Glycine max
  unsure (1)..(378): unsure at all n locations
aagagacagaggagaccatattntttttcttcttcttccatgttaaaccaaatgttcttaagcccttcttccatcaagcttaggtaactgacctccatttcaactctatgcttgaatttcacttcattttcttgagttattcctacttgtagttgcaaaaccttaccttgcactcttgaagattgaaaacttgaatataaaatctctcattcttccttctaaatcttgcggagactaccaaaggtaagggggtctctctaactcttgaaccatatgcttgtgtgtgttggtgaacttccttgaacatgttccttagaatttttagcttgccgcatgtcctgaatctgggccgagtgtttccttgagttttatgcaaaa

SEQ ID NO: 195085 - DNA, 369 bp, Glycine max
  unsure (1)..(369): unsure at all n locations
actacgnggcggccnggcgatggagcacaataagctttccacatccacaatgcgcgcataaactcaccatcctctgttgcccacctccaactgagctcacgtactcccacgtagcccatctcctcgtttctctcaacaccgggtccccatcaatccttttaagctttcacaacatccaagcaaaacaacgttcaaacagcacaagctatcacagtcaagcaaaacagagcaaaggcagaaaactctgctcaacacattaaccaaaattacagtttttttcacgttaagaccacagtaacaactccttcgatccaattcgttaaccggttggatcgactccaaaattctactgggagtctatagtgtata

SEQ ID NO: 195086 - DNA, 330 bp, Glycine max
  unsure (1)..(330): unsure at all n locations
tcatgcttttacaaaacggttcatcaagtcaagttgaaatatggaagtaaccgtcttgcanaattggggcanaagatgaatcgagtcacatcactgcttcgtctactgccaaacatatttaggattattgatgtccttgttactctccagttcaccttgacaaagatgtcatggaccatgttgaaaatctaaatttgatccaccccatatcttgcgtaaaaattcgcaatactttaactgtacaccattcgcatacatccatgcttttcattgcttgcattgctcattgcattcttttctctgaaaataaaataaaataaaaaatgaact

SEQ ID NO: 195087 - DNA, 292 bp, Glycine max
  unsure (1)..(292): unsure at all n locations
ctataacttatgaaaaatgcacgcatgtacaatccaggcactgccgttacctaaaacatatatatgtacttccaacgagtatatgctacctacatcacatgcacttccttggctaaacttacatacatgcatactcaaagcatttgtgtaccaagaattgcacatgtgcacattccggtatttctaatatttatgcatacacaaactatgtgatgaatctnggctatctacacaataacgtgatacatttcatgctttattcaagtgtttttgctacctaaagccgcatgcg

SEQ ID NO: 195088 - DNA, 436 bp, Glycine max
  unsure (1)..(436): unsure at all n locations
agcttcaatnntgnccaatttaattgcacanattataaacngaaagnatattatattgaaaaatataacataataatatacatctgagtgtgtcatttcagtgtgtcatctcaaaatatatctgagagtgggctacagcaagctagcctcccaccaagaggttggaattcctatgattccttttgctggacaatttctgaagacaaatttttacaaagtgctgaaatggtttctcaacgtctcaaggctcacggatatcaggtatatatactgcaaagaacaataacttatggatgatttatctgtgttagcagtgctctcggtagatatggactgatntctttccatcaactcttgtagtttgtcgagtggattacctctggtataagaagaaaatcaaaggtgcttaccctgattctcttggatttgacgtgat

SEQ ID NO: 195089 - DNA, 233 bp, Glycine max
ttaaagatcaaccataaacttggttaatatattaacggtacaaagagacaatattatgaacaaaatataagtaaatgctttagaacatatcatttccatgtaaagtctcacaaaatattacaaaaatatttaccccacaatcaaatgaggttttttcgtagtaaaaagtacaagtaattgaaatatttgttgaacatatcttctatatcataatatctaataaaagatctcta

SEQ ID NO: 195090 - DNA, 358 bp, Glycine max
agcttctactgatgtggcttggtggggcctcttcggcttggtgccccaaccgcgagccttggcctctgttcttcctttctgagatacttttccttatgtcagcttgcgtaggtttatagcttaacccaaacttcccacggtttcctctggtgcttaccaggctggttctgccgccgttgttcttgcccaaacccattccgggctcgtagccgtaccccaacatcacttaggccaccatcattgccgtattggataggcaaggctacccagagagggagtctacggaggcaatgcttactacctcgaaagattggaaggctgtttccaatgactcctccgcggcttccacatatggcat

SEQ ID NO: 195091 - DNA, 413 bp, Glycine max
tataaaactaagctgccaaaagtggggatctcgggcccactgaggaatttagtcctgctcaggagtctgactagggctgcttagagagggaggccacaaggagcttgagaggagttttcattttaagaagaggccgtggacagcatgataagggccttaacagccgttggcagctggttcttaccaggaccttgattggtctctttaccctttaagacgtgaaaatggtgtttgcttgacaagacatattgtgctaaaaggagaaggcgatgatgccattgtaggtgctttcgttatttctctttctcattgttgaattacccatggcttgaatatgacaatttttctaacttcttcatacaatttgcctattatgatgcttgggttgcttattatcatgtcatctgggagat

SEQ ID NO: 195092 - DNA, 283 bp, Glycine max
  unsure (1)..(283): unsure at all n locations
gcttgagcatattctaacaacagcaacnttttactcagatgtatgaaaaagnncgggaatatatcgagacgcccgtaattgaaatcggaagctcgtacaaatgcaaacccgcaaaactattaactcggatgtccgattgtgtcccataatatatcgacactctcgaaattctgaaccgaagctttgagcaaattcaaatgagaataacttttaactcgaatgtcggattgagtcctcgaatatatctacatgctcgaaattgaaaacataagctcttagcaaa

SEQ ID NO: 195093 - DNA, 390 bp, Glycine max
  unsure (1)..(390): unsure at all n locations
cagattctgccttcttctatttacagattggggatgcctctaacagcacctttggcaatgattttcttcatgcctcttaagtgcagatagtcaaatcntttgatgccatattctgacttcatcatccttggacgatagacatgtggaggagtagctggtttcttgaggtgtccatatgtagcagtagtcctttgatctgctgcccttcattataacttcactcttttcatttgtcaccaagcattctgacatatgtgaagtttacattgaatccttcatcacacagctgactgatgctgatcaagtttgcagtcagtccctttaccatcagtactttggtcagactaagaagtacatcatgaactagctgtnccatttcaatgatctttc

SEQ ID NO: 195094 - DNA, 429 bp, Glycine max
  unsure (1)..(429): unsure at all n locations
agctngaggagtgatgtgagttatgttcgttattgcttcgaccttccacctccatcctcatagatttagtttattattatattttaatcttaagccttgtanttggctatgtttttatgacattattctctgaacatttgggattgtttttagtatttgctacttagttaattatgacttaacatggtgattatatttattttctcttagatgtttatgattatgtgttagttattttgatgatatatgtctagttgtatgtacttacatttggtattaggctntgtgtatgttttaaaattatttatgtatgattttattttatgcactttggctttttgatgttgccaaaggaggagataaaatgggtattttagaaatcaagatattatactttcaaagctttaaaaataagcataaatttaaaaa

SEQ ID NO: 195095 - DNA, 439 bp, Glycine max
  unsure (1)..(439): unsure at all n locations
tgtagaattcaccccaattccagtatcctatgctgacttgctgtcatatctacttgataattcaatggtagccataaccctagtcaggttcatcaacctccatttctccgagaatacgactcgaacgcaacgtgtgtttgtcacggaaaagccccggggcgttccattgagcattgtanggctctgaagcataaggtgcaaggtctaattgatttgggctggctgaaatttgaggagaatcgcgtgtaaatcctgacattaacaagagatgccacacatggcgcaattntgaaagtttttgttagatgtctctaatgactcatcangattttccaagttgtacaattattgtaaaccacaattacaatgttaaatgaaatggataaagttgatatctttgtccctcgtcctctcacaaacgcatcttatcttattcaac

SEQ ID NO: 195096 - DNA, 332 bp, Glycine max
  unsure (1)..(332): unsure at all n locations
gttggtttattcatggagtggtaagcacctcttcttcttccgtttggcttcattttcattnttctcataaggcaccaatgggagcttgggagaaagctctattttcggggggtttgatttcatttgtggtcatntttgggttttgggtaatgtcgttgtgatggacttgttgttggagtggaggaaagtactacattagacctaaagctcattcatttctcattcttcttcacaaagttctctttttgcttctatagaggtaagggaagttcacctttttctttgtttgggtgcattgtaatgatataaaatgcttttgtagaaattaaata

SEQ ID NO: 195097 - DNA, 422 bp, Glycine max
  unsure (1)..(422): unsure at all n locations
tcagccccttaggcacttctctctcttttcgatttgcttggaaaaattggttcccgtgaagaaaaatcttaagccggatgcgcttctccaaacgttttccgtgagggaatttcgcaaagggttcgaccgttcttgacattctcattggtctttatcgccttcgatcttcaacgggtaagtaccttcgaccaacccattngatctcatctatgtacccgtggcggccacattggagttccgcgtatttttattcttcggttcaattactttctatacccccctttgacgcgcttaagccatcttatttaagtcatttctcgctaacctaaaaaaaaataaatttcaccgatcgttgaattgatatccgtaacctggttaaatgattcgaccgtcgtcggcgtactccttgaataaaaaaaaaa

SEQ ID NO: 195098 - DNA, 418 bp, Glycine max
  unsure (1)..(418): unsure at all n locations
ttgtgccagccattcatggggaaaaacacaccacatgattatgatgatggatggctcaaattctcacacaggtaaactcatcactttcaaattgagctntcanaactatcatgacatgtagaggagaatcaagggattcaagtcacaaaatgtcaaaaacttttattatcaaaacaattacccatttcttgaacatatcctataattcatagaaaaacgtgcaaagtcgtacatgcacacaaaattgacccacaatattaaactaacaatccgacgaaactaacaacattaacaaattaacaaaaccaacaaaactagcaaaaccaaagaacactcccctccccccccatacttaaacaatacattgtcctcaatgtagcacaattaatagataaaaacaataaatcatcaatagatc

SEQ ID NO: 195099 - DNA, 273 bp, Glycine max
  unsure (1)..(273): unsure at all n locations
atattaatgatgtgccacgttctaatgctctatanacggaaattacatataatggccatgtggattaataaagcccattctgccttctgtttatctaagaaattactaaattacaaagtttctttgcattggaaacaacctgcagaagtacttgatcggataacacacaataataacctactataattatgctatgagattgaagggttaaaacgggttgatcttgatatccttatattattatatcaacaaaatcaaatgaagctaattggc

SEQ ID NO: 195100 - DNA, 480 bp, Glycine max
tgcaagcttctataactagctcagcctgtgttaattgaaatatttctattaacattgagatttgactaagttcacatgctttgaaaatacttgataggtcaaacgaattttctattcttaaccaaaagaagaagacaaaatccaattgtccattacaacacaaaggtgtcaaaatgtcaattatacccaactagaatgtttaaagtacgagtcactagtgaatagtgactattgtagggtccgtaaaaaaaagtgagtagcatctttaagtaggaatcactagtgaatagtttaagaagacactctcatgtgttttaaataagctttgttaaatccctaagtaatgtggacactcaacatgttgtatgagcttgaaatttgagaagagatacatgtgatcacacattgacgaggcctaacactataactcaatagaaagttacctctataaaataataccatcgatttgattgaatgaaa

SEQ ID NO: 195101 - DNA, 282 bp, Glycine max
aaatagaaactaaaatttaatgacacgtatcccacaatatttattatttaaacaattttaaagctatatttcacggggggagaaattgaggcgttacacaaagcttttcactctttttgtttatggataataattttcctagaaaaaaattaccttctgtattattccctcaaatacttgtccagtaattatacagccccaccatagaaaaaattaaataagtcttctcctagctaattttatgggagttcacattatccaacccttctccaatccactatt

SEQ ID NO: 195102 - DNA, 305 bp, Glycine max
  unsure (1)..(305): unsure at all n locations
tcacctctctatgagctggtgaagaagaatgaggcatttacttggggtgaaagacaagagcaagcctttgctttactcaaagaaaagcttactaaggcacctgttctagctcttcctgacttttctaaaacttttgagctagaatgtgatgcctttagagtgagaattggagctgtattgttacatggttggcaccctattgcttattttagtgaanaacttcatggtgccaccctcaactacactacctatgataaagagtgttatgccttaataagagcccctcaaacttgtggaaaataact

SEQ ID NO: 195103 - DNA, 392 bp, Glycine max
agcttaccaccataagatgtcatggataagatctcgaaagtagaagaagatgaatggagggagaggaagagaagagctcgaaatttattgcctctaaagaagtctaaactttgaacgttaattctcaaatgatcaaagttgaaaaaatgcacactcataacctctatttatagcctaagtgtcacacataattggagagaaatttgaatttcaattcaaatttcacttgaatttgaaattaaatctgtggagccaaaatttcactaattatgattagtgaatttcagttatggttcaacccactaatccaagatcaattccaagattctccactaattgtgcttaggtgtcatgaagcgtgtaaagcatgaatgacgtgcacaaagtgtgac

SEQ ID NO: 195104 - DNA, 350 bp, Glycine max
  unsure (1)..(350): unsure at all n locations
agctttagagttntcattttgttaaggctctgtgtcttttgtttntgaatttataatacagggatctttcttcatctgttcctagtctctacccattctcattcatttgcatgtttacttctttttctaaaacggcagattctatgacgagtcccccgaaggtactaatacctgtgacccgtctatcaacttcgagcaagaaatgaaccaaacggaagatgaaggagatgaggatgtgggacttccttctgaactagaaagaatggtctcccatgaggaccaagaaatggggcctcatcaagaagaaacagagctagtatacttatgaattggcagtggaaagagggaag

SEQ ID NO: 195105 - DNA, 471 bp, Glycine max
  unsure (1)..(471): unsure at all n locations
tgctctaaattacatngatgtttgatttatgggaggatgttatattccatctttgccctaagagtaatgtcccactgtgtaaactaactctcccaacgtttgccttctcatgaatggcccccagaagcttgcctcatatatgttcaggaaagacaaggctgtcgaacgaactanntccgctctcgaatacgacaatcaccgcttatagagcgctgtacaccagcagcgcttctaagccatcaagggatggtcgtttcttctggagcgacgcgtccaactcatggacgaccagtatactgattnttangaggaaataaggcgcctgccgtgggcaccacttgttactcctatagcaacgttgatccacaatagtccttgaattattgccatgcttggccacacatgacgcgtgcgtacatgagatctggttatgggttatggaccagttcatgccaccttcaccaactctgg

SEQ ID NO: 195106 - DNA, 228 bp, Glycine max
ttaagcacgcgctcactcatccacccttcttcccttgcacacaaaaccaatgcgggtatacacgagattactaggcactatcatatagtaaaccaaatatcatcatctagcaaaccaattatccagctaaagactatccatccaaaatacaagtcaaaatatacctaaagctaccaatcacgtacataaaaagatattaactaaagggggagcaacccacaaatatac

SEQ ID NO: 195107 - DNA, 422 bp, Glycine max
  unsure (1)..(422): unsure at all n locations
agcttcgcacttgataaaggagaacacatgatcagcgctaggcaatgacattcatggtgctccgaacaaaggtggagtatggaggattgccttgagggtccgcacttaggcaatcatgaaactgagctccaaactcgaaagtggaggacacatgaacagccctaaacaagaacattcatgtggctctgganaaggacgagaatggaggattgccttgaggttcctctcttangcaatcatggaatacaactccaatactcgaaaatggggaacacatgaacagccctaagcaataacattcatgtggctccggaaaaggacgagaatggaggattgccttgaggttcctctcttaagcaatcatggaatacagctccagactcgaaaaatggaggacacgtgaatgacaacgcaattcactc

SEQ ID NO: 195108 - DNA, 391 bp, Glycine max
gtatagactatagatacttaatacatctatttttgtgtgtttaataatcaaattctctcaatttcaggttaattaggcaatttggcaaagtgttgtttttcacctcctcgctaagccaatctgctggcttagcgagcatccgctaagcgcaacactcaatggctaagtgcgaggaagaatccagaagaagatgagctatataggttcgctaagtgaaccacttcagttcatccgctaagcgagaaaggcgcgctaagccaaaaatcactaacgtgcgctaagtggtccataagtgcgctaagtgcacgagcatgaacaaggccacctatttaagcctgaaatcagattttgaaaagtgagtttggattgggattcagagctttgcatgtct

SEQ ID NO: 195109 - DNA, 396 bp, Glycine max
  unsure (1)..(396): unsure at all n locations
cactcttgtttcttttctttctttataaccgtacaattttctagtctttcaacatgtattttggtactgagatcttgtcagtgctcttcgtactatagcatatgactgtttataaaaacccttgcaaacatgttctttacaaagacagaacatttggaacccgaatacagaaaatatcacgaactagtggacgacgatcatcgccttctggtttgcgtctgtagcacaccaaagtgaatgtacgtggaacctccattaccattggtcctctccccccntaaaaggtaagcaagacggtgaatcgatttgatattttttactattcatatctttatgctaatcttatctatggaaaacttattgatcaaatcaataaataattacaaaaattcacat

SEQ ID NO: 195110 - DNA, 337 bp, Glycine max
  unsure (1)..(337): unsure at all n locations
agccgcagaatgctgtactacttgcaagaaaattggcggagacttcgggtttagcattggggattcccgctatgagtggactggttacctggaagttcatcgagtaccagagaaaaaacgcttatcatatcacgggtaactgtctactatcggccaaaggtgctgctgagactctgaagttcaacatggcacttatactcttgcccgtccgcggaaataccataacttggctcacgtccaccaagttggcttacgttgcacccttcgatgataatatcaactttcataacgtacgccgccnaccataccaccaccagaatacacgttgaatataaaa

SEQ ID NO: 195111 - DNA, 392 bp, Glycine max
  unsure (1)..(392): unsure at all n locations
ctgtttcaatttcgagcgtctcgtatattacaggacttcatcggacctctgactcataagttattgtcgtttgaatttgctcagagcttctgttcntaaatttgagtgtctcgatatgttacgtgacttaatcagacattcaagtgaaaagttatttcggtttaactttgcaacgagcttccgttttcacttacgagcgtctcaatttattacgggactaaatctgacatccgagtaaaaattaattgtcgttagaatttcttaaagcttcagtttcaattttagcatctcgattattcgggaccaatcgacgtcaagtaaaagtattgtgctgaattgcctgaatctgttcaatttagatctcattattacaactattggcatccataaag

SEQ ID NO: 195112 - DNA, 274 bp, Glycine max
  unsure (1)..(274): unsure at all n locations
aatcaaacgtnacaagacaattatagttgttggttgaatacctcacccactcaagtgtatcacacaattatggcttttctctaatgaaacactctcgccttntaccactctaattccccttgagttcttaggcaattcaagagattatggccacaacaaagaacaattcaccaatatgtgtcaggtaaggctagagagacaaggaaaaggttaaccaagaaaaaggctaacaatgtattgaataatatttggatgatgtccattatgaaatgtc

SEQ ID NO: 195113 - DNA, 461 bp, Glycine max
  unsure (1)..(461): unsure at all n locations
tacccgggatccttacagtctcctgcggctgcaacttcaaataacataataattcttttagaactttaatcattatatatactactttttgctccaaaagagaaaacaaatacactttcagtttcaggttctatttagggacttggatccacctgctcatcgtatttaatcttacccgtcatgtttaatcaacggctggagactaatgatttctcgtcaacacaaaatcatgggcttagtcaattttaattcagcatcccgttttaacaagcctagctaaatctttatctctctcttcatcaagatcattcaaaaaatctcaactgtcccctaaatatgctcaacttttcaaagtgggaaatatattacatatagctaaagagacaatatacattgaataactataaaaaanaaactgtcttgatgaaatttacactttcatcccactctttttctatgat

SEQ ID NO: 195114 - DNA, 347 bp, Glycine max
  unsure (1)..(347): unsure at all n locations
acttgagaagaagtttatgaacccttaagtccattctctcctctttattccttcaatntcgtgctcccccctctcttttctctcccctttcttttcctcattgaagcccacaagcagcttcatcaagtggatcagacacaagagctcaagaggtgcccttaacctcattaattttttgttaccttctttcattgtgttcttatttttctcatgtatctctacatgtttggataatgtgtaacagatcttaagttccccgtaaactgcttaaactaattattctatgtcaattcttgtctgtctgaactaatggtgattagtccttgatttgctgtattttgggtgaa

SEQ ID NO: 195115 - DNA, 350 bp, Glycine max
agcttctatagcaagtttaattggtggaaactctaaagaatcatgttaacaacatttagcacaagacatgtgaggagatacatggagaaaaataaagaaacaacaatggaagagaaggtaaagcaaaaaattaatggaggtttaaggagcacctacttgaagctcttgtgctctgattaccacttgatggaagcttgcttgtggggcttctatggaggctggatctttgagcttcaatgaggtcctttaatgttttacaccatggagatgcagcagaagacaaaggagaagaggtgagaggaggcgccatccactatggaataagccatggaagaaggagcttcaccacc

SEQ ID NO: 195116 - DNA, 380 bp, Glycine max
  unsure (1)..(380): unsure at all n locations
tcatcttttacatttctcactcttttgagtggcatttgtattgggtgttatattgaatgttgcatcttaatccatatcatatantttgtgcatcatgcatcatcatgagtaagtgagaaaaaactttctaaagntagaaaatttcttcagaaggccaaactctggtttaattcgttatagccttatcataatcaattacataagttgtcttaagcttgcaaagttatgtctcatatgttggatcgagtggcctcagaataattaagaaatgggggtggaattaattattcctaaaactttaccaattgaaaattactcttttaaggctttacttttgttggtaagagaatatggaatagaagagaaacttaacggaaagt

SEQ ID NO: 195117 - DNA, 464 bp, Glycine max
  unsure (1)..(464): unsure at all n locations
agcttcctcncacgtttcctccatacctagaacttcaaaccttcgattctcactcgattcttcaccaaatcacgtcccgtaaagcctaatcttcctctttttcactcctctgtcacttccaccgatcaaaatccagaaaaacttcatcaaatggcagagccatcaaagaagagaaagggatcatcttccaccgccaccgctgttgcccatcgccgtcacggcccatccggagcacccacagnacctattcctccttctttgtcatctccaagaacatcaacactgntttcatccgatgatcaacgtctacggtacctttctcagttntcttctagaataatcttagaccctaagtacctagacgtagagttctttaatgatgaaacgtttgattgctatcaaagtgttcacaaatctggtcttgttgattcatgtcattacattgcctattatcctgaacttga

SEQ ID NO: 195118 - DNA, 321 bp, Glycine max
  unsure (1)..(321): unsure at all n locations
agtgggccctggtgctatttacaccccccctgtttactaaatgcaccccctttctattnntttggaattctttttccggaacgttacgaaactttacgaattttgtaacgatacctattttccttccgcaaggttacgaatccttacggattatgtatttactcttttttagctttcgaagaagttacggaaacttacgaattgcgcaaaaacacctctttttgatttccgccacattacgggaatttacgaatcacgcaagcctgctttcttttcgattctgagacgtctcggggacttcattattgcacgtcatcaagt

SEQ ID NO: 195119 - DNA, 360 bp, Glycine max
agctttaagaactagtttgttatttttggactatagaaaagaacttgtccgtactaatcctaaaggatatatacattacattcggaagtgattaggattagaaggacgcattgcatcgcatgcaaaagacaggactagacaaggtgaagatgggcaagtgggtccctcccttaacaccacaccataccatgtttagttttccaaccaaaaacgttgcctttgaattcttttctctttagctgcttcttttgcctctccaaactaacatccacattgctctgttactgtgagtgatttgggttcttgcttgtatataattataaaactaaaactgcatcatccttttcatatcatattctt

SEQ ID NO: 195120 - DNA, 410 bp, Glycine max
  unsure (1)..(410): unsure at all n locations
ctgagagagcatcctttaaactttcattttgaacatactcataaaccagcatttgttcttcgcgctcaaagcagaatcccataaagctgacaagattcttatggtgaaccctcgataggcgctcaatctcccctttaaactcaagctgtccctgcatagattctttttgagctcgttttattgctatcactgttgcaagtcccacatctgggtggtaatgaacatgataagtgtttatatagctgggtagaccacccctttataaataagttnttaagaggacctatcngatgccttggtttcactttaacatggtgcttatatgtgtggacatttacacgtaaagtacgctatatgttatgcaatgctctattaaaagcacatgtgctacactatantctaagtagttt

SEQ ID NO: 195121 - DNA, 418 bp, Glycine max
  unsure (1)..(418): unsure at all n locations
ttctcatttgatgcattagaggaagaatttacaacctatttcactcatttcacacccacggaattcaagcacaagagacttggtcattatcatcttgaaagaatgctaaacatgaaaaanaggaaatatgcaaaagaaaatttgaagaagtttcaatggaggaatgcaaatctactagcacactaatgaatcaaaaggagaagtttacaaaagaagaaggtgttgataacattgatgaatgatattatgagagcttgattggatgtctaatgtatctcactacaacaaggccaaacattctatttgctcaaaagaacaaaactggaacttttgttgacaatcaagtagccattgctattgcaaacaatcccgtgtgtatgggaagataaacatttcaacatcaagtctattatttgat

SEQ ID NO: 195122 - DNA, 91 bp, Glycine max
ctcttgactgaaacacaaactttctatttgttgtcccacgcccttctcttgactggtactatgtaccccaactccaaattattcgcaactt

SEQ ID NO: 195123 - DNA, 483 bp, Glycine max
  unsure (1)..(483): unsure at all n locations
ggaccatagaaactcagcttcatcaagtangggggttctttccacttcttgaacctttatcttgttatcnttggaagctaaggttcattttatgttgtattgatgttcaaaatttcatagctactgccttggctgaaactgtgagataaggttttttctataaagtttagggttaacaatgagtgctttgggtgttacacttatggttagccttaaatttcacttaaatcagagttttctagcaaaaggtacgaataaaacaagtttaaggacattttgtaggattaaaatctatcacgaaactgaactgactgttatggatgcatggattatttttcttaatgatttgacttcaaaaatgaagttgttaggtgtgaaaatgaagggtaaaattcatgaaaaaccaattctcggnaaacctataatgttgaaaatangtttatgagctaaaccttgtaaactatgtgacaaagtattttagac

SEQ ID NO: 195124 - DNA, 335 bp, Glycine max
  unsure (1)..(335): unsure at all n locations
agctttctccactaagttgtctaatgcctgatatgtcttttctgatggcagtggtcctagatgcagggaagaatttctccaagaacaccctcttaaggtcatcctagctgaaaatggacctgngagcactatagtatagccaatcttttgccactccctctagagaatgaggaaaagcctttagaaagatatgatcttgttggacattaggggtcttcatggtggaacaaacaatatggaaccccttaagacgtttatgaggatcttcacctacaagaccatgaaacttgggcagcaaatgtattagtccagtcttgagaacatatggaacaccc

SEQ ID NO: 195125 - DNA, 412 bp, Glycine max
  unsure (1)..(412): unsure at all n locations
ttttggagtagaaacatgggaccaactcatgttatttcaatttaaaggttgtatctagtcaaggtctgagagaccatacaagtttcctagcgatttctaattatgtgggccattaagtctatcatatgttgacaatagccgagaagcccatgaatctcttncggggcggagtaagtgtccgccatcgccttggccttggctaacaagcggggaagttcttgactcccgttcaaggtaagagcaaaccgatccatccacatggttgcctcttggtgtaaagagtcgatcacccttcctctagcctctttttccgcgtatacttgggcatactcgtccgcgatcctatgctcgtgagccgtggctagacctaactcttcttggtacttggcgatgatagctagcatgttggtct

SEQ ID NO: 195126 - DNA, 340 bp, Glycine max
  unsure (1)..(340): unsure at all n locations
agcttcatgagagagtcatagatcaaatcgataagaataataaaagctatgctaaacaagccaacaaagggagaaagaaggttgtcttctaacccggagattgggtntgggtgcacatgacaaaagaaaggtttccggaacaaaggaaatcaaagctttaaccaaggggagatggaccatttcaagtgcttgaaagaatcaatgacaatgcttacaaagttgagctgcccggtgagtataatgttagttccaccttcaatgtctctgatttatctctttttgatgcagatggagaatccgatttgaggacaaatccttctcaagagggagagaatgatga

SEQ ID NO: 195127 - DNA, 383 bp, Glycine max
  unsure (1)..(383): unsure at all n locations
cataaagaaactctataaataggcctcctatttttaatggagagggttaccactactggaaaactcgaattgcaaatttcattgaggcaatagattaaacatttgggaagccatagaaagtggaccttatgtacccaccatggtggctggtaatacaataatagagaaacctanagaagagtggtttgaagatgaaagaaaatagtgcagtacaatttaaaggctaaaaacattattacttctgcccttggaatggatgaatattttanggtttcaaatngtaagagtgataaagatatgtgggacactctancangtacacatgagggaacaactgatgtcaaaagatctaggataaatactctaactcatgagtatgaatt

SEQ ID NO: 195128 - DNA, 428 bp, Glycine max
  unsure (1)..(428): unsure at all n locations
ntcaaaaatatntaaaatattntaaaacattccagtaagcattttggccactggtaatcgattaccagagagtaaatatctcttttaaaagcttttgagaaaaacctttggccataacttatgcatcatcaatttggaaacttctttctaagactctagagactaacttcatcatttatcttagatttcttggagtcttgttttggatcaaacttgagaaacatctttctttggcatcatcaaaacatcaagatatctttgcttctacatttactattcatagtgtagatttaggttaggaggacccacgattacattgtgattttcaaaataatttgcaaaaaaaaaagttgagaattcaagtccccctacccgaattttcaacgtgtatttctttggttttttcataaaannattaatttttaaaa

SEQ ID NO: 195129 - DNA, 368 bp, Glycine max
  unsure (1)..(368): unsure at all n locations
gccactatgaattgtttgaccattttgtggactaacatcctcaaagttggggggtgaaaattggttttcattaaacatacacaacattggcacatacatntctgtatcttcaaaatagttattcaagtcaatattctccttctcccattgtttcctcctttccttagctggtttcgcaacatttccttttgccctatcagttgcaaataactcagtccagatgtcataatgcttaatttgcattnntctccatcttgcagcatgtggcttttcctacataaaagggtaaaatgacaagtgatcaatttggacttatattaacataaagtcagtgatcaataaggataaaatgctatacttaatcactc

SEQ ID NO: 195130 - DNA, 283 bp, Glycine max
  unsure (1)..(283): unsure at all n locations
tcacacctgcatatttatctctagcatacattttctttntttctttacccactcctcacggttgggtttttttatggaaaaacaccataactaaacgcgccacaaggcattcctatcgcaccaaaatcaaatctataacgatgggtgatcaagaggagacacaagaatagatgaaagccgacatgtcagctctaaaagaacaaatggcctccatgatggaggccatgttaggtatgaggcagctcatggaaaagaacgcggccaccactgccgctgtcagttc

SEQ ID NO: 195131 - DNA, 411 bp, Glycine max
  unsure (1)..(411): unsure at all n locations
acccttgcgacaggtacagatttctgattcaaggccagctggattaccaagntgaccaacgcatccagttttccttcaagcttcttagtttcagatgatgcagatgggtttgtagctacctcatgcactcctctaatgactatggcatcatttctggcgctaaactactgngagttggaggccatcttctcaattaaatttctggcttcagcaagagtcatgtctctcaagggctccaccactggcagcatctatcatacttctttccatattactgagtccttcataaaaatattggagaagaagcttgtctgaattctgatggtgggggcaactggcacatagtttcttaaatctctcccagtactcatacaggctgctctcactgagttgtctaatacctgagatatc

SEQ ID NO: 195132 - DNA, 253 bp, Glycine max
  unsure (1)..(253): unsure at all n locations
gactggtattatctgagtaatgacattgttgggctgaagggaaatttggccatgtaagaatggcattcacggcaaggagttctccctcattctcatccttttcatttgccccaatttttgcattcatcanagcaggatgatataaattgtctcttttcagacccacttcgatcctttcggcagcgaagaccaaatccgcatagcatgaatgtgcgtacccaccatctttttcatagaaacactatgaatgtgc

SEQ ID NO: 195133 - DNA, 379 bp, Glycine max
  unsure (1)..(379): unsure at all n locations
agcttcaagagcttcgttccaacaacaagatttatgagcagaacaatgattcttatatgtgacggctaaagagatagtgcaagagttgaaaggccttctcaagaagcataggcaactcgagcatgctcaaaaggagtccatgaatgcattatctgcatggatcgaagcattcaatgaactgaaacaaagccatttccttcgatccttcaagccttcttctactgtagattcttgaattgtaatttgttgatatttttggcattcatgtaatcttccttttgaacaatttgcactntaattatcttatgggaatatttatcttagttatcattggtctatatanttttaagtattttccatttatcgaatcaatataact

SEQ ID NO: 195134 - DNA, 393 bp, Glycine max
  unsure (1)..(393): unsure at all n locations
atcaacacagttattacaatggagttgccagatataagtatcagagtattaaatacaattagcgcaactcattatccagaatataatcaaaccagaattcaaataacataaaatgtcaacaaccacaaaatatccaagactggaaattataaacacaagataaataagcaaagtacttagcataataatggtaattctaagaaactaaaagccaaaatacacggcttataaaagataaataatcagaatctaaaagctaagaagacggaggaggtggtggaagatcgaaactctgacgaatgtagccgacatcctcttcaagctgtgtaagacgaatgtccataccggcanagcgtgaatctaacgagtcaaagcggtcaccaacatacgaac

SEQ ID NO: 195135 - DNA, 284 bp, Glycine max
ctccctataaaaaaaaaaatcatgacagcttatatactttaaagatatttttgacaaatttttaaatggcccgaaaactaatttccataatgtatttaattgtgaatacatccgagaaataaattctcaaaatacatttaatgcatgtcaaacactagctatcagaaaacggcacttcacgtttgttcagagatataatagccgtaattatacaaagatgttaaatgtgcagttatttcagaataaaagatactgacaactaatgcatctactatccgagtcct

SEQ ID NO: 195136 - DNA, 487 bp, Glycine max
tactcagcttctaaccttatacagaatgaagctctgataccactttgttttatcttgtggcctcagatatcttaagaaaggcggtgggggtgtgatattaatatatatcaaactactttcccaatttaaaatctatttcactttgtattccagttataaatctcccctagcactgaacttctctaatggtgattccaaatatacaatctgtatatgaatttcacgccattactaaacacatgaatataagggaagagaaagtgcacactcagatttatactgctctcgccacacccttgtgcctacatccagaccccatgcaacccgcttgagagttccactatcttgtaaattccttgtacaagttctaaacacacaatgacaatccgttctctgtgtgtgaaattccttttcaatgcatgcgaagtcgtatcttttagtcataataaaacattgctccattcttgacatatctataattcataaa

SEQ ID NO: 195137 - DNA, 327 bp, Glycine max
  unsure (1)..(327): unsure at all n locations
tttaaacctttntcaaaatcatatccatgccttncatggngagctnggggacaacgttgaagaatgcaatatctatccaaactgttgatctaagcacatatcacttatgtggtaaattgccctatctttcaagtgatgtgtttcagttagatctttcaagcaattcattctctgaatccatgaatgcntctttatgcaacgatcaggacaagccaatgcaattagaatttctgaatcttgcatcaaataatttgttaggagaaatacctgattgctggatgaattggacatttctcgtggatgtaaattacaaagcaccattttgtg

SEQ ID NO: 195138 - DNA, 431 bp, Glycine max
  unsure (1)..(431): unsure at all n locations
ctaagcttcaaggaaagagagagaccagtcacgagcacatagcatggttttgttagaggagttagctgcttgctcaaggtctaagagaagcttgtctcagcgtttatgcgagacagagaccaacatgttagccatcatcagcaagtaccaagaataattaaatctagccacggcccacgaacacaaagtggcggacgagtatgcccgagtgtacgcgataaaagatgctagaggaagggtgatcgattcgttacatcatgaggcaacaatgtggatggaccgatttgctcttancttgaacgggagtcaagaacttccctgattgctagccaaagccaaagcaatggcggacacctactccgcccccgaagagattcacggacttctcagctattgttaacatatgatagaattaatgggccatataatta

SEQ ID NO: 195139 - DNA, 355 bp, Glycine max
  unsure (1)..(355): unsure at all n locations
gcctgatgcctgatatgtcttntttgatggtagcggtcctagatgcaaggaagaatttctccaagaacaccctcttaaggtcatcccagctgaaaatagacctgagagcaaggtagtataaccaatcttttgccactccctccagagaatgaggaaaagccttttgaaagatatgatcttcttggacatcagggggcttgatggtgaaacaaacaatatggaactccttaagatgcttataaagatcttcacctgcaagaccatgaaacttgggcagcatatgtattattccagtcttgagaacatatggaacacccttatcaggatattgaatgcataagctttcataagtgaa

SEQ ID NO: 195140 - DNA, 415 bp, Glycine max
  unsure (1)..(415): unsure at all n locations
actgaaaagtatgaagttatattgatttgaaaaatttcattttctcacttgtcaggtactcatccaagcatatcttcaggaaaaataaggtaaaataaacctttttttttaacttgaatgcataaacaacccaatggccgatgcctgatataccaagttgccgactaaagttgaatggagaggagccctataaaataatatttgtttcttctttaatcccgctataaattttataacccatttcaaatccagtatttcgggataatcgatcacgttgtttccattcctatctctaaatgaagaattatttctcatttcactatntcagcnaataaaaagtaaagaacacgaaggatagatgaggctgagtagcataatacaataattacttaatcagcaacccctccatatcaat

SEQ ID NO: 195141 - DNA, 478 bp, Glycine max
  unsure (1)..(478): unsure at all n locations
catcattagatactcgtggataaaaatgacttttacttgangggaaaactaccatatagaataagaaattcacacttatgagaaagatngttggactacaaatgtgaggtgaagttccacgttngataagaatgagaaggttgaataccatataaatgaaggaaagacccataaacctaaaccttatgattttaagattaaaaggtgatattaaactcacttatataattattcatgtctcattattatagatcttcatggtatttatctcctcgaattnttcttacactataacaaaattttaacatcattttttaaacctaagatttataggttgttttttttaccttgcatcaaccatctcacttcttcttgtatctcttacctcaccacaatctacagngttcacattatttgttaatttgtggtttgtaataatatgtatacaatatacnatttaatctcttctccatccata

SEQ ID NO: 195142 - DNA, 468 bp, Glycine max
  unsure (1)..(468): unsure at all n locations
gctttcatacattaatatangaattatatcctaatgtcacatcctatcagagcggtgtgttctcgtgtcctttagcatgagattctttataggtatccaccaattcatcttgctcccgaatacaaagttcaagatcatcacaggatccaaacacaaacaatacacacgagtgagttatcacattcctaactaatagatagaaacaagaaaacatatgcatgtaggtataaatatcatataaacaaaatacaacttacttaatagtcatcgacctattcatctgctccccgaatacaaagttcaagatcatcacaggatccaaacacaaataatacacacgagtgagttatcacattcctaactaatggagagaaacaagataacatgtaggtatanatatcatataaacanaatacaacttacttaaacatcactcacgttatttcacactttgtcgcacacattaca

SEQ ID NO: 195143 - DNA, 325 bp, Glycine max
tactaattcacataatcctgatgatctactaattatgttttggtggtgaaagtggtaaagatttatgctagtatgaaatattcgagtcaattataatactttctttaacctaaaactaagaaatatatatgttgctcatatagtaccaagagtaacactttttccctttttctcttacagggaacacttgatgatggaagagttatcgctgtgaaacaactatctgtacaatccaatcaaggaaagaatcagttcatagctgagattgccactatctccgctgtgcaacatcgtaatcttgttaacttatatggatgttgcattg

SEQ ID NO: 195144 - DNA, 216 bp, Glycine max
  unsure (1)..(216): unsure at all n locations
tcgaactatacttgctacaacaacatctacttgaatgctcccanagaatagccaagttttgccctcataatttcgaaagcacaatgttgtgggcagatagatcagtgtcatgtttcccaatcttgtagagcatagatcgaggcattaagttaacagccgcttctccatctatgagcactttgtagatccaacattctcaacttttgccctgtgaaa

SEQ ID NO: 195145 - DNA, 163 bp, Glycine max
  unsure (1)..(163): unsure at all n locations
ctatattgaactagacaccataataagtctataactttcactacgacaaccatgtatataaccacttctaagtggctttttctaactacctaatgatagaaatcatctttcatctttgaaatatctcaataggcctngactatggggataccttttcccttat

SEQ ID NO: 195146 - DNA, 354 bp, Glycine max
aacctcatcatccctcatagtctttatagttgggagcctatccaatccttgtgtgcggactctcagccacttatgatagccgccgatgatcccattactgcttcccctaagctctttgtcctttcttcatgcccgaatccatgccttgcgaacttctttgagtaccctcgcgattgtggtcactgaaaccccatgcgatgaaaggcatgatgccttcatctgatggcactttcttcatggggtagccaagctgtcttatggcgaggacgggattatattaataccaccccttgttcccacaagagaacatttggacatcttcgcatgaagatagaatctgattcttcttttttt

SEQ ID NO: 195147 - DNA, 288 bp, Glycine max
  unsure (1)..(288): unsure at all n locations
cacatagnnggacctggagatatgtcacggcggtcaagagaccttggggacgtcatgtggggtgctattgcccaaaaccaagcttgaccaatcccgacccaccccgaacataatcggtcagtgagaacctgtgatgtacctaaacaggcgagctcctggcagtctacagataaaaggaacaaagaccacaaagcaaggagggtttgggtggctggccagctctgaaacttgattgatatgtgagatatggtctctggtaatcgattaccaacggtgggtaatcgatta

SEQ ID NO: 195148 - DNA, 122 bp, Glycine max
aatttatcacgctaaaaaacttcctaatcttataatcaacataagctcatcataatcctttaccactatcacttctatcataatcaccactcgcggccatcaataatactattgccctcact

SEQ ID NO: 195149 - DNA, 323 bp, Glycine max
  unsure (1)..(323): unsure at all n locations
agtcttgcttctacatgatataggaagtgttttataaacttggatagtattttatatgagcgatcacttcctatccttncatgtcttgaccaagttattattatttttcttcctttttactctttacaacaactctgtacatggtttagatatttgtttattccaaagaacgttgttttccttctcttttcttctttctttttgctattttccatttttgattttttttctttcctgataaatatctaacttccttcaaaacccacaactagccacaaaatgatagaaatcttccctgaaaaacacccctactctcctatcct

SEQ ID NO: 195150 - DNA, 309 bp, Glycine max
  unsure (1)..(309): unsure at all n locations
actatacctngttctataggtgaagtttaatangcaaggctcttattgatttgggggccaagattaatttgatgtcgctctccatgtgccaaagacttggagagttggagataatgcctattcggatgaatgtatagttagctgatcgctccctcaccagaccctatggagtggttgaagacgttctgtgtcgagtcaagcatcttattnttcctaccgattttgttgtaatggacattgangaagatgcaatattcctgtctatttaggacgtccatttatgtccactactatctgtgtggtggacat

SEQ ID NO: 195151 - DNA, 342 bp, Glycine max
ggacccttatcaccgagctgcactgttatccctttaggatttggataattataaatgatctgttatggtacctatcttaatatttcatgatgaagataaatctggctttcaggaaaaaagctaattttaatgcaaaagacagtgggctaccttattcccgtaacgtacttaaggcttaccaaggaaattggcgacatatgatcaactgccgctacgtgaatcagggctaacgtataggcttaccagctagcgcgaatgggcaacccattcctactgcctagacaagggcctaccatgtccatcaggcattaagctatttgaaataggtaatttcaacaaaat

SEQ ID NO: 195152 - DNA, 395 bp, Glycine max
  unsure (1)..(395): unsure at all n locations
ggggagcatgaaattgaaggaagataagggagagaagttgaacttgagttgtgtctcacaagactctcattcatcacaattacaacaagtgttacacatgcttctatatatagactaggtagcttccttgagaagacttcttgagaaaacttccttgagaagcttctttgagaaaacttccttgagaagctagagcttagccacacacacccgtctcataactaagctcacctccttgagaagcttccttaagaagattcctaaagaagctagagcttagctacacatacctctctaatagctaagcttacctccttgagatgagaagctagagcttagctacacacccnctataatagctaagctcacgccatgacaaaanacatgagaataca

SEQ ID NO: 195153 - DNA, 399 bp, Glycine max
agctgtgagccaattcagacaacaataactttttactcggatgtcttgatgagtcccgcaatatatcgagacagctcgaaatgaatgttgaacctctgagcaaactcaaacgacaataactttttactcggatgtctgatagagtccccgtatatatcgagacgcttcaaattgaatgttgaacctcatagcgaattcaaaccacaataactttatactcggatgtctgactgagtcccgtaatatatcgagacgctcgaagatgaatgtttaagctttcagtcatttcaaacgataataactttttactggatatctgatcgagtcccgtatataacgagacgctcgcaattgaatgttgaagctctgacctaattcaagcgaacataactttttact

SEQ ID NO: 195154 - DNA, 401 bp, Glycine max
  unsure (1)..(401): unsure at all n locations
ttgaatgcactattcaatggagatgacaagaacatcttcattctgatttcactngcacagnggccaaagatgcatgggagatcctgaaaatcactcatgaaggaacctccaaagggaagaattccagattgcaactcttggctacaaaattcgaaaatctgaagatgaaggaggaagagtgtattcatgactttcacatgaacattcttganattgccaatgcctgcactgccttgggagagaggataacagatgaaaagctggtgagaaagatcctcagatccttgcctaagagatttgacatgaaagtcactgcaatataggaggcccatgacatttgcaacatgagagtagatgaactcattggttctctttcaacctttgagctatgactctcggat

SEQ ID NO: 195155 - DNA, 308 bp, Glycine max
  unsure (1)..(308): unsure at all n locations
ttgcatttcttgcatcaactacctgaatatatgataaaaaatnggatataatactacaatacacttaggagaaatagaaaactagatcaactaaatggttcaagtaatagacaaacccgctccaaggtcaatgtcttggtaatgcgatccttgctatcttggatcctatgggtagataatacttccattagctcatgggaactgcaacccattagcaaagcaacatttgctacagttttcaatagaaaagaaaaaccatagtcattttttagtaactgaaatttcaatataccctctatgttattcat

SEQ ID NO: 195156 - DNA, 392 bp, Glycine max
ggacctatgatactcagctacctcgaacccacagtgacaatggcagtgagaacttgttcttttctctcacctcatgtcaccacgaaatgtacctaaggtttaccaaaacgacacagcttatgtacaatgaagatatgaagcccagacgaaatttacctaggtaagttggcgatggacaacaaaaagcgcgatgaagaactgttagtcgtcttttatgactaacttttgtatagaaaagttgtccaaaatgtatatatttcgccccaatctatgggtctttttgtaggaatgtaaatatttcttggttagattttattattctcagtaaagacctttctcatgggaataatgtaaatttcacttcaatttcacgtaaaaaggagacaatttgg

SEQ ID NO: 195157 - DNA, 453 bp, Glycine max
tctatcttaagctttatatgggcctctagatgtattgtcactagtgaggatgtgctgttgggagaaaaaaaactaggtggcttttatcaaaatcccttgaatgacacccaattggacatgaccatgacattggaaaatgctgatgttgacaagtatgctgcggaggacttgatatcagacatcaaagcctatgagatggtgtttgatttgtatgtgggtggacacattggttttcaggttgggaaattgcagatgaataatgttccctttctagcatcttgtcatcaaatcaagagggaggatgtggattttggaagacagcctgaatgtgatgttaagctgtttgctgccaggtaaaattaattatctcgacatcattgtctgttttcaaaagtttgtgttggaaatactgaataaggctaggggtttttattattggttttagctttggtt

SEQ ID NO: 195158 - DNA, 430 bp, Glycine max
  unsure (1)..(430): unsure at all n locations
tatcaccttctcgttacccttcaagatcttttgttcaatgtatccctcctggntcaccattttctttcggtgttcaattcaggcatagttctgagcttttcaccaccctttggactccccaatgggatggccaaacctctggctcaggatcattgtggccataaactatagcacacgcttcaatgccacagagggtgctgagttcctcaaccttcttcagcatccccttcttccttttcttgtatgttgccctccttgcagcatcattccctatgaatgcgagtttcnacctttttctagtcatgacggtgaccagcaaaaatggagagaaactaanagaaaattgaaaagagtgataattgtggtggttttctattgccaccaacaatctctntatatggaacaatntgatatgcgtttgacttttctg

SEQ ID NO: 195159 - DNA, 385 bp, Glycine max
  unsure (1)..(385): unsure at all n locations
agcttgttgtgccatccccatntcgacctaaacccatttcgggttcatatctgtctcttaacataacccgagccaccatcaaagtggaaccagataagcgtggctccactggaggagaatccacataagcattgctcacaatttctagtgcttggaatgacatttccaacgactcctctgcaacctcaacatatggcgtagaagacgagaaaattaccagtatgtcttcctcccctaacactatgaccagctgccctttcaccacanactaatttctgatgcagcgttgacgggaccatcccaaccgaatggatccaaggacgacctaacaagcaactgtaagcagggcttatgtccattattnggaaggttatctgacatacgt

SEQ ID NO: 195160 - DNA, 343 bp, Glycine max
  unsure (1)..(343): unsure at all n locations
acggaacaactgagcaaaatggaagagaatatgttgacaattattgatcaatataaagaaaggtgaacctagctgctantcatgggtagaggctgtangatgaacatgcaaaggtattggctttgcaaattgaaatggaagcaagagagagggtgatagaatcattgcacggngaatctatganatggatggataggttccctttcactctgaaagggaggtaagagcttccaaggttgttagccagagccaaggcaatggttgacaagtacttggctctcaatgaagttcatggtctttccgatactgccaacacatggtcgaactaatgtcccacataatt

SEQ ID NO: 195161 - DNA, 157 bp, Glycine max
accaatgcccctccactacaaattcaactttgggtgagtgtagagggcacaactcccactgagtggattcacgggcgccccaacagacagctgtagggggggttaatatccattatttggaaagtgacttgataggcgtgagggccaatttgtactg

SEQ ID NO: 195162 - DNA, 415 bp, Glycine max
  unsure (1)..(415): unsure at all n locations
agcttcttatccaaagctcatcntggnagtgatactccttctttctggcttattccctagaggatggcgcctnttctcacctcttctcctttgtcttccgctacatctccatggtggaaaatcctcattaaaggacctcattgaaccttatagatctcacctccataaaagccccacaagcaagcttacatcttatggtaatcagagcacaaaagcttcaagtaggtgctccttaaaccttcattaattgtttgctctaccttctctttcattggtgtttcttcatttttctccatgtatctcctcagatgtctagtgctaaatgttgctaacatgattctttagaatttccaccgtatacactatctatagacgctagatttgattttctatggtcaaaattcttgttcatgtc

SEQ ID NO: 195163 - DNA, 317 bp, Glycine max
  unsure (1)..(317): unsure at all n locations
gattggaatagttttcttataaactacccttaaatctaattggttatatatattgtacatttacttatattgtgttaaataaaaatatcatcatgatttgtaggtttaatggtcgtttgttacatctaaaaagaaagataataggaagggcgaaatggtcttttcatgaagattattggccctaaattcgcccaggctagcatattgcttgcctgngctaaagagaaaactttatccataagcaagccactcgcttgggcgagctgattccttcaagcctaatcaagaagcttgcctangtgagttccccctgcact

SEQ ID NO: 195164 - DNA, 445 bp, Glycine max
  unsure (1)..(445): unsure at all n locations
atcctctgagtcttgctgccgtatgcaagcttctccnccaattttctataaatagggtgttatgtgaagtttaaaagggctcagccccttatgcacttctctctcttcgaattgcttatgaaaatgttcccgtgaaaaaatccaagccgaggcgctttcgtaacgtntccgtgagtgatttcgcgaaggttttcgaccgttcttcgacgttcttcattcattcttcatccgttcttcgttcttcaacgggtaagtgtttcaatccgagactttcaattcatctcttgtttnttaagctttcatctttatttcgttcatgttcgattttctttcttccatctttaacgcgcttttaccggttatttaagccgtcttctcacctaataaatgataaaatgaatttcaaccgatcattcgtgttgtaatctcatctaatcacttttaa

SEQ ID NO: 195165 - DNA, 303 bp, Glycine max
  unsure (1)..(303): unsure at all n locations
aaactatattatctacacacaaggacacttctctatattttcatagagggtgttcttcctaatgactgaaagaacttgcccgaaatgtcctaagtgatcatctacgctcctacatgtcactaaaatatcatcgagataaacaactacaaatctacctatgaaaacccttaagacatgatgcataagcctcataaaggtgcttggtgccatactgaagcccaaaggcatcactagccatncatacaaaccaaacttggtcttgaaagcggtttccactcatcaccctttntcatcctaatatcg

SEQ ID NO: 195166 - DNA, 413 bp, Glycine max
agcttcttatctaaagcacattcttggaggattatctccttctttcatggcttattccctagaggatggcgcctcctctcacctcttctcctttgtcttccactgcatctccatggagaaaaatcaccattgaaggacctcattgaagctcatagatccagcctccatagaagccccacaagcaacttccatcagaatacatatctcgaaatatggtcactaataatatcaaggagtgtgatgaaggcagtgctatattatacaggactatcgattcaagtacaatggttgtgaaacaagagttaagttcctaagtttgagtcacaaagttgtacctataaccaaaccaatagttaaagattcaagactaattaaggttaaaaaatgttaaacaacttctatttgctttaatt

SEQ ID NO: 195167 - DNA, 310 bp, Glycine max
  unsure (1)..(310): unsure at all n locations
tacatcaccgcggctgcagcttagccttcctgtcaagtataccttttatttcaatattagggtttggaagtaaaattcagattacacagtggtaggaatgtctcctccacctttaagaacctaanaatcactctaaaacctataatcctcttgaaaggtgagagttttggtgcttccttgcccttgtgcgcctctatttttctctctacgctcttcgatatcttgatttttccaacttcagccttaaaaagggctttctgacctcgaaggcttgcttagcgccattttcgcgttgagcgcaagttagtga

SEQ ID NO: 195168 - DNA, 393 bp, Glycine max
gaaattaaagatattcaagatggatgatctttatttctctagagtcttagaaagggtatattaaataggaagggaattccaattgaagtagcaaaaggttcggccaagaaatttatagttaaaaagtctttttccacaaatttactctctggtaatcgattaccagaggatgtaatcgattaccagtggccaaaacagatgtacaacagctattaaaatttgaattcaaaatatgcactgtgtaatcgattacacatatatggtaatcgattaccagcaggttctgaacgttttcattcacaatttaaagcttgtaatcgattacacacatactgtaatcgattaccagaagaagttttcagaatacattctcaacaatcacatcttttactt

SEQ ID NO: 195169 - DNA, 389 bp, Glycine max
  unsure (1)..(389): unsure at all n locations
atgagacccttccaacaagatgcttcacattctaacgtgctgagactgtgaggtagttggccatctctctggtttataatatatgcgtgtggaactcacttgagttcaactgaaggcaaatccattccccttatttcttcgacctttgttgctttagaaagaanaacctcccattctcaagattctaaatggttcccaaacacatttttagttaactcatttggacagatcacagatgtgtcgaatagagcaaaataaattacaataattttatccttacagtaataagaaagagtttatctacttttatatttattttcattatactgagatttaactcactacattcaaaacatactaatctcttttaaaaggtaatctgttaataa

SEQ ID NO: 195170 - DNA, 281 bp, Glycine max
  unsure (1)..(281): unsure at all n locations
tcccgacggccncaacagcaagaaacaaaaacacacaccccgagagagaaagggggaaaaccacgacccacccaaaagaggaccgaacccggaaaaacgagcggaaagcacaccgcgaacgaggaaaacggcggcgaggcacaccgggaacggcggccacagcaaacagcctacggcaggagcggacccaagacaagaaactcggccacgagcccgcaggaagcaggcgacccacaagcgccaaacaacaagacccccaagaagaaacaccaaagaaaaga

SEQ ID NO: 195171 - DNA, 351 bp, Glycine max
gcatgcaatcttagaaagtaaagctttataagacaagaatggtgaaagagaagcttaagactgcatgcactacggtcaagaaagagtgtgatgagctgaaaaatatcaacctaaccacggttgaagcattagagcgggaaacataaatggcctgataggaagaatggagtaggaacaagttccgaggggctctatggagcagtagtaacgagctcaagcttatgatggccaagacagatcaatcaaggatgcaaaatatggtgttataaggtaagttaaaggcttgtcacaggtctaagagaattttgacagaacagttgagcctaacaaaagagaatatgttgataatca

SEQ ID NO: 195172 - DNA, 357 bp, Glycine max
  unsure (1)..(357): unsure at all n locations
tacccccatttttactaaatgcactccccttcttttttttggtaatctttttccgttacgttacgaaacttcacgaatttcgtaaagatacttagttttcttcagcaaggttacgaatccttacggattatgtatttactcttttntagctttcgaagaagttacggaaacttacggattgcgcaaaaacaccttttttcgattttcgccacattacggaatttcacggattgcgcaagcctgcttccttttgatttttgacacgtctcgggacttcattcattgtgcaatcaaggacgccaagtgtctcgaagcagccaatcaaaggttgtatatcatcaaataataatccccgga

SEQ ID NO: 195173 - DNA, 367 bp, Glycine max
  unsure (1)..(367): unsure at all n locations
agctagctganggaggtgtttaactnnttactttngnttatcatagtaataatatgggggatggggcactcgcatanattatcgatttgttatgagttattatctacaaaagagagttctctttagtcttggggttggggtggggacattgctttgcaatatgcatattcgcagctgtggttgtgtaatagtaatagcattttttaaagcatttttaatagcatttttgtgtaatagtaatagtgtagtctttaaaataaagtaataatccttagaaaacattctctattatcgtaataaacttttgttagtttatttaaatttaaatttatcatcttttaccatgatactattaaatcgatgataa

SEQ ID NO: 195174 - DNA, 335 bp, Glycine max
  unsure (1)..(335): unsure at all n locations
tctcattgaggcttcattaatgagtacctggcagagtttgagagactccgtaacaaaatgtatgtctcgctccaccttttcttctcaattggtttgtctccagattgaacccacagttgtggtgtgaagtntaaagttctccagctattttcgcttaccctggcaaccgctctggctaagcttcaataagacaatatnctggaccgttgtcgccattctagagctcaatttcactttccccctccgtcaaacccacttgcggcgtcccttgtgattccaaccctaggatccctatcaaatgcctctcatcgaaggacatggtcattcgacacaac

SEQ ID NO: 195175 - DNA, 427 bp, Glycine max
  unsure (1)..(427): unsure at all n locations
cacccgcggcatgcaagcttatgatacttgttatatgtttcttactatttatggttcattgatttttatattaatgtcttttatgataaactcacccctcgcaatttttgtattgtgtggttggttcttgtgatgatcgcgaactcttgttcgtgagagtagaatgacaaaagtagagtacgagaagtgagattcttttgtggagccgccgagctgacgtgatgacgttgggattattttgggagagagttgttgttgtttacaatataaaaaggactctccaaaattcatctcaaatcaaaatctaggtatttcgggtcactaaatgaattagttttgggtcanaacacacctaaagctccaaatgagttatgaagtccgatgattgggaaatttgagacactagacttgatataccaacttggaa

SEQ ID NO: 195176 - DNA, 416 bp, Glycine max
  unsure (1)..(416): unsure at all n locations
caaaggactttcgacacctactatatgttgacttgaccaacgatgttattggaatactgcgacaaactttcaacaccttattcacacattctgataagttggctgtcatgtgaccatatcttcgtccagatgtatcataagccatgctccatntttcctttgaaatgtgatcaatccatgttgctatggctggactaaattgacgaaatttttctaagttttgatcaaacacatgcttgcaatgagtgtacgctgcatcanatttgttaccatcaaaagttgtatgtagatatgacactcaaattagcttaatgtataaaataaaccttacccaatttcttgaacatctcttnttgtntcgggttgttgaatatgcgattgaaattgctctctatgtgttggacgcagtacacatg

SEQ ID NO: 195177 - DNA, 428 bp, Glycine max
  unsure (1)..(428): unsure at all n locations
tagcttgagccatttctaacgacaataactttttactcggatgttcgattgagtcccgaaacatattgagacgctcgaaattgaatgttgaagctctgagccaattcaaacgacaataactttttactcggatgattgattgagtcctgtaatataacgagacgctctgaattgaatgatgaagctctgagccaattcaaatgacaataactttttactcgggtgtctaattgagtcccgtaatatatcgacacgctcgaaattgaatgttgaagctctgagccaattcaaacaacaataactttttactcggatgtccgattcagtgacgtaatatatcgggacgctcgaaattgaatgttgaacctctgagcctattcaacgacaantacttttactcggatgtctgattgagtcccgaatatatc

SEQ ID NO: 195178 - DNA, 256 bp, Glycine max
tatacattcaatttcgagcgtctcgttatattacgggactctttcatacatccgagtaaaaagttattgtcgtatgagatggcttaaagcttaaacattcaactttgagcgtcccgatatattacgggactcaatcagacatccgagtcaaaagttattgccgtttgaattggctcagaggttcaaaattcaattttgagtcgatatatttctggacggaatcagacatacgacccaaaaaatattgtctgttgag

SEQ ID NO: 195179 - DNA, 431 bp, Glycine max
  unsure (1)..(431): unsure at all n locations
agctntgcggatttggtcttcgctggcgaaatgatcgaagtgggtctaaaaagaggcaaatctgatcatcatgctttgataaatgcaaaaaatttggggcaaatgaagagggtgagaatgagggagaaacccatgctgtgactgccattcttatacagccaagtttcccaccaacccaacaatgtcattactcagccaataacaaaccttctccttacccaccacccaattatccacaaaggccatccctaaatcaaccacaaagcctatctaccgcatttccaatgacgaacaccacctttagcacaaaccaaaacaccaaccaagaaatagaatttgcagcgaaaaagcctgtagaattcaccccaattccggtgtcctatgctgacttgctcccatatctacttgataattcaatgtagccataaccc

SEQ ID NO: 195180 - DNA, 220 bp, Glycine max
ctgacagtcaatcgcaccacgattctggaggcagctttctacatagatgttcctatctgggtaccccagatgaaacctgccatgccgagatcaaacacaactcatatacttgatatatcaccacagtattggtcatcacacggatgactaacgccttatacgacaagattgaagaacttatacaggtggggtacttagtctaatgcgttcagaggcccta

SEQ ID NO: 195181 - DNA, 301 bp, Glycine max
ggatgaaacatgggagtgtctaattgatggtattcttcatcaacagagaaggataagaaacatgtcaggtaatgtaaagtaaaccttgtattcttttattgaatgcaattgttgtttaaaacttaaaaattcaattgtttatttctatccaaagatttagatattgaaacaagagttacagaatttggcattgattgaaattgaagagatattacaattgaacaaaaaatcgttaaaggattatccaaccatgccctttccaagaaatatgttctagtcatggtttggaatagatatatat

SEQ ID NO: 195182 - DNA, 321 bp, Glycine max
gatattcggtaaaagggaaaaatagcaagaatgaaattacttggtgtaaatcctagtttcaggcataataagagaagatgcccggtccaaaatgaaacagcatgtagttcatagtaagatagcaagaatcttgtaccaacaattttttttataaagatccaaatttcaaaaggtaataaacatagaaaatagacaagctgtgaaccaaggtatatgaaaagcattaggatatagttctataattattactagaattggagaaataaacaataaatgcttccctagataacccacaattaattcacaaaaaaatacatgtca

SEQ ID NO: 195183 - DNA, 452 bp, Glycine max
  unsure (1)..(452): unsure at all n locations
agcttatccttattgttgtaggtgtggttcatgtctgtgtaaatagacaaataattcatttctagaatagttcatttttctttaaaacgtggtttataaagatcaaaacattttcaaatcttggttttggttcaaaacagatttttttttccctttcatttgttcaccaaaaaatgcacacgtttttaacttcatttaattattattgattaaaacattttcatgntttgatttgattcaacacacgttagattttatttcttctttcatttactcaccaaaatttggaacatatataatcgtattatataagaagggaaacacatttaaatttttgcattaatttttataaaatattttttattagaaatcaaataaaagtataaattaatatgaaatattgtacatttatttaagaaattttgggtttttaatttccatcaagaattcta

SEQ ID NO: 195184 - DNA, 391 bp, Glycine max
  unsure (1)..(391): unsure at all n locations
gcagttcaccaagatgtctttctcgcctgatacgatgaccaaatgcccttccactacgaattttcaattttggtggagtgtagagggaacaactcccactgagtggatccacggacgccccaacagacaactgtaggggagttaatgtccattatttggaaagtaacttggcatgtgtgagggcctatctgtactgtgaggtcgatctctcccctaacctctcggcgggtgtcgtcgaaaggcacaaccaccattgaactccgctntatgtgggaggcattgaatggtnatntctccaaagtgctcttatgcatcactgttaaacttgaaccattatcgatgagcaccttggctattatatggtccatacacttgactgatacgtgtaaac

SEQ ID NO: 195185 - DNA, 408 bp, Glycine max
  unsure (1)..(408): unsure at all n locations
aaaattaccaaggacagtgctaaacatcttttctccaattttcattntccttcagtccattaattaggttattaactccaacttcatcaagtctggcatctaagaaatgaaccataggaggcactggcaaatacttaagtactattcataaatggccaaagtataataacattacagtcaccttaacatcatcaacggctgaaaaactgaaaatctggatgactgacttgatgcagtcttaaccagtcgtcagcaccctgcaaaagagaccgctggcattcatgtccaccattangagtccacagagatcctctgaacttatatgaagcaagaccaacaacaggtaaagacantttatggacatggtccatctcantangatgtggcatgggagcctgcactctttgt

SEQ ID NO: 195186 - DNA, 298 bp, Glycine max
  unsure (1)..(298): unsure at all n locations
acctcatcatccctcatagnctttatatntgggagcctatccaatcctngngnncgttctctcagccactnangagagccgccgaagatcccatgactggctcccctagctctttgtcctttcttcatgcccgatcccatgccttgcgaactccttggagtaccctcgcgttgtggcactgaaaccccatgcgatgaaaggcatgatgctttcatctgatggcacttctcttatggggtagccaagctgtcttatggcgaggacgggattataattaatactacccctttgtcccatc

SEQ ID NO: 195187 - DNA, 279 bp, Glycine max
acccggagatatgtcacgggggtcaagagaccttgtggacgtcaggtggggtgctattgcccaaaaccaacttgaccaatcccgacccaccccgaacatagtcggtcagtgagaacctgtgatgtacctaaacaggcgagcttcctggcagtctacagataataggaacaaagaccacgaagcaaggatgtttgtggtggctggccagctctgaaacttgattgatatgtgagatatggtctctggtaatcgattaccaacggtgggtaatcgattaca

SEQ ID NO: 195188 - DNA, 346 bp, Glycine max
  unsure (1)..(346): unsure at all n locations
agcttcgacactaccataagtaannatcgcatgttgccttactatcctatgcaaacaaacacatgaaccctgttctgcaagcacaggatgcaagtatactaagaagagtgctatcaacacacttctaacacgatctttacttattaaaaattataaaatccttaataaatctcattaactactagtcaataatagaaaatatgttcaaaatagaatattaaaaagtgtgttactaataaatacaagataaatctttagagtaatacacacatagatgatggatcatacctgaatcgaattnttcttttttccagactttgaaaacaatgcaagttggttgagcttc

SEQ ID NO: 195189 - DNA, 375 bp, Glycine max
  unsure (1)..(375): unsure at all n locations
atcatgatattggtatcattgagaaaataaataaaattaataagtttgccacagagtagtgactatttntgtgggaagaaataatacaggtttccgtattaaaagaagaattataataaatgggtttggactaatccgtgcggctccttacacgagtattatccgatcatctttatgtctatcatgcaaatgtaatgcaattttttttcttagtaataactctctgatacaatagatcgcttttattttttcgttcttctttcctacctaatactgctatacagacaccaggtattttcatttcttttctgagaaaaacaatcaaatacctgactgcgcctgtcatttgtctcgtctcttgatatacgcgttctg

SEQ ID NO: 195190 - DNA, 349 bp, Glycine max
  unsure (1)..(349): unsure at all n locations
tctactgaatcttgtcggtccacggnggattttattgtggaaattgttgcctgtcaagatggatccgaaacaaacactgaacaattagtgtttcctgaactaaccgacatggtcttatatgacctacgaagcatccagcatttctacagggggagacatcctatatagtgttcaaaattgaagaacttggaagtacactaattgtacgagaagctaaaaacattctgaaccggagaaaggagcaatgaagaagatgaagcacttttgtcatctggaaaagtaagccatatagtgagacataaatggagagtgatattgtaagatgtgtggcatactttaaaaagatata

SEQ ID NO: 195191 - DNA, 326 bp, Glycine max
  unsure (1)..(326): unsure at all n locations
tctctatattgngcgccagttgtagaatatcatatgtgaattcattcgacccaatatgaaagcacagagtaagaacttgtnacttgtgtaagaagtttgtctgaaattcttcacgcttgatcatctccagtcctatttcaccgagtgacaggcactgtaagttggatgtatgctaccaagagaaaccgatgaccaagcaaaagcaggttanggaggttgtaaaagagatgaacctgcaggctagctagctattaataaagtggaagggatgttgatacggtatgtgcctaaacaaatntatttatttgtaagtntaaaatttagat

SEQ ID NO: 195192 - DNA, 460 bp, Glycine max
  unsure (1)..(460): unsure at all n locations
agctagtcttgtagtttgttantaaatatatatagcgtcagaggtttcatgtgaatgcattgggatgaataaagtggtacattaactgtttctgctggaagttnttcagtaccaagtgacaacttgctacagaaaatgcatgtgatagaataatgtgtctaagtcattgttgaccataaaatataaaaccagaggggtaaatatattttttttattggcaaagaagggtaaataagtaatcactcttcgaaatgatgactagaaaaacaagttatcttgacttacaattgtctatccaggtaaaaaaatctggtcatttgtatgcaatcttactatagaactgaagaggctgtggcaggcataaacaatgaaataatattgctaacttcagtccaacactgagattttgtatgtgacttaagtctaagatgtcattggacctacattctcaatgaatata

SEQ ID NO: 195193 - DNA, 449 bp, Glycine max
  unsure (1)..(449): unsure at all n locations
tatatcgcatgtctgattacctttttaactacaaaacttntgccaagacttgaacacaataatttttactctcgtattgctttcataaattttctctttaaattgaagtgcaaaatagttattgacacctgctcaatatgctatgcttgggttcttttatctacgctgcctggattaaagcttgagaagaggaaaggaagcaagcacagaaagcaatttgattgtaattttccgtacaattcattcattcatcctttgttgataaaaatgtgcttacatatatcgattacaatgtaataaccattggcttcttgattgtacttcaagcttctgatgaatttgcttccatattattatactggcctgtgccacactcatagtcatacggttatatatgccgcttttttgtttgatattgctgtcctctgattgacagacaatcacacaat

SEQ ID NO: 195194 - DNA, 356 bp, Glycine max
  unsure (1)..(356): unsure at all n locations
agctttttggagtataaacatgggaccaactctttntatttcanaaaaaatgttgtatctagtcaaggtctgagagaccatacaagtttcctagcgatttctaattatgtgggccattaagtctatcatatgttgacaatagccgagaagcccatgaatctcttcgggggcggagtaggtgtccgccatcgccttggccttggctaacaagcggggaagttcttgactcccgttcaaggtaagagcaaaccgatccatccacatggttgcctcttggtgtaaagagtcgatcacccttcctctagcctctttttccgcgtatacttgngcatactcgtccgcgatcctatgctcgt

SEQ ID NO: 195195 - DNA, 347 bp, Glycine max
  unsure (1)..(347): unsure at all n locations
ttctagcttttcattggtgtattgtgaaccccttgtatctctatattatgggagnatgctcaaatatatagggcaattctggtttggtttcttgcttgaataagttgaattaagggtgtgtatgggatggccctatgcctataatgcanttttgaacaatgggacatgccacattgtccccgttctcttgctattgacgcctaaacgcgcgcccaccaagtgttcggtgaaatgcctcaatggcattaacgcgtgacttntgtaggaaacaacccatggggcattttggtttgtacacattatctttntttggaatatgtattcattcctgaaagaagctagagtaa

SEQ ID NO: 195196 - DNA, 424 bp, Glycine max
  unsure (1)..(424): unsure at all n locations
tcaagaaaacccattccgcaacctcaaaatgctctgtctctctctctttctgtcagctgggttcttcatcctattctgcgctcatcgcaactgatacttcaactgtgaaattgcttcatctctgtcttgtaattccctcctaaccgcttccacgtgaacctcccctggtaaaaacctacggagcatcggtggtttgcgaacataaacaacttcaaacggngtcattccagttgacacatgaaaattggtattatactaatattcagcccaagatagccaaaggacccanattttgtgttggtcagctagaaaacatctataatatgttctaataccacttatgtttgccatccatttacgatgatatctgtgtcatctcaaagctgtccttgagtttgacaactctttcaaaaaactgacaaat

SEQ ID NO: 195197 - DNA, 310 bp, Glycine max
  unsure (1)..(310): unsure at all n locations
attctgtccttgatatggctttcttatcttctgtgtaagtagataacttcattcttagcttaggttcatagttagactgctcatagtctntgaaactttttctctctttaagtgccttcagattgatgtctttagtttggaaggtctctccaaacaaagtttgatcccaaggaagaacaaaattgagggaacaaaggtgactcatcaatngttataggtctaaaagagtgtagaaaggcataacaaaaggctctgcctctctagctntccagactgtggcaccaagaggatataccatcttcctgtggac

SEQ ID NO: 195198 - DNA, 477 bp, Glycine max
  unsure (1)..(477): unsure at all n locations
tgcttctacaatctctccctgtttatgatgacatacctattataagaaacacatacaaactctatcttctaatcgatcactcacttaattccccccctttgttttttgagtttaaacttcacttgaagttaagttatttaattatatgagttcttgattcagtcccaattttttctccccctttggcatcaacaaaaagccaaagtgcgtatagagacattaaatcatacacaaactcataatcatccaagcattttaatccatacaacatgcaaggaggacaataattcatacataaactaagcaaggaagataataattcatccattaactataataaaatgtcagataattagaaagtcatccaagataaccaaattaaaacaactaatttagaaagtaatatactaattagtgtatcanataagtcataagacatcataacatataacaaatcattggtctaagtcactagca

SEQ ID NO: 195199 - DNA, 138 bp, Glycine max
tcaagcttgatctttactaacccgcgacatgatttatgtctggccactctccaaccttcgagccaatatcctgagtcaccagaaacctctacgcgctgtgagaatgcctatccatcccctctgtatcctacaagacac

SEQ ID NO: 195200 - DNA, 457 bp, Glycine max
  unsure (1)..(457): unsure at all n locations
gcttattattggataaatatttgccatatttatatgctttatttgaacatatacatttaaataagttatgatatatattagattaaactttaaaaatgggcttatatcattatacaaagtaaaacccgactcttataaaagctaaacaagtttgttttctctcttgtcatatattttgaagagtctgatgtgatttaatcttcatagtttatagcctattttatgtataaaaaaatatctcattatcctatcaatcgatttagatcaagatgggtcaaatttatataaaagatttcatgtaaaataaccctttaaataaggttgtagntcaaatcaaacctttaaaaatcatataccaaaccttataaaaatgtatgacgaataacatgtcgatctaaatatggcatattgagaaaataataatgagatactgagaattatataaatttatgacaat

SEQ ID NO: 195201 - DNA, 447 bp, Glycine max
  unsure (1)..(447): unsure at all n locations
tatgacataagttctaatcagatatgataacttattaaataagcaattgattagctaatctaacaacatctatgtattctcatgaattattatctatctaaaaacattttatttattattcaaaacattactttcacaaaaatcaatgtttgaacagaagtttattaacacagataattatcaattaaattgaaatgcattgaaaatataatgattgtntataccattatctaatcatgtatatgataaattcgcttatatttataataaatactttaagtcatttataagatgattgttatntgattcatatagccgaaaaattaaagtttcattaaatatttatgaactcacttcttaatagatatctagtttatgccggccaacaacttataataccaattatgacgcataatgaccgctgatatcattctttgacacaatatt

SEQ ID NO: 195202 - DNA, 385 bp, Glycine max
tgtattataaacatgctccaccatctacataatgggcaactcttccatataggtggactcagctcccacgttaataagcattaacattccagttcttccatgaatgacctaagacttataataacaaatacatgatgaattgctaaattatcaacacataatgcagcatcctacattttataaatatgatcacacctatcgattgttgctctctggtaacaaataacacatcaattcacataagaacccctcacaaaatatctaatatcctttctcaaacctatggacaataaagagcacaatggatcaagagttctatgacaacaaacaaaagctaaaccaaatgaaataccacaacccttgccaccaaccaatgtaatacatt

SEQ ID NO: 195203 - DNA, 435 bp, Glycine max
gctgtccgcaaagaaattatttaataagtatttaagggtcattacctcagtttttcttaccaagcaaaaatggatcatttttaaggtccaacaccttaaaaagatcacattccaagtaaaaagaatcgcttgataaaagataaaaatataaaaaagcaaatggaaacgcccttgtcgaccacaaaaagataaaaatataaaaaagcatataaaagggaaacgcacttgtcgaccacaaaaagataaaaatataaaaaagcatataaagggaaataagaatgtaaaaaaggaagataacttaaattgaagtcatatttgcacatttgattaaaggctgcagtctcctgtgacggacgcgtggggtgctaataccttccccgtgcgtaaatacaaactccgaaccttttacttatagttcgtagatcacgtcttttc

SEQ ID NO: 195204 - DNA, 432 bp, Glycine max
  unsure (1)..(432): unsure at all n locations
ttaacctcatcgtctctcacnagtcttatatatgggagccaattcaatccttgtgttcngactctcaaccgcttatgatagccgccgatgatcccattacggcttcacctaagctctctgtcctttcttcacgccgcatcccatgccttgcgaactccttggagtaccctcgcgttgtggtcactgaaacctcgtgcgatgaaaggcgtgatgctttcgtctgatggaacttctctcatgaggtagccaagctatcttatggcgaggacgggattataattaatacaaccncttgttccatcaagggaacctttagacatccttcgtatgaagatagagtcccgantcttccttccttcttggagaaaaaggtgtgaaaccagccatacatagagagccagtgcacaacaaacaatacttgcgccactcttt

SEQ ID NO: 195205 - DNA, 254 bp, Glycine max
tccataatccccccgatgatcccttaggtctggacctcacaattctacatgtgacccatttgcaacaagacactaatgccctgaaagacttttccaacaaaggattgctcccgcctatagctcctgattaagttctcacacctgaaaacccctgtttttcagcccatcatgactggccaattaaaacagatgaccgtgtcgggtaacataattttagagctaaggtggaccttgtcaacactcgcagaaaaaaa

SEQ ID NO: 195206 - DNA, 288 bp, Glycine max
  unsure (1)..(288): unsure at all n locations
aaggcgaaaagcttcngcataggaagaaggtctcaccggtgacgagatcgacatgatgaattgtttgcgcgtgggcgaaagacatgactatgaaagaactgaactctaggggtagcgaacaatcgttgaagcgctggtatngtgggaagagagatcacgaggataatcctacaagtatgcgggggcatgttccggtcacgtgtatcataccctaatttcagccggtgacctttgcttggagacatgcgacctttctttgggccttgggaggtgcctggcacccatcat

SEQ ID NO: 195207 - DNA, 357 bp, Glycine max
  unsure (1)..(357): unsure at all n locations
gcttacatttgtcatcagtatcaaccaccgggttaccggcggtgatggctttttgacgagctacagacaaaaatgcattcgtcattgattagcccggctagttgtcgcttttgccgtgactgctcttaccaccttttttacctgcttcagatgcgcgctgcgggtcattcttgaaattacccccgctgtgcttgccaccttttttacctgcttctgatgctctttcgcggtcttctgcaaaattgccggaaccgcctcgatggtttgccattactgacctccggctgggtatagacatcatatngcatagaattaacgcggcgtatggcggctgcatattttcgtacgtgggactaa

SEQ ID NO: 195208 - DNA, 473 bp, Glycine max
gcttttgtcactccacccaaatcgggccttcttgttgaccaaagctaacactgttgaaaaccttgtgaaagctgtgcaccttgaatacaaaaggcttctttcaatcattttctattttgtcatacaaagctacatatgcttgtagaaaaccatcttggcctaggtcgcgaatcatgtcttctatacaatgtctgacatcttcatcaagcggctcagtgtgagagacatatggcatgtctggcaattcaccatgccatatccattttgtgtaagtcggaatgatcccctcacatataagatgtgatctaatgtcatttattgattggtgtctcccatttccacagttaacacatagacagaaaaattttccatgcaaacatggtgcattgcgttcagtaaatggcaggaattcttcaaccccattttgatccctcgtactaatgcgtgatagtttcatccaacttcgatccatg

SEQ ID NO: 195209 - DNA, 262 bp, Glycine max
acatgagaacacacggtgtccaaagctaagttgggctgttgacctctcaaatgggccaagctaagcaagcttgagaacaggacactgttaaactacaggaggaaagaggaagaactggtgagcttgaccctccatccataatatgatacaatgcgtggaggcaacttattggcagctctacgtctggcaaaagagaaaaaacgtcattcgacaacgtcttgacacttttttttgggaatggaacacattgtaaggtaaatcc

SEQ ID NO: 195210 - DNA, 338 bp, Glycine max
aaccaaaaatagaatcagaaccccttataaccaagctgtttcatgaaaagtcatggtcaactaaaggaaaacgaaaaatgaactcaaagagaggaacaaaggagaattatctcgcctaagaccctgaaacaaccactaaagggaggagaagtgagctctattactgcacaacaccaatggacaaaagtctctaatgatgctttcttcgagaaaagagaattgtgaagagaagtgtgtcgagagagatagagtttcgcataaataagggggtgtagggagttataggactggaaagggttttctctcctacacctaagtatctgctaaactcacaaccc

SEQ ID NO: 195211 - DNA, 136 bp, Glycine max
gtcattgttattcataatccttcgaccccacagcagcacaaagggtgtaatatgaatataggatgaaccttcacagtaggcacggaaccatctatcttaggtctatgcaaccaatagcctatgatatgggaggata

SEQ ID NO: 195212 - DNA, 364 bp, Glycine max
  unsure (1)..(364): unsure at all n locations
catgcattcttggctactatatttaanatgctatatatactttttttatataaattaagagattctaatataaatataaaaaaataaaaaaatatttacttttagtataaacatgctttaaaaatatttggtttaatatgataatatactttaaatttgtttggttttaattaaatttaaattttggttttggttgttttagtatgaatatccttagaaacatatacccgcataccaacatatatatatatatataatataataatataagaatttataaattgtaaatttaaaatcgatgtaaacatgtgttattatattaataaataaatatcaacggctcgcattatgatttgtatgtgat

SEQ ID NO: 195213 - DNA, 405 bp, Glycine max
  unsure (1)..(405): unsure at all n locations
ctttttactcggaggtccgattcaggcgcataatatatcgagacgctcgaaattgaacaatggaagctcttgaacaattcaaatggtcataactttttactcagaattcctattcaggcaaataatatatcgagacgctcaaaattgaacaacagaagctctcgagaaattcaaatggtcataacttttaactcggaggtctgatggaggcgcattatatatcaagaacgctcgaaatgaacaatggaagctcttgagcaattcaaatggtcataacttttcacttggaggtcctattaaggcgcataatatatcgagatgctcgaaatngagcaatggaagctcttgagcaataaaatggtcataacttnntattcggaggttcgattgaggcgcataatgtat

SEQ ID NO: 195214 - DNA, 478 bp, Glycine max
gcttctcgtatattatgtgcctgaatcttttattctagtgaaaagttatgaccattggaattgctcaagatcttccattgttcaatatcgagcgtctcgatatataatgcgcctcaatcgaacctccgagttaaatgttataaccatttgaattgctcaagagcttccattgttcaatttcgagcgtctcgatatattatgcacctgaatcggaccaccgagtgaaaagttatgaccatttgaattgcgcaagagcttccattgttcaatttcgagcgtctcgatatattatgcgccttaatcggacctccgagttagaagttatgcccatttgaatttctcgagagcttccgttgttcaatttcgagcgtctcgatataatatgtgcctgaatcggaaatccgagtgaaaaagtatgaccatttgaatttttggagagcttctgtttgtccatttcgagcgtctcaatatattatgc

SEQ ID NO: 195215 - DNA, 471 bp, Glycine max
  unsure (1)..(471): unsure at all n locations
ctgcagcttgaagcattaaggtgcaaaattattgttgtaacctaaagggttgttctacattcccatcatacacgtcaaccccgtctagccacaattttctcaaatctttaatcaacggagtaagatacacatcaatatcatttcctggctgtcttggacccgctatcatcatacaaaacataatgtattttcgcttcacgcacaaccaaggaggaaggttgtaaatcattagcaaaacaggccatgaactgtgactggtgctcaagttatcgaaaggattcattccgtctgaagaaagactaacccttaggtttcttggatcctctccaaattccagttacaaccgatcaattgtcttccattgtggagaatcagctagatgttggagcaaccgatcaattattnttccattagcatgccatttaagggtttttgtaccatctgaattagcaaacaatctcttaaaccttg

SEQ ID NO: 195216 - DNA, 362 bp, Glycine max
  unsure (1)..(362): unsure at all n locations
cagccttctggaggaatcttctggagggcctaagtgggcctggttgctatttgcacccccctgtttactaaatgcacccnccttttctatatttttgtaattctttttgcgtaatgttacgaaactttacgaatttcgtaacgatacttatttttcttccgcaaggttatgaatccttacggattgcgcaaaaacacctcttttcgacttccgccacattacggaatttcacggatcgcgcaagcctgcttcctttagatttctgagacatctccggacgaaattacggtatgacacatagatataattaanatcccatttttacatctttaacccaacaaaataaaacttaaaaaactaac

SEQ ID NO: 195217 - DNA, 227 bp, Glycine max
aagcgggaggcttcatagaacggattctatcaaggcaatatgacctctaataccaaggggacttttctgagtttgagaaaaaacttgaattatattgaaaagaatcttaattaccaactaagaaataatagtgtaaaagtttcttaccaaggacagacaaaatgactaacccactaattcaataacaaggaactaaaatgagaaaatcgctagttttctattatgac

SEQ ID NO: 195218 - DNA, 370 bp, Glycine max
  unsure (1)..(370): unsure at all n locations
taagactctaaggactaacttcatcatttatcttgaatttttgagtccttgacttggattaaacttgagatacacttatcttgtggcatcatcaaaacttcatattaagtatgcttctacacttagcgttggttaagaccagcctaacttcatgtatgtgtgtgaagatatgttcaaggatttggacaaaacttttcctttttctgacttcgaatgtgatgttttgactaagacaaatgttgctcctatgcaancttatccgaatagctgggcctttatgaaggattctcaaccctctttcattttttgatatcactcccacgaataataaaattctatatttttattgggtcaacgcaagtgggatggt

SEQ ID NO: 195219 - DNA, 301 bp, Glycine max
  unsure (1)..(301): unsure at all n locations
aacattcatttttttatgaaaaaacttttataaatttctaaataactcctcaaaaaacttgattatcttatgaaaaataactaagggctaagattgtatattcgtttgtaagacaattaaaagagctagtcattatgcatacaaacaacaaatttgtttgatttatataagggctaataagattgtatattcgtctgtaagacgattaaaagctagtcattgtacaaacagacaacaaattcgtgtgatttatatacacccgacgatggctttgtaagacaaataatatcggngtttaata

SEQ ID NO: 195220 - DNA, 316 bp, Glycine max
gggcactattaatgacaaattccttgggataaaggtaatgttgcaatggtttcaaagcccgcactaaggcatacaactccttatcataagttgaatagttaaagggtggactacttaacttttcactaaaataaacaattggatggccttcttgcaacaacatagctccaatttcaacatttgaagcatcacactcaatttcaaaaagattttttaaagtgtgcaacaccaatatgggggcattaattagcctttgcttaagaacattgaaagcttctttcttgtttctctccccatttgaaacccacacttttct

SEQ ID NO: 195221 - DNA, 301 bp, Glycine max
  unsure (1)..(301): unsure at all n locations
ggcctgtccgatgtatcattaatgatggcccgattatgttgtgtactgtacaaacccngaatgggtttatgcatagacaacgaccgcatgactaacctgataaatgccaaaggaaatacggggaagtatgggttaggctataagcccactcacgcagatataaagagaagcatcgcgggaaggaagaacggtagtcaaagctccgggtcgagacaagaaggtgaacgaaacccgccctgccacataaggagaagcattataaacaccggtctggaggaccaaaggcaagtggtcccatata

SEQ ID NO: 195222 - DNA, 328 bp, Glycine max
catttcttggtaaaactaactttccaaatgtttgccttcgcaggaatggccccgaggaagcttgcctcaaagaggtccaagaaggacaaggcggccgaaggaactatttccgctccggagtatgacagtcaccgctttaggagcgctgtacaccagcagcgcttcgaggccatcaagggatggtcgtttctctgggagcgacgcgtccagctcagggacgacgagtatactgatttccaggaggaaatagggtgccggcagtggacatcactggttactctcatggccaagttcgatccagaaatagtccttgagttttatgccaatg

SEQ ID NO: 195223 - DNA, 478 bp, Glycine max
  unsure (1)..(478): unsure at all n locations
ctgatagcgatcttatttgcaaatatgattcatccttttatgaaaccctgctcaatatcaattcagatctaagatatgaatatttttccacataatccaaatccctaaaagctaggttgatcactcctaacatgcatctaagcaaagaaatgaaatatgatcacataactaacggatttgattagaaaatagagaattacatactttaattctacttctttcactcaacaatcgaagatttaattcatntggatcatgaatggtccacatagaacctcaaaagatgaattacaattcaagaaagagagagagaantttgtgattctatttttgtaaatcacaanaatgaactaaaagctttttttacaatgatgttacaagctcctatgtagagagctcgattacattcattttttcgccacaacatattttcattgtagcgaaaatacatttcgctacagtctgaatatacaacata

SEQ ID NO: 195224 - DNA, 359 bp, Glycine max
  unsure (1)..(359): unsure at all n locations
atgcctatgaccctaacactctattgtgaatttgtggactagatcttgaattagtgggctgaaccatggctaaaattcactaatcataattagtgaaattttggctccgaaatttggctccacaaatcaatttcaaattcaagtgaaatttgaatggaaatttaaatttccctccagttttttgtgacacttaagctataaaaagaggtcatgtgtgtgcattttatcaactctgatcattggagaattacacttcanagttcagacctcatttgaggcacanaatttagtggtccttctctccctctcgctccactcatcttctcctttcttcaagctcttatccatggcttcctatg

SEQ ID NO: 195225 - DNA, 325 bp, Glycine max
atatattcatctctaacaataagataagcaatcataaggattaattattagatggacatgacgtaagagtataatatatagaatcaatatgttaagctgaattggaccaactacataacaaatgataaggaatatgagatgaaaggtcaacgttgatgggaaacagactgagttgttaaggaacatacaacacacttatgcttctgaacctgcaaaacttgctattattttttaaacgtccttttaaccaagataactgccctcttacttttcataaaatccaataaaattaccgtgtacacaccacacccaccaccctatctat

SEQ ID NO: 195226 - DNA, 365 bp, Glycine max
tctcgactcaaagacagacatataagtctcacacacacaatatagaacctatactctaatgtcacatcctatcaaagcgtggtgttctcccgttctctagcatgaggatcttcatattcatccacctatttatcatctctcccgaacacaaagttcatgatcatcacatgatccaaacactaaccggaaacctgaagtgagatattacattgctaactactatagagagacaacacaacatatagtctccaaatataatacccttatcatatctcacattaattcatcacttatgcattcatcaaatcacaccgtttaatcttcaatcattatacacacgaatcacacactccgctcatgacata

SEQ ID NO: 195227 - DNA, 204 bp, Glycine max
ccggggtcagaaccttgggacgctaggggggtgctattgcccaaaaccaaacttgaccaattccgacccaacccgggcttatttagtcagtgagaacctgtgatgtacctaaacaggcgagctcctggcagttcacagataaaacgaacaaagaccacaaagcaaggaggcttgtgtggtggctggccaactgcgaactttgat

SEQ ID NO: 195228 - DNA, 349 bp, Glycine max
acttgcatcctatacttaccacttgtgatagccaccgatgatgccattgctacaaccctaagctccttattcttcctctccgctgtatatccagctctacagatactcttaagtatcttcgcattggcttcaatgaaacctcgcgcgatgaaaagaacgatgatctcctctgacgtcgcacctctcatagggtagtctaagtgtctcatggccaacatgggatgattattaatacaacccctcgttcccatcaaggtgacgtttaggaatcctttacacgaacataacacttatgcccctccttctttacatcggaggaaccagcatatggaacttctaccatacctgc

SEQ ID NO: 195229 - DNA, 299 bp, Glycine max
tagggcaatgctgagtttcttttttcaatattatgcactagtttatgatatacaggcaacagcccttatctattttaaaagatactatctgcaatggtcagtggaggaacatcaaccaaaacatattatgtaagatttgcttcagtcttatgaggacctctagactaaggatgcatcacttgtattttgggcaatattaagttgaaatagaaactaattgatcataatagggaattcattacttaatttattctaatattgtcgaaatttggtaggatgttcgcacctgcgtcagcatc

SEQ ID NO: 195230 - DNA, 334 bp, Glycine max
  unsure (1)..(334): unsure at all n locations
ctattatatgatgtaagtcatgaaacngataatctcttttattagaaaaatagcatttcgtactgaagtatatctaaaataaataacatgatcaactaggtaggatgtgagaaaaggtatataggaataatatagattatgtgcaaggtacgagacaaatgtctttcataatatgatcaattaagatttaaattatcttttaaaaaaaatcatatttaatttagtgcttaattgtaactcgaacataattgtcattaaaaaagattgtgagaaaaaaaaatactacgtgtataagaattgagattattcgcaatggtgagagaaatagtacata

SEQ ID NO: 195231 - DNA, 413 bp, Glycine max
  unsure (1)..(413): unsure at all n locations
ntataagcgcgggtctgggagactaatgtctgnggtcgcgattttctaatatgatgttctgagtacattggatttggtacgaccatgccctcctgatttccagctgggaaattggcgagtggaggaacgccccggcatttacgcaacgagcataatggtaacctttacgatcttaagagctctatagttgggcctaggctntagagttattccttttgtaaggctttgtgtctttcgttgctgaattataatacaaggatctttctcatctgtcctacgtctctacccattctcattcatttgcatgttacttcttttctcgaacggcagatccgatgacgagtactcccgatgtactaatacctgagacccgcctatcgacttcgagcaagaaatgaatcatacggaagatg

SEQ ID NO: 195232 - DNA, 247 bp, Glycine max
gtaaacctacttgtatcatagtaagtcggggcctggaagtcgtgtattcctttttcttgaagccatttgtgacaaaagaaccactaaaactatgttagcgtacttttattagatgtgaaacatgcattaaaaacttaaaaacatagtgagccctcagcgagagcatgctctcttagcgcacctgatgagaaataactaataggcttatgtgcacatgggtgcgctttgcaaggtatgaccaaaaaaa

SEQ ID NO: 195233 - DNA, 474 bp, Glycine max
  unsure (1)..(474): unsure at all n locations
tgcaacttggacataagcgacacaaatgattctcttagagataatgattgctttctcacgaagtctacaaataccgaaagaattgaagagttgaagttacaaactttgaacgaagcaatctctctagccttcaaactctctgaatttgaattttcttaagttgtatagcactcaaaacacattgtgaatcctaagagaaaagggtaatgttcttaattagtatattcattttttagatgttaaactattatgtgtgcacctaaccttaaacaaattggctagtttattttagagttagatgtggcttggtaggaaataatgcatggggtattaacttggagaagctaatgtaaatatatntgggtagagccagaagtggaagtgatcaatacttgtatagtgaaaacttgataagttatcaaatactagacataatctttatggtcaagatgaactagtctaaaattccttatg

SEQ ID NO: 195234 - DNA, 368 bp, Glycine max
  unsure (1)..(368): unsure at all n locations
tccattatcaatacagaacatttacaaccaaagatatgaagatgtgagatgtttggttctctgccattgaacaattcatataggagtatctttaaaatgggtcttaattaagccctatttaaaatgttacatgcagtgttaacggcgtcagtccaaaagtaatttggaagaggagtataatctaataaagttctaacaatctcttccaaagatctatattttcttttcacaacaccattttgttgatgggttcttggtgcagaaaagatatgctcaatcccatgcttatcacaagataattcacaatctctatttncaaactcacccgcatgatcactcctaatagatatagtcatgagattttctta

SEQ ID NO: 195235 - DNA, 377 bp, Glycine max
  unsure (1)..(377): unsure at all n locations
aacatcaatcatctatctttcaatcgtttttcaacatcatcgttcagacatctttcaatatctttctacagagggttctgagttatttctcttcatctttctaaaagggttggatcaacactttctcttccaagaaaagttctttggtcaaaaacttgcgctattcatattttttattctcttctccctttgccccaagaacagaaggactaactgcctgaattcttttggatctctcttctcccttacaaaagagtcaaatgactaaccgcttgagaatntttttgagtgcttccttctccttaagcaaaagattcanaggactaaccgtctgagatatcttttggttccccttacgaagattcaaaggactaacc

SEQ ID NO: 195236 - DNA, 456 bp, Glycine max
  unsure (1)..(456): unsure at all n locations
aactcagctngccttacatgcanatcattctcaaagggaaaacataatttttcatatttatgacctcacaataaatcatgtacacgtaaatgtggaagagagaacttgtttaccatctcagaatatggccataaaattcacatttatntgctttcaaccacattcatccaacagaacacaaaatatataacacttttctataatataaacacacgcacacacaggatgtgcttgtcctttctttgatntcgaaaatattccaaaagctctacaagcattcaaatgcaattgaaggcatcttgttttgaatagaaattctcataagtacgtacatgttattcataatgacgaanacatcacttgtgagaaattggtaatccattaatttattataatatatcataacaattctgtcttccgtatttttttaaaaaaatactacagagtaaccatgat

SEQ ID NO: 195237 - DNA, 377 bp, Glycine max
tcaccgaggctccgtacactttgaacgttctatacgatcccgggaagttcttaccgtcttcgtcgtcttcgttcgttcttcgatcttcaaccggaaagtgtctgaatcccgagctttcaattcattcttgttttgtttgctttcattcttcatctcatttacttttggtattattttcttctgcttttacgagctttcaactgtttatttatgccggtttctcgtttaatatttgataaaatgaattccaaccgatcatttgtgtggtaatttcggttaattattggtaaaaaaaaatatctttgatgaaataatagtataatgatcaaacatctctgaaaaaataatgttaatattcaaaaatcatccacatttac

SEQ ID NO: 195238 - DNA, 469 bp, Glycine max
  unsure (1)..(469): unsure at all n locations
actcagcttagaccaagcacacaaatcttgtatcaagaccctcattgtatggattncaatgttgagaagagacatgataatgggggaaatatggagcaaagtctcacctcacacaaggctataacatatatttatacttgttcaaactggatttacacctaaaattccaccataccacaatttgactcctcaacacccatatttaccggagagatggctctctgttcactttggtcatttgttgttctctctagcacagcccacactttctcataagtcctaaatgacatttcaagctaggattaactcactttaacctccaaataccactaaattcagatttgtcgtccaactctaaaacctactcttttccactataacacatattctactttctaacataagttacttacccttatcttaacgttttcataagcattagccattacattcagcatctataaaacct

SEQ ID NO: 195239 - DNA, 209 bp, Glycine max
aaccccaaaaccgggagaaaaaaattgttaaacaaacggactccaaagatcgagaaagagaccggacggaacagaaagaaaggaaaggcgacgagggaaagaagagcgaggacagggagggggggaaagggagacagggaagggaaggaaaggaagaggagggaagcaagggaaggggagggagggaaaggaagggaaggaacggaagg

SEQ ID NO: 195240 - DNA, 217 bp, Glycine max
gagatttttccatttgttatagatgtcactgaaaactctacaatgtgcttcagaaaggcccagacttgtcaagagtcagaagcaggaccaagactttcgtctgataactcccgttagacctgcccgcaccttgagctatggaggctttcgacacctcattaggacacagttctgttcagagataggcccggggcatctggaccctgcagtcaccaaa

SEQ ID NO: 195241 - DNA, 464 bp, Glycine max
  unsure (1)..(464): unsure at all n locations
actcagctcataaagttattggctgaacatctctgagcatggttttaaagttaatgagtctatgagaaactcatgatacaacagatgtgacatggaccattgctgctatgttaagaaatatgctaatagttatgttattcttgtcgtgtatgttgatgacatgttgattgcaagatctagtatgacagaaattaacatgttgaagcaacagttggtagaaaactctgaaatgaaagatcttggtccaactacacaaatcctcggtatgagaattcttcaaaacggatcagagggagatttgaagctagctcatgagacatataaacacatagttgttgatcggtgtttccttgtagattctaagaccaggaatacccctttgggatctcatttgaattnttcacatagcaactcttgttacatatgaataaaattttacatgtcaagagtaccatatgcatcac

SEQ ID NO: 195242 - DNA, 389 bp, Glycine max
aaaattacgtgactcataggactatagctagagccaaactgcatctaggacaaaaataaggctaggtaggggattgagtgccatatttcattcaagacaaacattggtcatattgcattttgaacaaaaagataggacaacattgaaaaccaatgataatacccaaaaggtagaaaagctgaaaatttaacaatgaacatacaccaacacattgaacccagaccaatgaggttgagtgtcatcagattggccacatcaaggtaagcaaaagagtcagactacatatttaaaaagaacctaataatttaacaatgacagagaacttcacaatatgaaaatacattccattttattgtaataaaagcttatgtgtattcacaaatcaagta

SEQ ID NO: 195243 - DNA, 317 bp, Glycine max
agctcccttgaacagattcctaaagaaactggagcttagctacacacacctctctaatagctaagctgacctccttgagaagatgaactataacttaactactcacctcctataataactaagctcacccccatgacaaaatgcataaaaagaatccctactgcaaagactacttaaaatgcctcaaaaggccctatggttcttatgagccttagggtagattattcctaccacacagtatgacatacctatggtgttccatatgagtactctagtttgtgttgaatctaaaaattagaacagacctacctattgag

SEQ ID NO: 195244 - DNA, 256 bp, Glycine max
caaccttcttaacaccataaactctctttctaccttcaccctcagtcttcattcatgggtgaagaagaataagcaaatgatcaagatcattgtgcataaaccataacctccaaatgtagaatgagaatgaactataaaaaggtggttcttcatgcatatgaaaacggattgcacaatcctccttacctcttatactccaatgaaactcttggtttcttagaacactaaagtcttctacaaatcagttttgcaagaa

SEQ ID NO: 195245 - DNA, 421 bp, Glycine max
cttaaaccaagtacctgtgttactaaagagaattaccctcatttaatgatgaaataaagttttataaaatttttaatatttggctcctttttacaaataagaaaaactaaatacttatttttgtgtgcctatatgaacttaaaaaatccatagaagctaacgcccccaacttttagtattctatatttggtatcagcagcctagatctagctccttagttaattttttttatgatcatactagtcctggaattggaaagatacttaacattttactttgggggtgctatgcctgatcatgagccaatcaaattaaatagtttttcaacgtgattttgaataacccaacctaaaataaaacacgcactctgcagttttgattgggaagataaagagtattgattttattataacagaaaaaa

SEQ ID NO: 195246 - DNA, 328 bp, Glycine max
  unsure (1)..(328): unsure at all n locations
ctcgatatgaaatatgtcatcattcatgctccccttcaagatgtggacattcaaataaaattttctcccctcacgcattgttatcttacactgagtgagagatatgcatatcagatgttactttcttcgataaaattatgatattaggatagntctctccttctggacgtcaagaaatataatgcgcaaaaatcaacatatattcttttctttaacgcgtacgcccaaacttcaaaggtaaatggaaataacaaccgctattgataccacgacctatacggtaaggacaaaaaaagggaaaactgagaagcactatatacacatctac

SEQ ID NO: 195247 - DNA, 240 bp, Glycine max
gggaattctcaaaggagatggaggttttttattagtacaacataaaagatggagagttgtcaatggccttataccaatgtgggacaatggtcttgctaccaaacagccccttgctttattgtgaagatgttaaacacattggcttgggcccaattttaaatgatggaagaccatcttatactgaagaaaggacacataagtgactggtttactcaagaaagaataaatggaaggatagtg

SEQ ID NO: 195248 - DNA, 414 bp, Glycine max
  unsure (1)..(414): unsure at all n locations
ctctatcttctcatgtggacatcatgcatcatcatgtagaagtaagaatattatttctaaagttagaaacttcttcagtgcataaaactctttgttttaatcgattacaaagctgatcgtaatcgattgcacaagtgtttataacatgtagagagagtctacgtcaatctaatcgattatcaattaaccgtaatcgattacataatttagtaaagacaatgattggtttttcgtgagtctttgtttaatcgattaccagatgattggtatcgactacttctctcttaaaagtggtcatataagtgatcacaaacactttaatcaattacatcaagaatctagttggtnacattgttcttaaaagtttccagatgttggaagacactttatcaattagatgagtattaatcgata

SEQ ID NO: 195249 - DNA, 416 bp, Glycine max
  unsure (1)..(416): unsure at all n locations
taaattnggtgcggcatgaaatcttcattacgaagtgcggatgcctgctgctggtgccaagggcgcgtctaaaattcatggagaataaaaagacgatacaagcgcggccagggaagaaaagaaggtacctttatgtcctgttactgattgggaatctatgtatgtattatgggaacttgataaatgagatggattgataaaaaaaaaatgtgaattggggtgggtgctaatgatgcttctcaacttttactcttttaattctcgggaattctaacgggctttcatcactagggaaagtgcaattgctctgattctatatcctttcttcgccggagtatatatctcttggctgtatgttatatgactgtggagatatagtagcatttgagaacatcaagagaaacttcgcatatagg

SEQ ID NO: 195250 - DNA, 387 bp, Glycine max
  unsure (1)..(387): unsure at all n locations
agtgttccatggcggctaattaaggatagattaccaactattttgatccttagnactgttgttgtggtggngaatgacacgacgtgcccattctgcagtattcatgatgaggatgctgcccacttgtcttttcactgcagtaagatcctacctctatggtgcgaatcactatcttggattggaatagccactgcacttcctcaacacccaacggagcactttatgcagcatgggcatcaggttactgggaccacaaagtctactatgtggatatgttggtgggttgcagtaacgtggaccatntggcaacaaaaaaatagaatatttctttaaaatcaacggttcaacagcagcaaagtatggatgacgctctgctattactttggt

SEQ ID NO: 195251 - DNA, 396 bp, Glycine max
  unsure (1)..(396): unsure at all n locations
gcttgattaattgtctctgcgcttatttacttttatgcttaaagatcatttacgagtaatctgggtatggggtgcttaatcacctaaccaatgtcttatgttaaatttctcttaataatttaatttaagggtggattaaatggttaaactgattaaggattaattctctcaacctaggataagaaacttgcttgtgaatcaaggggaagcaatgcattttaattctaatattttcctagtcaaatttactcgttgnggtaattacaaaagcaaacacccctccccccccatttggtgccattttctactatctgttatgaacaagtgatttattattgctcatttggaaacaacctaggatcacttctagtaccacattttaatgttatttgattc

SEQ ID NO: 195252 - DNA, 458 bp, Glycine max
  unsure (1)..(458): unsure at all n locations
ttggaggctggatctttgagcttcaatgaggtccttcaatgtagattntccaccattgttatgcagcggaagataaaggagatgaagtgagatgaggtgtcatccactatggaataagtcatggtagaatgaacttcgccaccaagaatgtgctctggataagaagcttacaaaggatgcttcaatggaggaaaaaaatgagagagaaatagatagggtggagcataatattataggaagaaaatgtggagagaatctaactttgattgtgtctacaagactctcattctcaaagtacaacaagtgttcatatacttttattttaacctatgtcctttcctgaaaaacttccttgataatgttcattgagaagctcctctgagacattagagttgagcctcacacactcttcttataactatgctcaccttcttgagaagcttcttgtaaacttcttg

SEQ ID NO: 195253 - DNA, 339 bp, Glycine max
ctttttttatctcatatgggcccgatggggcctatgtatgtttaaagcctcggaggaaagaggttgcctatgttgtagtggatgatttcttcagatttacctgggtcaactttattacagagaaattacacacctttgaagtatttaaggagttgagtctaaaacttctaatagaaaagactgtgcatcaagaaaccatgagtgccatggctaatgttgaaacagcaaggttactgattctgccattgaagcatactcatgagttcttgcgttcttcaccactcatattggatattgaaggaaaactgacttcaagatctgctgggtatgcctatgcca

SEQ ID NO: 195254 - DNA, 403 bp, Glycine max
  unsure (1)..(403): unsure at all n locations
acttcatttactctntatactccactcagacgtgcttaagacctttatttaagtcattactcgctctatctaaaaataaaataagttttcaccgatcgtttggattcgatcatccgttaatatctgtcaaaatgaattccgaccgttcggtcgtgccgtatccacgttggacatcaaaggagatgtgataatattacttcatcttcaataaatattttctagttagtgaagcggataatctatcggacgctttctctattggatgtttcattcttatttgattgactaataactaaagctgaactaaagcttaatacaaactcgccttgtcaagctcgtccacagaagtatgctcattgtaagctatcatttcagttttctacttatgtagatagagcattct

SEQ ID NO: 195255 - DNA, 340 bp, Glycine max
aatgtattaatcttgggtcttactgaagaattccaagtttccttataaaatcatctactattggcatgaaggattcagctacctcctttaaatgcccccataagttagaatgaatataaccccttatttcttaggggggtgtgctctagtgcttaattttactttgggagacttcgcatttatacaatattcacataaattaaggtgttccaacttgtcactcgctttaagaccttgttgctgaataccgaaaacccctttttctttgacatgcttagactatatgcatatcttttttggcaattttatcctaacaccggactggcctacacattcttcc

SEQ ID NO: 195256 - DNA, 292 bp, Glycine max
  unsure (1)..(292): unsure at all n locations
cagtgtatctgaacattaacactcacactcaattgtgaagagtcacatcctctcataagcactctggatatcgatacattggctcggtcatcgagaccactgattagttcgaataaaagacaagagatgtaactctttcaatggttttcagaatattctcaatgtatatacatcttcattggttttcttgacagacatgaatagtctataaacgcaagaccttgacttgtatttagtaactcttacaactttttaacaacctctgagatatcttgaaaccttngcttctcat

SEQ ID NO: 195257 - DNA, 376 bp, Glycine max
ttattaattaatcttctttcacccactctctccatatataaacccaccctcaatgctttcaaaaagtttaaaaaataattataagaaaaatggcaacatgtaaacttccacctacctaagttcaaacaaaaaacacccacacacacaaagaagttaaggaacaaattggaaccataagcattctctcttattggagaaggagaaaataatgtcaaaggttgaaggttccaagtacaaggaacttagagtacggagaattgcagagaatcaagcataaatagaagctttaaggttatccaaattggctgccattttcaaggataaaattcacaaggctacgcaaaaggataaaaggaacggtaatgatgatgatgat

SEQ ID NO: 195258 - DNA, 455 bp, Glycine max
  unsure (1)..(455): unsure at all n locations
tagagcttagctacacacttttcttattatagcttatctcacccctctgccagaatacatgaaaatattaaaaaaaagtccctaatacaaagactactcaaaatgccctgaaatacaatgcttaaaccctatactactaaaatggccaaaatacaatgcctaaaagaaggaaaaatctattctaatatttacaaagaagagaggacccaaccttggtccatgggctcagaaatctaccctgagattcatgagaaccccaaggccttctttagaagctctagtccaatcctcttggagtcttctatccaataccctcgcggcgtaggattgcatcaccccgaacacgatagcattccagatgacctcactacaaggacaatgactcttacctacaatcaanatctatcactagaagtccagaatccgtatgtagatgtataaaggactttgtccta

SEQ ID NO: 195259 - DNA, 323 bp, Glycine max
ttcttcatcgccaataccaagaagagttgggtctagccacggcccacgagcatagaatcgcggattaatatgcccaagtatatgcggaaaaaaaggctagaagaagggtgatcgactctttacaccaagaggcaaccatgtggatggatcggtttgctcttaccttgaacgggagtcaagaactttcccgattgttagccaaggccaaagcgatggcagacacctactccgcccccgaagagaatcatgggcttcttggctattgtcagcatatgatagacttaatggcccacataattataaatcgttacgaaacttgtatg

SEQ ID NO: 195260 - DNA, 384 bp, Glycine max
atattgtatcgtggtgtgaatcggttgttttgggcggatttttgacacagggaaccagagctgagttctttggtgagtacccggaaaacaacgttggaagattcgtaattctgaagctgtgggaatgcgaaacgaattaccaaaatatattgatgagaagttagggacgggagcacggcgaattgttggtcatatgaacgtgctttatgttactgattcgttggcacgtcaattagagttgtacattctctagcgacaatgccagttgccctagttttaaatgtttgcatcagccttggaaaaacgctttgtcctaggcaactgctcagggatactttctcacactcttataacgagctatgcatggctggttgcggtacagat

SEQ ID NO: 195261 - DNA, 404 bp, Glycine max
  unsure (1)..(404): unsure at all n locations
tcaactagtctaccatcagctagcaccccagatccacataattgctggaaaaatgttgaactaaatgataattctgcacaatattaaagggtaaaaggggtgaaaagatagataccaaatgatcataacaaaggagaagaggttccaaaagctgatattttgtttcataataatccataggatcatgtttagatggaccatgtcgataagaatttcaaccgtctacgagttctcagaagctaaacacatggaacgaaagataatattanccggtattaagacaatatataaaatctgcatattcaataaaaatgtagatgtgatttatgtttaatggcaccccangatacaaatccttcacagacaatattcaaatcaaactaggaaatatattttcatctatg

SEQ ID NO: 195262 - DNA, 394 bp, Glycine max
  unsure (1)..(394): unsure at all n locations
acttccagctggagctcatataccctcttgttgctggcctgntacttataatttttcaaaaaaatgctgtctggttttttgtttgcatatcctgnttttaactggcatgttcttttcttctgtaactgcaaaaaaatatttacttgttgagtggcttctaactttaataatctttaacaatttttaattaacgaatgatgcccattgctgattgcatgaacaaatgaataggaatccttccaatcctttgaataacttctcatgctatcatgcatgaggaatatagtgcaactctattcatatgccgacatatataaattcttgacccaatcaagtatgtgattaacctattatctattagtatgaagctctggctcgaatagtacatttcatg

SEQ ID NO: 195263 - DNA, 236 bp, Glycine max
acttaactgactcaacatgagcgcccctctgggccattacgaaggttatttattttttaccaggagtctttaaaaaaaggctacacctctcaatataacaacattatgttaattagagcaagcttatgcgccaatttccttactaacgttcacttgcacaagacattctattaactaaaaaaaatgcgcccatatacaaataaggcacccttcgtacctagattatatatatgtac

SEQ ID NO: 195264 - DNA, 384 bp, Glycine max
  unsure (1)..(384): unsure at all n locations
tgacagtaacaccatgtgattttaactgcattatttcattaattgactgtttttctatacgcatctaatgaacctcttccatcattgataatcgatagtggcttccctcttaattagcaaaactgcgaaagcttatattagttgatatgtttatgtatataagatttatatgaatgccattatgtctatcttatgaacatgtaattatgtacttggatgcaacttcaaaggatctactaatctcttattgcaagaatcgatagttaaatctctttatctaatgcatatatcaatatgcaattnttattataatattaccatcattggaacttacagcacgatattccttgtcattttcataggtgctacttttgtattgctcaa

SEQ ID NO: 195265 - DNA, 187 bp, Glycine max
atttttggaagccgcgccatttttgatcattcttgttgaaaaatttttccggaggtaggaatgtgtgattctctcaaatttgtatcactaaaaatatgctctaagaccccgcatgaatacttctcctccggactttaccttttctgtcacgcctgggtgataatgccaaagaatttctattgtctta

SEQ ID NO: 195266 - DNA, 254 bp, Glycine max
ttaggagacaaacgcttgagctaaaaggttttaaacgaagaatccattgatacaaggttggcaaatttagtaaagctttacaaaaattcttctggtatcataccaagagtatcattccagtgccaaatgttacaacacttaaattgaataaattgcctgtatcatacctattggatcaattaagttgaacgataccattctgatcataccagcaattcaaaaatttcctgccatcttatgggtctgatgcataa

SEQ ID NO: 195267 - DNA, 354 bp, Glycine max
gactgaatccgatagttgaaaagatttttaaaaactgagtagcacatgacattttcacaacataagattaccaacaaagttttactctctggtaatcgattactaaattgctgtaatcgcataccacgtacacaattgttttataaagttttcagattaaatttacaacgttccaattaatttcaaaaagctataatcaattactatgttttggtaatcgattaccagtgcctttgaacgttgaatatcaaattcatatgtgaagagacacatactttcacataaaagccttgtgtaatcaattacactgagttggtaattcattaccagtgattgattctgaataaatcaaaa

SEQ ID NO: 195268 - DNA, 397 bp, Glycine max
  unsure (1)..(397): unsure at all n locations
actggatgtatttggttacttggtaacccacctggccttgaatcagaaatctgtacctgttgcaagggtttgtggtttgtgctcctctgctgaccaccatacaggcctttgcccttccatgcaacaacctggagcaatcgagtagcctgaagcttatgctgcaaatatntacaatagacctccccaacctcagcagcaaaatcaaccacagcagaacaattatgacctctcgagcaacaaatacaaccctggacggaggaatcaccctaacctcagatggtccagccctcagcaacaatagcaacctgctcctttcttccaaaatgctgctggcccaagcagaccatacattcctccaccaattcaacaacagcaacaaccccagatacagccaaca

SEQ ID NO: 195269 - DNA, 428 bp, Glycine max
  unsure (1)..(428): unsure at all n locations
tactcagcttcagtaaaaaaattattcatttaaagactatgtaaatttgtggtataatgcctattaataccagaanactttgagagttatggttaacaaacctacgcatatangtttgaaatctcttgttctctgttaaagctctttcttaaaatttgtatagttgtaaagctctcaaaacaccttgtaaaacctgtgagaatagattaagtgtttatagattgtacatccatctataagacgattaagaactagtcaatgagccaacaaaaaactaatctttntatttgttttagaanaagaatactatgttntcaagcttggtgataagcatggtgtgtaagagctagaagtagcagtgagcaatacttganacttgttgaagtaagtgcaacttggtggttagccaagaactagacgtagtattg

SEQ ID NO: 195270 - DNA, 297 bp, Glycine max
ttttggcctaaccatcaatgctcatatatatatatgcctctctcaccaaactatagctgaagatcctttttgtgagctaattttgcactcaaacatttcaagtaatcctaaatgattctttgcaatcgctagttattttcctaatctaaactcaatcaccttttttcatatattcaaagtgactcgtgttctatccctttgcaacttactcaattgtgaatatctttcttattcttatacacaggaaccatatgtgaaataacggtacaatcatccatgaattgagttcatatcaca

SEQ ID NO: 195271 - DNA, 297 bp, Glycine max
  unsure (1)..(297): unsure at all n locations
ctattaatactcagctcgctattataaagatganggcgtgaatttttgtttaacttctgttctgtataattaagcacttatttgatgatggaccattcttcaacaactaatatattccagctcgatgaaagagttgacttaggagtttgatgctccacgtgatgaaatacaataagtctccgtattacctcttccacttggctataatttctaccgaattcttggtcctgtaattatatcttaaaagtctgatgctccttaagtaaatgaaagatcgattatagcatgcttgggtta

SEQ ID NO: 195272 - DNA, 429 bp, Glycine max
  unsure (1)..(429): unsure at all n locations
gcagcttttagtttagatgatgcagttgagtttgttctacctcttgcactcctctaatgactatatcatcatttctggcgctaaactgctgggagttggaagccatcttctcaattaaatttttggcttcaacaggagtcatgtctccaagggctccaccactggcagcatctatcatacttctctccatattactgagtctttcataaaaatattggagaagaagctgctccgaaatctgatggtgagggcaactggcacatagtattttaaatctctcccagtattcacacaggctctctccactgagttgtctaatacctgagatatccttcctgatggctgcggtcctggaagcagggaaaaattttctaagaatacttctcttatgttatcccanctcgtgatggaccttggagcaggtaatac

SEQ ID NO: 195273 - DNA, 500 bp, Glycine max
  unsure (1)..(500): unsure at all n locations
ttaagtgtaactaagtcctgacccgatgattatccccatagcctgtccataagacagacgcttgtggngatatcttanggtcccaccgaggagacaaagaccctaattactgtggttacaaagaatacatatgttcaactgttttataagtgccatgatatagtaaaataaaggagcttggataaaaatatcatacacacaaataataaaaatatcagcttaaatatttgtttactacattaaaatataaatataccttaccaatgcactaaaccagtaatttttctttcaacttgcaagatacatagccagcaccgcagtaacagatgcaacatctgtattatagagaatagtgaagaaccagtgaagggggtacaaggatatgaccactgcatgaagcatcgtctttctatcatctaagtgtggcttcaagtgagtaactatgtcatatataattaaactacagacaactgctaatacaccattaattgatcgaagaa

SEQ ID NO: 195274 - DNA, 423 bp, Glycine max
  unsure (1)..(423): unsure at all n locations
atgcaagcttgctttttaccacttattggtaaaaaattgtttattgcttttatataaagtaaaactttctttatacgtattgataaaaaatattttttaactcgatgaattttacattggtactttaataatttaataagaaaattactacatattgttaattatatatatacctaaatttcaaacaacattcatatatatatatatatatatatatatatatattaatttatttaaacttatttttaatcaaaatcaaattttcaaaatcaaatatgtttgtatactctgatccaaacacatactacttttgtttctcgaaatcgggcattgcaatgtaaccacgtgtgattgatatatatgtgagagacataacttatattanatattaatcaccgcgtacttaataatcaaaattaaaat

SEQ ID NO: 195275 - DNA, 239 bp, Glycine max
cttacctttgcctctataatgtgctgaaaacaatcttttatctccctcagtagcttgatattttctttaggagaagttagttaatccatccaatcggtttgtctatgaacaccatcattccctcttctcctcctttcttcgtcattatgagctctaatttccatttgatccaacctctcatggagcgcatcattctcgtggttaattaacctcttcaaatgtttgctttaatgcttgca

SEQ ID NO: 195276 - DNA, 448 bp, Glycine max
  unsure (1)..(448): unsure at all n locations
gcttataagaacaaaatngcctaaatcatttttcaatatgcatgtgaattangaagcattaacaagaatcaagccaaggctattgtgcaagcaatcaatggggcaaaacacaccaaaagattatgatgatggatggctcaaattatcacaaaggtaaacttatcactttcaaattgagctttcaaaactatcatgacatgtagaggaaaaacaaggatttcaaatcacaaaatgtcaagagacttttattttcagaacaatttcccattntttgaacatatcctataattcaaagaaaaatatgcaaagttgtacatgcaaacaaaattgacctataatattaaactagaaacccaacaaaactaacaaatttaacacaaacaaaactaacaaaactagcanaaccccaaacaaagaacacttccccccccatacttaaacaacacat

SEQ ID NO: 195277 - DNA, 413 bp, Glycine max
taaccaagcctctactttctatgggcaactcccaccttatgaagactatcccgggcaagacgatggggaaagagatacccatcttggccccctgctgcacctcgaagatccatcctcgcatgaactaccccagccgaacatatgtcgccatatcccggcctcacccacacccgcaaaagaatctgttccctttgcggaagataatggaaagattgatgcgcttaaagagaggttaagagcagtcgatggcctcggtaattacccattctcggattaggcagatctatgtcttgtgcccaacatcgtcatccctccaagttcaaagtaccagactttgataagtacaaatggacgacatgtccaaaagggcatcttcggatgtattgcccgaagatggtggcgtattctgcgga

SEQ ID NO: 195278 - DNA, 255 bp, Glycine max
ggcaatgcaaaaaaatgaagctttccaagcatgccacaagaaaatgaaggaagtggtacttgaacccggtgatgatcctcgacatttgaggacaaatgttttccaagaaggagggaataatgagaatcatgaaattggccaaatacaggctaaaggcccaagtctagaaggacgaatgcctaattggagaaggacaatacccccgagtggagaaggatgaacgcccaagtggagaaagatgaatgctcaagtgga

SEQ ID NO: 195279 - DNA, 367 bp, Glycine max
aaatggatctttctcaaggtccaacgccttataatgatcacctcttaaagtaaacaagaatcacttgataagaaagaactacgtatgtctgatttcctcatcgcaattgaggaatacgtatgagcatagggaaacacccttgtcgaccacatatagagatatatataaaaagggtattaatgatataaggatttataaaggaacatataaaatcatggcatgtttcacatttattaaaggtgccgtccttggactgacgtgtggggtgctaataccttcccgtgcgtaatacactccgaacctttacttaaagttcgatatcgcgtttttccgtttatccacatttcctcaataacgttgtgggact

SEQ ID NO: 195280 - DNA, 292 bp, Glycine max
gctaaatccctagtggatggtgcctccccttatcctttatgctttgccttccgctgcatctccatggggaaaaatcaccattgaaggacctcattggagctcaaagatccagcctccataaaattcttcacaagcaaagcttacattacacggacccttcgttgatttgctaaagaaaggggatcaagacagaacccgtgcgtgatgcatatgcgaaaggcacaacacgggagtgtacagtatgaccatattcacaaaatatattgtcacgcagcgttgtcgcttatgcatg

SEQ ID NO: 195281 - DNA, 382 bp, Glycine max
ctaatagcttggtgctttacaggaggcaaattactgtgcagagagagtgtggtgacaacaaacacattttagcaagcattgtatggagagggcattattgactcatttaaaagataaaacactaaaatgaatcttttaaaagataaaggatcaaaacaaattttattaaaaagataagcaaccaaaaatatattttagccaaaatgtttttccccaagtacaacaatttttcgccaatatgtatggccgcttcaatgtcctttcttcattagttctttgcaacaaaagttacttagttaaatgaattgatttgataatcgattccaaattcaacctatctgacaagctagttcagatcgattatgataacacatattaacat

SEQ ID NO: 195282 - DNA, 281 bp, Glycine max
  unsure (1)..(281): unsure at all n locations
atatacacacactatcattagagccgctatcacatgatcctaacaacatacgtagcaatcaaagcatattaggaaatcatccaacactttgtcactgaaatgacctatactactctagttatctaaacgtttatgcatcccccaacaactagcacaaagagagatagtcctaatcttagacaaacatgatcagctatgacactaaaggacttgtgccatattttaangcaaatcatttgtactatagtcattgattcctagcttaacacaaccctaccagc

SEQ ID NO: 195283 - DNA, 330 bp, Glycine max
ccagcttacacgaatgaataaccggtgcaacaaatatggagaggatgaaggagaaactcatgctgtgattaccatttctgtacagccaattttccaccaaccaccaagtacgttacgtcagccataacaaactatctccatatccaccacccagtttaccacagacgccttcccttaatccatcacgaagactgcttaacgcacttccaatgacgatcaccacctttagcacacaccacaaacacccaccatgaagtgaatcttgccaccgagaatgtctgtataattcaccccactacaatgatctatgctgactcgctcccatatcta

SEQ ID NO: 195284 - DNA, 396 bp, Glycine max
  unsure (1)..(396): unsure at all n locations
cgctttatatangaaagtctgatctttcactatatataactttgngatatgccctgtagactggatgtccctccaaccatgcaagtccactatttctctagaatagtctctcttgaggagatgccttacaatttaagccatggaattcttgcacttgttattgaagtttatgtgatcacttaccaacatgcttatagttttctctccggacacactaacaagaacttttagttactcccaacctatacaacaggggtatctgcgaagcatccgtcaaatcaagcagtctgtgctacaaactatcctcttaaaatactcatctggtggaagtctctacttactacatatcagagatccatgtgatggtgcttgcttattacgaaaacagatgattca

SEQ ID NO: 195285 - DNA, 390 bp, Glycine max
tttatcctttctctgctgtcgtctgctgactgaagtttgtccatcatgcagatatttctgagtgcactaatagatgtcgctggtcatgcctaaaagctggatgctgcctttgatgtcctgcaagaagcccgtaaaggacgaatacttattggaataatgtcatatagctcattgatgggtgcctgtagcaatgtatgtctggttagtaatatgatttagttaaatgaaaatgataacacgactgcatggataatatgaaaatcataatgagttggcttacccaggcatctctatcatgaataaaaaattgatatggtttgtgagatgctaataaagaaagactgaatggatgaggctgttatgacgatagtcattgaatgtttattttat

SEQ ID NO: 195286 - DNA, 483 bp, Glycine max
  unsure (1)..(483): unsure at all n locations
tgtaactctcggcaagtttcttaaaacttgtctcttaanaaggtttgactcgcgttagaaacntcagaaacaagtcacttgaagaatcgtgctcctgtgaatgtattttttgaaatcagtcactggttatcgattacctattaagtgtagtcgattacacatcatcagacgtgactcttcaattttaattttgaaaattaaaacgtttataagctctggtaatcgaatacaagtactgtgtaatctattacacaagttgaacatgtttaaacacaacttgtaacttaagaaattttatatcttaacggtctaaaacactggtaatcgattccatcttctgtaatcgataccagagaagaaactctttggtataaattgtgaaacttctgtgctctcaatgtctcgaaatattttatactcatttgttgagtcttctctgattctgatcttggtcttgaatctgacttgatattctgaatctga

SEQ ID NO: 195287 - DNA, 388 bp, Glycine max
  unsure (1)..(388): unsure at all n locations
atgcttaatgagttntgtatatttaacatgcgaatcaagattctaatatataatttagattattattattatattatatcttggataatatatggtgattacagggaaaataaaaataatatacatcgatcactgtgtgatattagatttgatgtacatgtgatgtattgagaaatatatgttttttattatatattgaatatataatatgagattaatttttttcacgtgttaaaaggtataccaatattgatcagatatgtgaattataagatgttaaggtgatctttattagattgtagcatttttcagtagctttgaagatgataactcatatcttcaatattgctatataatttgatgagcttaatataattgagtatatcaa

SEQ ID NO: 195288 - DNA, 457 bp, Glycine max
cttatacacttagactaatctgcaaacacaccgcagtatctttttctgcaaaatacagatacatggaggaatcattttttgaagaaaaaatgtattaaatgcatgtcatttatataccacactgaagtatcctgtttcaagataatacaatgtggcttttccagattatacgagtcatacgtacgtgcatctcaaataattacacttattttgtacagatactcttacattttctaaatctcagaattaaaggactatattctttccctctctattgtcatcctattggttctactaccattcctctatgttcttatattctgctcgtttgaacccttcaatggagggctaaatatgagtcaactcaacgtttcaagagtgacgataaatgggtcccctgtcttaattctctaattgcacacgtctcttcatttttaattcactttctgaattaata

SEQ ID NO: 195289 - DNA, 356 bp, Glycine max
attgatggaaaaacccgattaaatggcgcataatcttacacgcaagatacaagaatatggttgtactataaaatacgctctgactgggacactgtaagaatcaattactattttatcaaatcccaggagaaaaaacaatttgcacagcagctacgcaaaaattaataaaaatatggttcaccgctgaataacacttccaatgagctcatttcaacttcaagtatgaaaggattactaaaacagagtgtatggtatttccttcttaacacagcccaaacgactggtgcctcttattatataattttaagacgacgttgctgtaaaaatgctggcacatatatctgtgtccaaaattt

SEQ ID NO: 195290 - DNA, 240 bp, Glycine max
acatttataaaataatacaaccgttatattaattatattcttggcgatgcgaaataatataataacattccagttaaaaatttatttgattaaattaaattatcaaaataatcattcttttatgtgaagattgaaacacttgttggtgtgtgatcccatagggttaaactaatagatgactaatcataattaatttactaggtagacgtctatcaacaactcctagcattcagataacat

SEQ ID NO: 195291 - DNA, 350 bp, Glycine max
attgatcatcctactaggacgactgagaaaactggggcaaataaagagggtgaggataagggagaaacccatgttgtgactgccattcctgtacgaccaagtttcccaccaacccaacaatatctttactcagccaataacaaaccttctccttacccaccacccaggtatccacaaaggccatccctaaatctaccacaaagtctgtctaccgcacttccaatgacgaacaccacctttagcacaaacccaaaaacaccaaccaagaagtgatatttgcagcgagaaagcctgtagaattcaccccaattccagtgtcctatgctgacttgctcccatatgattcaatg

SEQ ID NO: 195292 - DNA, 342 bp, Glycine max
  unsure (1)..(342): unsure at all n locations
acaaattgctcaagaaaattgttctcttcttggggacaagacttgcgaacaagctttcttagccttcaagaagaccattaccactccgctagcctaaacaaccccgttgaaatcgaggaattgtcgacaaggagacttgctatttggcaaaaacaaaatgaagaanacatgagggttgaactcaagacaagaaacgaagtctaagaaatggttatgatcagagaagaagcttgtcgcaacctgcccttcggcaagagggcgatgcgtgactcacgggtgcgtgttccaagaaaggaatacacgcggagtcgccaccaacagttatttgaggaaagtgtccga

SEQ ID NO: 195293 - DNA, 402 bp, Glycine max
ttggtgttcccattttcagtaagcaagctatgttgttacatcatcatccatgaataaaatcagacaatagtgacaaggattatagctctctggttggagagaacattttttattttcatcttccaatcttttcatgttacatcactcaggtctaaattcagacaatagttacagctgagctctttatatggagagaaaaatatttaattctaattcctaatgtttacatgtgattacatccaagtcactttattttcaaagagtgtataaaattcagggaaacgacatattggtcagtcttattatttcgtaaacaaatcttcatagaaattaacacgaatgaatacagatcttctaagaatctaattagtatacagtcagggtctatcattcaatcacaga

SEQ ID NO: 195294 - DNA, 250 bp, Glycine max
tcattctttttgccaaccattctgttgggaatgggaaggactgtttatgcctttgatgccatttttctgcaaaactattgactactctgaacaaactcacacattgtatgccttcaaatttatatttggccaagtgattccagcacaagatggcttctctaattttaaagctccgactattttcaaacatccccatctctcctgagaatcatttgagggaaaagatgacttccccgagttcctttaatgg

SEQ ID NO: 195295 - DNA, 255 bp, Glycine max
tggtggctaaataaaatatcaaggtacacataactatgtcctaactagaagctctcttaccggttaggccattcacttcttgcacccctctttgcttcctgcatctccaatatattatatatccgcctactactgtcttatataacatctatctcctacccctagtcttttctaatacgactccataactcttctttctaaacacactttctggacgatcgagagagaatttatataatctgcgcaactaacaca

SEQ ID NO: 195296 - DNA, 340 bp, Glycine max
aagaaaattgtgatccaagcattgaaagcagacaagtgttgatcctttttattcttgtcaaaaattctggcttgatatgggttcttatcattcgtgtgagtagataacttcattcttagcttaggttcataatttgactgctcatagtctttgaaactttttctcttttaggtgccttcaaacgatgtctttagttggaattctctccaacaaagtttgacccaacgaagacattattgagggaacaaggtgactcatcattgttatggctaaaagagtgtaaaaggataacaaaaggtctgtctctctatctttcatactgggcaccaaaggatatcca

SEQ ID NO: 195297 - DNA, 234 bp, Glycine max
taaagtgagaatttataagggaggggaagtaaggaaatgaggaaagtgaggaaaggagggaaggatagagggggagaagggagagaggaagggagggaaggaggaagggaagtaggaggaaaggagaaggaaggaagggaggaaggaagaagtattgagggaaggtaggaaggaagagagaaaaggaagaagtgagtaggaagaaagagaggtggagggaggggaggaagggaa

SEQ ID NO: 195298 - DNA, 461 bp, Glycine max
  unsure (1)..(461): unsure at all n locations
atccttaagtcacctgcggcatgcaagcttgtgactcttggcaatttcttttattattcttttacttaaaaagttttgactttngaaaaaatcttcagaaacaagtcatttgaagaattgtgacttttggaaatgtatttttcaaaatcaatcactggtaatcgattaccattaaggtgtaatcgattacacatcaacaaatgtgactctttattttgaattttgaaaattaaaacatttagaagctctggtaatcgattgcaagtattgtgtaatcaattacataagtttaaaatactttaaaactgtttaaacataagttataactcttgaaatntgaaatcttaacgttttaaaacactggtaatcaattactaccttcttgtaatcgattaccagagagttacactctttggtaatgatattgtgaaaacttctcgtgctacctcaatatttgaaaa

SEQ ID NO: 195299 - DNA, 422 bp, Glycine max
  unsure (1)..(422): unsure at all n locations
ttacagcagaatttagtattgacccactaacctagaatttattatcttaatgccattaacctatggaattaataacaacttaatggctgagtgtagctgaaattgtggcaaccaaaagtcacccccaacagccaacaagtcagccaccatatggtctcccaaaaggctgatgcctatgttgccaattgggcccttattacaacttgaactaaacctaactaaagcccttctaattgattaacccataacatatatttggtcagccaactctacaatgattgagccattatntatacaaactaaacactcttaaaattgagacaaagtggtgtcatttattcctcctccatttgggccatgaaacaactcacaaccttggactttctccttgaactgggcttgattcaatagtatgacaacac

SEQ ID NO: 195300 - DNA, 469 bp, Glycine max
  unsure (1)..(469): unsure at all n locations
ttaagtcacctgcngcatgcaagcttgaactctnggaaatttctatatttacttttttcttagnaaagtgngacttttgaaagaatcttcataaacaagtcacttgtagaattgtgacttttggaaatgtattttttgaaatcagtcactggtaatcgattaccattaaggtgtaatcgattacacatcaacagatgtgactcttcattttgaattttgaaaattaaaacatttagaagctctggtaatcgattacaagtattgtgtaatcgattacacaagtttaaaatactttaaaattgtttaaacataagttataactcttgaaacttgaaatcttaatgttttaaaacactggtaatcaattactaccttctggtaatcaattatcagggagtaaaactctttggaatgattttgtgaaacttcttgtgctctcaatgttcgaaaactttttaaaacttatttg

SEQ ID NO: 195301 - DNA, 280 bp, Glycine max
  unsure (1)..(280): unsure at all n locations
agcatccgctaancgcaacactcctgtgctaagtgcaaggaagaatccagaacaagatgagttgtacatgttcgctaaacgcactgcttcatctctctaagcgcaccgcttcagttcatccgctaagcgagaaaggcgcgctcagcaaaaaatcactaacgtgcgctaagcggtccatacgtgtgctaagtgcacgagcatgaacaaggacacctatgtaagcctgacatcagattgtgtgaagagagtttggagggggattcacagctttgcatgtcta

SEQ ID NO: 195302 - DNA, 437 bp, Glycine max
ccaagcaccgcagctgcagctgaaacaacttgaatcgaaagtttttactcttacattgttaacaaatgaatcatatctatgttagtagaatgtgtctacacaatgaatcaatgcgtgtgttagaataactaaattacactatcaactgaagaaccactcttaaaataatattacaataattactatactaatcaatatattatatttaaaattttcaataccaatataaaaaatttattacatggtatatcattttttctttattaaacggccagatatttgatgtataaagggtgataattagttatgtttatacttctttaactccattgctcatttcttttgttgaaaaatttgcactcttttttaatgagatgactacttatttggtgacacgtgttcatttcattaataatatttataataataatgataat

SEQ ID NO: 195303 - DNA, 321 bp, Glycine max
aagaagcacgagcacgcgccaagaaagctggatgatgcaagatgacagtcgaaatgcgaattcacacagaagggtgagaatcaattagattataacatggtccatgacatctttggcaaggtgatactggaagcaacaaggacatctacaattctaaatagtgttggcactagacgaagctgagatgtgactcgattcatctttagccccaatattgcaagacggttacttgcatattataacttgacttgatgaacctttgagtaaaaacaagagcttggtcaaccctataaccaatgaatggaattctgatcccaatac

SEQ ID NO: 195304 - DNA, 459 bp, Glycine max
  unsure (1)..(459): unsure at all n locations
agcttctcnncccaatttctataaataggtttggttatttaagtgaaaaaaggttcggccccttacgcacttctctctctttcgaatttgcttggaaaaattgtttccttgaagaaaatccaagccgaggagctttcgaaatgtttccgtaacgtttccgtgaggaatttcgcgaaggtttcgaccgttcttcgacgttcttcattccttctttatcgttcttcgatcttcaacgggtaagtacctcgaaccaagttttttcgattcattctatgtacccgtggtggtccacattgtgtttcgtgatatatattctcgtttcgattactttttatacccccttttgacgtgcttaagccattttatttaagtcatttctcgcttaacctananataaaataaatttccaccgatcatttgaattgattatctgttaacttcnggtaaaatgaattccga

SEQ ID NO: 195305 - DNA, 398 bp, Glycine max
  unsure (1)..(398): unsure at all n locations
ctatcaatagacctccaatctttaatggagagggttaccactactggaaaacccgaatgcaaatatttattgaggcaatagatctaaatatctgggaagccatagaaatagggccttatatacccaccatagtagaaagagtttcaatagatggtagttcatcaagtgaaagcataaccatagaaaaacctagagatagatggtctgaagaggatagaaaacgagtacaatacaacttaaaagccaaaaacataataacatctgccctgtgaatggatgaatatttcagggtatcaaattgtaagagtgctaangagatgtgggacactcttcgattaacacatgaaggaactacagatgttaaaagatctagaataaatgcactaactcatgagtat

SEQ ID NO: 195306 - DNA, 129 bp, Glycine max
  unsure (1)..(129): unsure at all n locations
agcttctcccccaatatcgataaagaggtggttatgtttatacaaaagggancagcccganaggcactgctctctcattcgagaacgcataagaacaaggttcccgtgaaaaaaatccaaaccgaggcg

SEQ ID NO: 195307 - DNA, 401 bp, Glycine max
cactttccagagtgaaaatcctttatgaggagagatcttatattgtgctatccaaaaacacataaacctctttattgtttaaaggccagctatggctagcaaaggttgtaactagtggtgtttgtgatctagctgaggctatgtgtgaagtccattgcgagtgtagtcacgttattgaaatctagtaattttttgttcaactatgacgggctatgtttgtgaaatcttatcttatagagtaagaactatacgtactccatggctaggatgaaccaatatataaatcatttacatcattctttctttctctctcttctcatgagataatggtttgatttgttaatattgacgtaagcattaaacataaacattacaaatactgcaaatcgacctttcactaa

SEQ ID NO: 195308 - DNA, 446 bp, Glycine max
  unsure (1)..(446): unsure at all n locations
cagcttatcaatnttcaagttaccaagagtacaagggtctgttaaactcnctggatccataaacttaggtgggaactttctctaaatcacaacagaacacacttcattgagaccaattgtagcatagatcaccaactttcctttatttgaaagaatttatcttaaatatttggattactttgacatttgagcaattgcctcaacaaatgagaaactgatgtgcatctatttaagcatctcaataaatctagaaaactaccaatccttactcttgtcttttaatcttagagggaagggaacatttacctgatgagatgttaatacatatttcacaccctcttagatgtccccttggctctctgcagaatgaacctcttatatttgatggtggatagactctctcctttttttcaactttgtcataggacttcctctcttgtacttaa

SEQ ID NO: 195309 - DNA, 263 bp, Glycine max
  unsure (1)..(263): unsure at all n locations
aaactcacgctngcgaaacacaagagaaagacagagacagagtgaacttagtgttgtatcgangncagtgtactggatgaaggaaacatgatcaaattgagagaatctcgcgtttgctaaggtagcgagattcatgatattcaagtctatggaggaaacactctttgagtgattagaatatatatcctatcagacatatattgtatgcgaaagccaagagtagcttaaggacaaagaatactcaggtcctaatcttaagggga

SEQ ID NO: 195310 - DNA, 453 bp, Glycine max
  unsure (1)..(453): unsure at all n locations
agctntaacccaacactgcttatgttcttttatttcaaaaacatgctagtttcaatgcccattctttcttaagtcctacccttttggcgtgtaagctacaacctagcatggcttaagctccgagcctcttagttcctgtcgcttaagcaatattccccactataactccgtgatgaaactctattttcttgcaaactttaacaactcctcaagcctctcagccttacccccaaggattccaaatcaaatagtactctttccaaacataaacaccaacatcaaatacaaactaattgcagataaacactcataattcatagattaaatttcctttgacatattcacaacccgtccaagatcaacaaacttatgaacattcaagcttacacatggacattgaatcatacaaaagaatgagagttcactcctcctacctcacaataagagaaacgt

SEQ ID NO: 195311 - DNA, 408 bp, Glycine max
  unsure (1)..(408): unsure at all n locations
taacgatgttaggttngaaaaccctgctatattgttatgtctagggccctccaatttattatgtgaaagatccaagtgaatgagatgttgaagatttgaaagtgttgatggcagctcaccctctattttgttatgtctcacatccaattcgtgaaagttgtttgattgaggaaagacatttgggatttgaccactgaggtggttagcttctagattcataaaagatagccgtggaagggttaagagtgaggatgggattgaaccgctgaggttgttaactgagaggtccaggaaagtgagatgtatgaggttgaagatagagggagggattgacccttggataccacaatgtgaaagatctaagaaatcaagagaagttgttctacaactcacttctggaagcttctg

SEQ ID NO: 195312 - DNA, 456 bp, Glycine max
  unsure (1)..(456): unsure at all n locations
agcttgcacacaagattcgccttgtttgtttcttaaaaccttctggntgggtcatatagatgtcttcctctaattccccatgcaagaatgcaattttaacatctaactgctccaagtgaagattctctgcagctacaatactcagaataactctgatggtagtcatctttacaactggagagaagatctctgtgaaatcaattcgttgtttctgctgacaagtctcgccttgtatcttcttttaccgtcagattcttcccttagcctatagacccacttattctgtaaagctttctttccttctggaaatttaattaaagacgacgtcttattcttctgaagggatgccatctcatctttcattgctagctcccactcaatagagtcattcccttgcgtagccttactgannacatttggctcaccagcatcagttaacaacaaataatgcaatga

SEQ ID NO: 195313 - DNA, 413 bp, Glycine max
  unsure (1)..(413): unsure at all n locations
tgtcgacatattntctctagaggcttcttctataactttattaccaagcgatataataaaaataaattatattacaatcgatccaaattaatgaactgaaatataaaatataaaattaacataaaagtaatattgtgcgatatatatattttcttttcaatcagtagcattttttctcgcgtagccgcgcatttttatgttgcatttcttaaattaattttcaattaatattttttaaattagatatcaataggtctgtagattttactttgatagtacatatcctaatttctcattgaactatntaaaattcattttactaaattntaaactaaacctaaacggacgcaagggcctcttcccaaacgacgaagctggccagtatgactaagttggtttggttcaacttctct

SEQ ID NO: 195314 - DNA, 428 bp, Glycine max
  unsure (1)..(428): unsure at all n locations
agcttngactttgagtcatttatagatttttttatgngaccatgacatgagtttcaatcaattatctctttcaatctctttcaactctttctacagaatttctgattcatttctcttcatctttctaaaagtttttgttcaacactttctcttccaagaaaagttctntgataaaaaacttgtgttattcatctttttcattctcttttccctttgccaaaaagaattcaacaaggactaatcgcctgaattctttttgtgtctctcttctcccttttgtagaagcaagcttcatgatgttgaatccagattgattcaagttgttttgatgataacaaagatgatgacaaaaatcccaagagaattgatttcagaatgagtcaagaacaattcaagaatcaaagagaaattngatttcaagattcaag

SEQ ID NO: 195315 - DNA, 376 bp, Glycine max
  unsure (1)..(376): unsure at all n locations
ntgaatgcactattcaatggagttgacaagaacatctttatattgatcaacacttgcacagtggccaaagatgcatgggagatcctgaaaatcactcatgaaggaacctccaaagtgaagatttccagattgcaactcttggctacaaaattcgaaaatctgaagatgaaggaggaagagtgtattcatgacttccacatgaacattcttgaaattgccaatgcttgcactgccttgggagagaggataacagatganaagctggtgagaaagatcctcagatccttgcctaagagatttgacatganagtcacttgcatagaggaggcccaagacatttgcaacatgagagtagatgaactcattggttctcttc

SEQ ID NO: 195316 - DNA, 414 bp, Glycine max
  unsure (1)..(414): unsure at all n locations
agcttccatctatgaaagcttgtttagtttgcncaagggtattaatatgaaggaaagnttgagcaccatcattaagatcaatgctgcagataaacaatcatgagaagtgctaccctgcggcagagaattgcaagtcataagaaagccttctcatcgtagaaggtatactatataccttaatgagtacctcaagtaatcacttctatcatcagttgtatttatttgctccagcaatccaaatgttgagaatgaatcagcctttgatataccgataggttcactaattcaactccatcttgagccagaatcattcttagaaccaacatctttttaagaattcattgngaagcttgtaatcatagatgcagaagtaatctgtcttttttaaataaataactatggttttgctctttt

SEQ ID NO: 195317 - DNA, 451 bp, Glycine max
  unsure (1)..(451): unsure at all n locations
actacgctaagcactcttgtaggattaagactttcatcttctctgttaatctaccatatactcattcggtattatgtctcatgagctntctcatattcaacagcttactggatttagctcgggtggcttcccttttagatacttgagtgttccccatttatcatctagattaaatgtatgccactgtgctcccttgctttccaagattagtggcttgatttagggatggagcaggaagtctttatcttatgcaggtaagctagagtttatcagagcagttattcaaggaattgtgaatttctggatgagaatttttcccttgcctcaatctgttatggaccggatcaacgcttcgtgctgatatttctgtgggcagagcggatattgtcaaaacaaccattgtgtgttgtcaataatatgtctctaaaaagaaggtgttatgccttttatc

SEQ ID NO: 195318 - DNA, 324 bp, Glycine max
  unsure (1)..(324): unsure at all n locations
ccanncaatacatcttctttttggctttgtgtgggacttgatggctgcatttatgttattttcggttaagaacattatattggctctgttatcaaggaagtgatcgccacaagataaagccgatggcaaaaagaactgcttgaactcaagtccaacttactgagacccattgcatactatacagattcctgatcaaccatttaaggcaatctgggcttcatattaaaccctttctgtttaccactttcgacctgatatatttacttatagaataataccaaggtgtttttgcaacttttgctcctttcccaaccttctgttaac

SEQ ID NO: 195319 - DNA, 378 bp, Glycine max
  unsure (1)..(378): unsure at all n locations
agcttgaagaggatgctntaatggagganaataaatatagaaggggggagcacgaaattgaaggaatanaagagggaaacaagtggaactttgaagtgtatctcataagaatttcattcatcanagttacaacaagtgttacacatgcttctatttatagactaggtagcttccttgagaagttntcttaagaaaacttccttgagaagcgtctttgagaaaacttccttgagaagctagagnttagctacacacacccatctaaaaactaagctcacctccttgagagccttcttgagaagctagaacctaacttcacacccttattattacctaagctccccccatggacaaaaaacctggaaattccataaaaat

SEQ ID NO: 195320 - DNA, 500 bp, Glycine max
  unsure (1)..(500): unsure at all n locations
nganactagactccaccacaggagatggtgccattatatcatatgtcacatctggccatggagaatcaatataatgttcagatgattccatgggtcttcttaacccatcattagtcttcatatatttattacctgttttgcctccaccaatcttatgaggaacttggtcatggtagttaaactgcctctgagaggaaacctctaaacgatctatcattccagtcatttctattttgaaacctcctaatctaataagcatttgaacatgaagcagttcataaatcgatatggctacagcattcatgtgaaattaagggagggattataatagagatacaacaacattcttaggcctccattggtttagaaaccaatcggaacacactagtctcactaccaccaggaatagcttgcaatcagcatcaacccattgaaccattngagtaatccattaactcagaaccagactaaatcagtctaaccatatttgaatcctcacc

SEQ ID NO: 195321 - DNA, 444 bp, Glycine max
  unsure (1)..(444): unsure at all n locations
agcttaaagctcaaggacaagcttgaagatgttgttctcaaagtctctggatgaagcaacaacttanagactntggagtaaaccttggttctaaaatgtggcaacataagtgttatcaatctaacaaaaaatcctatcatgcattctaggactaaacacatagaaataatgcatcattttcttagagatcatgtgttaaaaggtgactgctacattgagttcatagatagtgagcattaacttgcagacattttcactaaaccacttgctagagataggttctttttcattagaaatgaaataggcatattagatgcatccaacataaaataacttcctatttgcataatgtgtgatgcacattgctatttgagacgatgactaatttattctggagtctctactntaatcaattaccaacgtagttaatcgattacttctctc

SEQ ID NO: 195322 - DNA, 430 bp, Glycine max
  unsure (1)..(430): unsure at all n locations
gctgctgattacatctnnccctttctcaagagaattcttcttgttatcatcaaaatcttcatgattgacattttattctcgtcgttcggcgacattcaagcccgacgacgcacgagattcttctttgctgggaggggacgatcaagttcgatagtgtcgcaacctaccctttggcgggagggcgatgcgagggctcacgggtgcgtcttccatgggaggaagatgcgcggagtcgccaccaacgtttattcgaggaaaacgtcgaataaaccagatagacgtggtctacgaactttaagtgtgaaaggttcagaagttgtatttacgcacggngaaggtattagcaccccacgcgtctgtcacaagggacgacagcctttaatcgagtgtgcaaagatgacttcaaattggtttaatttcccttttacgt

SEQ ID NO: 195323 - DNA, 403 bp, Glycine max
  unsure (1)..(403): unsure at all n locations
agctnctcattcccatccgagcaggaacttattttgttttatgatgccgcgggcgaaccttagatcaaacagctatttctgactggaattctgtcgcacccttcccagctattgccccacactccattctttataccgcaatgctcgtaccatcatggagttcacctctataaaccgttccaaaaccttcttgtcccagaacattcttctcacagaaatagtccgtgacgttcttcagaacttgtatggaaatgaccatatttcctgcttcaaccatttgaatatcacttgcctcactgccaggcatggttcgcgtatcactgatcacaccaacgttgacacttgatccagctacggatatcattacaccctcattatcggatcctgaatgcctaggatgaat

SEQ ID NO: 195324 - DNA, 382 bp, Glycine max
ggctaataccctattggatggtgcctcccctatcctcttctcctttgccttccgctgcatctccatggtgaaaaatcaccattgaaggacctcattgaagctcaaagatccagcctccatagaagctccacaagcaagcttccatcactaagtgtcatacaaaattggagggaaatttgaatttctattcaaatttcacttgaatttgaaactaaatttgtggagccaaattttggagccataatttcactaactatgattagtgaattttacctatggttcagcccactaatccaagatcgagtccaagattctccacttaatgtgctcacgtgtcatgatgcatgtaaagcatgaaggacattcaccaaatgtgactata

SEQ ID NO: 195325 - DNA, 435 bp, Glycine max
gactcaaagaagtctctcaacgaaactgctcaaatatgtctcttattgaagttactcaaggaagctacctaaacctatttcagtgaaatctctctctcggattcggtaaccattggaacatcttaaaatgttatttggagggtcttatgacaactttccaaattatgaccgttgcgatttgcaatataacatctggagtgtgagaaatgattttctattactgaagcagaaaatttgagtgtagcaggctttaaattacatgcagcatcggagaacggccacttcttccttcttcttctcccctataccctatccaacacgcccaaacttgtgtttcaccacccacgatcaccggtggccaccgcgaagctgtcgtgtctttgttgaccctcacaccaaacgaacactgtaatcgacggaaattcaaactatctc

SEQ ID NO: 195326 - DNA, 267 bp, Glycine max
tgcattgcatatttgcttgattgttgtataactatagacattgtgctccttcaacgttagaagcatatttcttgatttcaccattgactttgtcatatcaacaacaatgatcttcttatccttagccagtcgaccaacatatggatgtcaaactaatgacttcgccaattcatgattatgactcccacaaattaacttcactatccatccttcgccttccacaactagtttcgcacgtagtttaaagggacacccatattttctact

SEQ ID NO: 195327 - DNA, 475 bp, Glycine max
  unsure (1)..(475): unsure at all n locations
aactcaagcctgcaatctacantgggtcttgaatcctaggaatttatctctcctgattatatcctcccttaatccgntatgagcttcatgatatatactcttggtcccaagggaagatgttttgtgatttatcttctcaattggagcaagggacgggttaggttggctctcatatttgtttcgagaatctacatgtgggtttggataactatgtgacacttctttcactattttctcgataatttttacatggaagatatatctcggtgtcgaactgtttgcattattttgttcgatgcacgttgagtctctgagtcttcatatggtatttctgtctcacgtgaagactaaataataaataattcttgatgcagcgagatagaactgcgcacagcattggataaataatttattcatgagattcctctgtatatgttattctctggactcgatatgaagcatacgattgaatatg

SEQ ID NO: 195328 - DNA, 434 bp, Glycine max
  unsure (1)..(434): unsure at all n locations
agctcgngctcccagctatgctgtctatatattatttatccataatagcatgggtgtattggatgtattatgttgtagtgtgcatattgaattattcatttgcaatctattagaattcctaaataagcaactcatgttgttccatatcaatgtatcatgatagttataatattctcaatggcacaagcacataaggtcgtgctatgcatgtacgcacaaaggatcataaattatttcttatatattaatgaaagtatggctatgatcgaagcatgataaaatatgtcattatattgagaaatctatattattgattgagaactttattctcttcacaagagattctggacattggcatatatacttaacagaaaatcacattcatgatttgtattgcactcatgggattctctgaatcataatattttattgac

SEQ ID NO: 195329 - DNA, 437 bp, Glycine max
  unsure (1)..(437): unsure at all n locations
ntgcaagtaattatgcaattatggtctgccttgtgtactgtgtaactggcatggcttatatatgcaatagcattatattttgagcctgctccagcacaactggtatgtataatataaatatagggtcttgctaatcaatgtctctagaatagtgattaaacaattaaaaggagaaaatatttattgtaaaaagggtaaaaatatcataggcgatataactttacatattataataaaaacctttctccttttaatttcttactaatgttctaaggagaatgtgtaatattttttataaatatatatattntgaaattgttgataatagctatacatttcactttctctttatggatctcttttcatcactggtagtggtcaatgcttctcccgattgtatgactcattgcgaaccactaaagagatattgtctttat

SEQ ID NO: 195330 - DNA, 449 bp, Glycine max
gaccttaagcaccgcggctgcagctgagtctcaggtgagtgtacttagttaaccacttcatctcctctctctctggtgtcggctgcctgtttggcggctcaacatctctgacgatctccctcttctctgaaatctcctcatctcatcctctctgcatcacttgatctctctcttctctcagcatgatccctccctctcagatgtcctcgatgggttgaactttttgctctcagtcactactactctactcccaaatcctctaacaggttgcagtgtaacttggctgaagctattttttggttcagaaacccatgaattggtcgtcttttgggtctttcatttgaaatacatcatctcctaaatattggaatgactcttctgcccctctctatgctcttgtctgtctataatctcataactactgtcacatataaataatctaagatatt

SEQ ID NO: 195331 - DNA, 311 bp, Glycine max
tattatatatcacacatgtgtgtataaacacaaatccaatgtttaatgtaaaatactcgacaacacacacggaaggtgacgagttgaagcttatgtcacctctccaactcaagtgatgaagtattttactacagacaatttcacttgacgatcaccaatcctaatcctttaatcatctggaaaatgggatgagcatggagaagggtccactgtttactccacgcaaatgggtgccaattgccaacacgctaagcataacaaatgaaattataactaaaatggtaaaccacaacttccaagctaacgtgata

SEQ ID NO: 195332 - DNA, 290 bp, Glycine max
  unsure (1)..(290): unsure at all n locations
agctngagacacaangacttcagtatatccttgtgccannanancaaaggatgccgctggtgacttgttgctacttactctagcacatacctactacagtatatatggatattatagaccaaccaggtaactacacccctgcagggtcttccatttcctacgtatcaacataatttcaagtnctgagatattgatgtgcttgcgttgctttcaacaatcaagcctagaaaagagcttggaaagctggaatntcatcaattcatttattttagctcacgagctattggtat

SEQ ID NO: 195333 - DNA, 394 bp, Glycine max
  unsure (1)..(394): unsure at all n locations
aggaaagaggctgggaggggggaatttatgctntcttccatacataaacaaagcaaagctaataaaacaactatacctgtgttcattcaagctgtataaaagtttcccaagttccacatgccatagctttaccgttgaatcaaatgatgcactgcacaaaaagatgagtaagtagcttaaaataaacaaaacaaacttttcatctggtattaagaaaaatataaaaacacaagcaagcatgattgcatgtatatgcacttgcacatgggacattgtgcaacataaaactgcatgacaacaatattttaccaaagacagacagcaacaatgtaatagataccttgccatatacagtatgtaaaatgggttggactcttcatataataaacatgct

SEQ ID NO: 195334 - DNA, 309 bp, Glycine max
agccaaactacgaagggagagcttctcttctttaaaacgcacagaaaacacacaggctaatataaacaatcatatactggctaactacacaagaaaactcacaccatacagatgaacgacacataatacgacgaagcaagtgaaaatacaaaagaagaaaaatagtgagaaaataagaagacagactcactcaatatcagtatctcacaagatattactaacctatcaagcacaccacaagcgaaaatatgagattcgagattcaatatatccacaaaaaataaacacttctttctctctaagacatta

SEQ ID NO: 195335 - DNA, 265 bp, Glycine max
tttcatgcagcaatagaaagacagaccatctcacttctatatacttacattaggcctaaattttcactgagaataatatgttcattataatatgattctgacgtgctggtagggggaaatagctcgattaatatctctccttgtcttctctagcgagatttgtagtgcttaacaatcttttagcgggttataataatttgggaaaactatctaacatatgtgatagaacatttcatatattggatggatatcttgggtctatcca

SEQ ID NO: 195336 - DNA, 178 bp, Glycine max
gcttccatgccacaaatttctttccaacttcttttgtttttgaggacagcacgcatcctgggcttgttcaaatccttatcttgcctagatgcattgtttgtgaacaagctgtgaagcacacaagtgagtgagtctagtccgtgaacaactcaagcgaatcgattagtcacaacaaaaa

SEQ ID NO: 195337 - DNA, 263 bp, Glycine max
ttcgagatcacttgatattagtgaaaaagatcgcttccgcgaagaaaatccaagccaaggcacttgcgtaacgtgaccataatgtttccgtgggtgatatcacgaagattgtcaccgctcttcgacgttcttctttcgttcttcgccgatcattgatctacaaccggaaaggacccgaaatcgaactatgccaactcattctatgtacccttagcggaccacatctgacttcacgcgcttggattctcatgtaattcactttc

SEQ ID NO: 195338 - DNA, 287 bp, Glycine max
  unsure (1)..(287): unsure at all n locations
agcttaaagctcaaggacaagctngaatatgntttgctcaaagtctctggatgaagcaacaacttaaagactttggagtaaaccttggttctaaaatgtggcaacataagtgttatcaatctaacaaaaaatcctatcatgcattctatgactaaacacatagaaataatgcatcattttcttagagatcatgtgttaaaaggtgactgctacattgagttcatagatagtgagcattaacttgcagacattntcactnaaccacttgctagagataggttcttttt

SEQ ID NO: 195339 - DNA, 365 bp, Glycine max
ccgacgacgcacgagaatcttctttgctgggaggggacgatcaagttcgatagtgtcgcaacctaccctttggcgggagggcgatgcgagggctcacgggtgcgtcttccatgggaggaagatgcgcggagtcgccaccaacgtttattcgaggataacgtcgaataaaccagaaagacgtggtctacgaactctaagtgtgaaaggttcataagttgtatttacgcacggtgaatgtattagcaccccacgcgtttgtcacaaaggacgacagcctttaatcgagtgtgcaaagatgacttcacattgttttattttcccttttacgtgtctttctgtgtgttatgctgttatatttgtatctt

SEQ ID NO: 195340 - DNA, 453 bp, Glycine max
  unsure (1)..(453): unsure at all n locations
agcttctagagaaagctacatgaagctgttttgtttatatcgcngcccagccttcgataaccgatggatcttctctatatttggtctgcaacttcacaagacaattgtgcatgatcggaccgttgtgatctttgagaagatgtctggagtttgctataagcttccgttcccgagagcatctcttatttaagcacttcagccttagctttcctgtagcttatgaaaaacgtcatttcttcttctttctttcttccagagccatttctaaagttccaagcactttcttcatcacccacagccaccattagcaaccacaaaccattattgttctccattgagaacccacaccgagaggaacccttcaaccgaagctgtatcttccaacttggcttgcggcttctgaagagaacgtaaaccctaatctgacctttaaggttaccatggtttattgct

SEQ ID NO: 195341 - DNA, 467 bp, Glycine max
  unsure (1)..(467): unsure at all n locations
ctcaagcttcggaagacgatgaagaagtccgagtactgaagaccgttctatganattctagactngccaaagaaaaattctaggtggtcgctacagacgtccggaaagagtgtgccgggttacgagaagaaaatgcagctaccacaaaagcccttgaacaatacacctagagggctcgcaaggaatagcatggccgtgacaaattccgtggagcgttgtggggcaacaacagcgagctcaagcttctaagggaagagagagaccgatcacaagcacatagcatgggtttaaaagaagagttagccatttgcttaaggtccaaaagaaacttgtctcagcgtttatgcgagacagagaccaaaangttatctatcatcaccaagtacctagaagaactaagtctagccaccacccacgagcatatggtggcggactagtatgctcagtggacgcggaaatgatgctaa

SEQ ID NO: 195342 - DNA, 445 bp, Glycine max
  unsure (1)..(445): unsure at all n locations
agcttctcnncccaatttctataaataggttgttttttaagtgaanaagggatcagccccttaggcacttctctctctttcgaatttgcttggaaaaattgtttccgtgaagaaaatctaagccgaggcgctttcgaaacgtttctgttaggaatttcgcgaatgtttcgaccgttcttcgacgttctccattcgttcttcatcgttcttcgatcttcaacgggtaagtacctcgaaccaagctcttcgattcattctatgtacccgtggtggtccacattgtgtttcgtgtatttttattctcgttctatttactttttatacccctttttgacgtgcttaagccattntatttaagtcatttctcgcttaaactataaataaaataaatttccaccgatcgtttgaattgtttatccgttaactccggtaacatgaattccga

SEQ ID NO: 195343 - DNA, 448 bp, Glycine max
  unsure (1)..(448): unsure at all n locations
tatccttatggctngcctccggacttcacccgccgtgctcttctttaagatataagccaagtccctacattctaggggcaactcccaccttatgacgactatcccgggcaagacgatgaggaaggagatacccatcttggcctcctgctccacctcaatgatccgtccccccatgaactaccccaaacgaacataatccgccatatctcggcctcacccacacccgtaaaagaatctgttcccttcgcggaagataagggaaagattgaggcgcttgaagagaggctaagagcagtcgagggccttggcaattacccattctcagaattagacgaattatgtctcgtgcccaacatcgtcatccctcctaagttcaaagtaccagactttgacaaatacaaagggatgacatgtccaaataggcatcttcgaatgtatcgccaaagat

SEQ ID NO: 195344 - DNA, 466 bp, Glycine max
agcttgaagaaaaggccaaaatcccctcttatattttatttcaggcttaaataggtggctttgttcgtgctcgtgtgcttagcgcaattatgaaccgcttagcgcgcattagtgaatttcggcttagcgcggcttttctcactcaacgaatggactgaagcagggcgcgtagcgggatgacccttcactcaacaaacatgcacaactcatccttcttccagattcttcctctcgcttagccgaggattggtctcgctcagcggatggctcgctaagccaatagattgtcttggcgagagggtgaaaatcagcacttcaaaacttgcctaattaacctgaaattgagagaaaaatgattattaaacaaacaaaatggaagtactaagtacttattacctatctttaacaaaaattaattacaacactacaaagttagtcgtattcaccgactaacacacgctaagcg

SEQ ID NO: 195345 - DNA, 323 bp, Glycine max
  unsure (1)..(323): unsure at all n locations
agctttaaaaagagctgcacttaattttttgttgcaagccaagaatcacacataaaaaaacaaaagaggggcctacaaaaaaatcnctattntcgttgaataatacatacctgaattttggcttcccaccattcatcactagttgcaatggttgtcttctccccatcccagccaagacctgtgtccttcccaacaagcttagcccattatttttgttcctttntcatagaatcccacctatttctgaattgtttatattcatatctcacatttggtgccttatttaacctttctggaataattggccaaccaagcctaatgaa

SEQ ID NO: 195346 - DNA, 384 bp, Glycine max
  unsure (1)..(384): unsure at all n locations
tgtcctgctctggagtaccatggtactganaaatctgtttgatcttaaagatccaaccgagtggctcggtgccatctaaccgaggcatgtctaatttcattatgtgtgttactgcacggacaggggaaggcagaggccaatgtggtggagtggttgaagaacgtgacaaggcatggctaatgcgctagataagttcatcaattttcaaagtcatggaattcacagactcacccaggtacatatgttgattggtgagacgaataagggcttcctcaaggcggtctgaggaacccaagttcttgtcagaatcgtgcatgaacgccatgagagcaccaattgatatgggtgttagtgtgtggcttctacggccagtacctccgcaag

SEQ ID NO: 195347 - DNA, 452 bp, Glycine max
  unsure (1)..(452): unsure at all n locations
agcttagagagaagagattggagcttaattancttaacaatgaccaaagcaagacatctacattcaacttcagtacttgagtgtgcaacaacaaattgcttcttagaccactaacagatgagattggggctgaagaagacacaagcgtcgaaggtggaccatctgtaatctgggtcagacgcctagtcagcatcacagaaagtcacaatagaaaaaaggtgcagaagcaagcttgaaatgcgagccccacgagatggttcccttgagataccgcggtatccccttatggtatcatagtgtaacgccctgaaatttcgctaactgtaaatcgattataatgtatttctcatcttatttgattgtgtgattgatttggatgagttgaggtatcgttcgaatatccatgtgtgatttgcttgatttgacgtttagttatgtggagttttattgac

SEQ ID NO: 195348 - DNA, 491 bp, Glycine max
gacctatgaaactcaagctgcatagaagtgtctccgtataggtttaatcgcttactttgcttatcgaatcgattacacaactcttgttgagacaatgattgattctttcaggagtccctgctttaattgattactagttgaaatgatcgattacttctctcttaaaaagtgtttcaaaagtgatcatgaatgctttaattgattacattgaggatctaatcgattacattgttcttgaaagttttccaattgtttggaagaacactttaattgattgaaatggtaatataatcgattacttcttcgaaataattgattacattgtatatttagtcaattacaagaagttatacctgttttctctataaatagccaccttgttgtcccacttctaacaagttttaacaacttctaaatgagctagaattatgagttggtattactaaaagaaagaagagaagagaaatgtgactcacactctaatcttgata

SEQ ID NO: 195349 - DNA, 290 bp, Glycine max
ctctctggtgtcggctgcctgtttggtggctcaacaactctgacgatctccctcttctatgagatctcctcatctcatcctctctgcatcactagatctctctcttctctcagcatgatccctccctctcagatgtcctcgatgggttgaacattttgctctcagtcactactactctactcccaaatcctctaacatgctgcaccgtaacttggctgaagctattttttggtctagaaacccatgaattggtcgcctttgggtctttcatttgaaatacaacatctcct

SEQ ID NO: 195350 - DNA, 247 bp, Glycine max
  unsure (1)..(247): unsure at all n locations
cccccactcccgcggcaaaaagcacatannnnnaaggggttgtctctgcccgacaaaaccgcgggaccggagaaggcattattttgaacaccaacaactcagaaatccgaaaagaacttcccaaagctccgtgaaacagggcaaaccaacagcaagaaaacgaaccaaggaggagatgagcagcacccccatagggagatgacaaaaactactgcacccgccaatcgtaaatgaaagagacaggaag

SEQ ID NO: 195351 - DNA, 303 bp, Glycine max
  unsure (1)..(303): unsure at all n locations
agcttctatggaggctggatctttgatgttattaagttccttcaatggtgattttcagccatggagttgcaatagaagacaaaggagaagaggtgagaggaggcgccatccactagagaataagccatggaaggagaaacttcaccaccaagagagtgccttggataagaagcttagagaggaagcttcaatgaaggaagagaatgaaagagagagggggggggggggggggatttnctccctctcttctctaccttgtctctctcctctttcgcctcttaatttacctcttcttctatcgtt

SEQ ID NO: 195352 - DNA, 461 bp, Glycine max
  unsure (1)..(461): unsure at all n locations
aactcagctttaaattaattcaatttctaaagttgttacaatagntatactnctttagccaaacctgtgcagcatcaattaaggaattctttataagaactgtcacaacctaccctttggcgggagggcgacgcgtgactcgcgggatgcgtgttccactataggaatacgcgcggagtctccaccaacgtttatttgatgaaaacgtcggataaaccaaaaaagacgcgatctacgaacttttaagtgaaaggctcgggagttgtatttacgcacggtgaaggtattagcaccccacacgttcgtcacaagggacggcagcctttaatcgaatgtgcaaacatgactttgatttttacattcccttttatgtctttatatcccttataccctgtgtatatatttcttctctttttgtggtctacaaaggtgttccctttgctcctcctattcctcaattg

SEQ ID NO: 195353 - DNA, 454 bp, Glycine max
agcttaacaataaagatcttctctataattgtctataaaagattcagacataaaaatgcacaccaaaaactcacctctacattatccccatacagattaagtatatggttttcattattaaaaacttgggcagggtacttgtttctagcattacatgccatgtcatctgctagcatgagtataatcctctcatccggtattcctagccgtttaactgtcctgaatgagaaagaagttaatgaccaataatagatcattgtcaagcataattcaaacaatttaaaaaagatgaaaaggctaaagttgtatacgtacctatacaatgacagggtactggccatatgccgataattaaacctgaacaagggaagcatcacatttagtatactatccatgccatacaacatgaaacctacaggtacaatataattcacaatacctctgtaagacacat

SEQ ID NO: 195354 - DNA, 350 bp, Glycine max
tctagcacactccagaatgttctcattattctacttgtagatcatggaacagtgtcttgtgaagttgcaaaccaaatttcgagaagatccaacggctaatgaaggctgggcagcgcttttaccgaggcagctacatgtagctttctctagaagcttcctcgtggcttctttgagaagctttctcaagaggcttctgtgagaagctacattcttacctatccacccctctattaacgaaattaacttcctttaaaataattatcgatgaaaataacgccacacataatcaaacatccaacataattactaataatatatagatatatatatcacggtgttacaggcttcat

SEQ ID NO: 195355 - DNA, 425 bp, Glycine max
  unsure (1)..(425): unsure at all n locations
agcttctaattggatttttaccatagtagtttagtttgttcttcttcaaatggcttgaatgtcagttccacactgaattcattctcacccatatggtacatagtctacaatntgtccttacttgcatcgttaaatactattttacattatggctaaatttaatttgccctatgtggttttggggagtatcactttgccaccatgttgtttaaactttgtcactttgatccccttgtactttcattaacctatttattatctccttgtctctttttttggttgtcaactatgaaaagcttatacatgctataatccattaaactggcgagtttacatataagccatgtctatctattcctaagnttcgacaaggagaacgttgtttctaggaaaataaacaaagtaatcttcaattgatgttttgt

SEQ ID NO: 195356 - DNA, 406 bp, Glycine max
  unsure (1)..(406): unsure at all n locations
tgatataacatgacatgnaagccagaatgcattagtttgcatcctgatattaacagggctttgatatatcctgtcaacaatgtcaaatgcaagtggttaataaaaatcaaactattagcctaataaatgaatgaaaaattaactgagaatgactttcttttgttatgttgtaccatatgtgaaaaacaactaacaagaaaataacatgcaaggtattcaatatccatcagtccatcacacgagactattaaacgctatcaggcagcatgcaaatccacgggcaagatatgcaaagggtaaatgcaacaataaattccttaattataaaaagaggtggggattggaataaccacttactctatgtgcgcatccacccatgatgcagcattattaataactttgctcc

SEQ ID NO: 195357 - DNA, 461 bp, Glycine max
  unsure (1)..(461): unsure at all n locations
cagagcgacctgaggcatgcaagcttgtattaggacaccatagctcagcttattttctctggatgnnaaanaacagtaccacttgtattgagtttactactatatataatatattcatacttttgcagataaaaaaaatggcatcaaattgttttttctatgattcctgcactggtttagagatgagtgagactttcttgatatctacttgtgatttatcagcttgtgattcctgcatcggtagtgttggagtaaattatcaaatatccttttctacttgtgattatcattcttgctatatgcaatgttaatggacacaccactgacaaattatattgaaaacatttcagcagtaccttcttgaggaagcgacaattcttttattcacacaaagctcatgtgaagcatagctgctattttcatagactcttgtgttctaactctatgttacttttttactg

SEQ ID NO: 195358 - DNA, 341 bp, Glycine max
attctgagggagtcatatcgagggtcttattctgaaaaacattgtttattagcattttgaagtaacattagaatggtgaatctaatattagttgataaaggatccatacttgaattagatcctcttgataaaggatccatacttggaaggattcaacttagctttataatgctctttgaataacctcttatagcttctaagaagattgttggagtggagcccacacaactacaagcttttggaacaagtggacaaacttgacaattgtcaggaaatgatagctagcaagatcattttgaggtggtcatattgaggttcttattctgagaaacatttttatt

SEQ ID NO: 195359 - DNA, 464 bp, Glycine max
  unsure (1)..(464): unsure at all n locations
agcttgtctcagaggttatgcgaaaccgttatttatatgctagccatcatcagcaagtaccaagaagaattaaatctagccatggcccacgagcacaaagtggcgcacgagtatgcctgagtgtacgcggaaaatgaggctagagggagggtgattgactcgttacattaagaggcaacaatgtggatggatcgatttgctcttactttgaacgggagtcaagaacttccccaattgctggccaaggccaaagcaatggcggacgcctactccgcctccgaggagatccatggacttctcagctattttcagcatatgatagacttaatggcccatataatttggaacctctaggaagtttgtattgtcactcagatcttgactatntataactttctgaataaaaagtttattcccacgttttactccaatatcagtgcgattcanatcaatcccacatttta

SEQ ID NO: 195360 - DNA, 416 bp, Glycine max
  unsure (1)..(416): unsure at all n locations
tactaagctacataatgtatattcacactatgtatgattaatngtgtttatttcttgacctgtgtaattagcaccattgtctaggttaattagatagagttttacttcttttggtaaaagccaagttgtcttttatgcctaattgatggaagcttgcatgagaagcttctatggaggttggatctttgagctttaatgaggtcctccaatggtgattttcaaccatggatatgtagcggaagataaaggataagaggtgagaggaggcgccatccactatggaataagccatggaaggaggagcttcaccaccaaaagagtgccttggacaagaagcttatagaggaagcttcaatggaggaatagaatgagagagatagggggggggggggcactaaattggaggagaaaaaaga

SEQ ID NO: 195361 - DNA, 460 bp, Glycine max
  unsure (1)..(460): unsure at all n locations
agcttgaaccatatntacgtcaatctctctttgtgtatgtagggcaccttttatggatttttcagttatttcgtgaaagactactcttgctaatgaaatattatcgtgtagagcaccctgttgttgtaacatctcaatgatgtgccaagcaatagcttctccctcacgatctggatccgatgcaagaataaggttttctgctctgtcaaataacataaaatgaattaagcaggatacatgctgtcaaccacctatgatgcacgtatacttcaaaattggcagcatatacatactgtacctgtgctactggaaacccaatattcagatttcttattattatatgtctgcctcagtatcaacacttgattgtgttatgttcaaatctttaatactaatatagggatattatcataacttgaagtcttgattaagtattcttatttaaattacagtatgattc

SEQ ID NO: 195362 - DNA, 342 bp, Glycine max
tgtcttgttatttatggtggtctcttcccatattagataacaagcatgctggcatacaaagaacaccatttagtgctccaaaagacaaaaccacaattggaacctcgctttgtcttgaagaagcatcatttgacggtcaacttcttggaccctgcttatgtgacatgttgattacctatcatctcgatgcattgacttaaaggggagtgtacttgttttcaacttcatgccttgcaccaaagatagtgagatccataaagaccttaataatatggagggattgccactacttgctcttaactcttgtttcttttaagagagcaacttcacaactttatcctt

SEQ ID NO: 195363 - DNA, 474 bp, Glycine max
  unsure (1)..(474): unsure at all n locations
atcctcagagtcacctgctgcatgcaagctggcttctacgatagatctgacttattatattgaagnccttgaaaagtaaagggcagatgacattaatagtctccgcaagacaaaagactctgatagtctttgaaatctttcactaaaatgcgaacatgcttagcaaagaaacaaactcccaaaccgattagaacaatatatattgtaaaaaaaaacaatgtgattaaaaggaaatgaaagcatgcaggtagatattctcataacccgaaatgagtcttaagaaaattacatctcatttctaagagaacatcagaaaaacactgcgtccaatggaatagaagaaaactgctcaaggtgtatataatctcacacaggcaagtgtttcatcgtaattccaaccacagatatgtcatagattgacgttgcaagcatttcccatcatatcaaagataatatgcgcaataatcatggatc

SEQ ID NO: 195364 - DNA, 320 bp, Glycine max
tctgtgtggcggtcaccacaggagcataaaccacagattctggcgacaggttgcagatttaattattcatggccagttgggttaccaagttaactaatgcatctaggttaccctcaagcttcttattctccgctgatgaagatgaatacgtggctacttcatgcactcctctaatgacaatagcattacttctggcacttaattgctaggattttgaagccatcttctcaataaacttctgctttattaggggcatggtctcatggctccaccactgacagatctatcatactctttcattgtactgagtcttcataaaa

SEQ ID NO: 195365 - DNA, 439 bp, Glycine max
  unsure (1)..(439): unsure at all n locations
cctgcagctgcaagctataaacatgatacttgaagatataataactttttcaagtngattcttgtctcatgtgctaagaagattatctccaacttttatgtttatccaaagacctagtatggaagcatactatgcctaaaattacaatctatttgaaaattctacttattaccgacaactcggcctttgtttttctagagttatacactatttttgagtaagaccatcgccaatagttagatagtatctaggtacaatttctcttaagacaatcttccctaatatccacttgaagattgacttttggtccatttattcgactatgtcttactatagtcgattgtcataccaaataattgactatgactaaatctaacataactctctaaggagggctgttattgatataaatattctatatcataccaataaatgacta

SEQ ID NO: 195366 - DNA, 476 bp, Glycine max
  unsure (1)..(476): unsure at all n locations
ctatattagtatcatgtntatgtgcaatgagacantttttatattcttatgatactagatagcctttatcacataatngactaacactaagcaagttgtgcttaaggccttcaacaagtagaacattttcaatggagtttgaagaattcgtacctattttttcaacttcaagaatcctacctttgttgttgtcaccataagttacatgtccgcttttcttgggagagatatgtgtgaactttgatgaatctcccgtcatatgttttgaacaaccgctatctatgtaccatttcttcttcaaggatacctacatgatcaagtttgtgacttaggtatccaaactttattgggtcctcgtgtgttagtgttaactaaagatccttttggaacccatatcattgtgatattgttgtaattgttcttaaaataacatgtagatgtgccatgcncttttcttcccaataagaacaagtatg

SEQ ID NO: 195367 - DNA, 462 bp, Glycine max
  unsure (1)..(462): unsure at all n locations
agcttgatgtacactaagcctcatatctttttctaagcgcatgttgcaaaaagatttttggtgttgcagaaagcgctaagcgccgctgctgcgctaagccccaaatgcttactggaagttacaacttcaagttgggcttagcatgaggctaggctaagcgccaatgttttaaactcaaacgtcacgttggcacgctaagggcagctgcacgctaagcgcgccatacgaatttcaatttttaaaaagtagaggcagaggcacttgggttgctaccttggcaccctaacctctgcactctctcacctcttagtatttctatttctgattcgtgcttattgatcctctgcatccttcttgcctctctgcattacacatccaagtaagcttcttgacttctttntacttttattttcatgtctcacaccttangatagaagaatatgctctcatagntagtattgg

SEQ ID NO: 195368 - DNA, 480 bp, Glycine max
  unsure (1)..(480): unsure at all n locations
ngaaatctcataatttcaacctaagtcaataaattgttattttactcaacatccacattaagcagatcacacatggctaattcacacaataccttaactcatccaaattaattaagtaatcaaataacacaagagaaacatcaaacatctattttcaattatcgaaatttcaggcattacaagagcacttcacatctttaaaagatcacttgaatattggaaataagaagtatatcaatctcatttttctttctaaaagtcaacatatcaagcattaagtcatactattattcattgtagaaaatatccataaaaatattaaactttactttcaaaacatttatgatcatctcaagtgttgatgcaatcctatcccgcaagggcattgngtagaagactccaagtagattgggctagagatccaagggaaggccctatggttctcatgagccttaaggtatatntngagcccatgggcta

SEQ ID NO: 195369 - DNA, 287 bp, Glycine max
actttctcatgccctctcaacatctatggtgaaacaatttgggcctaacgtggtgcaaaaggtgagtgactctatatgcgatacattgtcaacatcacgatgttaaattgttgtggacctgctgcacaagattgaacgaaatatttcctcccttgctcggatagcattatctcgatatatataaaaccttttactatgatccttgggattagattttgttgtttcatagttattttcaccgcaggatagaattattataatctgaaagccaaagcatcatagggatt

SEQ ID NO: 195370 - DNA, 404 bp, Glycine max
  unsure (1)..(404): unsure at all n locations
accaagatactaagctgtccaatgagcaagntattactcttgttgtgtccntttatcccaacaaattcaattcaacatccttgaatctcatgctttaagttgttggaccaaatatatactcatttgttgataggattgcttgtcacaagattaattagaacttcttaccagctttggaaagatactttcccaattaggatgatgatttcaaattcgatcatctacatattggaattgtttctatgttctgccatgattatagaggccaagattttcagaccctatgatgagagacacccaaccaacatgattgttgctcaagatgtgagtttgggctaaaaaattgactgctaaggatatttggctaacccttcatcgataagattgaggggctattttttttc

SEQ ID NO: 195371 - DNA, 458 bp, Glycine max
  unsure (1)..(458): unsure at all n locations
agctntaatgaagatgaaagactttgttttttgtttntgatngcaanctatgttagttgttgttgttaattttctaaatccaaccaaaattttgttctttattacattactaggcacgtgtcattaaaacataaaaacaagaaaaacataaactactaaatacaagttcatagaatataaaaaaatgtacaaagaacatcatcagtcaaatacataaatataaaataatacaaaatgacaaatgccctaaacaaagctcaactatccttgcggacacctcctctaccacctctgttggctatcttccttgacagtagcatctcctcagctgagttgcatccagctgcaaaaccctcatgtgccatcaacagaagttgttgtatgacctaatgactatctgtgccgtcagatacaactctcatgtccaacaatctctgcgtggatgctaacataatcta

SEQ ID NO: 195372 - DNA, 422 bp, Glycine max
ttaaaaaatcgatcaaagagaaatcactttacttttttattaaaatatcagcattcgtaggtcatttgagaagtgatgtaaatattctattgaggtgttcacagcttgacttagatcagaggaagataattatttgatctaataatttcttttattattcaatcgggttaattttaaaagcaaattcagtctggtcaaattaagaaagtatacaaatattaaaaaaaaaataaagcatacaaattaattcaacatcaaacatcacatctcacaattcaaattataaattaaagttgtatgtttagtataactttataatttattaagaaacaaatatatattagacaacacctctctatgttataataagtttgttagaagatattttatagaaagtgttagatacatgatcactgtattaa

SEQ ID NO: 195373 - DNA, 418 bp, Glycine max
agcttcttgcgtacgcgttctttttcttttaatatccaaaacaaatccctcttattactagctattttgaatactttagttcctgaatgtacaaccttcaaactgttgcttgttcccctctttcttttctgcaaaaaagaaaatcaaatgttgtcaaaacatggatgaagtcctaagaaaatcaatatcaaagaaaacatggatgaaatcacaattaaaaagcacaactacctatctttcagagacctttggttaattacgcttgcctccttatgtggcggggtttcgtttaataatcttaaacttttgccttccataaaaaaacttatcactaaacctctttacattaatccaaatttgtatgtgattgtataaaagaacattgggtttacacctgcctccactactcctacttctc

SEQ ID NO: 195374 - DNA, 349 bp, Glycine max
  unsure (1)..(349): unsure at all n locations
actaagcttgaagaggtaaaccggagcagctgtctattgtattcctttgaagaacttcgganacttaaacacgaaatcgagggatggaagaatcaatacaaggttagattacgcgagactaaaacaaggctctataaatcagaaacggaaaaaagtcggcgatcatggtgggggaagttcagctcanaagcataatggtattcagttattaaactcatttgctgagaatagtaatgccgaagaatcataaaaattggcataatgattgttgtcatgaactgttgtccttttcgagctgcttgttctatatctcgctggagcacttattaaaagtgttaccaatttactc

SEQ ID NO: 195375 - DNA, 459 bp, Glycine max
  unsure (1)..(459): unsure at all n locations
agcttcctcgttgccatttactacgaagggcttatattgtaaagnntagtttaccaagaaatgctactcttaaaacaaaaatggcatataacctcctccaataatcacaaacatcaatgtaaatttagagcaaactcatgcacatacttccttatgaacattcactcgcacaagatattcttctacctaagaaaaatgcacccatgcacaatcaaggcaccttcattacctagattatttatatgtacttccaaggtgtatttgctacctacatcacatgcacttccttggctaaatttacatacatgcatactcaaagcattttggctaccaaaaattgcacacgtgcacnatttggtatttctaatacctatgcatatacaaactntgtgatgaatcttggctatctacacaataaggtgctacattacatgctatattcaagtgttattgcttcct

SEQ ID NO: 195376 - DNA, 293 bp, Glycine max
agacaggacaagcggcccaacgcgaagcccaacccccccaaaaaaatcggctcacagagacagcccaaggcccacacggcgaacgacaacccgcccaacacgagccccaaaaaacggaaaaagaagcaaaacgagcgggggcacacacaaggcaaaacgaccacaccagcagccctcacggtgcaaaccgaaacccccgaggcgggcagaacagaaaacagccaagaccccgaagcacccaccggagactgacaagatcaccgcccgccccccagaaagaagcccaaaaagga

SEQ ID NO: 195377 - DNA, 438 bp, Glycine max
  unsure (1)..(438): unsure at all n locations
agcttataagcatntcaataaaacataatttttttttatattacgaaatccaaacttaataggaaaatatacgtgatatctctccttccttaacgtatataataatctctttaattatttcaaatatattactctgcatatttttaataaaaaacaatattaaattatatattataacttaatagattaaacaagatgtgtgaattgttatacttataaatatcttgttatctattttcatattttcgtagataaaaaaatattaaaaacatctaaaaggccgaaatatcatacaaactttcaagcaatacatgaaatgtgattgtaatattgtaatatattctatttcataaattttatcaacaagataaagaagagtaattatgtcttgtcaactatgtggccaagcgtttgtaccatatcgtttcattgatcatg

SEQ ID NO: 195378 - DNA, 470 bp, Glycine max
  unsure (1)..(470): unsure at all n locations
agtcacctgcggcatgcaagcttgggtctctgtctatcagcctcattttctttgttgttnttanacntacgacctactcattcttcccacagcatcatttagcaaccaaccattaccattccctctgatctctctcacctagctagctactcatcttcactccttgctcctttcattattttctcttagattctgcatcaccgtgttcacaaaaaaagattacactagttactgagtactacttctgaaaccacttntcttcctggtttgcttctgttgcgaggcccattggaggtttcatctttggttcattatcacttaaaaaaaacttaattcttttctctttccttgaggtattgctgatggaaggtcctcactgttcttgcgctagataatccactcataaatatttgtgattcgttgggtcattgacgagagaaaaaagccatttactagttggtctgcgggct

SEQ ID NO: 195379 - DNA, 442 bp, Glycine max
  unsure (1)..(442): unsure at all n locations
caggcagcacaagccatgtgtctttcaatgaatcgcgtacatctcttcctttatccaatgaatggccacaagcgcaagcatgaaagacactagtcatggaataaacatctggaccaacccctttgctgtccatttcatagaataaccttattgcatcaacatatagaccttctcttacataagcagcaattaatgaagtccaagagacaacaggcttttgacccatcttctcaaaagcttgaattgcgtcagttaaattaccacattgtgaatacatgtctagtaagggatgtgtaaacataacttccctactagaacaagctntcactcctagtccatgaagtgctctccccaatgaaagactaccaacattngcacaatgccgaacagaaataaccaaggtagccaaatccacaccaaccctcaaaatgagcaatctgac

SEQ ID NO: 195380 - DNA, 443 bp, Glycine max
  unsure (1)..(443): unsure at all n locations
agcttaatggctgatatatacgtaccttctaaatctttacaanaaggaactcacaaaagggtatgcttaaagccatattttattctttattctgaccttttatgattcttcaacgtggtggtggggttacaaaagatggcactttctgtcatgacccacgagacatattcacggggtaattgcaccctttcttgttgttttgcaaaaagccacaaaagcagaccctctcttttaccaaatttgtctctccgttgaatgtgtaacttgttcttgtcagcgcaatgtgcttgttaagagtggttccttacaggccctttgatcttcatcaaatcttgatcacacggaacaatgtattttacactataagttgatttgggctaacatggaaacaaagaagcagaaaaacatgacacgggacaatgttggcttaacatatgtctcat

SEQ ID NO: 195381 - DNA, 456 bp, Glycine max
  unsure (1)..(456): unsure at all n locations
agcatctagcacactgcagagattanctanagttcccagnggncagaccatggaaaagtgttttgtgaagttgcacaccaaatctccagaaaatccaacggttaatgaatgctgtgcagtgtttttaccgaggcagcttcatgtagctttctctagagagttcactaagaggcttcctttagaagcattctcgtggcttctttgagaagctttctcaagaggctgctttgagaagctctctcaagaggcttttttgagaagctagatccttatctatccacccctctattaactaaattaacttccttaaaaataattacggatgaaaataacgcatcatataatctaacatcagacataattactaattatatttggatatatatatcagggtgtgacaactcctccacctttgtatacattttctcctcgtaatttacctacttaaactaggac

SEQ ID NO: 195382 - DNA, 352 bp, Glycine max
  unsure (1)..(352): unsure at all n locations
gcagcagcaagcngaacacagcgccgagggaatctttttctaacacacgnacaacaccagagcagataaccaccataacacaccaacgacaaccgtagggacgactcattgcagatccataagatggactacgagcacctgcaccagatcttggcactaacaaccctctgcctataggcaacaactgagaatgcgacccacaagaccaccaagaccctctacaaaaagggcaatggaaccaacaacaactgtgccatatagcacgccacctacatggagagcgtaaacaaactcaccatggatcacaagggagcaatcaatgagccacaaaacagctagacttaacaccacc

SEQ ID NO: 195383 - DNA, 400 bp, Glycine max
  unsure (1)..(400): unsure at all n locations
agcttgcatggaatcctccctatttgatantctttggtagatgctgtatatctaccattaatagatgtccttgtatgaccgctaacaatctatgaggtaatgatttagaactgcataggttggattcttgtggcattgattcatctcatgttagtatgtatagtttctcaactcgttcgaatacaattatttccacagagaatgagtcatctacagaagtggataagcatttggccaaattccaatgtgaaactgggaatgatgtcatcccaggtgatagacagcaaggtggtgaagatcttagtgattctgttgtctgtcatcctgccaaaatatattcacaaatacaatcacatgtgaaaatttctcctgaatttgatgtaaaatgttgcccagttgg

SEQ ID NO: 195384 - DNA, 178 bp, Glycine max
aacaagggaacatggaatttgcgcccccggccagaagagaccccggaaacccggcacggcgtagtgggaagagtacaaacctaccggccacagggaagtgcaaaccgggcgagaaactgagcaggacacgctatcggcaaaaagacaaacaggaagatggagcatccggggacataac

SEQ ID NO: 195385 - DNA, 476 bp, Glycine max
  unsure (1)..(476): unsure at all n locations
gacctcaagtcacctgcggcatgcaagctacctcgatggggtttattagattaatctgcggcccccaatgccgacaacgaccacccaatgcaccacaaacgaaccttcaaggagaggaaacagtgctgggaggagaagaaactttaacgactgagcaaaaaatagcaaacgacacacggaagaagaagctatggaatgcgtgaactgtgttgggtgtacaagttttaaattttaagtgaagggcattatcgcccattcacttaaaatgctgggtgcacttagcaacaccctatttttatctttgttgaatgtgtgttcacccaagacttttccaacatatttttaagtaaacttttatctactatattncatattaaaaataagagtaatatctatactctgacaatataataaaagtttaattttatactggttttccatcacaatttattgtttgaattactctatgatattat

SEQ ID NO: 195386 - DNA, 458 bp, Glycine max
  unsure (1)..(458): unsure at all n locations
actcagcttgatggggcgagaggaaatacatgtttgtctcattaattaggggagaangtgaacgaatgtgtacatgattgcgatgacgtccatagaagaatcaaacaaggcgcactttgcttcaagattaatacaagatagtttcagcaaacaaagccttgattcaagatttcttcaagatcaagccttgcctcacaatgacaggcttcaagtcattcaaggcacatgtaatcaattaccaatggtttgatagtgtgtgatcgattaccagaaactctgagcgttgggaagtcaaattttagatgaagggtcaccactcgttcatgacaaacaactgtgtatttgattacactaactctgtaatcgtttaccagagatggattttaaggaatatcaccaacagtcacatctcttcattatgattgtgaatgcgcatcaatggcctattaatatgtgac

SEQ ID NO: 195387 - DNA, 449 bp, Glycine max
  unsure (1)..(449): unsure at all n locations
agctntccctaccaagngggtactattttcatcttgtcttgnnagcatttaataaaaatatcttattttggcttctgaaaaagggggtaagtctttttaataagtattcataagagaaaaagataaaatgaattaaagagataattaaaataaattaaacttctttcataacttaaaaacatgttatgtgtcctaacttataaaaaagttaaaagatgtataagttacttttaacttataaaatatatttgatttcttttcatttttatttttgtataagttgttattaaaaaatttatttaaattgattatccatttatactttttcatagagtatttatcgttatccagcttaattctagatgcaatatgtaagacaccatattaacaacctcatcaaacagactgtngcttggtaatatgcatgccttgaatatttgatgaattac

SEQ ID NO: 195388 - DNA, 460 bp, Glycine max
  unsure (1)..(460): unsure at all n locations
actaagctgtatcttatttttctnangntattcattttcatcatgaagcttaanaattagaataactatcaataaagaggtcagtttcgtttaaggcctaattttattcagttaaaaaatgtctcattgattcattaacaattaaatgattcattgattcacaaattacacaagaagctttgtcatcttcattntttcatactcatcctctacatcttacacttgaagaagaatcatcccttgattgagacatttaaacaaacatcctataagtaacaacaaaaagaaataatatttcttcaatcccaaatttagggcaacaaatgcaaatccaacaccaaacccaacatccacctccaccaataactcataatgcanaaaaccaaaanacagggagaaagagaacacaattatatgcacacaaccatgcttatatattcatatgtaaatgatttgaata

SEQ ID NO: 195389 - DNA, 422 bp, Glycine max
  unsure (1)..(422): unsure at all n locations
atgtggcggncgggcgatggagcacaacaagatttccacatccacaatgcgcgcataaacccaccatcccctggtgcccacctccaactgagctcacgtactcccacgtagcccatatcctcgtttctctcaacaccgggtccccatcaatcctctcaagcttccacaacatccaagcagaacaacattcaaacagcacaagctatcacagccaagcaaaatagagcaaaggcagaaaactctgctcaaacaccaaccaaaatcacagcgttttctcgcttaaagaccccagtaacaattccttcgatccaattcgttaaccggtggatcgactcgaaaattttactagaagtctctagtacataagcctacattgtgaccgttgggatctactagcanacatccagactcattctgcacta

SEQ ID NO: 195390 - DNA, 477 bp, Glycine max
  unsure (1)..(477): unsure at all n locations
gcttattaagaggcttcctccagaagcttcattaagaggcttcctccanatttcttattaaggggcttcctccagaagcttcattaagaggcttcctccagaagcttcctcgtggcttctttgagaagctagatccttatctatccacacccctatattaactaagttaacctccttaaaaataacacaacaaataatcaaacatcaaacataattactaataatatattgatatatatatatatatatatatatatatatctgggtgttacaactctcccacccttttagaaatatcgtcctcgagatataccttaatcaaacaaggatgggtgagcttctcgcatctaactctctaattcccacatggcatcttcttctgacgcaccctcacagatcaccttgaccaacggaatctctttnctcttatgagtttggtcgctaccttgatctcaaggcatgttcatatgaaatctc

SEQ ID NO: 195391 - DNA, 459 bp, Glycine max
  unsure (1)..(459): unsure at all n locations
agcttggagtntccaagtgccaattcgtcttcttctttagtccagncttcttctggcttcaattcttcagtgggctttccttctgtgtccagcatcttgggatgttcccagcctttgatgacagctttccaggttctgctatccagtgatttgaggaaggccaccattcttgctttccaatattcatagttgcttccatcgagaattggtggtctgttcactggtccgccttctttctccatgttcatcagaatttatctccctagatctcactctgtgatttcgagtgttggctctgataccaattgaaattctgataccaggggacagatgtcgtacaggatgtcacgacatcacgcttcagaacatgcagattatatgtgtccgtatgaacagattaaacaagtaaataacacaagaagaattgttacccagttcggtgctacctcacctacatct

SEQ ID NO: 195392 - DNA, 336 bp, Glycine max
ggtgttgaagagtcaaatcttgattctgcggaattccaagtgtaaattcagtttgagcaagcttagtttgaggttatggacttgtgagacgtgagagtttgcttcaagcttacctcattctcaatatcacttttcaaacctagaaaacccattgaattgaggggtgtcggacacctagattctgtgttgctgtgctgcaaagctcgattttgggttagacatgatcgatacatgatctgggacttgtacgaatcgattttgccagattggatgagaggatgtgtgatcttcgcaatctgcacttatgcagaattttgctgtctcaataggtgcagc

SEQ ID NO: 195393 - DNA, 329 bp, Glycine max
ccaagcacgcgcagcacagaaaaaaaagagaaactcttgcatgcacacagggagcacataccacaagggggaggtgagggtgcaacaaaataggcacaatcacaaatgaaaccaaacaaagcaaaactgaaaacagtcggaatgcacccgcatgaaacacgtaacccaagaaaacaataaagccactgtgaaacaaacaaagataaaacgtgagcgcaaacacataaggggaaccaaagtaagctccttgctaccacccccaaactaagctaagggcaacacacaagatgaaacggcgcaaagacaccagagtaaaccaaaccccctaa

SEQ ID NO: 195394 - DNA, 323 bp, Glycine max
cgcaagagactggggggatgctcctctgctggccactatacataccagtgccctaccatgcagccacccgtagcaattgagcagactaaagctcatgccgcgaaacatttacaagagacctcctcaacctcagcagccaaatccaccacagtagaacaactatgacctctccagcaacagagacaatcttggaaggaggaactaccctaatctcagaaggactagccctcaacaacaacaacagcagcctgctccttcctgccaaaatactgctggcccgaacagaccatacattgcgccacacattcaacaacagcaacagc

SEQ ID NO: 195395 - DNA, 450 bp, Glycine max
  unsure (1)..(450): unsure at all n locations
agctnggngtacgtaaaataattagcacttttgtttatattattttatgtatttatcacaatgtgcaaatgagatgattgtgtctaactttntccataacatataggcctgatgttttattttagaagtttataatctgatcttcagaatttgaaattttttctttacattcttatcaaaggaacgtcgttttaatcaggtagagtacaattataaacatataaattacaaaaattaaatataacattttatggtttatgatgatgagtgagatgtggtaatgggagagcaataaggaaagcattttggatccacaaaacaggacatgaagcttcttgcaagttttcaaataatcccttcacgatcggtnttgggatcttgcaaatnttcttgtctcaaatcccaaacttccacgagttgacatggctttcaactgttgttgcaatcacc

SEQ ID NO: 195396 - DNA, 440 bp, Glycine max
  unsure (1)..(440): unsure at all n locations
agaacgccgaagaacggacgaaaaccttcgcgaaattcctcatgganacgttacagaagcgcctcggcttggattttcttcacggaaacaatttttctaagcaatatcgaaagagagagaagtgcctaaggggctgaacccttttccacttcacttctccccctatttatagaaaattgggggagaagcttgccacccagctcgcccaggcgagcagggttgcttcctccagaagcaacaaccttctggaggaatcttctagagggcccaagagggcctggttgttatttgcaccgccattatactaaatacaccccctgcctttttttggtgattctttttccggaagtacggagactacgaatttcgaacgacactagtttccttccgtaatgtaccggaccgtgcggatacatatccatcccttctgacttacaaag

SEQ ID NO: 195397 - DNA, 334 bp, Glycine max
cgcacaacggaatcaaacaatgcgaaagacgatgaccctatggctgcaaatatcccaatcccgtgcgtatggcttttgaatagggtgaaaataactctttgattgtcaaaacacccccactttcgtcaatatgacacatcggcgcaagggtggctcgcccagtcattctctgtctgctacgcacagacaaaggcatcgatcggtcggtcatgaccccatccccgctagcggatatccctaagtacctgcctttaataatcaaacaagtatggcctaccttgaccgcatttctaccctaccttgtatgtatcctgccatcatgtcttgctcactc

SEQ ID NO: 195398 - DNA, 435 bp, Glycine max
  unsure (1)..(435): unsure at all n locations
agctngcctaattaacctaagaattttattaatcattattgaacacaccaattgaaaggaggtcctactgagcgacttccgcttcttcttggtgcggcttcatctctcggacctactgagcgaccatcctttctagcttagggggaaataccataccttcgtcttcttcaacctcaggccgattcacatctcattcaatatcaatggtacggtcctcagtattagtaccttcacaggactcgtgatctgatctgtatcgcttaaacgcaacatacaataaacatgcacatgaatgataatgggtgaaggccaacaatatatgaacgaaagatctttatattatcattcttaatagcgagagacataacaccttaacaaggagagaaaccctatagcctatgaccagctgtatggttaaagctatagcattacatt

SEQ ID NO: 195399 - DNA, 274 bp, Glycine max
ataactctggcaatggatcctacgcttttctaacagatataactctgctaatggtgctcctgaccatacatgactagtctataaaagcaagaccttgacttggagtttaataacaactattacacagcgtttatcatgtattctcttacacacctttgagtcgccatgaacatcctcttgaactccttcatcttcttcctttgccagacgctttctgagatttctggtttgcaaactttgttctcgcacagacaacaggagagtgctatacatc

SEQ ID NO: 195400 - DNA, 480 bp, Glycine max
  unsure (1)..(480): unsure at all n locations
ttagagtcacctgctgcatgcaagcatctacattaaactatagttgttcttttttttaacaatttttagttaaaatttacttattttattgaatgaacttcgaatcactcaaaatcaatattcaattatccatgataaaccggaggattacaacaattaataaatgactagggtgcataatgatgtccttaatgaatagagaaccaaaataaactcgagttattgcaaaatatatgcatctgcatcaaagtaattaagatcatacctttcattgtggttaagacgaattccaaggtaaaatgccacagatagcaaccacgaatcactatgcacatgcaccaaagaaatccaatccctgcgactcacatcatccctagcaaaattgattccaagagtnggctcacggagctctggtggaactatctntgatggcagagttacttaccaagccttattctgatgtccatacaggcacaaatt

SEQ ID NO: 195401 - DNA, 401 bp, Glycine max
  unsure (1)..(401): unsure at all n locations
agtactgcattacctcttgagatggctacgcattcaacctcggcttctatccttagccgtaaaaggtcctcaagctccgactcaaccactttacattattcatccgacgaatctacggttctaacagactcttgcctacagatcgtaccactactctgcgatgtttcaagtcagcaatcctggagtcccttagagcaagcacactcctgaaatcttctcacttgctttccaacatatgtatattnttgtgtccggctcaataccttgcgatctgatgaactcgatgcagtttgttatattcttctgcaccacactgaccagatnggcttgattattaagtacaagatcaatagttgaaccagccaacgcactgttcacttgggtggtcatatctagtgaac

SEQ ID NO: 195402 - DNA, 393 bp, Glycine max
agcttgctagtggagctaatacagatgttgatctatgagcttcaacgaagaccttcaatggtgattatacaccatggagatgcagcagaaagcaaaagagaacatgagaggggaggcaccatccactatggaataagccaagaaagaaggagcttcaccaccaagaattgccttggataaaaatcttgaagaggatgctttaatggaagaaaagaaagagagaacgggggagcacgatattgaatgaatataagagggagagaagtagaacttcgaagtgtatctcataacactctcattcatcatagttactacaagtgttactcatgcttctatttatagactatgttgcttccttgataagctttcttaacaaaactatcttgagaagct

SEQ ID NO: 195403 - DNA, 455 bp, Glycine max
agcttaagcccggccagactctcttcttgtctttgcttcttcaagaaaaatgtcaaactccctcaaaaaatcttatttcaagcttaaataggtgggttagtccgtgctcgcgcgcttatcgcaaatatggatcgcttatcgcgcataagtgaattggggcttagcgtgcttctctcgcttagcggataagctgaagcggtgcgcttgatgacctggagcggtgtgctcaatgaacctgacagctcgtcttcttctggattctttcttgcacttaaccaccgaatgttgcgctctgcgaatgctcgctaagccaggagattggcttatcgagaaggtgaaaacaacacttttgccaatttgcctatttaacctgaaattttgagaaagtgattattaaacacacaaacacaagtgtaaattatctattacctatagtttacataaagtacttatta

SEQ ID NO: 195404 - DNA, 462 bp, Glycine max
  unsure (1)..(462): unsure at all n locations
tcttagtttcagatgatgcagatgagtgtgtntctcttcatgttccctattacaanattctggcccaaaacgaaataaacactgaaccacataaaataaaattgcaatctcctaattagaaattaactaaggtaagcgctgttttatttgccctcttcaagtccacaaccaaaatccatattaagcccaatgtgtcattaattcctgaaattagattaaaaacatcaaattagctaaatgagcccaaataataaaactgtctaattaattcgacaattaagactaatcagtaattaaaaatggtgcacatagggtttaagacatagaagataatgatggcacatcaaccttcaaattaatctnggccttcagcaactattaatagtcttggtaggtctctgcctctgggcatcatacttctcactcagggcgttgccttctcacttgggtcttatcttctca

SEQ ID NO: 195405 - DNA, 453 bp, Glycine max
agctagagaggagctttttgtttgtttaaagagagagaagggggggagggggaaggaattgatagggaaaaaagaggaagagaagtggaactttgaagtgtttctcacaaaactctcattcatcaaagttacaactagtgttacactagcttccttgagaaacttccctgagaagcttccttgaaagctagagcttagctgcacacacccttctaatagctaagctcacctccctgagaagcttccttgagaaacttccttgagaagctaaagcttagcaacacacacccctctaatagccaagctcacctccctgagaatctttctggagaaacttccttgagatactaaagcttagcaacacacccctttaatagctaagcttacctccttgagataagaagctagagcttagctacacacaccccactaatagttaagctcacctccatg

SEQ ID NO: 195406 - DNA, 460 bp, Glycine max
  unsure (1)..(460): unsure at all n locations
gggggatgctgatataataagttcctcttactttatattacatagaaggannaaaagagagatggatattcaatatatagatagaagaaaagaaaacacaatcattctctactttctagtttttctaccaagctagtaaaatggaatagtttcaatccacatctttcatagaaacaaactaaatttgtcactcagtcaatagtaaagaggatacaaagtataatttaattgatgacattgtcatactgttagtccttcaaatgtattattattgtngatcacgcacacttgttcatcaagtggttccccaacacctcgactatcatcatggagaatacgccttgagtagtaaacattgtgttaatactctgtttgcaataaaataatattgaattagcattaaatgaaagaaagcttgaatacctatgaagcatcaattccacctcaccatctttgatgc

SEQ ID NO: 195407 - DNA, 414 bp, Glycine max
agcttcttagtttcagatgatgcatatgtgtttgtagctacctcatgcactcctctaatgactatggcatcatttctggcactaaactgctgggagttggaggccatcttctcaattaaatttctggcttcagtaggagtcatgtctccaagggctccaccactggcagcatctatcatacttctctccatattactgagtccttcataaaagtattggagaagaagttgttctgaaatctgatggtgggggcaactatcacatagtttcttaaatctctcccagtactcatacaggctctctccactgagttgtctaatacctgagatatccttcctgatggttgtggtcctggaagcagggaaaattttttctaagaatactctcttaaggtcatcccagctcgtgatggac

SEQ ID NO: 195408 - DNA, 399 bp, Glycine max
  unsure (1)..(399): unsure at all n locations
atttaactgctctattgtgttcaatcttgctctttctaagatntatccttctaatgtgtgagctacttaattttttctttctttcttgaattgtgcttgggtttgttttcaggtaaaacaagttctttataaattgtagatctgctaccgcagcttcaagcacatcatgggttttcatgatatacacagggatggaaggaagaaagattgagaattcanatcacttttttttttcttgcccaaaatcttatcagctttggtctttctatttatgctcggcttggtgtttctgttgctctaccacatgatgaatntgcttattatctacaatagggtagcttactctgtntgtatactgtaaactggtcaatctggcagatgtgtaacaaggtactatat

SEQ ID NO: 195409 - DNA, 433 bp, Glycine max
  unsure (1)..(433): unsure at all n locations
agcttatcatatntggattctccccaacttttcttctgattatgaggaaaataccttaccaggttctcaaacctagttgcatactctgccaccgtcacgctcccctgttntagctcgaggaacttcatcttcttcctattcttcacgtcttctagaaaatacttctccataaaagtctgtttgaaagtctcccatgggacaacaacacctgctccctccagacttgggtgagtgttcttccaccagtactatgcctcatctgccagcatgggagtagcaaacaacaccttctgttggtcctgacacttcctcactcagaagatcttcttaatctccctcaaccaagcctcagcgccttcaagatcataaccgcccttgaaggtaggtgggtattcctctannagcgatctaaaccatggtacacagctgcttc

SEQ ID NO: 195410 - DNA, 423 bp, Glycine max
  unsure (1)..(423): unsure at all n locations
tttttgttggtaaacctcacatgantggtttgtaggttatgtatgaacctgtgtaagaatgtttggatattntgggagtcaattcttggacctttgggttatatttgtttgctagttcatgagggagaatagagactcactcatacacctaacatttttcaaatgtacttgatgatatagttcaattataagggaggaaatggattgactatgtcaagtactactagtgtagaaggacttgtacatggaaaaacctttctaggatacctaatgagccacagtgggtatttgagggttatgtttcgttggtcattgttntgagccctagtcttttttgtatatgaaanaaggtagactangctntcattttaaggcatgtcaatctctcgtatgtgacccacatatattgtgtaatctgattta

SEQ ID NO: 195411 - DNA, 418 bp, Glycine max
  unsure (1)..(418): unsure at all n locations
agctnttcgtcttacagacagcgaaaaagttatttttataccgataaccactcgggaatgtccgcccgttagcgtgactcatatgtcagtatgacagatcttgtgagcgccgaagatgacgtaaatctccgagtgtcatcaggcttgttggccgcgattgacgataggcgcacaagagaacgcttgtctctgcgtgctataacgcttttcgtcttacatagagcaaagaagaaagcttatacggataaccactcgggtatttccgcccgtcagcggactcaaatgtgagtatgacagatcttgtgagcgccaaatatgacgtaaatttccgcgtgtcaacgggcttgttggccgccattgacgaatggcgctcaattcgacattaggctctgcgtgctattatgctcttgctcttaca

SEQ ID NO: 195412 - DNA, 435 bp, Glycine max
  unsure (1)..(435): unsure at all n locations
agcttacaaatnncgtaacgagattagttttctttctatattgcngcggaaccttacggattacgtaatcatccctctttttcctttcagaatgatacggaactatacggattacgcactaacacttactcttaatttccgccatgtcacggaacttcacggattgtgctacaacgcttttcttttggcttccggcatgtcttagaacttcacaaattgcctaacgatgggtgccaaatacctcgaagtggtcaaacgagggtcgcataccacaacggatggtccccgaactaaattatggtatgacaatattacattgaatgtgttaccaaaataatctatgttgatatatagttgtttgattgttcatgataaatcgatactatcatgctcccgatttttgtacttaacactaattcgtaaacatatagggat

SEQ ID NO: 195413 - DNA, 464 bp, Glycine max
  unsure (1)..(464): unsure at all n locations
agcttcttcaggtgttattccttccatctctttaaaggctcctattcaagatgaagacaactgtagacactacctctccccacaagtacttgggcagactcttgcctttcaacatgctccttaccatattcattatggttctattttttctttctgcagctccattatgttgaggtgtgtagggaggagtcacttcatgaattatgccttcttgatcacaaaattcttgaaattctacagaaacatattcaccaccaccatctgttctcaatatcttgatcaatgagccactttgcttttctgccatatttttgaacttctcaaagacttcaaagacatcactcttccttcttattaggtaaactcatactttcctagtcaattcatcaataaaggatatgaagtatctgnttccacccagagattcagtttgcatatggccacacacatcatagtaaatcacc

SEQ ID NO: 195414 - DNA, 452 bp, Glycine max
ttgagatcatagaagggcaggactaagaatctaagattattcttatttctcacggaccagccaatatttctagtaaagctgcatgagccaggattatttttaaaggaaagtcgtgcggccaagctctcctatgaagactacaaggccaagctgatctcacagtgcacgatttgaaccaaagagagcagatctgagcaaagaagattatggctcaattggaggagagagaaaacaaaccaaacagtggcgaataacctgaatagagagccgcaaggcccaaatacaattaacttacggcagcagattcacgacaatgatggcgacatgaatcagataatattgaagaatcaaaaactggctgggacatgccaccatgtgtggaggaggaacggtgcacatggaagaaccatgtctacacaacaacagtgtgaacatgcataatatcatctatg

SEQ ID NO: 195415 - DNA, 254 bp, Glycine max
  unsure (1)..(254): unsure at all n locations
gacttaaataggtggccttgttcgtgctcgttcgcttagcgcaattctgaaccggttagcgcgcattagtgaatntcggcttagcgcggcttttctcgctcatcagatggactgaagcggtgcacttagttagatgacccttcgcttagcgaacatgcattgctcatccttcttccagattcttcctcgcactcagccgaggagtgttgcgcttatcggatgcctcgctaaacccgaagattggcttagcgaga

SEQ ID NO: 195416 - DNA, 227 bp, Glycine max
acgagcccaaacccggcaccccatcccagaaaaccagacctgcacaaacccacgccaacaaagggaaaaagacccacataaagcgaaaaagcaaacagaccgaacacgacaaaaaccatcaaaatctctcaaaagacagacacagggcaaaacaaaaactaacaaacaaacacaccaaaaaaacaagccacagaaacacagcgggaaatggcccaagcacgcaaaaa

SEQ ID NO: 195417 - DNA, 427 bp, Glycine max
catgaagctattatgatctgcaggttctttttcattacgtgaaggcaatgtcactcatcatgagtacatacaagttggttaaggaagggatgtgggtcttaaccagatatcaatgtttgaagcaaaaatcgctgctgggaatggtgagcagacaatgagtagagacatatacaggcttggacaccgttttgatttcttccgaatgctatcttgttattacactaccattggcttctatttcagtaccttggtatactcggaacctaccttacttcttgtggcatatataaatatgatctgtccaaatactgactttggtttgacagataactgtcctcacagtttatgtattcctttatggacgcctctatcttgcccttattggagttgaagaaagtgtgaaccacaaagagctattccagacaac

SEQ ID NO: 195418 - DNA, 412 bp, Glycine max
  unsure (1)..(412): unsure at all n locations
tgacgctcacagacagcccaaatgaaagctctacactatcgaacaacttcatcacatggatctaagccagcatgcaaattgcatagcatacgatgggagagctcgcacacagatgtcaccaaaaatattatcctatggccttcgtgcaatgaaagccaaacttatcacttaagatgcgtctatgttgtctggcccactcatagaagaaaacacttgagtatatctctactaatcctttgacctgaactgcaacaaaacaagtcaagaatgtgattaataacctcaacctgatcaacgctaggctcagcanatagaagcaaatcatgctcaaatgccaaatgagacagcttcgtatagcttatctaaacaatattcatatagctagatacatcttaacacgccttaaagaata

SEQ ID NO: 195419 - DNA, 457 bp, Glycine max
  unsure (1)..(457): unsure at all n locations
agcttgaaggtgtgtagccaaccatcttttatttataacactggnaatgggtctactatcattgatatcatttctttctccgacattgatgagccacttgagctaccatgtctctccacctttggacgtattctttgaaagattcatgcccctctttgcatatgttttgtagttgcatcctatctggagccatatcagaattgtactgatactgcctaacgaaggcaaccattaggtccttccaagaataaactcgggaaggttccaagttagtgtaccaggtaacagctaccctagtaagactttcttgggaaactgtatcagcagtttctcatcttttgcgtatgcccccaccttccgacaatacatctgtagatggttcttatggcaagtagttcccttgtacttgtcaaagtccgacaccttgaacttgtgaggggcgatgatattgggtact

SEQ ID NO: 195420 - DNA, 447 bp, Glycine max
agcttaattatgacaacaagtcttttatttactatgaaacttattcattacatgtattatttttattataatacttattattaatattaataattatatatatcaaatataaatgttatatatatttatgtaatataaatattatgcatattattatataaacatactcacctataggcttagtaagcatcttttacagcctaaaggctgatttttctcattaaaaaatatttttttttaaatttaagtctaatctatttaataaatagatcagattataactttacaatctaaactataattctgcaacagaaaattaataatatcacattttggtttgaaggtggatacttctgggaacttattaaatattattagaattacaattctttgtccagattctttacgaataactccgcaactaataatcaaataccataacaatat

SEQ ID NO: 195421 - DNA, 351 bp, Glycine max
  unsure (1)..(351): unsure at all n locations
ggggagaaacncagncagcacaagagagacaactatgtctttactntattaaccatnctatggtaaggtccgtacggcctgacccaacaactacacgcataatactgggccaagaagggaggaaatacaagatcatttctaaagatgaatcgaaagaaacaagtgactaataaaatctaaccaaattttactaaaacataaaatactggtaaaagggaaaccaaatcaaatatttaacacataaaaactacctatcctatttatcacatatggagcagacttactatccatcttatattatatcaaaaacaaagtaaaaagaacatacttggtagcggacatcacacactc

SEQ ID NO: 195422 - DNA, 461 bp, Glycine max
  unsure (1)..(461): unsure at all n locations
agcttctggtgggacatcttgacttgctttcctatctgacattcaccacagattctgccctcttctattttcagattgggaatgcctctaacagcacctttgtcaatgattttcttcatgcctcttaagtgcagatgtccaaatctttgatgccatattttgacttcatcttctttggagaatagacatgtggaggagtaactggtttcttgaggtgtccataggtaacagttgtcctttgatctgctgcccttcattagaacttcactcttctcatttgtcaccaagcattctgactntgtgaagtttacattgaatccttcatcacacaactgactgatgctgatcaagttcgcagtcagtcccttcaccagcagtactttgttcagactaggaagtccatcatggactagctntcccattccagtgatctttcctttagagccatctccatatgtcac

SEQ ID NO: 195423 - DNA, 431 bp, Glycine max
  unsure (1)..(431): unsure at all n locations
tcctctgatgaagcanatgctgcagaacaaagttgacttttctctttcangcgaacaaatatatatatcacccctacaaacaaatgaggaaaaaaacaatatagaaaataattgttgaaatcaaactcgaatgcacatatgctggtccaccgtagtaactacacacagtatatgaatcctattcctattcctatccagtaagaacatgagcttctgcatctgttcaatccagattcttgtcaacgaggagcagcagtttcttaaccacaaggcacagtgtatttctaaaatgcacatattaacatttcagtttttttcagaatgtgtagagacttgcacacctatcactttggcatcatgctttctcttacttcgagtgcgcctcgatctagatgttctagtctttgtagaatgcttggtcgtctgatctt

SEQ ID NO: 195424 - DNA, 411 bp, Glycine max
agcttatggtacaaagaattatattaagtttcttgagatacaaggcttgtaaaggattgattcaataagtgtaaaagtgtattgaaaagcaaatcaaagccttgcttttatagagtcttcatgtctggccaagaggaccatttataagagttataacttttagaaaaacttaaaaccaacttgaaaaagtcaaaaaccttttgaagagtaacatcttttgatttattcagaaacagtcactggtaatcgattaccaaatatgtgtaatcgattacacaaagtctttatgtgaaaggatgtgactcttcacatttgaatttgaatttcaacgttcaaagacattggtaatcgattaccaaaacatctgtaattcccaacataagcttttgagcctttcatggcaaggtatca

SEQ ID NO: 195425 - DNA, 478 bp, Glycine max
  unsure (1)..(478): unsure at all n locations
ttacatatatcatctaatgtagtaaggaagtgttatatattcttcttngaaccaacaagcaagaataatgaatcacattcatcaagaanattagtttacataatttaatattgataatctcaataaaaaaatcattttctataataccctttataacaaaaaaggagaaagttgttgaaaataaaactttaattaaatgaagggtgttctagagatatatcatcaaatatagaagagttagcttaaagttgcttatattttaatccatcacatgtgtttgttttatttttttatatttcaatccagataaagtaactatttaaaattggctaaatgaactatttagtcctttattttatattttttgggttagttgaactcttatttattttaaaagtcgaattattcttttatcttatgtttttgtgcattttaagcccttatattttaaaaaaattagtaagcctttatcttattt

SEQ ID NO: 195426 - DNA, 453 bp, Glycine max
  unsure (1)..(453): unsure at all n locations
agcttgttcttgattgtgtctatatttctttatcaagctctgaacaatatacttgtccttcatttaactgtctttggggttggcggccatgctcaacaaagtactttcgacacctactgtacattgatttgatcaatgctgttatgggaatgttgcgactattcttcaaaaccttattgatacattctaagaggttggttgtcatgtgaccatattgacgtccttctctatcataagtcatcgtccatttttcctttgaaatgcgatcaatccatgttgctatggctggactcagttgacgaaatttgtctaaatnttgataaataaaatgtgcttgcaaggagtgtacgttgcatataattacgtatcaataaccaatttatgtatatataaaacttagataaacatgaccatcaaatatgagatcttacccaatgtctccaacatctcttt

SEQ ID NO: 195427 - DNA, 464 bp, Glycine max
  unsure (1)..(464): unsure at all n locations
actcaagcttgcagctgaatcattatccatctnttctgttatgtgggagcccgccaggtgtcccgaagaaactggcctacaatgataaaaatgagaagaggagctattctactcgggtgcaaaagttggaaagtctgcattgactataggaggctgaaccaggttaccaaaaaggaccattttcccctgccattcattgaccagatgcttgaacgcctggcaggtaaatcccactactgtttccttgatggtttttctggttatatgcaaattactattgctcctgaggatcangaaaagacctcattcacctgccccttcggcacttttgcttatangaggatgcctttcagcctgtgcaatgcccctggtaccttccaacagtgcatgattagtattttcagtgattttttagacaattgcatagaagtgtttatggatgatttcactgtatatggatcctc

SEQ ID NO: 195428 - DNA, 390 bp, Glycine max
agcttgcaggaggagaggcatggtgcttttttcaaagcccaaacgggaaagaacttatagtcactgtcggaggcaccataccttttcccaatctatatccacttatgtgggccattccttgtataatagcccgtctatggccttcaagactaggacatatttcagacgcagagtttgtacatgccaacgatcaagtcgggagcgcaccattctggaaattcctgacttccaatagtgtagggtgcaccctggccatacacatagatgactcttggctaactattaccatatatctacattaccctctgatttcactgactgtgaggcatgcgggtcctatactcaccctacgaatgacggagggagaccttacctttcttgggctgagga

SEQ ID NO: 195429 - DNA, 343 bp, Glycine max
tgctgcacataaagatcacatataggctggctttatattatgtgcacggccctcctgtgcactgcaccctgttgttatggagattatcatatgggctgcagctacgtatgatatagcacttagtgcattgtatctgacagtatcttaggttactatgcacataccatgacgtgacggccctgacctatctacccagtaatgacctgctgcatgccattgaaggtcttcatgtgtatgatgataccgtccacttatttgcatacatcgatgtgggtgctcatgaagacacaacatatacactacagtgttgtggatcatatcttaggacttactgactctaata

SEQ ID NO: 195430 - DNA, 454 bp, Glycine max
  unsure (1)..(454): unsure at all n locations
actatgcagagaatatccaagatttatatcttcatctgacttagcatcaaattttcctaagttatcttttccattattcaatacaaaaacatttacaaccaaagatatgaagatgtgagatgtttggttttctgccattgaacaattcatatggagtnttctttaaaatgggtcttattaaagccttatttaaaatgtagcatgtagtgttaacggcttcagcccanaagtattttggaagaggagtatcatttaataaagttctagcaatctcttccaaagatctatttttcctttcaacaacaccattttgttgaggggttcttggtgcagaanagttatgctcaatcccatgcttatcacaaaataattcaaattctttattntcaaactcacccccatgatcactcctaatagatataatcttgagattttcttattttgaagattttgc

SEQ ID NO: 195431 - DNA, 490 bp, Glycine max
  unsure (1)..(490): unsure at all n locations
tagccttagaagtggatggaccttttaggttgtggagatgatctatatctttgcctataagttggtgttggatcgagtggcctcacaataattaagaagggggggttgaattaattattcctaaaccttaactaattaaaaaattactctcttaaggcttctactaaattgttaagagaataaggagtagaagagaaacttaacagaaagttaaagcggaaattaaatgcacaacggaaagtaaaagagtatggaagaaggaaacaaacacacaaaagtttttatactggttcgacaacaacccgtgcctacatccagtccccaagtgacctgcggtccttgagatttctttcaaccttgtaattatctttgtacgtattagactaggatgtcattatatttggtccttgaatatanggctctataatgtangtagggtaccctacatatatatgaattatcaacccttgtattttacgacacctagact

SEQ ID NO: 195432 - DNA, 325 bp, Glycine max
gcaaccggaaagagaaggaccatacctctgcagctgaaacagcggctacacccaagagtgcacgaaagacagcagaaaagtagggccgcaaatttcaagttcttaactccagcaaaaaaaaataaaaaataaatcaaccaatattaaagacatgacaacggaagccatacagctggagcttcaacaataatagtagggagtcttctctgaacactgcaatctcgctcatacaaatgcagaacattcccatgcttatccccaaatatctacaatgataaacagaaaagaatccataataaacctcaatcaatgagacatgacactt

SEQ ID NO: 195433 - DNA, 176 bp, Glycine max
cgggaaaaatataaataacacgacaaaataaagcaaagaaacacacccacggatcttaagtacctaacaggaaagcagtaagtctcttaaacagactgaaacaaagcagagaagccaaaaaatggtaaaacatataaacaaaaggctaaaaaatacgacaaagattacaggaaaaa

SEQ ID NO: 195434 - DNA, 365 bp, Glycine max
ccctaccgaaaggcccaagcataattattctataaattctactcatgtccttaccgccgatatgaacccaagtaaaccttctacccactatagatgtgtccaccaattccttcccatcaatgaaagaatggaattcttctatctttctaccactttgttggctaacacctgcatataacatcctttcctccttttggtcactacattgaataaaccgccaaatgtcctcccctataacataggactccagcgggtgagttaagctggaggaacctcattcttatgacatgccccaattctctaaaagttggctgattcctcattcttttttggaacatcaaatcttgattgttttcaataaattc

SEQ ID NO: 195435 - DNA, 201 bp, Glycine max
gaacggacccaaggccacggaaaccgacaaaagaaaagcgggaacgcaccacgggcgaggataccagacaataacgacgcggacgagcaacaccaagggctgggcggcgccggacgagcacggcacgatgcgcggcgaccacgcgaaacccggacgaaggaacctacgcccaaagggtcacagacgaagggaccaaacccc

SEQ ID NO: 195436 - DNA, 449 bp, Glycine max
  unsure (1)..(449): unsure at all n locations
gcttatatgttacgtatcattttgtcctttattattatatatgtaaattgctttggatttctcgaaggaaaccgcttgttaattctgacctcttgtatttaaaaagtgtattcagattgaattattttaaaaatggaaaaagtccaatcataatatatatctgtaactcaatgttttcctccctaacatttagtatgactgcctttagcttaatatgtatatactaatttttttaattgtttttcacttataaggacaccaaaagcaatacatatatatggtgacattaatgcttttacaaaaaggacacaagatggaggaacagaagttttggaagcccaagtttgagaatgttctgcaactttgtcaatgacgaatgggattaataatgttaatgcacaaaattcatgtatttatgaacaactcttttatatgtgcangtgtggact

SEQ ID NO: 195437 - DNA, 432 bp, Glycine max
  unsure (1)..(432): unsure at all n locations
tgttaagctaccttgagaagaatgattggacatgttatacgcaattanggcatgacgatttacatgttggccacccccggttgaataaactaaaaagcacagcatcccattgcatatcacactctcattaccacctctccaccccatcaaaacttcctgtaaagaggtcacccacgttgcattttctgaattgtatagatgaattgagatatcccactggacacagttctcanggacttgtttagattttacaattgccacagtataacagtgagattccctgntcactgagattgctaatgcactgtaatcagaaactttcaaacctggaggctcctcaagcttcctgtagggtttggtaatagtgttgcagatgcatatttcacttctgctgtctttgccatgaagcaaccatgcctatgatgaactatg

SEQ ID NO: 195438 - DNA, 459 bp, Glycine max
  unsure (1)..(459): unsure at all n locations
agcttaccanaatataaatacatattcnattataccaattcatgttatggaaaagaggagaatactaactatatatacttcgaaaatacttttcataatagtcaagatattatataaagcttagcttgtataaaatgtcatttcctactaatcatcactaaacaacaaacgtttttagctcaaccatctcaattgattcatacaacataatcataacacaatcctgaattaccatcaacattatactttcatcaccaattatcatcaagagccatcaaatatcataagtcacatataatcttcaactatcataatcttcaactatgatgtatatcctcaacatactcaatcaccaataaccatcatcataactgaagtacaacataaactaaaacaacttcaaaacatcaaacattgactgtactccacggagtttcaacatatatataataacatatt

SEQ ID NO: 195439 - DNA, 442 bp, Glycine max
  unsure (1)..(442): unsure at all n locations
tatanaatgaatgtctcaactatgcattcaagtgagaatctctttatgatttgaatgaagcccatttgtgtgataaattcagtgcttccctatgaagatatcaaccttgctaagttgcaaagacatcatgaaagccttacatagaagatttatcaaatgctacaatgagcatacaacatcataatgtagttgtactagagtcaacattagaatggtataattgaggactctgagaatgagaacatcaaaatgatactctgattagataccaaaatcaagacaagagatgatgtagtcctaccccgcaagggcattggatagaagactccaagtagattgggctagagatccaagggaaggccctaaggttctcatgagccttacggtagattttgagcccatggactaaatatgagcccgcttatctttgtaatattagaat

SEQ ID NO: 195440 - DNA, 460 bp, Glycine max
  unsure (1)..(460): unsure at all n locations
agcttaccaagtatttaagcgctttctattattgtcctaagcaaagntcccaaaggcctattaacaacttccgtctgcccatcggtttgtgggtgacaagtggttgaaaataacaatttattgcccaacttgctccacaaagtcctccaaaaatggcttatgaacttagagtccctatcactaacaatgctccttggcaaaccatggagtctcacaatctccttgaaaaacaaatcatccacatgggaagcatcatcaatttttttacatggaatagaatgagccatcttagataacctatcaacagccacaaaaatggaatctctaccatcgcttgtttttggcagccccacaacaaaatccatggataaatcaatccaatgatactccggaattggcaatggagtatacaattcatgaggcttaccttagacgtttcctattacatacaatgcaatgt

SEQ ID NO: 195441 - DNA, 456 bp, Glycine max
  unsure (1)..(456): unsure at all n locations
agcttcaaaatccatcaaccttccttacttcgtgttttntctcccgctcttaaatcacttcccaaacgtgctattcattatgcctctttgagtagccctatgaaaatacccaatttcatacgcggcttagttaggaggcgcacatcaatcggaactaaattcacgtttgcttccattcagagataggccttttgaagggactctgatatcatttgttcctcaagcagcctttcacatttttatttttaatttctttgccttcagaataacttaacggcgaaaacaaacgctgttttgtcatacagaggcgcaaatcaaatgttaataatctgaatacgtttgaggggacggaacacataatccactgttnctgacctagatatattcagatattcacattctattattattattattagtattatgttcaattttatagtcaagttactgggtatt

SEQ ID NO: 195442 - DNA, 479 bp, Glycine max
  unsure (1)..(479): unsure at all n locations
acaagaaactacgcttttaacaatttcaacagatggtccactctccgttcnttcagcagaaagaaaacccgtgcggctttctcggatcggatcttcttcacattaaatagtggtacccgccactcaagttccaccaaaaccgttactctttgtaaaccaagtgtttatttcttcttctcaaaattgtatctctaattaatatatttatttatgcaaatgcctttatttaaaaactaattagtttaataattttggtatgtgttgcgtaacaattattctaatattctataaaaaaaaaggaattattctactgtattaggaatttttaacatagataacattaattaaataaatatataaattcaataaaatgatttatatacatgttcctacaaatttatcatcaacatatacatcttctataaatattcatagaatattatttatcaatttgttgcctctttgcttacacttgattt

SEQ ID NO: 195443 - DNA, 412 bp, Glycine max
agcttaggagtaacctgatttattttgtattggttatttagtctatgtaactagaggagaattaattataaaagaggatttacttcttggacacaagctacacattgttggggaggtgcagttgctaattaaccactgcctcttacgattacctggtgtgagaaaagaggatctcaaagctgtaataagccaccctcaggttggcaattatataataattattttttttttacacatgaccatgcttaagatggctgcaaattaaacctcaatgttagtttttacatattttgaatgcacatataggaattactcctatctaaatatctccatatgtctaaatttcttgcagtactgacactggctttctatgatgttgatgatctttctccaagtgaattttctttttgca

SEQ ID NO: 195444 - DNA, 397 bp, Glycine max
tactttattatcctacagattctccctacatggtactccatcgggtattttaaaagcccaaagagggttgaggcaaggagatccaatctcccctcttctctttgtgtttgttatggaatacctccataaggtgcttcatgggcttggatcaaactataacttcaattaccaccccaagtgtgagaagctgaacatcattcatttgtggtttgcggatgatattcttatatttctaagacgagatcttggatcaatgaaatttactgatgagtgaaattgaaggatgtttctgctggtacaggcctttagattaatcattctaatagttaagcctactttggaggggtggatgcagaaattcataacaaatgcagcaagattcttgggtcgttgttgg

SEQ ID NO: 195445 - DNA, 441 bp, Glycine max
  unsure (1)..(441): unsure at all n locations
agnncttttgtacgacaccttgttctcattttcactgttaattctctcttgaatcaatgaaacttttattgatggatcttctttgatcatgcctgtcaatagaataacaaaatttaaatgacaattaaggctaaacaataacataatatgaacataaaatacgtacctactacacaagtggcaattaaatctgaatcaagcttctcgtgatcttgggtcatggtcatattgagacatatgtgtggtccaccccattgagtgactttccatgaataagtttttttagatagaattgctctcatatagaaagggcaaggacaatctgcatttttattcaagcaacanacgacatacttgttccatttgctntcaaccacttngaaactttgatgcaccttcataacatattgtttgactgcattcttgaccgcatctttacta

SEQ ID NO: 195446 - DNA, 444 bp, Glycine max
  unsure (1)..(444): unsure at all n locations
agcttttcttatagacaaatttaatcattanttaaaacanaccttatggggnntgtttgtacatttgatttgtgtaatatcattcttttgatgctgaataagaccagtttaaactccacctcctccaccgaagcaatatctgtgacttcaaaatgtcgatctcctccccaagtagctacccaattcccacactttgggtaatgtgagaaatcatacttacaccatgttgtcctctcaaggttatacaaccaatgatatgtagcttcattgatgtccttaatctgttgcattntatgtttccacaactgttcataagtagctttagcagcccccatgatcagatctttgagcattaccccccccccccaccaacttatttttcttaaaattgttctaaagttgtcatatgcagaacctgtgttctcttctatcttgaaattctaa

SEQ ID NO: 195447 - DNA, 413 bp, Glycine max
  unsure (1)..(413): unsure at all n locations
tganaatagagtggtgcagctgtagattattttgttatatccaagcgnacgtgccaaaggcatcaataaaggatacataatacttaaaaccagcatatgaagtcaaatgagagggttcccacaaatttgtgaagatgataagttccaaatgagagtaaacagaaatagaagtgtgagatggtaatctgtgagactttcccatacaggaggaacaaaagactgaaagtttttattatacggggaaatattacaatgattgaagactagcttccttacatgactattaggatgacctaatctatcatgccaaaggctagcagtactatgagaagatacacagaattggaaccacactagagtttttataatagcagtggctgtactagacaagacattatctgagattgaagttg

SEQ ID NO: 195448 - DNA, 182 bp, Glycine max
cctgttggtactccataatttattctacaataactgcttaaggcagttacatatggtcctaaatcactacacattcagttacgattaaccctttgtgcctaactaaggttttcaaacatcacaacagagacagaccattgaacaatggatgttcatcattaacatacaatagagacatacct

SEQ ID NO: 195449 - DNA, 369 bp, Glycine max
  unsure (1)..(369): unsure at all n locations
tgaggcatgcaagctttacagcanatgtcactctactgcagtttttatgtatatgntaacaaggaaacacaagtatattcaccaggaaaacattgttgtggaaggaaattgtaatgttgtgattcaaaagatccttccacctaagcataaagaccctgggagtgtaaccattatttgttcaattggagatagcactgtgggaaaagctcttattgatctgggagccagtattaacttaatgccactcttcatgtgcagacagttgggagagatggagatcatgcccactatgatgactttacaacttgctaaccgctccattaacctgatatatggagcaaatgaagacgcgctgtgcagaagaaaaca

SEQ ID NO: 195450 - DNA, 471 bp, Glycine max
  unsure (1)..(471): unsure at all n locations
gcatgcaagcttgtaggaatatggagaacccatcacatgtggtatctangtggcgcgcgggcgatggtgcacaacaagttttccacatccacaatgcgcacattaacccaccatcctctgttgcgcacctccaactggactcacgtactcccacgtagcccatatcctcgtttctctcaacaccgggtccacataaatcctcccaagctttcccaacatccaagcagaacaacattcaaacagcacaaattatcacagtcaagcataacagggcataggcagaaaactctgcccaaaacaccaaccaaaatcacagcttttctcacttaaagatcccagtaacaattccttcgatccaattatataaccgtgggatcgactccaaaatttactggaagctctagtcataagccaacttttgaccgtgggatctctagcaacatccagactcattctgaactactcttcaca

SEQ ID NO: 195451 - DNA, 334 bp, Glycine max
  unsure (1)..(334): unsure at all n locations
tcacctgagcagcaacttgccctgaacccttatgattttttattgtctctgcncccttactgaaaacccactaacaactgcctaaccgccctgttggtactccataatttattctacaataactgcttaaggcagttacatatggtcctaaatcactacacattcagttacgattaaccctttgtgcctaactaaggtttcgaaacatcacaacagagacagaccattgaacaatggattttcatcattaacatacaatagagacataccttcgatggaagcgcagacacgaactccacaaacgcgaactcgacaatgtggttgcagtcacaga

SEQ ID NO: 195452 - DNA, 240 bp, Glycine max
  unsure (1)..(240): unsure at all n locations
ctgctttgatgaatgagaaaaccggcgccaatgaagaggatgagaaagaggaaggaacccntgttgnggctgccattcctacatggccaaactttccaccagcccaacaatgtcatcgctcaaccaatatcggcccttctcaatacccatcacccaatcatccataaaagccatccccaaatcagccacaaggcatgcctgcttaccacacgtccaatgcccaaacaccacctacagtgc

SEQ ID NO: 195453 - DNA, 316 bp, Glycine max
  unsure (1)..(316): unsure at all n locations
agaaaannagaggttatctcttttatcttagngagagtgattctcctaaattcttgagtgattcaagaacaccctggctgtatcaaaggactttcacaacctttgtgtggtgccctcgctggaaagagtgattctttccttcctatcatctccacccttgttctttcaaaccacaattccagaaaatccacctctgcccaaaattatctcgtgaccataactcccattntacacanctcaattaagtgattcttgatcctaaattgaagttcaaaacgagatctttcacctcgttgtggaatcacctcatttggag

SEQ ID NO: 195454 - DNA, 454 bp, Glycine max
  unsure (1)..(454): unsure at all n locations
gcttgcattggcaacatgcatagaacggatctttatcttgcttaacatggagnnaatagtagattacagtntagtcatccatttatttaacgccttagtgaattggtctgggatatttttaagggaaattctgaacctttcttaattaattccctttaccaatactaacagccattatataagtttctatacttaaattcgtccatctatcccttgtccgtattatttttgagggaaaaaaatcaaacgaatatcactttccttctcttttttcttaccataaaaacataggcacatatatggaagattgaataatagataaaaacttctacggttctacctaataaccataaccttcaggctacaatctctgaatatttcagcatggtaatatttaattttatgtaataaaattaagtatgctatttatatagaatggatcccctctgcatgc

SEQ ID NO: 195455 - DNA, 371 bp, Glycine max
  unsure (1)..(371): unsure at all n locations
atatgcccaggaactgcgtttagcattccattctgttgctgtgccactccagttatatcgcttcaaataaagtctaaatttctgcaaattaatattacaattcacaattgcaatataaaataggtacacaaagataagtccatttatctacatctattgccttagttagaaaaaagataanatatttacatattaaccgacaatgttactcacccaattatggagataatttctagttaagaaatgatgactgtggtcttaaactcttaattctcgaaccagtaaacttacatagaatgaaatctatcactgaaaaaaggctactattcatttctactcatattaggcctattgatcctatcagctaaata

SEQ ID NO: 195456 - DNA, 169 bp, Glycine max
gaaaccgggggggcacctccagacgcacgacagggagcctccggacacccaggaccgcaggttgcagcaacctcacgggcaaaaagaaaccggccccttagagggccccctccaaagaacgctccaagcaaagccgaagaaaacggaaccgggggaaccaagcccagag

SEQ ID NO: 195457 - DNA, 400 bp, Glycine max
ggacgcatcaacaaaaatcaagcccatgctattgagcaaacaatcaatggggccaaaacacaacaaatgatcatgaagatggatggcacaaatcctcacaaaggaataactcatcactttcaaattgagccttcagaactatcatgacatgaagaaaaaaaccaacgatttcaactcacacaatgtcaagaacgtattattttcaaaacaatcacccatttcttgaacatatcccataattcaaagaaaaacatgcaaattctgacgtgcacacaacactgacccataaattaaactgaatatcgacagacctacaacactacaaataacacactaacatataacaaaccacacaccagcgaaccaaaacctcccccatactaacaaccatgcctaatga

SEQ ID NO: 195458 - DNA, 363 bp, Glycine max
  unsure (1)..(363): unsure at all n locations
cagtaatacaccattaatgacttattgtttcttatttcttctatggaccgtatatgcttggggtaggaacctatgtacgttatatacatcatattggatggttgcgaatccttgtttgtagcaatgctaatgccttatagtttgatgacctgtatcaagctatatttcttaaggaatactattttgatcataccttttggntttggtacaatccattnttttgtgttgcatgttgaagtcaagtaactccattacactcgcaagcccgagtataattcattctttgtgttataagcttatggcaaactgtctgacgtcttcatatgtgtgaacactatggtcatggttaggtttctaaattca

SEQ ID NO: 195459 - DNA, 389 bp, Glycine max
tgttggaaaaggatatcgcgattaggaactttttgtacaaaatgtttaaaaattgattaatggaaatgcatctacttttgctcatatgattaattcctatgatatatggcatgccggattaggacatatgaattccacttatgttgtgcaacgactaggcttaatcaacatgcatgataatcaaacaaaaaaatgtgatgtatgtgttgaatcaaatttaactaaatcgcttaacttaattcattcaatcttgttgattaaataaactatgctagagaggtagacttttttgaaccttataaacactttttcatatctgagttattgattagctaagagagcattacatgttttatctataagtgaaatgtcatttttatttagacatt

SEQ ID NO: 195460 - DNA, 218 bp, Glycine max
ccccccaaaacgccaaaagaaggacccagcaggaaaagccgcgacgcccacccgaaagaagagccaagcacaacacaagaaaagaagcaacaaccaaaccggggaacaggcaaagcgaacgcgcaaacacaggccaccacaaaacccccgaaaaccaaccacgaaacacgcaaggggcacagagaggaaacacaggcggccaagaaaaccaaccagga

SEQ ID NO: 195461 - DNA, 376 bp, Glycine max
agacttccaacggaagaaataatagcactcatttgttttataagcacaacaatgtgttataaataatcataagttgtaaatataaataaaaatgtttgtttttattcaagaaaaaagaaagctaagtgtggaaaggcaagtaatagagctggaataaaaagaaagaggttaatctatggatgaatgctctcctagaacttaagttttgcatcctagacaaaccatgattgtgttgcagcccagcctcattacaagcctagtaaaagtcctttggattcaagtttgtgtgttcttgactgtatggtatgagatgaagtgcaaagattgagacttatgttggttgttgactgatggataacctaaacacttcgtattg

SEQ ID NO: 195462 - DNA, 370 bp, Glycine max
  unsure (1)..(370): unsure at all n locations
tgcagccttagcttatgaaggaagtttttctataattgcttctcaaggaagttttctctagaaagcttctcaaggaacctacctagtctataaatagaagcatgtgtaactcttgttgtaactttgatgaatgaaagtcttatgagacagacttcaaaggtcctcttctctccctcttttattcctccaattttgttctccccctttctttctttcttttactccattaaagcatcctcctcaagctttttatccttggcacattcttggtgtgaaagcttaatgtaagctccattggagcttgtacgcctaggatcttcttcatcaatggattcctttgcctctnggaagatgaatggcaatggaatgg

SEQ ID NO: 195463 - DNA, 236 bp, Glycine max
ttttattaagagctctgctattatcctcctatatcccagagactggaaaaaccaccgactcaattaaaatattataacattttcctttactaatgaaaatccacattcaatccaaagcagggaacataaaataaacccactgtctaattagacattgagcaatacagcacaagatcaccgatttccttccgacctgtttgcgcggaatgtaaagaaaaccattaaaagaagaaaag

SEQ ID NO: 195464 - DNA, 363 bp, Glycine max
  unsure (1)..(363): unsure at all n locations
agcttacttggattgtgaagtatgaactgttttttataagcanaatgtggggaatgcacggacttgatgcacataataaaaggaatgcaaggaatgcaaaacacaaggaaatgcaaaagctttgatgaaaatgcaaaactgcctacttgtataccctaaattcgttcggggaccattgtttgatagcctgcaacctttgcttgaccgcttcgagttacttaacacccatngttaggtaatccatgaagttccataacattgcacaggtcaaaatagggattattgcacaatctgtaaggtttcgtgacattacggaaagaaaataagtgtcgctatgtaatccctaaagtttctgtacgctat

SEQ ID NO: 195465 - DNA, 252 bp, Glycine max
  unsure (1)..(252): unsure at all n locations
agctggattcctttagtagggaatctatcctttttattatggagccaaacccagtcgccctcattaagaactaactctnttcttcctctncgtgcctttagatgaatacacnncttgttggttctctatttggntcctaacactctcatgcaactttcttacatattctgacctagaatccccttccttatgtataaaaaaatgtccagtggaggggaatgacgtctaatggtgttaggggattgaacccat

SEQ ID NO: 195466 - DNA, 165 bp, Glycine max
cacctattcttacatccacaaaaagaattgtctgaacccccacggaccaaggacgcgcgcaccaacagaggtttttgtaaagtccccaaactccgctggaaacgggagaacctgactgggggggaggaaggtcaccggcttcccacctctgagactacggaaaaa

SEQ ID NO: 195467 - DNA, 414 bp, Glycine max
agctggtacagaacttaaggaagagaagaacatgcttgctcgcacatcgttcgcgcgacgatatccactcgacaaggtttgaagtagaggagaccttcattcctataacggcacgtggcaaacaaaaatggacagataacttgaatggccattattgtcaatgcggaaggtattctgtacttcactatccatgttcacacattattgcagcttgtgggtacgtgagcatgaactactaccaatatatagatgttggttacaccaatgaacacatcctataagcatactccgcacagtggtggcctcttgggaatgaagcggcaattcctccttctgatgaggcatggacactaatccctgacccaactacaattcgtgcgaaagggccgccaatatcaacaaggatacagaata

SEQ ID NO: 195468 - DNA, 197 bp, Glycine max
cacacccctctcacaactaggctcacctccttgagaagcttccttaagaaagatcctagagaagctagaggctagctacacacacatctctaatagcttagctcagcttcctgagatgagaagcttgagcttatctacacaccccctatattagctaagctcaccctcatgactaaaaaaacatgaaaatacaaaaa

SEQ ID NO: 195469 - DNA, 249 bp, Glycine max
gaagttagtatccatgcggacgacacgatcttctttggggaggcaacaatggataatgttagagcaatctaagcaatattgacggcttttgagcttgtatcgggcctcaaaattaattttgctacaagaagttctggtgctttcggggtctccgatcagtggaaaatcgttgcagcctattacctcaattgtaacctgatgtcctttcctttcacatcccttcgcgttcccattggagcaaatccataa

SEQ ID NO: 195470 - DNA, 435 bp, Glycine max
agctttttcggagccatctcctgcaagagataaatattcacgaagtcagtttacccagaattttcatcttataaccaagaccaaacaacaggggggtaccactttttctgaaatgcaaatgtcaatgtgaatttgggcaaacccccatacattcaaagcattagctacctaaatcacacacacacatttataaagtattttggctaccttaagatcacatacatgcattccacagtatgtcggctactttgaaagattgcatatcttgaaaggcacttaaactaaattaacaacgtatttttgtcacccgtgttaatacaataaaaaagtatattggcttgctaccacgcaatatatacacctatgatgccttcttgctacctaacaagcaattcatatttaatcgaaagaaatattttgctacccacacgattg

SEQ ID NO: 195471 - DNA, 350 bp, Glycine max
tcatgatgaatcaacaatgattcaaaagtgttttgatgatatcaatgatgacaacaaaaagatgatgacaaaggtgatgaacaaaaagcacaaaagatcagagaacaactcaaatgaatcaaagaacatctcaagtgaatcaagaacaagtcaagagttcaagaatcaaggagaattcaagactcaagaagaaagcctagaatcaagaatcaagaatcaagaatcaagaatcaagactcaagatctcaagaatcaagatcaagaatcaagaatgaaggaaagactcaatcaagataagtattaaaaaagttttttccaaactttgaatagcacgtgagtttttgaccaaa

SEQ ID NO: 195472 - DNA, 364 bp, Glycine max
  unsure (1)..(364): unsure at all n locations
agcttcggcactgttaagggtaaagactcttcccgtggccttcagatgtccagtntggtcattcaggcccctaccattctgctccttcttgggatatggacaatctctctgaatattgttggatcaagtggcctcagaataattaagaagggggggttgaattaattattcctaaacctttactaattaaaaatttactcttctaaggattttactatgttgttaaataaatgaagaatagaaaagaaacttaaccaaaagtaaaagcggaaattaaagtgcacagcggaaattaaaagagtagagaagaaggagacaaacacacaagagttttatactagttcagcaacaacctgtgcctaca

SEQ ID NO: 195473 - DNA, 227 bp, Glycine max
  unsure (1)..(227): unsure at all n locations
ntntggagtagaaacatgggaccaaatcattntatttcagatagtcgtatctagtcaaggtctgagagaccatacaagttttctagcgatttctaattatatgggccattaagtctatcatatgctgacaatagccgagaagcccatgaatttcttcgggggcggagtaagtgtccgccattgccttggccttggctaacaatcggggaagttcttgactcccgttc

SEQ ID NO: 195474 - DNA, 390 bp, Glycine max
agcttattactgcttcttggatggatactctggatacaattagattactgtggaccccaaggatcatgagaagacgaccttcacatgcccttttggtgtctttgcctacagacagatgttgtttggattatgtaatgcacctgccatatttcagatgtgcatgttggccattattgcagatatggtggagttggagcataaagcctaatgggccctcaaactgcttaactttgattaagctacatctagagagaagatgaagttacagttgctagagttagaagaaataaggatgaacgcatatgaatcatccaagatttataagcaaaagatgaaggcgtatcatgacaagaagttactaagacaaaacttccagccaggacaacaagt

SEQ ID NO: 195475 - DNA, 378 bp, Glycine max
ctaagctttagaaaacatgagcctaaccttttaattaaataggtcagttcaagtcagactttatgtatgttaagtcgtaggcccctgtaggccggcctgacctattcccacccctaacaattacacgcactcaaaacttaaatcctaaaacattgcctcaaatcctttaatttgaaaacaaccctcgtatttttttatgagacatatcggaataccacttcatcaaccacgccaataacgtataaagcaaccacaagataaacgcatgttatttgaaaagccataagtacctcaatcaaaatcaatgcacaaattggcaatgatcttaccaaccaagagtccagtttcaaaatgaccagcaatgacagcggaaaaatc

SEQ ID NO: 195476 - DNA, 314 bp, Glycine max
  unsure (1)..(314): unsure at all n locations
agctttgagccaatttttacgacaataactttttactccgatgtctgattgagtcccttcatatatcgagacgctcgaaattgaatgttgaagctctgagccaattcaaacgacaataactttntactcggatgtctgattgagtcccgtaatatatcgagacgctctaaattgaatgttgaacctctgagctaattcaaacgacaataactttatactcggatgtctgattgagtgcccgaacatatcgagacgctctgaaatgaatggtgaacctctgagccaattcaaacgacaataactttttactcgga

SEQ ID NO: 195477 - DNA, 244 bp, Glycine max
tcaacattcaatttcgagcgtctcgatatatgacgggactcaatcagacatccgagtaaaaagttattgtcgtttgcattggctcagagcttcaccattcaatttcgagcgtctcgatatatgacgggactcaatcagacatccgagtaaaaagttattgtcgtttgaattggctcagagcttcaacattcaatttcgagcgtctcgatatattacgggactcaatcagacatccgagtaaaaa

SEQ ID NO: 195478 - DNA, 347 bp, Glycine max
tcgatcattttccaatccacatcattcactaattattcagggattgaataaaataaacaatggccggtgtcggtcgctatatggccccgactgatattcttcaaccgacattgcgcaatttcttttaaaaaagctggccgataatgtatttttaccgtagaggaagatttttgtttttggattccctaaaaaatttacgatgtaggtcggctaggtttttccctgcgagctcaacccaggttgtgtttcggacgacactggcatgttctcatttattaggccaagaaaacgttagcccactccggcaccaaaaaacatcatcaacggaaattgataaaaaaaaatga

SEQ ID NO: 195479 - DNA, 216 bp, Glycine max
  unsure (1)..(216): unsure at all n locations
tctatataagctgaaccattntatcaataaacacaagttgagttntattcagaaaattagagtttatctcttttatcttagtgagagtgattctcctaaattcttgagtgattcaagaacaccctggctgtatcaaaggactttcacaacctttgtgtgttgccctcgttggaaagagtgattctttccttcctttcatcttcacccttggtcttt

SEQ ID NO: 195480 - DNA, 406 bp, Glycine max
agcttgtagaagcaaaaggccagctatggtgttcaagggtggatttgaaaaggcctatgactcaatctcatgggtttttttggattatatgctgcaaagaatgggtttttgccacaaatggagacactggatgtctgcctgtctcaagtcagcaagcatttctattcttatcaatggcagtcctacaaagggaatttgctcctactataggtttgaggcaaggggatcctttagcccccttactctttaatatagttggagaaggcatcacaggattgatgagggaagcagttcataagaacttatatagaagctatatggctggaaagaaaaaggaacccattaatattttgcagtatgcggatgacacaatttttgtgggtgaggctgagtgggagaatgttat

SEQ ID NO: 195481 - DNA, 313 bp, Glycine max
  unsure (1)..(313): unsure at all n locations
tataagaacaaaattgcctcaatcatttccaaatatgcatgtgaattangaagcatcaacaagaatcaagccaaggctattctgcaagcaatcaatggggcaaaacacaccaaatgattatgatgatggatggctcanattctcacaaaggtaaactcatcactttcaaattgagctttaaaaactatcatgacatgtagaggaaaatcaatgatttcaaatcacaaaatgtcaagaaacttttattntcaaaacaattacccatttcttgaacatatcctatnnattaaagaaaacatgcaaatcgacatgc

SEQ ID NO: 195482 - DNA, 298 bp, Glycine max
agcttacaaatatgttttagatccaagcacatatgtaaaatcagatcaaatctagataaagatgagataagatctagatgaaataatatctagatgatatcaaatctaaataatatctagataagataagatctaattttatagaataaattagtctgccctcttcaagtccaagcccaattctagattcaagcccaatgcttgattcaagcccaatgcttcattaattcctgaaattagataaaaacatcaaattagctgaatggtcccaaataataaaactgcctaataaaattga

SEQ ID NO: 195483 - DNA, 221 bp, Glycine max
  unsure (1)..(221): unsure at all n locations
tgtgagtatctacatgagatgaagcatagagggttgcaacctaatgttgtaacttatagtacctaattgattcattttgcaaggcangcatgacactggaagcaaataaatttttttgttgacatgatacatgttggtcttcaacccaatgaatntacgtatacatctctaattgatgcaaatcgtaaaatacgtgatctcaatgaagcattttatctgga

SEQ ID NO: 195484 - DNA, 347 bp, Glycine max
  unsure (1)..(347): unsure at all n locations
agctnttaggctgattggctgctttgttcataggagatttctagcctttnttcatatctatagtgtgtaataaaaagggaccaatagttgtacagtttgacatataagaaataccaagaaaaattatattctgattacatgaaaaccctgaatatatcaaaatcatatattacatattatatataacaaccatcaagaccaaaccttgtcctattaggtggtgctagttagctacataaatcaaatatattcagagtaaggtcccttttaattttatatgcaacaataagaaacataagaaagaaatatgtntattgtatcatgtcaaagttaagcctagtactaaa

SEQ ID NO: 195485 - DNA, 408 bp, Glycine max
  unsure (1)..(408): unsure at all n locations
tgtaggattatggggtacccatcacatgtggtactaggtggcggtcgggcgatggtgcacaacaagttttccacatccacaaatcgcacataaacccacaatcccctgttgcccacctccaactgagctcacgtactcccacgtagcccatatcctcgtttctctcaacaccgggtccccatcaatcctcccaagcttccccaacatccaagtaattcaacattcaaacagcacanactatcacagccaagaaaacagggcaaaggcagaaaactctgcccaaaacaccaaccaaaatcacagcttttcccacttaaagaccccagtaacatttcccttcgtccaattcgttaaccgttggatcgactcanaaatntactggaagtctctagtacataagcctacatt

SEQ ID NO: 195486 - DNA, 405 bp, Glycine max
  unsure (1)..(405): unsure at all n locations
atatatctaatcgaccattggcactactgttcctgtgagagatttggatggacatgcgtgtgtgatacgcttctatatgtgaatcatctgatggcctctaatcaagatgaaatgagtgaccttactgcttctttttgattcngcctcacgcgccattttaagactgtgatgctgatttttcaaccgtataatgacccgtgcatgagaagaaatccctcacccttgtacaccaagaggaggatgaatctaatatattgttttacgtgctgagaaaaaagcttatatgttcccatgtctgagtgtctaagatcccaagtaaagttctaatgaaccataatgtgccttgtcggtgtatatgaccgcatagcttttttttgcccttaacattattattatcctccatct

SEQ ID NO: 195487 - DNA, 248 bp, Glycine max
tctccatctccttactgttatctgaaaaagatcttaagcacattagcatccaaaatagaagcattctactatgaccaaatctaacacatagctcaatttcaacctgctgggattccagtgtcacaaatctgtaacccacaaaaatgaaggaccttgtatgactcttgaagaacaacacgatgctcatctgagcattgttttaaccattcataagtgactattggattcttcatatattcaagcccact

SEQ ID NO: 195488 - DNA, 102 bp, Glycine max
agctatgtatctattacactagtcttgaattcttattacccaagagatattcagaagataactttcaagagtcacatctattccataggtttatgaatggcc

SEQ ID NO: 195489 - DNA, 199 bp, Glycine max
gagaatgtttctctcttcttgattttcatctttttttacagttatactctatcttttatctccatttttttcattctattatctcctttcatgctctttcttttcatcaatattgcttttctctgctattctctctcgatctcttttcactctcaatttaatttgatccttacaaaccttacttggaaacaaatttgtg

SEQ ID NO: 195490 - DNA, 447 bp, Glycine max
  unsure (1)..(447): unsure at all n locations
agctnggaatgaggtttgctaaccatgagtagataatggctggagagccagcagctggaaacttggaacaaatggatgaagatgttgaagctgaagctccataagagcatgcacatcaatgagtccttttgagtcactcatgattcagaagatggacgctatgcttcacctccgtcaatagcacttagttgaagttcacaattcgctggagaacataactacccggctggaaaacatagatactaggctgacccttagcaacctcctaaaccccgatgaggatgaagcttagttatgtttttaggtgcttagttcagttgcttatattttttgaatgtttgtgtgtctttgattaagaagttaaggtttctaatgatagtttaatgtttctatgtattggtctttaatgaatgaaatgctatggtattttcccttttcacattatat

SEQ ID NO: 195491 - DNA, 281 bp, Glycine max
gtggtaatcagagcacaagagcttcaagtaggtgctccttaaacctccattaatttttttgctttaccttgtcttccattgttgtttcttcatttttctccatgtatctcctcacatgtcttgttctaaatgttgttaacatgattctttaaaatttccaccgattaaacttgctatagaagttagatttgattttctatggttcaaatttcttggtcttgttcttgaaccatgaattctgttgaagttaaggtcctttgaacttttgcctggtatttttt

SEQ ID NO: 195492 - DNA, 382 bp, Glycine max
  unsure (1)..(382): unsure at all n locations
agcttgcctcagagaggtccaagaaggataatgcggccgaagggactagttccgctcctgagtatgacagtcaccgctttaggagcgctgtacaccagtagcgcttcgaggccatcaagggatggtcgtttcgacgggagcgacgcgtccaactcagggacgacgagtatactgatttccaggaggagatagggcaccggcggtggacatcactggttacccccatggccaagttcgatccacaaatagtccttgagttttatgccaatgcttggccaacagaggagggcgtgcgtgacatgaggtcctgngtaaggggtcagtggatcccgtttgatgccgacgctatcggccagctcctangatatccgttggtgttgga

SEQ ID NO: 195493 - DNA, 260 bp, Glycine max
tcaacctagaggagacgaaccattccaagtgttggagaagatcaacgacaatgcctacaagattgacttgcctagtgagtataatgtaagtgccactttcaatgtgtctgatctatctctttttgatgcagatggaagagccttggatttgaagacaaatccttttcaaggagggagtgatgaggacataaccaagggcaaggaccatgaagcacttgaaggtcccatgaccagaggcagacttaaacaagcccaacaca

SEQ ID NO: 195494 - DNA, 436 bp, Glycine max
  unsure (1)..(436): unsure at all n locations
agcttataagaacaaaattgcctaaatcatttccaaatatgcatgtgaattaggaagcatgaacaagaattaagccaaggctattgtgcaagcaatcaatggggcaaaacacaccaaaagattatgatgatggatggctcaaattctcacaaaggtaagcttatcactttcaaattgagctttcaaaactatcatgacatgtagaggaaaaacaaggatttcaaatcacacaatgtcaagagacttttattttcagaacaattaccaaagcttgatttgtgagttgattttagccttggtttcactttgattattagtcaattaattcaaggaaactttcaaagaaaaacgtctgattgatttttcttgattattntattatttttttcaagatattntgattattntattattattttgcttttttttgtttaaa

SEQ ID NO: 195495 - DNA, 309 bp, Glycine max
  unsure (1)..(309): unsure at all n locations
ntannaattgaattaaaacattcagaaactgctggtaatcaattaccatatatgtgtaatcgattacacagtgcaaattttgaattcaaattttaatagctgttgtaaatcagttttggccactggtaatcgattacatcctctggtaatcgaataccagagagtaaatttgttgaaaaaaactttttaacttaaatttcttggccaaaccttttgctacttcaattggaattcccttcctatttaatataccctttctaagactctaaagactgtcttgatcatccatcttgaatatatttaatttct

SEQ ID NO: 195496 - DNA, 376 bp, Glycine max
  unsure (1)..(376): unsure at all n locations
agctnntaacaaattttctttgtgggaaattatccatgtttggttgacatggtcaacaaacattggttatgctgaacaaacaatttcaaacttcttaaggcaatcatcgaaatgatccttaaaaggacaatcaaccaaactcccccagacatccatcacataatcccatgcatttttttgaccaactagagatttacattntaccttgacattcttgtcaatgtgaaacctacacaacaagttggtacacccagggaatacagttttcactacattcatcaacgttaggtctctatcggtaacaataactccaaggaggacatcacatcttagaaaaagacattgaaaccgttctagagatcanaccatattattt

SEQ ID NO: 195497 - DNA, 347 bp, Glycine max
  unsure (1)..(347): unsure at all n locations
ntgtggcactctgttacacacgtcagccctccatgtcagtcctggcacaggagcacatatatcatgcccttagcaattggactctcaactgacaggttatctctaaccatttatattatttgaatatattgcaatctccttatcacgtggcaggtattcaattatctctaagctacacattatctataagccataattatttacttgtcattacctacaagtcggtaattatcttgtaaggttgttacaacaccgtaatagcccctacaaacaatatcctgcaacttctactctactctataagtatcaggtttcatctcactcttttcatactcattcattactct

SEQ ID NO: 195498 - DNA, 319 bp, Glycine max
  unsure (1)..(319): unsure at all n locations
tcttcctgacactactaacatcatcattttaacgtctattntatcataacctatgttaaaataagtgtggtgatatatttgtaaataaattgagttcgttaatgtcattttttcaaagaaccaatgttttgtgtcgatgttaacatcggtttttttttttataaaaatcaatgttgtttgatgctcgttaacattagcttttatagaaatcgatgttgtgttttttcctaaattaaaaaaacccaatctatttcactttcttgttcttgcgctcactctcaccactctccctcttatctaaaaccctctcattgctcta

SEQ ID NO: 195499 - DNA, 403 bp, Glycine max
  unsure (1)..(403): unsure at all n locations
ntgatgtctatataaagctcanagatgtttgtcatgaagttgtcgaatcactagagaatcatctgagtcaaaatgaacaaagtgttgtaatgctgtcagtttagttggacgacaaaaacttgagtgaattgagtgaatcttagctctgctaagcagcaagtttccattgtatccgagcttattgtgtaaacattccttgagtgattagaatacatattctatcaaacatctatttttgtgaaagccaggagtgacttcatgacaaaaaatacttgggtcttaatctcatggggagattaagggtagagtcagaaatgacctagagattacttgtagccagaagtgacatagagaatacttggttgtaatcaaagttttgattagtggaacccttcaagttttg

SEQ ID NO: 195500 - DNA, 372 bp, Glycine max
  unsure (1)..(372): unsure at all n locations
agcttaagggttggatattctagtgtaacttatctctctattatgttaaaataagagcgcacgcttattctaatgtaataacgagatgttcggattaagcaaattctggaagttacatggaagttactaaagcttccatcaacggtaatttttaaaaaaaaataacttccatcatccgccaaaaaccaccttttctttgatcataaataattattctggttcacaaagcataacgggtgacaaaacatacaagaccaaaacaaaactcttgaattataatcttctgattntatccgattgaacaattttgattgaaccccgaaatttgattcaatctgaaagtggtatacacgacttcagaattatccagta

SEQ ID NO: 195501 - DNA, 525 bp, Glycine max
  unsure (1)..(525): unsure at all n locations
cgagtcacgccnncnatgagacgcctgtcatttagatgacgctagcatatacgtgacactatagactacatcgagactgtgaccttgagccagtcgttgagaagatatatatatcgagacaagcggtactgagatttacttgcactggtgagaatcatgtttgagccaccaatcatgagttatgaactcatctttgaatgatgcatattgcagactcttttatacatcgactctcacacatctttgaaggaatgtttcaagatctatccacagacattgctgatgcatcactctatagctctctgaacagatgctatcaacaccttcttttacacagaatgtactctaggcacggacttgtgttatctagtcttttcaatcactgatgctctggcgaaaaacgacagactaaccggctgaagctttttgacactcttcttctttgccaaaggaccacaaactgtggaagccaagctcataatgaatcaccatggatcaaacgtgtgttgatgataaccaagaagg

SEQ ID NO: 195502 - DNA, 407 bp, Glycine max
  unsure (1)..(407): unsure at all n locations
agcttagttcgaggtacttacccattgaagattgaagaacgatgaagaacgaatgaagaacgtcgaaaaaccgtcgaaacctttgcgaaattccttacgggaacgtttcggaagcgcctcggcttagattttcttcacggaaaccatttttccaagccaattcgaaagagagagaagtgcctaaggggctgaacccttttttacttcacttctccccctatttatagaaaattgggggagaagcttgcacccagctcgcccaggcgagcatgggtgcttcctccagaagcaacagccttctggaggaatcttctggagggcccaagtgggcctggtttctatttgcacccccatttttactaagtacacccccctggccttttttggtgattctttnttcgtaaagt

SEQ ID NO: 195503 - DNA, 362 bp, Glycine max
  unsure (1)..(362): unsure at all n locations
tctcaggaggtgagcttagttnttagatgggtgtgtgtagctaaactctagcttctcaaggaagttttctcaaagaagcttctcaaggaagttttcttaagaaagcttctcaaggaagttttcttaagaaagcttttcaaggaagctacctagtctataaatagaagcatgtgtaacacttattgtaactntgatgaatgagagtcttgtgagacacaactcaaagttcaacttctctccctttntcttccttcaatttcgtgctcccccctctctctttctctccctttttcttttctttcattgaagccatctctccaacctctttatcagtctcatcttgtggtgaagctccttcttca

SEQ ID NO: 195504 - DNA, 395 bp, Glycine max
  unsure (1)..(395): unsure at all n locations
agcttcgtatcanatgacacagaaagcgtgtttctgctttgcgcatgggagatgttcgggtgacaccttgcatgcacgaattttttcactaaaatcgataattttacaaaactatgtatcagtatcgataatttaaaaaattatttacgtgtaagggtgatttttgccactccaaaatcttagttgataaaaaatactctcattataggtaaataattttcaaaatacccatattggtaaataatttacaaaattatccattttagtaaaaaaaaaatagtggtgcatgcacctttgaaatgcaatagaaattatgagagtaaagatttattagaaagcgtgttttatcanactttaatgactaacacagacaatataactctcttcaaacttat

SEQ ID NO: 195505 - DNA, 295 bp, Glycine max
tttgagctagagtgtgatgcctctggtgtaggtgtgggagttgtgttatggtagggtggacaccctattacttaatttagtgagaaacttcatggtgccgctcttaactaccccacatatgataaggagctttatgccttagttagagccctccaaacttgggaacattaccttgtttccaaggagtttgttattcatagtgatcatgaatcacttaagtacattagaggacaatgcaagttaaacaagaggcatgcaaaatgggtagagttccaagagcaatttctatatgtta

SEQ ID NO: 195506 - DNA, 434 bp, Glycine max
agcttaaggtcactttacaatacacggtccttcaagcaagtaagatgtttcatcttctattcatttggtggactttatacttcaaggtattatctttttatttttttgggatagtcattattattatgtggtaagagtttatacaagtctagtttacttaataaggggtcaattgatggattacccaaactagtaagccacctactttgtaaaccattaccattaataaagttatgtgtcttcttaaaagtttcacataatttgttcattttaattttgactatttatgagaaggtgtttttaccatttataatgagacaatagtcaatatttatttatcacattctcatataaaaataaatctttcactaaatacatttcttctttctctttatgtgtgtatgtgtatgtgtaattaacatacatttagtgat

SEQ ID NO: 195507 - DNA, 430 bp, Glycine max
  unsure (1)..(430): unsure at all n locations
taacattgttctgtgacctgagttccaaataagattctcattcttaacaggattattttatgctgtgaattactcccaggacttgggtgtcaatgatagtagcatgtataaacactcggatgaaaagctaaaatcacttagaatgtgtttgngttgcattttcattttctgtttttattttcacaagattagaattataaaaatatgtttggtttgacttcttgttttctgctttcaagaaataaaaacactgaaatgcgttttcaaaaagaaatgtatntttatatttgcttaaaattacattccttgtcaccgcgttttcatgttatccaaaatgaggtgtctaagttcaactgaaacactgaaaacgagatttattatttcagtttttgttcggtgagaaaaattttactgaaatgtttcaaaatca

SEQ ID NO: 195508 - DNA, 300 bp, Glycine max
  unsure (1)..(300): unsure at all n locations
agcttatggcttctcagtaaaacactacggcgcttgcattctcataagttttaggcagatatgatattttaaaaaaagtttatgagatccattcattgcaaaaaggatgtattatgcatggtgatatcatgattttggatagtaattaattataactcattatttagagtaaattaatgcgacctcctattttttaatatccttaactaaaacaactgtatcaattaaagatataagtggttaattaaggaatgagganggcgnataataaagagagacagagagaaaaattgttgatga

SEQ ID NO: 195509 - DNA, 244 bp, Glycine max
  unsure (1)..(244): unsure at all n locations
tgagctgtaaggtgatggcctagaaagagtttagtctctaataaacctttgaggttgaggtaaggcatangatangtccatcatatcttatgcttgaatgcaatttggctcanataatggggcattatattatcaagcatggaactccatgtcagtttgtcaaagagtattcaatatcatgttgagtaaccatcaccaaaaagtttaacactatcaagtacatgaacataacgatcagtcgcaa

SEQ ID NO: 195510 - DNA, 287 bp, Glycine max
  unsure (1)..(287): unsure at all n locations
agctngtccaatgaggtgacaatgaaaatacctagtgttactacctgatatacagtttttgctgctcgttttattgtcaattccaactgcatcgatgcatctttaacaagcaggtaccacgaaccagagcagcaaccaagttgaccttctttaaactctaaaataccataaaaaacaaggtatgtaaaatgtgcaactagtcagatattaatcagatccttcttaaaccataaattaagacattttccacagcaagcccaggaaggcatttcaatggctaaaaaatt

SEQ ID NO: 195511 - DNA, 370 bp, Glycine max
  unsure (1)..(370): unsure at all n locations
actctagtctcgctctcaacaactgcaaaatcaagtggaatattgttcctactacaatcttgtccgatgggagttaacaaagtaccatggtatttgccagttaagaatgtcccatctaattgcacaagtggcttgcaatatttgaagccttcaatgcatggattaaagttgtgtgttcatggtttggggattaaggcttgaggtttaggatttagagtttactgatacttgaggtaaagttgtgtgttaggatttacgatacaatgagaaagatatttggactattaatgagatatttaatcaaatggacttattagatataaatagggaaagaaggatatganatattctctactatattatgaccttt

SEQ ID NO: 195512 - DNA, 71 bp, Glycine max
atcccccccgaaaaactgtattattttaccaatgctcatcttccccaaaattggcggacatcttttgtatt

SEQ ID NO: 195513 - DNA, 399 bp, Glycine max
  unsure (1)..(399): unsure at all n locations
agcttcaatctttgcttggagtttaattcgagatcgattgccgactaagtctaatctgcggagaaggcaaatagatataagtgacagcctctgtcctttctgcagtattaaggaggaaactgcatctcatctcttttttgactgcagcaaaacacagcatctttggtgggaatccctatcatggataggaacttcgggggcataccctataaatcctacgcaccactttttgcagcacaacaatgggatgaatggtgggaagaaatacaatagatggaagtgttgatgggttgctctanattggtccatttggcagcatangaataaggttattattatcaatgctccattcaacggcagtatgttgctggaagatgcactatattnggcatggacatg

SEQ ID NO: 195514 - DNA, 298 bp, Glycine max
gaaagttagttctaccagtgggacactactcttaaaacaaaaatggcatacaacctcctcccataaatacaaacatcaatgtaaatttagagcaagcttatgcgcatatttccttacgaacgttcacttgcacaagacatcctattaactaagaaaaatgcacccatatacaatcaaggtagcttcattacctagattatttacatgtacttccaaggtgtatttgttattacatcacacacgactccttggctgaatttacatacatgcatactcaaagcattttggggtacccaaa

SEQ ID NO: 195515 - DNA, 380 bp, Glycine max
  unsure (1)..(380): unsure at all n locations
agcttatgattccatttcctgggaattcttgtattggatgcttaagtccattggctttccagcccagttctgtacttggatcatggaatgtgtttcttccacttcctttagtgtggcagtcaatggatccatttatggtcacttcaaagggcagcggggtcttagacaaggggatcttctctccccttatctgtttgtgctctgtttggagtacttttccagagatatgagcagcctcaaggaagatgccaattntaaatttcatcccaactgtgcaagtattcagctatctcatttggcttttgcagatgatattatgcttttatctagaggagatatcccttctgtgtcaactaatgttgccaagcttcaacacttct

SEQ ID NO: 195516 - DNA, 374 bp, Glycine max
tgtacacatgctaaggtttctccttatcttcaaatctatgtggctgcttcacataaacctcttcatttatgaatccatttataaatgcactcttgacatccatctgatatagtttaatgtctttgtgtgctgcataggctaagagtattctgacagcttcaagtcttgctactggtgcaaaggtttcatcaaagtcaatcccttctttgttgattgtacccatgagcaactagtctagccttattcctaaccacttctcctttttcattgagcttgtttttgaatacctacttagttccaatcaccgactaaatcttatgagggggaacatgattttagaccttgatctaacgaactggctggttcttcttcat

SEQ ID NO: 195517 - DNA, 408 bp, Glycine max
  unsure (1)..(408): unsure at all n locations
agctntgatctaccaccaccgccgccaccatcatcatagttntctattatttaatattactagtactttgatttccagccatgtatttggctatattattatgatatttgaacaatttactatttctttatttgcatggtatgtttgaacaaaaattaattatgttatttgaactatgtggttttatatatttgatctattcatggttcttgcttcatgatttggtttatacttttccatgaatgttgtgtggatgcttagttgtatttgaatgcttcaaacttgttacacactttggctttttgttgatgccaaagggggagagaaatagggattaaatcaataactcacatgagtaatcaacttaattttaagagaagcataaatttcaaaacaaagggggagaat

SEQ ID NO: 195518 - DNA, 357 bp, Glycine max
tgtagaatggctagacatgatacatgtcggggcttggtttggtgtaagggtaaaatggatgccccacattatttccatgacacaaatgcagaaatgatgatttggagactatatgcagaactggtcatgcatgcatctatgccgacactcaaatgtcaaatctttatggtcatgtgatgctagggctcgggattcatttcctctatattaatcaacccaacgttaccaaaatatgttcttttatcaatttgtacattcatccgagtccattttgggcgttcgggaaaatcttacagcattcacccttcatgtgtagacacatgttgcaaaaactagttatgatcagtgaattttttc

SEQ ID NO: 195519 - DNA, 329 bp, Glycine max
  unsure (1)..(329): unsure at all n locations
tataagcgcgggtctgggagacaaatgtcaagtgttcgcgatatgcgaagatgatgttccgagtactttggatttggtacgaccatgcccttctgaatttcaactgggaaaatggcgagtggaaaaacccccccgcctttacgccaccagcctatatgtaacctttacgggtgtaaaagctctataattgggcctaggctttagaagttttccttttggtaagctttgtgtcttttggttntgaatttataatacaaggatctttcttcatctgttcctacgtctctacccattctcattcatttgcatgtttacttctttttctgaaa

SEQ ID NO: 195520 - DNA, 373 bp, Glycine max
  unsure (1)..(373): unsure at all n locations
tggactgtgctannggagaaaacaaatgaccaaagtgaaccatgagccatttctatggcaaaattgggtgttgaagagtcaaatattgattcggcggaattttaggtgtaaatccagtttgagcaagtttagattgatgttatagacttgtgtgaagtgagagtttgctccaaatttacctcattctcaatttcacttttcaaacctaaaaaacccattgaattgaggggttttggacacctacattctgtgttgctgtgctttaaagcttgacttcngcttangcatgattgatacatgatttgggagttgtangaattgatttgggcaagattggatgagaggaagtgtgattttcgaaatatgcacttat

SEQ ID NO: 195521 - DNA, 345 bp, Glycine max
  unsure (1)..(345): unsure at all n locations
agctgcatgattatattctcgccctttgtctagcatattccttnttatatcatcaaaacctgcatgaattacattctccccctttttgatgatgacgagcattatccaatgcttgatctttttgacatcatcaaaatcttcatgatttacattctccccctttttgatgatgataaccacctataagttaggagcaacaaccaagaaaaaatatctatttgcatatagtgtactcccccttggttttggaatgtttgcttatatgagacaattgaagattatatacttttcatatataaaaagttgtctcatacagaatagaccattttccttctattttagctt

SEQ ID NO: 195522 - DNA, 232 bp, Glycine max
  unsure (1)..(232): unsure at all n locations
tgagatgaggaagtgttgaagggtgaaacttcctgcntttattgttgaccacagagtggtacctggagatatgtcgcgggggtcaggagaccttggggacgtcaggtggggtgctattgcccaaaaccaatcttgaccaatcccgacccaacccgggcatagtcggtcagtgagaacctgtgatgtacctaagcaggcgagctcctggcagtcaacagataaaaggaaaaca

SEQ ID NO: 195523 - DNA, 398 bp, Glycine max
agcttcacccaaacctatggtattgattactcataaacttttgttcctgttgcaaaacttaacaccattagagtcctcttataattggctgcaaatttagattggccattacagcaacttgacgtaaagaatgtctttttaaatggggacttagaggaggaagtctacatggactcaccttctggttttgaatctcagttcaatcaaaagatttgcaagcttcaaaagtctctctatggcttgaaacagtcacctatagcatggtttgagagatttgcccagtttattaagaagctgggatattctcagtgtcagagtgatcacaccttgcttgtgaaacactcttttgaaggaaagatggttgtattaattgtctatgtggatgatattataattac

SEQ ID NO: 195524 - DNA, 248 bp, Glycine max
tggatttggaccttgtcattggacccttcaactcatgaagtgcttttacgttcttgtgctttttggatatccctctatcatcccctccttcttgaaaagaatctgtccttggataatgctcttgggatagccctttatcatccgctccttctttagaagaacctatcctcatatgtgcatgcaagacacctacatcacaagaagaaagatcaataacatttgaagttgaactaaccccgtgcttactt

SEQ ID NO: 195525 - DNA, 68 bp, Glycine max
gcttatttaattttaacttttatttgatggagaatattaatttggcacgaatagtaatgatatttcag

SEQ ID NO: 195526 - DNA, 404 bp, Glycine max
  unsure (1)..(404): unsure at all n locations
tgtcaatacattggatcacaaaatcaatggtcgaatttcaaaatcaccgactgaactgatcactcgatattgtagtgttataaataattttttgtatatttatataatatacatattataaacataatatttgtcaatattgttacaagaataacctccatcttagtgtaaggtgtgcttgtgtcagttgctgacgatagatttgagccttgatatgttgctttttgttaatttattccattaaatacgaatatcttattataaatatcacatttgtcaatgctaaaaaataaaaaggctccagggtagtggtaagacttngttatctcccatcactggagatatattgatacctatcattccacaacaaataaaaaaattccttcctaccactntacttgatg

SEQ ID NO: 195527 - DNA, 455 bp, Glycine max
  unsure (1)..(455): unsure at all n locations
tggacgtgaccaatgaaccgtgcatttgaggccctgtanatcctcaccttggaataggctccacatgatacatggcagggcctggatnggttcagaggtaacatggatgccccacagtattttcatgactccaaagcacaaatgatcatttggatactatatgcggaactggacattcatgcctttttgcccacactcatatgtcaaagctttatcgccatgtgatgctacggctacggattcatttccgttattttaatcaaccacatggttccaaatatgtcctttcatcatttgacatcactcggtccctttgggcgatgggaaacttcaatcatcacctcacgggtgacacttttacaaactacatcacatgatatttttcaaaaagtggaaacctctttcaaacatgtggtcttctattccacaaattcattttttattatttttctcac

SEQ ID NO: 195528 - DNA, 386 bp, Glycine max
  unsure (1)..(386): unsure at all n locations
agcttgaacactgcatccttgttcaataggttgctcaatggtttggtaattntggagaaatccttgatgaacctccgataaaaacctgcatgtccaacaaaactcctgatacccttaacatttactggtggtggtaacttctctatgacatcgatttttgctttgtccacctcaatgccttgggctgaaattttgtggcccaacattatcccttcttgaatcatgaagtgacacttctcccaattcagcaccagattcgcttcaacacatctttgcagctgtcataccctaatttcgtccggggactatcgtttgttgatcttttgatccttgctagtcgacttacgatgttcaaacgccagttacagtgcanaacagatgatcat

SEQ ID NO: 195529 - DNA, 336 bp, Glycine max
tataccaattatgtatatattttttgcttcatcagttggtggatggaaatgccatcaaaatgccaaatgagtggtggcatggaaactaaaagctcattaattatttcttgcattgatggcctggattttggatgggggcacaagcatgttaatgctaatattacaataagcacaatttcttgcatatcctttcgatagaagggtagtggtattcgtgagtccaataaatgaggcagaaatgttagaccagagatgcacatgctatcaagataatagtcatagcaattggcagagataatcaattacaactcacatcacttgctacgactacaacta

SEQ ID NO: 195530 - DNA, 131 bp, Glycine max
  unsure (1)..(131): unsure at all n locations
tctgcttatgccagcaacagttatacctaaccatttganttagaccaagcatgcaaaactttttaagttctaattataatatatcaacaaactggttaattccctaatggcaaacgggaagtttcttcatt

SEQ ID NO: 195531 - DNA, 172 bp, Glycine max
cttagttagtgttccgtagtcgaaatgttgtgcttgactcttacattactttagtcagagaaaatttgacattgggtttatgtgttgcagactcatgggcttgcagaatatatagctcaagtgagatttactttacaactagatacttttatatacatttttagactacata

SEQ ID NO: 195532 - DNA, 276 bp, Glycine max
agcttaaccaatgtcatgttaaaaccactttttttaagtcacgtcaagaccctgtcactcttatatattcatgtgaacccagcatatagccatgagcatgctgttatcataaaattaaattacaacagtgcccttgaaggaaagtccagaaaggtacaataagagaaaagtttagaacacaccaataggtaaattagttgcatcagctaaaatgatgatgcaacagtctctaatgatccaataattaactagctagcaacttgtgggtcttatata

SEQ ID NO: 195533 - DNA, 404 bp, Glycine max
  unsure (1)..(404): unsure at all n locations
tgtagaggctacaacaagatagtggttctagagaataaaacagttaatatagataaattggccatggtaaacaatgacactatcataagtgtgctgctctattccacaatattggttntggttttcatgagtgtccaacagcatcatcattgtattactttgcttttaacagaggccagacagctgcttctgcaattaagttgacatttgagaataaaatcatgtaatgtaattcatgcccctctattcatgtgaatacttaaatacacgcatgctntgtttgcanatcaccgggtagagggttgattaggtagttgttcanaggctctggataatatttattttgactgttaaaattactacaaatttctagaatattcttacatataatatgtatgaaaatg

SEQ ID NO: 195534 - DNA, 414 bp, Glycine max
agcttcatctaactggtcatacatatgaatcatggccgcagctccccaggcatacccccactttgacccaggtcgcgaaaagcctctagatgtaccacatgaacatttgttgcactcttgttagaaaaaagagtgcaaccgaccaggtgtagtagataagcacgagctgctacaatccatcgtcgtgcctgacatctcatttcatagatctcctgaacccatgagaggtgtacatatgccctgcgcgctcgtattgactcggctctagcctcctcaccagacacctcgagcaactccatcaacaaaaataccgtctcatccacggaaatagcctcgaagctgtggaaagcgccactgatagggagatggaggagtgacgacacatcatctagtgtgatcgtcaactctcctact

SEQ ID NO: 195535 - DNA, 321 bp, Glycine max
ctttgcaagctggaatcatttatcctatctccgacagccaatgggtgagtcccgtccaggtagtcccgaaaaagactggcctcacagtgatcagaaatgagaaggaggagctgattcctactcgggtgcagaacagttggagagtctgcattgactataggaggctgaaccaggttaccaaaaaggaccattttcccctgccattcattgaccagatgcttgaacgcctggcaggtaaatcccactactgtttccttgatggtttttctggttatatgcaaattactattgctcctgaggatcaggaaaagaccacattca

SEQ ID NO: 195536 - DNA, 458 bp, Glycine max
  unsure (1)..(458): unsure at all n locations
agctntactgcctcatcattgctgaagaagtttaataaaccatcactccctactataacaaattgatcggaatttgaaattctatggacattcaatgatggttgcgtggatatgtatggtgggcttttaagatcccgaactcgaaggattcccatcaaagcatcattcagatttttctgcaggagaataaaataagaaaattaaatctatgtttggtacttggtaggacaaagatttattctttgcaatcgtccattcacagacacagtcagtagattgaattttaagggtttataattatcacatttacttgctaaaatatcagtacccaaaatcttatagaaacctattggctgaagtgtaagagagaatactaacctttttcaagtagccaactccaaaagctcgagtaaccttcaatttacctttcacttttcctnctataacgatcttgggat

SEQ ID NO: 195537 - DNA, 313 bp, Glycine max
  unsure (1)..(313): unsure at all n locations
cttgagaattttaaataactgggaagggacggcacttaagttttctcaatttaacaatatagacttagtaattaggcagcatttgatattgaaagtggtaccattgtttgtcactggacagtggaaaatgtatagatttcttggccagctagcttgtaactacagcatcataactgaatcttacgtttgtttttatgaaattttttatttgctattcattnttcattttgtgctatgttaaatctattcgcttcatttttcagcggcttggaaaccaatggttgctggcatagatggcctaaccttgggtggg

SEQ ID NO: 195538 - DNA, 474 bp, Glycine max
  unsure (1)..(474): unsure at all n locations
tcgtacccgggatccttaagttacctgccgcatgcaagcttgtgagagtctnttcactgcaatttgtcttccatctggtagagttccctgataaaagtttgcaataaatataaggcttaaagcatataaaaagatggtaaaagtagagaatcactaatatataccttgtaaacagggccaaatccaccttcccctaacttagatgcttctgaaaagttatcagtactctttagaattgtgattaatgggaatgtaggcaagtctacattaagtgtttcctcagtttgaacattgtgatatgatgattgatcaatggtatcaggtatccttccatctgcaaagaagacaagtttttgagtttgtgaaataaactaaaatttctagtatatatgtattgtttcaggaaattaccttttcctcttcctcttctagatcttttcctgaaccagaagcaataaacactgaaacatagta

SEQ ID NO: 195539 - DNA, 434 bp, Glycine max
  unsure (1)..(434): unsure at all n locations
tataagctagttgaaagcttatattaaatcagttaattagtttataagttntttttactaattnttaatttttcaacttttagcttatgacaatatatgtttggtaaggtctttgaagaactaataagcttctttaattagcttataagtttctttgagcaaaataagtttgtttggtatctaacttattttaatagtttattttctataagctactacttcaagtaatttattttgataagttatttgaagtaatttatagaaaataagataacatataaattattattttttttcttcttctccattntacttttactattttatttgacatttcattttacccttatattcaataaaaaatcttctatctttttgttggtgatgaaaaactttgtatctattntatgttttacaatatgatatcacctctc

SEQ ID NO: 195540 - DNA, 361 bp, Glycine max
agctttaacaatatattctttgcgggaaattatccatgtttggttgacatggtcaacaaacattggttatgctgaacaaacaatttcaaacttcttaaagcaatcatcgaaatgatccttaaaaggacaatcaaccaaactcccccagacatacatcacataatcccatgcatttttttgaccaactagagatttacattttaccttgacattcttgtcaatgtgaaacctacacaacaagttggtacacccagggaatacagtattcactacattcatcaacgttaggtctctatcggtaacaataactccaaggaggacatcacatcttagaaaaagacattgaaaccgttctatagat

SEQ ID NO: 195541 - DNA, 375 bp, Glycine max
  unsure (1)..(375): unsure at all n locations
ntgtggcactctgttacacacgtcagccctccatgtcagtcctggcacaggagcacatatatcatgcccttagcaattggactctcaactgacaggttatctctaaccatttatattatttgaatatattgcaatctccttatcacgtggcaggtattcaattatctctaagctacacattatctataagccataattatttacttgtcattacctacaagtcggtaattatctgtaagggttgttacaacaccgtaatagcccctacaaacaatatcctgcaacttctactctactctataagtatcaggtttcatctcactcttttcatactcattcatactctcctaattaacatacttacttgagcgtcag

SEQ ID NO: 195542 - DNA, 128 bp, Glycine max
agctttgagcaaattcaaacgacaatcacttttttactcggatgtctgattgagtcccgtaatatgtcgagacgctcgaaattgaagaacgaagctctgagccaaatctaacgacaataactttttac

SEQ ID NO: 195543 - DNA, 306 bp, Glycine max
actcagcttcgtgatcaatttcgagcgtctcgatatattacgggactcagtcagacaaccaagtgaaaagctattgtcgtttgaatttgctcagagcttcgatattccatttcgagcgtctcgatatattacgagactcaatccgaccaccgagtgaaaagttattggcggttgaatttgctcagagcttcggcattcaagttcaagcgtctcgattattacgggactaaatcagacatctgagtaaaaagtattggcgcttgaattgctcagagttcggaatccattttgagcgtctcgatatat

SEQ ID NO: 195544 - DNA, 252 bp, Glycine max
catggagaacatgtactaaattactaattgtaagaaataggcttctaaaaaataaaaataaagaaggacgattatgaaatatacagataccttccataatatgatcatattatggaatagatagacggctattttttctataatcaaatacattaaacttttgaacccctaaaatcagtggtcgggctctagtaggaacactgaagtctgaacccttcagaccttgacagacataatccatatatagaagtc

SEQ ID NO: 195545 - DNA, 200 bp, Glycine max
  unsure (1)..(200): unsure at all n locations
ctgctagtgaaagggcttactcgtgcatgtttntgggtgtgttatcangtacattcaatattttataaactcaatgctaaacataaataactaatattataatatgtactaacgacaaaatttagatgcagtttcttatatactttaagaactattctaacattagaattggaattctattttagtaattcatacaatga

SEQ ID NO: 195546 - DNA, 429 bp, Glycine max
agcttgcccagagtatgaatccacggaggatatgcttaccacctcgaaagactggaaagcggtttctaatgactcttctgcggcctccacataaggcatagaggatgggcagctcaccaagatgtcttcctcgcctgatacgatgaccagatgccctttcactacgaagttcaacttttggtggagtgtagagggaataactcccactgagtggatccacggacgccccaacagacagctgtaggggggggttaatatccattatttggaaggtaacttgacaggtgtgagggcctatctgtactgggagatcgatctcttccctaacctctctgcgggtgccgtcgaaagcacgaaccaccattgaactcggctttatgtgggaagtttgaatggtatttttccaagtgttttatgcatacgttaaac

SEQ ID NO: 195547 - DNA, 210 bp, Glycine max
tcttatccaaggctcatcttggtggtggagctccttcttccatggcttattccctagtggatggcccctcctctcacctcttctgctttgtcttccgctgcatctccatggtggaaaatcaccattaaaggacctcattgaagctcacagatccagcctccataaaagccccacaagcaagtttccatcaagtggtaatcagagcacatg

SEQ ID NO: 195548 - DNA, 402 bp, Glycine max
agcttcgtatcaaatgacacagaaagcgtgtttctgctttgcgcatgggagatgttcgggtgacaccttgcatgcacgattcttttcactaaaatcgataatattacaaaactatgtatcagtatcgataatttagaaaattatttacgtgtaagggtgatttttgccactccaaaatcttagttgataaaaaatactctcattataggtaaataattttcaaaattacccatattggtaaataattttacaaaattatccattttagtaaaaaaaaaatagtggtgcatgcacctttgaaatgcaatagaaattatgagagtaaagaatttattagaaagcgtggttttatcaaactttaatgtactaacacagtacaatataactctcttcaaacttatc

SEQ ID NO: 195549 - DNA, 294 bp, Glycine max
  unsure (1)..(294): unsure at all n locations
ttgagctagagtgtgatgcctctggtgtaggtgtgggagttgtgttatggtagggtggacaccctattacttaatttagtgagaaacttcatggtgccgctcttaactaccccacatatgataaggagctttatgccttagttagagccctccaaacttgggaacattaccttgtttccaaggagtttgttattcatagcgatcatgaatcacttaagtacattagaggacaatgcaangtatacaagaggcatgcaaaatgggtagagttccaagagccatttctatatgtta

SEQ ID NO: 195550 - DNA, 311 bp, Glycine max
agcttgtccttaaattcagttaagagcaacgcatagctcacattatctgcttcaactcctaaacaatccaaaatttttggcttctggttttatgtcaatacatcaaaatcttatgttttacttgtgtcatcatgtaatgcttcctctactattgattccataaaacagaaaaaaaaacactataaaatgaaacctaatatcatcaacaacataaaccaaaatttttggctgctggttttgtgcccattccccacatttgatcttcgatgatccaatctacaaatctcccccccgccccccataaaaatgaa

SEQ ID NO: 195551 - DNA, 355 bp, Glycine max
  unsure (1)..(355): unsure at all n locations
tataaactntatacaagaatgaagctctgataccacttgttagacaagtggcctcagatatcttaagaagggggggttgaattaagatattccaaattatttcccctaattagaaatctatttcactttttaaccaagttatgaattcccttaatgaaaatcttcttaaatattaattcaaatgaaacaatttgaatatgaatataaagcaataataaataaaggagattaagggaagagaaaatgcaaactcagttttatactggttcggccacacccttgtgcctacgtccagtcctcaagcaacccgcttgagagttcactatcttgtaaatccttttacagttctaacaca

SEQ ID NO: 195552 - DNA, 274 bp, Glycine max
agcttctcgttcattgccataggtgtggcaagtggtttgcaatcttgcatgttgaacttctttaataagtcatccgcatatttttcttgcgagaaaaatatttgtccaagtctttgcttgacttgcatcttcacatatagtgacggctcacttggacttttgaggaatctatgctcgacgaaggatttgtctattttgttgtccatgctcggggagcttgtttgagaccataaaatgcatttttcaagcgatatactttggcttcttctccctg

SEQ ID NO: 195553 - DNA, 361 bp, Glycine max
  unsure (1)..(361): unsure at all n locations
tgtaatcaattacacacatactgtaatcgattaccagaggagattttcagaaaatattctcaacagtcacatctttttatttggttcttgaatggctatcaaaggcctatatatatgtgacttgagacacgaatttgcgaagactttttgagaacaaaaaggtcttatcctcttaaagagcaaaattgttttatcctcttacaaattccttggccaaaacacttgtgattcaataaggaattatttgagtgctcaaattgttcaatctatctctntaaagagagatttcttcttctcttcttctttattttgaaaagggattaagagaccgagggtctcttngtgtaaagaaatctgaaca

SEQ ID NO: 195554 - DNA, 288 bp, Glycine max
  unsure (1)..(288): unsure at all n locations
agcttgtaatagtatnttgagcaataatatccagctatcttttggatctccccctcttcccccttgattttcctgtaaatcgataagtatgatatccactatgtctggctaaattctttgaaggcaccctcaaggggccttatttatcttcatttagaaaatgcgaatatgatttagaacccaaatgtttattttacttttgattttttttttgaaaacctgcggtttgtaagcctgcaaaggtgtgcccttgatatatgttttcaaaaacaatggaagtccttatgg

SEQ ID NO: 195555 - DNA, 220 bp, Glycine max
tggatctgtgtttcagaggaatttgatgttttcaacgtatcaagagcaattcttgacacgattactgattcgactgatcatggtagagagctagaaatagttcagagaagactaaaagaaaaattggcagataaaaaatttctcgtcgttttggatgacgtttggaacgaaagcaggcctaaatgggaagctgtgcagaatgctcttgtttgtggagctc

SEQ ID NO: 195556 - DNA, 266 bp, Glycine max
cgattctcactcaattcttcaccaaatcacgtgccgtaaagcccaatctttctctttttcactcctctttcacttccaccgatcaaaatccagaaaaacttcatcaaatggcagagccatcaaagaagagaaagggatcatcctccaccgctaccgctgctggccatcgccgtcacggcccatccggagcacccacagcacctattcctccttctttgtcatctccaagatcatcaacattgttttcatccgatgatcaacgtcta

SEQ ID NO: 195557 - DNA, 361 bp, Glycine max
tgtagaatggccagacatgatacatgtcaaggtttggtttggttcaaggattaaagggatgccccacattatttccacgacacaaatgcaaaaatgatgatttggaaattttatgcaaaactggtcatgcatgcacctatgtggacgctcaagtgtcaaatttttatggtcatgtgatgctagggctcaggattcatttcctctattttaaatcaacccaatgtttccaaaatatgttcttttatcaatttgtgcattcatccgagtccatttcgggcgtccggggaaatttcacagcattcacccttcaggtgtagacacattttccaaaaattgggtatgatcaatgaatttttttttc

SEQ ID NO: 195558 - DNA, 358 bp, Glycine max
  unsure (1)..(358): unsure at all n locations
agctatgagttggtttctggccttagaattaattntgctaagagccaatttggtgcaattggccaatctgaggagtggtgtactcttgcagcagatatcttgaattgtggtcctctgcagttcccatttatatacctagggatgcctataggtgttaaccctanaaggaaggtggtgtgggagcctctaatcacaaaatttgaggccaaactgaacaaatggaaccagagaagtctatctatggctggcagaattactttaattaatgctgccttgacagctttgcctttgttctatatgtccttttttagggcccctacagcaatcattaagaggctcactgctattcaaagacaat

SEQ ID NO: 195559 - DNA, 329 bp, Glycine max
  unsure (1)..(329): unsure at all n locations
nntggtatttataagtccccttcaatcaagtatttgttgtctctaaacgggcatatttcctctcttaagtttgcatctgaaaaatttggtccttggttcattaaatgcacgcacttcctcatgctaggaaactactctttgttgctagtgttttgaacaccatagcaggaaaccacttcctttttgtatcaaagcatgtctatgcagcataacttttcttttgatggcaactgaggaattgcatagcttgacttcatttattcttcataagattcgagagatcctaagagaatgtttctgcacaatagatctcagacacaggatttaat

SEQ ID NO: 195560 - DNA, 448 bp, Glycine max
  unsure (1)..(448): unsure at all n locations
agcttgtgataaggagacttttccttccttgtttgtccattaaggaggaagcaatacaagttcctgcaacaaaataaaacttcaatcagaaacaatatcttgtttgcggaacatatacaataaccttcttttactgaatgcacaataaacatttttaagaataaaaaataccaaccaaaaacatttgatgcaccaaccaaggcacttgctgcaacatcagaagcaattccagcactacggaacacagaagttgaataataaactacagcatttattccagccaactgctggaacaagaaaagtgctgccccaacactgacaactgaaacaaggcatantttaaggaagtgctatatactatttcataaaagaatacatttaatcaactaaatagtaaactaaaaaaaagttgtcagtgaaattaaaacatgaacaatgataatattat

SEQ ID NO: 195561 - DNA, 336 bp, Glycine max
tgttcgaagatcctcgagacgttataagaggggccaatctttctgaaaagactttcaagaagtttttgaagatttctcttgatgaaaactataacctgcatccttttgagttcaaccattcccacttttgcaccatggggtttgttacctggtgggagaaatattattcgacccgttcagttggagacactactatcatgatctccagacttgagagtggttttacacaaccaacggtcgagaatatccgctcaaaccttcaagctcgaggtattaaattacttttgactttctaaattgatatgtatttttgccttttctaatattcttattttc

SEQ ID NO: 195562 - DNA, 160 bp, Glycine max
agcttgcagatggtacatctttcagagcgcgtgtactagttgctacggatttccctgggactatgtttgacgaaatcattgggggtaacaggtgtacctatgttgttgtagatcctgaacacttagttgtcatggtctgcttttttccatagcaatcctg

SEQ ID NO: 195563 - DNA, 238 bp, Glycine max
tattacggacctataaatctcagcttcctgaactatatcgattgaaataggtgctgacgttcttgacctgcaaatcgcatcatataacatcggaaagcaatggtcgcgcgctgagcactcataacatgtggcttatcgctttctctagacacgcactaggacggaggactgttacaaattacatgaaaccatagatagtctgcagttctttattatatataatgtggacctcccccga

SEQ ID NO: 195564 - DNA, 341 bp, Glycine max
  unsure (1)..(341): unsure at all n locations
catgaagcttcgcgctttttattatgaagttgcaatctaacacaaagggtgatgatgtttccttccaccgcaaaaaataacgaccagttattttcaatctactatctttacctctttcctttttcctttggtttttattcactcaacttcggcactgttttcacctcacaatcacaatgcctgcatgcataaatactatgtgtctgaaaatcacaacctatctcggacgcattgatgcggtaattgaatttttttaatacaaatcataaatgtcataattaatntgtgtttagaagtttttttactactactactataantctaattaaaaaaaaagttta

SEQ ID NO: 195565 - DNA, 310 bp, Glycine max
taaggattgtcaacattccaatttctcgaggaatgtgaccgataaggttattttctgcaatacgcagaaatcccaacttgttcaacttcccaatctctggaggaatgtggccagaaaatttggcggtacttaagtctagatatgacaggttggacaagtttgctatggaattaggaattgctccacttagttgaagacattgggaaagatcaagagcatgtaaactccttagtgaccacatttcttgagggatggaaccatggaaagaatctaaagaaaaattcacaacatttactttggacatgttacc

SEQ ID NO: 195566 - DNA, 291 bp, Glycine max
  unsure (1)..(291): unsure at all n locations
tgctacaaactgggaaggtggttntagagttactgaatcactcaaaaatggagcctatctactatagtcttatccgacaaggtaattccaagagcctaaaacaagacttacctcaaattctattacagttaaacttgtaagtggtgatgtactatttttcctacgagatttttttgttaaatatgtcttaacgaggcacacccaaattttacattgaataaagtactatttttatgatttttattaactntatagatctgagtagaccaattggtttctctgactaaacac

SEQ ID NO: 195567 - DNA, 307 bp, Glycine max
  unsure (1)..(307): unsure at all n locations
agctctgataccacttgttatacaagtggcctctgatatcttaagaaggagtggttgaattaagatattacaaactattttcccaattaaaattctactttgattttaatgcaagttccaagttcccttaatgacgaatttctaaatgatgattcaaattaaacaatttgagtgtaaatttaaaacaacaatagataaaagagtttaagggaagagaaagtgcaaacttagttttatactgattcggccatacccttgtgcttacgtncagtccccaagcagctcgcttgagagttccactaacttg

SEQ ID NO: 195568 - DNA, 307 bp, Glycine max
agcttcgacctatgttcatgaattgtgtgccatcacaactgccgttaagaagtggagacaataccttcttggccatcaattcatgatcttgactgatcacagaagtcttaaggagctcatgactcagattgttcaaactccagagcagcaaatgtattttgccaggcttatggggtatgactactccattcaatatcggtccgggagcactaatttggtagctgatgccttatcgcgcttgaaggagggatcagaaggaaccatgttattactatctgtaccttgcctgacatttctagatgaattg

SEQ ID NO: 195569 - DNA, 311 bp, Glycine max
  unsure (1)..(311): unsure at all n locations
tctcaataaatacttatagatgaagattattaanaagcaaattaatgaatcaaatgtgattagaagtgtatatatatgtataccatgttctttgagcccagttgccaagttgttagtctttctcccaagcctgttcatcccggtaagaactgaatttactctacctgaaaaatcaagacattaattcagtatttcagtgttgtgaatataaacatacctttattgaatacctgatgaacaattatcttttctctcgttttctaattaaacaattgatcaaattattttctaataaacgatatatatatctc

SEQ ID NO: 195570 - DNA, 373 bp, Glycine max
  unsure (1)..(373): unsure at all n locations
agcttgatattttccatatatctcaatgaattacaattgctttatttatactagtttccttgctaacggtttttgtcattttgtgccaaggaatatttttaggaaatcattggatcatcaattatgactacactgtccccccatgaccaacaattcctcatctggcaatatcagcgcaaatctaggtcaacttcctctccatgacttttctttatacgtagtccctgatgtaagagggccttgtgatggtcctctttgcctttgctgctatttgtacccgtttgttctgtgtttgaacctctntttgatgatctttgttgcctctgctagctatttcttcctttgtatcacctgtacttagatggaatgttac

SEQ ID NO: 195571 - DNA, 282 bp, Glycine max
  unsure (1)..(282): unsure at all n locations
nttggtcttaaataaaaagggttctccctttttcccttattttattcaagctctgccacatgtccttatttgagtggagcaagaagggcccactttctctttttgactgtgacccatactcagtcacaaaagtgagaaaaaatctgacctttgaaacgctaaaatcctgcctcggtttgcgtgccatttctctgattccagattctcgcgtttctctgcgtccgccggggccagttttcgaaagcaagcaatatatatatcataacgctcagaatgaaaccc

SEQ ID NO: 195572 - DNA, 326 bp, Glycine max
  unsure (1)..(326): unsure at all n locations
gcttgatcaaaacaattatctaatcattccaatccactcaaatcatacaattgctcattcaaatcattctcaaacactcatttcatgcaaaacaatccactacatatcattttcaatcaattcattggtcaaacacgcttttggtacaaacaaacaactcaaagtgctgaaatttatataattgaaatttaaaaaaattgaaatataaaatctgaaattaaaatgactgaacatanatcataaaataattgaaaataaactaaaatgttcgagatgcacaaatttaaatgtcctgctcctgtggntgctcctatgcatgctcatta

SEQ ID NO: 195573 - DNA, 302 bp, Glycine max
  unsure (1)..(302): unsure at all n locations
tgctctanattacattgatgtttgtatttatgggaggaggttatatgccatttttgctttaagagtagtgtcccactggtaaaattaactttccaaatgtttgccttcgcaggaatggccccgaggaagcttgcctcaaagaggtccaggaaggacaaggcggccgaaggaactagttccgctctggagtacgacagtcaccgcttcaggagcgttgtacaccagcagcgcttcgaagccatcaagggatggtcgtttctccgggagcgacgcgtccagctcanggacgacgagtatactga

SEQ ID NO: 195574 - DNA, 129 bp, Glycine max
agctttagtgactatatgacgtagctccattggagcttgtaggccttggatcttcttcatcaatggagtcctttgcttcttgaattttaatggcagtggaatggagaaaaagaagagttgagaggagac

SEQ ID NO: 195575 - DNA, 399 bp, Glycine max
  unsure (1)..(399): unsure at all n locations
tgngactgcatttgggcatttattttgactttcctatgctgtctctacatacacaaaatagccccaccatcccaattttgcaaaatcatattcattcatcattggggcatttcaccgagcacttggtgagcgcatgtttgaacataaattgcaagaggatggggacaatgtggcatgccccattgcttcagaatacaacctaagcctaaggccttctcatccaaatcctcaacccaagaaaacaaggatcaaagcaaaccaaaactgcctcacaaatataagcatgttctcacaatttagagtaccaaaagatgaagaaaacacatcaatgggaagcgaanaacatcaaggatggaatacttacttgttgagtgaattgaacaccaaaatgaagcaaac

SEQ ID NO: 195576 - DNA, 354 bp, Glycine max
aggctagttttggaccctttatcattgacttccaaactttataaatgaagacattacgattgcagaaaatctatttatgtttcgaagggttacaatggtagtcatttatctttaatgaggctttgatggaaaggtaccttattaaaaagagacttacacatgtgtcaaaaaaaggtttgtgaacacttttgcgttaaaaagacgtctatatggttgcatgtaacattgacctttacatgttaccataaaataattctactatttggataataatatatgtatatataatataattcatacttatcatcattctatttatctatctatatgtcacctgtcatatttaaaccaatc

SEQ ID NO: 195577 - DNA, 408 bp, Glycine max
tctaaagaagatgtaaaaatctcatgtgcgagtaaaatagttggaattatagacaaaccaaaatatatattagaggggtagttgatgggaatatctaagatctatgactatatccaacctcgttaggctacaagaacacgagtttggagtcaaatcaaaatttcttgctgaggatagttatctagaagaaccaacaagggtttttgtgtgtgttgtgtactgttaactgtcaactttatcagttcgagtgatgagtagcattgcacaatgtaatcgaaaattctcataaacaaaagccgtagaagtgaatatttatgataatacctaacaaaagaagcaattgctggcggtaacagcgagattaattatcgagcagttggagcagtgctttgacgcatcacaacaact

SEQ ID NO: 195578 - DNA, 74 bp, Glycine max
  unsure (1)..(74): unsure at all n locations
tagcttgtangccttggttcttcttcatcaatgtgagtcctatgcttcttgaattttaatcacaggggaatgga

SEQ ID NO: 195579 - DNA, 229 bp, Glycine max
  unsure (1)..(229): unsure at all n locations
tgcttgagaagcttctatggaggctggatctttcagcttcaatgagatccttcaatggagatgcaacaaaagataaaggagaagaggtgagaggaggcgtcatcccctagggaataaaccatggaaggaggatcttcaccaccaagagagtgccttcgataagaagcttgaagaggaagcttcaatggaggaaaagaatgagagagagatagacggngggggggggggg

SEQ ID NO: 195580 - DNA, 391 bp, Glycine max
  unsure (1)..(391): unsure at all n locations
tttatattgctaagagccaatttggtgcaattggccaatctgaggagtggtgtactcttgcagcaaatatcttgaattgtggtcctctgcagttcccatttatatacctaaggatgcctatatgtggtaaccctaaaaggaaggtggtgtgggagcctctaatcaaaaaaattgaggccaaactgaacaaatggaaccagagaagtctatctatggctggcagaattactttaattaatgctgccttgacagctttgcctttgttctatatgtccttctttagggcccctacaccatcattaagaggctcactgctattcaaagaccatttctttggggtggaaacttataaagagaaaagaagcttgggtgcttggaataaatgtggctn

SEQ ID NO: 195581 - DNA, 362 bp, Glycine max
  unsure (1)..(362): unsure at all n locations
cttggtatttataagtcctcttcaatcaagtatttgttgtctctaaacgggcatatttcctctcttaagtttgcatctgaaaaatttggtccttggttcattaaatgcacgcacttcctcatgctaggaaactactctntgttgctagtgttttgaacaccatagcaggaaaccactatccttttgtatcaaagcatgtctatgcagcataacttttcttttgatggcaactgaagaattgcatagctcgacttcatttattcttcataagattcgagagatcctaagagaatgtttctgaaaatagatctcagacacagtatctaatgaaattttaaatgttatctctaatgttgatcata

SEQ ID NO: 195582 - DNA, 132 bp, Glycine max
agtctaggcgcgtgcatgcgagatcacggcagtgaacaatcccactgcggcttgactagacaatcttttctaaggactgcggctatgtgcgcgggagggacagcaaccgtctacatcgtctgcacatgacgg

SEQ ID NO: 195583 - DNA, 286 bp, Glycine max
  unsure (1)..(286): unsure at all n locations
tcttgatttcttccaccattganttttcaaccgctctaattcttgccttcacacttagcaaatctgaaaccccatctggtatcaaagtgcttttgttatctcttgaactttgatagccattttcatggagacaagtttcaattactgcatcctggacaaacaaacattcatgataaacaaggataagtagaattcatatttcctgcatatgctcattgcctcatttaataagacagacttaagaacaaaactgaagtacacgataacaagtcaatggaatattacc

SEQ ID NO: 195584 - DNA, 445 bp, Glycine max
  unsure (1)..(445): unsure at all n locations
agctntcacaatatctagacaattcaattccatttgtcatgaaactaccttaaacaaagaaaaataaagtggaggcagaatctttgcacaagattcattcaaattccacagagtttttcctaccctcatacctcagcaaaatcctcttcttttcgatttgttaaccattggatctccttgaaaattttactgggggttcctaatgcagaaatctaaattttgaccgttgggatctgctataaaatgtctagaacacgagatgtactacctttcccgtgactagcactgcccaaccatttttctacataatttggcagttntgctacacaatttaacagctgtctctgcataatctggtagatntcgaattctggcttgcatgtatccaatttcactcanattggatcctacaagtcctaaatcatgtataaatcatgttcaaacc

SEQ ID NO: 195585 - DNA, 381 bp, Glycine max
cttatcatcctttttagtgactcatgatagtcttaagtttacttcaattgttgttctttacagaaattttcatttctgaatacacttaagcaaactcatcagtaggcataaacttagaaggctcatgattcctgctcagaaggtttttcataattaaaacaccaataattttggactcaacagttctttaattttgacacactcataatgatgctcagaaaggtttagagagcaactaccagagttgagaacttggaataattcttgaagcccattaaaatgatggagtgtgcttccctctaagtacttaattctaggaaaaatgatgaacaacaaggccttacatagaagattcattagatgctacatgaagagcatcat

SEQ ID NO: 195586 - DNA, 379 bp, Glycine max
  unsure (1)..(379): unsure at all n locations
agctntttaacaaacactggccgataatatttctatactgttaagaaagttttgttgttggtgtcgcctataaaattttcaatgttggttggctaagttttttcgttcgagctcaaatgaatttgtatttcggccgacaccggcatgttttcatttgcttggcaaggaaaacattngcccacctcagaaaaaacatgattcaccgatacgtatcgcaaaagattctagccgacgtcggccaagagagatgaccgatcgagctataaaaaagaagcatcaccggatgacgccgatcgaacatttcctaatagacatcagccaaatattattcagggattgaatagaaaatacaatatctgaaatcggtagttaaaatgct

SEQ ID NO: 195587 - DNA, 371 bp, Glycine max
  unsure (1)..(371): unsure at all n locations
ntacaacagattntagtaatgacccactaacctagaattaaaataacttaatgccattaacctagggaattaaaaaaaaacttaatggctgagtgtaactgaaattgtggcaaccaaaagtcaccccaacagccaacaagtcagccaccatttggtctcccaaaaggctgatgcctatgttgccaattgggcccttattacaacttgaactaaacctaactaaagcccttttagtttattaacccaaaacatatttttggtcaaccaactttacaaggattgagccattatttagacaaactaaacactctaaaattgagacaaagtggtgccatttagtcctcctccatttgggccatgatacaactcac

SEQ ID NO: 195588 - DNA, 382 bp, Glycine max
  unsure (1)..(382): unsure at all n locations
agctngatgcatacataaatcaacaaaaagaatgttagtgaattcattcaataataatattacattatagaaattaataaataataagttaatataccaatttatcattcaattattattataatatcatattttatataaaattgagcataatatatattaaatatttcaaaaaaaatgaaatagcatgtgaactgcagtgattttttatgatttgactcaaacaaaatagtttttcgtaataataattcaaaaaaatataaatataattcttaaattaattttactatctaataaattatattatcatataaatattaatctggcattaaattttgcatatgaagttagatgcataaattaaatcaacanaaaaagagag

SEQ ID NO: 195589 - DNA, 411 bp, Glycine max
  unsure (1)..(411): unsure at all n locations
tggagtcactccaacacttcatgtacttagctcttgtaacgccctttgttacaataacaatccgtaataaaaatatactttataacgttcataaaataaaaatgtttattttaatggtccaaaatacttcaaatattataataaatgagtccttacaaaaataaacaactttattctcaaatatgaacagctacaaagtttaacgaacaatgaactgagtcttcaattctcttttgtcttaaaagcttcttcctcgaactcttaaaacaacacttttaatgagataataatctcaatgaataaaataagttctgaaaggattcacaaatagtgttgttctcagacgacgcggtaatcagaaaaatccaataatgatatccataanattaaaatttaaataatatatacata

SEQ ID NO: 195590 - DNA, 368 bp, Glycine max
tagcttgccacccagctcgtccaggcgagctatgttgcttcctccagaatgttgttctggtggaacttcttggaaggcccaaatgggcctggttgctatttgcacccccatgtttactaaatacaccccctgccttttttgctgattctttttccgtaacgttacggatctttacgaatcacgtaacgatacttgtttcctttccgtaatgtcacgaaacctttttacggattacgtaattatcccttttttggctttcggaatgttacaaaacatcacggatcgtgcaacaatgcttccttttgactttcggcatgtcacggaacttcacagattgtgcaacactgctttcttttgacttctggcat

SEQ ID NO: 195591 - DNA, 285 bp, Glycine max
tggacataaaccccgcctacagttgcctgctatgtcggccttggatccattctgttggggtggtcctgtcaatgttgcaccaaaaattaaagtttatggtggaaggacaactggttatagtgccatgggaagaagatatactaatgagttgtccatcctcttcaccctatgtggaagctgtggaagagtcattggaaacatcttttcaagcactagaaattgtgaacaatgcttatgtggaggctcctctggtgcaaccgcgtctatctggtgatggcacagaat

SEQ ID NO: 195592 - DNA, 397 bp, Glycine max
agcttatggtagtgaactctttcactgtggtctcgacatacaagcttttagaaggactacaacaatctgaacaagagggtcagcagagtgcaaacttgttttccaaattctggtgtgcaaaagttccaacgaaagtacttgttttctcttggaaattactccaagataggcttccaacagcacaagcgctctagaggaggggagttattattcaagactacaatttttcatgcaaactgtgtggccttgaggtggaaaccaacaatcatttgttcttactatgtccggtaattaacagattgtgggaaagagttatggcatgggtgggaatggatttacaaattccaaatcatatcaaccagctgttcgggatgattagagagaatctattgggtgc

SEQ ID NO: 195593 - DNA, 346 bp, Glycine max
  unsure (1)..(346): unsure at all n locations
tggatttccttttagtagggaatctatccttcctaagatggagccaaacccagtcacccttattaagaactagctcttttattcctttattgcctttagttgaatacacctttgtttggttctctatttggttcttaaccctctcatgcaacttctttacaaactctgacctagattccccttctttatgtataaaagaagtgtctagtgggaggggaatgtgtctagtgggaggggaatgaggtctaactgtgacatcctggaaatatttacctggaattttgtaagcgatatattntaaataaatatatatatgtattattcagtggatatatatatatatact

SEQ ID NO: 195594 - DNA, 377 bp, Glycine max
  unsure (1)..(377): unsure at all n locations
agctntgcatgtctagggtttctagagagagaaaggtccaagttctagagagttttgagagattttgttgtgtgaagatctgcagagaccagagcttgaaacaagagccggtttgagagcttgagatgagtttgtgagtgattgcgagatcctagaggtgaaggagacatcttcaccacttgtatatttgcaatctttcatcttgttcttctctttgttcttaagaaggctttctggtatggaaagctaaatcctttgtggatcttccctgtaggtacctgatgtaaatatatttctatctatttaatgatgttntgtgtgttctctgtgctatctgcttttcattccagtatgcctttaccttgatcacgtagatg

SEQ ID NO: 195595 - DNA, 246 bp, Glycine max
  unsure (1)..(246): unsure at all n locations
tgtagaatggctagacatgatacatgtcagggtttggtttggttcaaggataaaagggatgccccacactatttccatgacacaaatgcaaaaatgatgatttggaaacttttatgcaaaactggtcatgcatgcacctatgtggacactcaagtgtcaaacttttatggtcatgtgatgctagggctcaggattcatttcctccattntaaatcaacccaatgtttccaaaatatgttcttttat

SEQ ID NO: 195596 - DNA, 293 bp, Glycine max
taaaacaagcttcccgtcagtggtaccttaagtttcatgggataatttcttcatttggttttgatgaaaaccccatggatcaatgcatataccacaaggttagtgggagtaaaatatgctttcttggtttatatgtagatgatattttacttgcaacccacgattcgggtttgctacatgaggtgaaacaatttctcttctaaaattttgacatgaaagatatgggtgatgcatcttatgtcatcggcattaagattcatagagatagatctcgaggtattttaggtctatca

SEQ ID NO: 195597 - DNA, 345 bp, Glycine max
  unsure (1)..(345): unsure at all n locations
tgactaggcgagttgattntagccttagtttcactttagttattagtcaattaaattaagaatgagaaatcccaaagacaaaacgtccgattgattnttcgctttattttactaaaaggtattttttgattattatattattattttacctctttttttatttccaacgtggttacgacacgaccgaacggtcggaattcattttaaccgaaattaacggatgatgcaattcanacgatcggtggaaatttattntattnttagattangcgagaaatgacttatataaatggcttaagcacgtncaaagggggtataaaaagtgaatgnaaacgagaataaaaa

SEQ ID NO: 195598 - DNA, 321 bp, Glycine max
agcttatgaaccatatgcaaaaatgtgattggtaaggtatttggcaaaaagcttagcctgaagttcttgttaaatattttattgaaaaaaaaatatggtaatacaaaataattttgctattgaattctatatttccatggttttgttttaagaatgtatcgatagagaatatttattctccattaagcaaggggaaagtagaattattatgaaggattaaaatattaatagaatttttatgatttcaaatattaatagtttatttatagatgtaatttactacaaaatattatacttttcttttattcacgtaatacaatt

SEQ ID NO: 195599 - DNA, 370 bp, Glycine max
  unsure (1)..(370): unsure at all n locations
ctgcaagaaatagtggctaatatgaggacaatccaattgtatgaggggacccaacatctagaggcctacatgcgtgggttgctagtcacatgtattgcttgcttggagtgagaatagaagacaattattggctaaggcatttaataataataataataataataataataataataataataataataataataataataataaagtgcttgtagctagttttgagacttggacctcaagcttaattatgcctcacttaatcactaaggcattntagttatgtttacaatgttgagattttatgtttcttttattttctaccaagtacacaagaagtgatttgtataaatcaattgtgaagtgaatggaa

SEQ ID NO: 195600 - DNA, 357 bp, Glycine max
agcttgattgcctattcatcaaagggagaattctcctgagataatatatgagagatgcagcaacaacctcagatttcattcctttcacttcaatggctataatcagtcgtttatatagggagaggcttaacatagacacatcataaaaccaccaatcatggagttgagatggtttctcagaagaaattccattccacaatgcactgttgtctgcttgattttgcttgcaattgcttccaaccacaggccagtggaataaggttggatctgaacaagcctttatagccaaggaatcaatgcatcttgaaactatatggagatcttttgtcaagggctgcacttccttcacatgtttaa

SEQ ID NO: 195601 - DNA, 355 bp, Glycine max
  unsure (1)..(355): unsure at all n locations
tatagatcagctaatccaagagaaaaatgaaaaatcgcaaaattgttaggtgtacctaacaatgccctcacaaggcttggcgtcatgtcccatcctaaaggaatcaacaacacactagctaacctactttaaaatttatcaaaaactactaataagatataatataattagtaaataatntagtcacttaaacatgtgatcataaatagaatctctagttcgtatatttggagaaacattagtttgaaaagatcaatcttttcaataaatctcactaggtaaaaaaaattaatcaataccttttgaccaaaaaatattngattcctacccatttttttaataaaaaaattccaaa

SEQ ID NO: 195602 - DNA, 396 bp, Glycine max
  unsure (1)..(396): unsure at all n locations
ttattatagtccttctatgggacctatctcgatgggtcgattcacaaccccacaaacatttaacttggtaagcgtaagtgcttaaatgtattgatagaattgaacctatgaaattatcttggttagatggtacaatttcctaccaagaacttatcatgtaggagtaagtgcttaagtactgtcataagctatgtctcaaagacttacctcggtcaaataatccatagtacaacaagtacttatctagataggcataagtgcttaagctttcttgatcaattgtccttagtaacatgagaattactttgatgagtttgacaccctaccccaacatgcatataaatgaaaaaanaacataaatgcggaatctaattaaagtcaatttcattcaataan

SEQ ID NO: 195603 - DNA, 396 bp, Glycine max
tgttggttacagtgacaacaattgggctggagatgaagatgattggaaaagtaccagtggatttgtgtttttcataggaaacacaaccttcacttggatgtcaaaaaagtagccgatattcactcttttgactcgtgaggcagaatacgtagcagctacttcatgtgtttgtcatgcaatctagcataagaatttattaaaagagttgggcatgtcacaagaagagttgaccaagatctttgtggataataagttagtcattgctctagcaaggaatccagtgttctatgatcgaagcaagcatattgataccccttaccactacataagggagtgcatagcaagaaaggatgtacatgcagaatatgtgaagtctcaagaccaagaagctgacat

SEQ ID NO: 195604 - DNA, 390 bp, Glycine max
agcttgtaaatatttattggtataatttgcctgttccattaggctcttaatgtctttagagattacttccttgttgacatcttttgtcttgaatggaattgccatgataggtttattgttactgtctttgacatttggtagttgatattgtgttgcgggaggtaattccgattagattaactcaccatccttcattcgccaattttttatgacatttgttgttggatcacctatgatatcttgtttccaagggtaatctatatcctttctaatggtataagcatgaaaccaatcaaagaaaaggacattaattttgactctttcgacaaattcgtacaacttgtcttggatttgctatctgtttgtaccctagaaatgtcggaaaaatca

SEQ ID NO: 195605 - DNA, 323 bp, Glycine max
  unsure (1)..(323): unsure at all n locations
tcaaccctacgtcctgctcttacatctctatatatagagaatgcttcttccattatcttagcttgngccagcaattctgctctctgtattccagaaggatgagtagagaaataatccccgaaggtagaataaccagcaaattttcctaactcctcatacactttatgtgccacccggggatcataaccggctaatgcaattatgtactaagttatgtcacgcctattttgaacactcagtccatctatttatcacttgctcatttgctaaattcattcgcgtattaactcatgtagatgttaattgtgaagcatcgggataca

SEQ ID NO: 195606 - DNA, 391 bp, Glycine max
  unsure (1)..(391): unsure at all n locations
agcttntggcaaaggaagaagaagttcaagaatatgttcaaagagattcaaaggttgtaaaagaatatattaaaaagtacctgaaatgcaagtcaaggtcttgcttttatagactcttcatgtctggtcaagaaaaccattgaagagttataacctttagaaaaacctgaaaaccattggaagagttaaatgttttgatttttatttaaaacttgtcgctggtaatcgattaccaaaaccatgtaatcgattacacaaagctttttatgaaaggatatgactcttcacaattgattttgaatttcaacatttagatacattggtaatcgatttccaatatcttgtaatcgattacaccattttaaaatcaattggaatggtgcaaattcag

SEQ ID NO: 195607 - DNA, 333 bp, Glycine max
tgtaggcctaggatcttcttcatcaatggattcctttgcttcttggaaaatgaatggcaacggaatggagaaggaagagagagagagaggagacgccacttcaaggagaagatgagtctagaagaagctcaccaccataagaggccatggataagagcttgggggaagaaggagatgactgaagggagagagagagaagagcacgaaattttgtgctccaaatgagctttgaaatctgaagtttgatattcaaatgatcaaaagtgaaaaaaaatcacacacatgacctctatttatagcctaagtgtcacacaaaaatggagggaaattcca

SEQ ID NO: 195608 - DNA, 376 bp, Glycine max
  unsure (1)..(376): unsure at all n locations
agcttcatggatntccttctacaattatatcttataaggatgcaatttttctcagcagtttttggagggagatgntaaattggctagaactagtcctaagcatagcacttcttatcatccccaaacggatggtcaaaccgaagttgctaatcggtgcttaaagacctatcttaggtgctttgctggccctaagcccaagacttggtttgaatggttgcattgggctgagttctggtttaacagtaactacaatatctttgctggaatgacaccttttaaacctttatatggacgagatcctccattgttgattaagagctgcaccattccatcaaagttggatgatgtaaatcagttggcccaacaacgagatgat

SEQ ID NO: 195609 - DNA, 321 bp, Glycine max
agctcgcttagtagatgtttatcggcaaggaaaatattcactttatttatgaagttgtacaaattcataatatttaatttattgtattatgtaacactgtatattatttcatgattgtacatttttagcttgtggaattttgtttctgtgtcaagttttagatgtttcattcttttgttacgtgttgtgaatggaatgcatttaaagtattctcttttatttggtaaaatctctcaaaagactataaaaattggtcataactaagagagtatttgtgctattacaagattcaagaagggaaaaaaattatttcaaatttca

SEQ ID NO: 195610 - DNA, 286 bp, Glycine max
ctacagttggatgcctcgctaagtggatgcatctcttaaccaatctgcctcgctaagcgagtcattaacaacttttaccttctcttctttggcgtgaaattgagttggattcaacattaaggcacaaaaattgagtttctactctataaaatcacacaataaagaaaatatgtaccatctctacaaaaagaaccataaataggaggcatattgctattttcttgcaaatttccaataccaaactaactcatggatgatgcaatcctaccccccaagggtattggat

SEQ ID NO: 195611 - DNA, 365 bp, Glycine max
tccttgagaagattcctaaagaagctagagtttagctacacacacctctctaatagctaagctcaccttcttgaaatgagaagctagagcatagctacacacacctctctaatagctaagctcacctccttgagataagaagctagagcttagctacacaccccttataatagctaagctcacccccatgccaaaatacatgaaaatataaaaaaaaagtccctactataaagactactcaaaatgccctgaaatacaaggctaaaaccctatactactagaatggccaaaatacaaggcccaaaaaaaaggaaaaacctattctaattgggctcataaatctaccttgaggttcatgagaacgc

SEQ ID NO: 195612 - DNA, 341 bp, Glycine max
  unsure (1)..(341): unsure at all n locations
aacatccaagcaaaacaacgttctaacagcacaagctatcacagccaagcaaaacagagcaaaggccgaaaactctgctcaacacatcaaccaaaatcacagcttttctcacgtaaagaccacagtaacaattccttcgatccaattcgttaaccggtggatcgactccaaaattttactggaagtctatagtgtataagcctgcattttgaccgttgggatatactagcaaacatccagaactcattctgcactagacttttcacagccaaccacacacaagcattnttctgcacttgtgcaaaattctgctgcacaatttcacagcaaaaactctgcat

SEQ ID NO: 195613 - DNA, 383 bp, Glycine max
  unsure (1)..(383): unsure at all n locations
gaagaagaagaagttcagagagattcaaggcttgtaaaggattgtaagagattgattgaaaagtattcaagattgaatgaatgtaaaagtgtaaaacaaagccttgcttttatagactcctcatgtctggtcaagaataccttttagaagagttataacttttagaaaaacttaaaaccaatttgaaaaagtcaaaaaccttttaaagagttacatcttttgatttattcagaaacagtcactggtaatcgattaccaaatcagtctaattgattacacaaggctttttatgtgaaaggatgtgattcttcacattngaatntgaatttcaacgttcaaaggcactttgaatcaattaccaaaacactgtaatcgattacaac

SEQ ID NO: 195614 - DNA, 325 bp, Glycine max
agcttctatggatgttggatctttgagctttaatggggtccttcaatggtgtattttagccatggagttgtagtggaagataaaaggagaagaagtgagaataggcaccatccactagggaataagccatggaagaagaaacttcaccaccaagagagtgtcttggataagaagcttaaagaggaagcttcaatggaggaagagaatgagagagaaagagaaagagaaaaagtggcatgggaatgaatgaaaaacagggagagaagatgaactttgaagttttctctcaagattctcattcatcaaagttgccacaagtgttaca

SEQ ID NO: 195615 - DNA, 267 bp, Glycine max
  unsure (1)..(267): unsure at all n locations
tgaggagaagctctgactccatttgaccctataaataaaaacatatgggtgagtctttntggtttgccaatcaaaatacaaaaaaaaaactaaacataagttaaaacacactagactagcaaccactacgatgtggttatctatcgaatctcatatgcatttctaaggtgtcaccttttcactaattcaacatatatgtttatatatgacattggtaagctaccactggaactcccagaacttagtagtcttacgaaactttagttt

SEQ ID NO: 195616 - DNA, 349 bp, Glycine max
  unsure (1)..(349): unsure at all n locations
agcttgcctcanagatgtccaagaaggataatgcggccgaagggactagttccgctcctgagtatgacagtcaccgctttaggagcgctgtacaccagtagcgcttcgaggccatcaagggatggtcgtttcgacgggagcgacgcgtccaactcatggacgacgagtatactgatttccaggaggagatagggcaccggcggtggacatcactggttacccccatggccaagttcgatccagaaatagtccttgagttttatgccaatgcttggccaacagaggagggcgtgcgtgacatgaggtcctgggtaaggggtcagtggatcccgtttgatgccgaccctat

SEQ ID NO: 195617 - DNA, 314 bp, Glycine max
tcaacctagaggagacgaaccattccaagtgttggagaagatcaacgacaatgcctacaagattgacttgcctagtgagtataatgtaagtgccactttcaatgtgtctgatctatctctttttgatgcagatggaggagccttggatttgaggacaaatccttttcaaggagggagtgatgaggacataaccaatggcaaggaccatgaagcacttgaaggtcccatgaccagaggcagacttaaacaagcccaacacattatagagaacaggctggtcatttggatagctgtcattgatgatgattgaaggc

SEQ ID NO: 195618 - DNA, 279 bp, Glycine max
  unsure (1)..(279): unsure at all n locations
agcttgaatgtcttctgatgacgaaagtaaatactctgtaaaatttcaaaataatcataatcgaacgaccaacatcatcctgataccatcgaccttcttcgccctggttgacgaaaggtacggataaccataaagtattccccgcatgtcatcgaactcgttgtctctggatgacaaaaggtgcagaagacgacgttagtctctgcgtatcaaccggctcgtttgcctctgngtgacaaaggtgcggataaccataaggtacccccccctgccacttga

SEQ ID NO: 195619 - DNA, 120 bp, Glycine max
tgagatgaggaagtgttgaagggtgatacttcctgcttttattgttgaccacagagtggtacctggagatatgtcgcgggggtcacgagacctctgtgacgtcttgtttggtgcttttgt

SEQ ID NO: 195620 - DNA, 330 bp, Glycine max
  unsure (1)..(330): unsure at all n locations
agcttcctgcaaccattagcactccatntnttatgnttattcagtaaaccaattgagtcatcaactgcaactaaactctcacaccaatcatatgaaagtttctttcaatttgggagatcagatacattatgtatctgtgttaaaaaatcgcactggtcaaaattcaaaactcttagatgccagaactttctgcaaggaaaaaaaaaaaagaagatgacatcagaaccatatgaataaactttaagtgaatttaataattcatgggatgaggatatctgtcatgtaactcgccttggatgagcgatggaactcacatgacataatggaact

SEQ ID NO: 195621 - DNA, 290 bp, Glycine max
  unsure (1)..(290): unsure at all n locations
tgccttctgatttgagttgatcaagctttttgctnttttatgggtcaatttggattattcttcaatatatttattcttttgctgctacgttgttatgctattttttttccaatgtatttacttacgtaattgtgttcaaaacagaagtagaagtaactatttcattatttttatgatatttgtttgctgagtagagctaaatatttcattctttctgagagtttttttctctcttctggtatagatattcttgtactcaccttagttgatgcagtgaatgatctataatt

SEQ ID NO: 195622 - DNA, 422 bp, Glycine max
  unsure (1)..(422): unsure at all n locations
agcttgtaagttacaaaatagagaaattctatagaaataaaatgcatccttttgtatttaatcattttattagattatgtaactactaccaactaactttaattaaaataagttttattctctttatatatattcctcatcctatatcaccacttattttcttagtatttaatggttctaaagaataattgttcttgacaaatattatggaaaacaataagtgcttcaattctttcacaaattaggaaatgaaagttaggaatttttttaggtttcaacagcaacaccaaaggtaggaaccacgatataagggcagttccatttgattntgatctcagattttgtttacaaaaaccaacttgaaaatctaaacataaaatattaaagaacttgcagacatatcccagctagctgggaataca

SEQ ID NO: 195623 - DNA, 347 bp, Glycine max
  unsure (1)..(347): unsure at all n locations
tggaggacaaaacanagtagtgtacaagtacttggtgctatggcataccgtgctcctcagcatttgtctcggtgtctccctaagattgttccaaaattggctgaggtataatatgaagcaaacattatttttcacttctaaattccttttaagctatagattgcattaccttaacccatctcagtatttgaagggtttgactgataaagagtccagaaatatctggtcttgtccctactctacttaagtaaattggtgttttcagtatctagagggaggaataanagtaattctttngaaattatggcatanaaaatcatcattcaattccactctacttttatatg

SEQ ID NO: 195624 - DNA, 280 bp, Glycine max
  unsure (1)..(280): unsure at all n locations
agctntgtcggattggtcttcgccagtgaaaggatcgatgtgggtctgaaaagtggcaaatttagtcatcctgcttggacgaatgagaaaattgtggcaaatgaagagggtgaggatgaagtataagcccatgctgtgactgccattcctatatggccaagtatcccaccaacccaacaatgtcattactcagccaataacaaaccttctccttacccaccgcccagttatccacaaaggcaatccctaaataaccacaaaatgtattgtctaaagatgg

SEQ ID NO: 195625 - DNA, 306 bp, Glycine max
  unsure (1)..(306): unsure at all n locations
tatatactctaatgtacagattataaagcaagttccacttgatatatgcatganaaacaaagataatagaaattaaaactaggttgcctcccaggaagcacttctttaacatcattagcttgacgcatttacctcaatgggtgatatcatgttttggttcttacctccagaacctcttgacccacttccattacctgtaagcaaacattttgttctagagcaggcttgtcttcaacaaacaaatcaaaatcaattttctgatcttcgaaacccatttccagcttctttctacccatatcaactatg

SEQ ID NO: 195626 - DNA, 287 bp, Glycine max
ttgagaaaactcaactttcataactttggactcaaatgtctgattacggaccataatatatcaagacgctaaaaattgaacacggaagctcgggcccaattcaaactggcataacttttgacttagatgtctgattgtggaccatattccaactgccatgattggtgattctgatgtttgactacggcccataatatatcaagactcttgaaattgattacaaaagctcctcacaaattaaactaccataacttttgattggatgtctgattgtggccgataatata

SEQ ID NO: 195627 - DNA, 375 bp, Glycine max
  unsure (1)..(375): unsure at all n locations
tgtaggcattagaagagaatgcacatatgattagaagtatgactgaaaatgttagttagttgtaagattgattgtgaaggaatgcattaactgtatcccggtgagagtgtgatccttanattatgagagaaacgactatcatttagtactgatttttgcgtgaatctttgaagtatgaaggccatgtttgattgtgatagccacttagccaaaaagctgaccatgtgcttgaatgaattatccctcatacctangatgagttgaatgaattattgattgattgaacccagagcctatacaattatctcatgctaccttgacttanggtgtangagagcatcatccacaggaagcgcagttcanagcaaatttgtc

SEQ ID NO: 195628 - DNA, 384 bp, Glycine max
  unsure (1)..(384): unsure at all n locations
agctattcttcgtgggttgatgggttctgtctcgtaaaatggcatgatcactggatgacatgttctcaattagctcagttgcttcttccggggtcttcagttttatctttccccctgcagaagcatctagcagttgcttggtttgtggtctcagcccatctataaacatattcaattgaattagctcggaaaacccatgggtgggagtttttctcaataaacctttgaacctctccaatgcttcacctagagattcatcagggaactgatgaaatgaagagattgcagctttcccttccacagccttggactttgggaagtatttctttaggaacatttcaacaacttcatcctangttntcagattgttacccttaaatgagt

SEQ ID NO: 195629 - DNA, 305 bp, Glycine max
  unsure (1)..(305): unsure at all n locations
ntgaagggccgaaagagactagtcgagagtcaaaggtatgatattagaggacgggttgaaggcttgtcaaaggtcaaagaagagcttgtctgaacaattaagtaggacggaagagaagatgtgggatatcattgacctgtataaagagaagcaaaatctagctgcaacccatgagcaaagactagaggacgagcatgcaaaagtatcggtcctgcaagcggaaagggaagcaagggagagagtgatagattcattatacagagaagctatgatgtggatggataggttcgcgttcactttgaatg

SEQ ID NO: 195630 - DNA, 411 bp, Glycine max
tttttattcttacactgtggtctttacaaacatggctttataaagactacaacaatcttaacaagagggttatcataatgctaacttgtttttctcaattaggggtgcaaaagtctccacgaaagtacttgggttctctttaataatacctccagataggcgtttaaaaatccaagcgtttctttatgaagggaataattattcgatactaacatcttttctttcaactgggtggtcctttggttgcaaccatacaaacattgtttgttcaatgttcggaacaaaaaattgttgaataaataagcgttgggagggatcggtttacatttcacactcttataaccgctgtttcgtatattggtacaaacttttgtggtgttaaggaaaatgtaaacaacaatcttggctgcg

SEQ ID NO: 195631 - DNA, 364 bp, Glycine max
  unsure (1)..(364): unsure at all n locations
tgtgggattntgtgatagtgattnttccgaagatgttgatgatagaaaaagtactaccagatttgtattttttatgggtgattgtgtttttacatggagttctaagaagcaaggcattgtgacactttctacttaataggaccttcataactcttcagatgagaagaagagaaactatatgtgatggctggtatattggagatcatagtcttcttatagggtgttaacctaataggattctcattactctctaataggccaacactgacatctgctcgtttaagtccatatcatttgattttgtttttgattgtctaacggaggatcatttatttgatcaataagataaactcataatgataat

SEQ ID NO: 195632 - DNA, 451 bp, Glycine max
ctgcaagcttggatattgtaatgttttcttactaattgtggttatttgattttggtattaatttcttttataataaactcactcctcgcaattttgtaccgtgtggttactgtgaagattgccaacctttgttcgtgggagtagaatgacaatagtagagtacaagaagtgagattcttttgtgaaaccgctgaaccgacgtgatgacgttggattattttggaagagagttgtgttttgttaatcaattcctccatagttggttccatgattctttttattgacttaaagatgtaaatcacaaatttaattatatgtatgaacaaatttactttctattatgtgaatgatatgtactgagttactatacctatatatatatatatatatatatatatatatatatatatatattcacttaagtaatgatgcgttgtttgtgaatgtatat

SEQ ID NO: 195633 - DNA, 239 bp, Glycine max
  unsure (1)..(239): unsure at all n locations
ntcccttcatttcnaaatttannaaattgtctcttttgttttcttccatttcatcagaacaacaagctagtgagggaaccctgttccaacaataaaccatgtatttcatgtcagcataaaaaaagaatccaaatccacaaacttctgcataacttgtcatgactcaaagcagcaataaggcagcttaatgagacaatattcaaccattatattatatcaattggaacgcggaggggggg

SEQ ID NO: 195634 - DNA, 512 bp, Glycine max
  unsure (1)..(512): unsure at all n locations
cgcgatgtntagtttgaaatcgtctcgtaccttggatccttagagtcacctgcngctgcagcttgtctagcgtttatgcgagacagagaccaacatgttaactatcatcgcccaatacgaagaagaattatgtctagccacggcccaccaacataaaatcgcggatgaatatgctcaagtatatgccgaaaaaaaggctagaagaagggtgatccactctttacaccaagaggcaaccatgtggatggatcggtttgctcttaccttgaatgggagtcaagaacttccccgattgttaacaaaggccaaagcgatggcagacacctactccacccccgaagagattcatgggcttctcggctattgtcagcatatgatagacttaatggcccacataattagaaatcgttaggaaacttgtatggtctctcagaccttgactggatacgacttttttttttttttttttttttttttttttgaaaaaaatgagatggcccattgttctaccn

SEQ ID NO: 195635 - DNA, 464 bp, Glycine max
  unsure (1)..(464): unsure at all n locations
nggcttagcacatgaagagatggcgcttagcgcaaggtttgcgctntgcggataagcaatttgaaaattttctaagtcattttctacttatctcttcacacataattttaacaaccctttntgttcattactaaacaagctgaaatcaatcacaatcacaagcaagatgacctaactacatgcaagaaataaaaatgaagatagagaagggaaagaaaagctgggttgcctcccagtaagcgcttctttaacgtcattagcttgatgcatcatcctattatctaggatccaataatgttcccacttcaaggaccttcttcttaggttntctttcctccttcacatgaactntanaatagacattccggtcaggtggctctntatcttcatgaaataaatcanagctgattttctaatcttctatgcccatntgcaacatcttctttcccatatctactacacag

SEQ ID NO: 195636 - DNA, 323 bp, Glycine max
  unsure (1)..(323): unsure at all n locations
agcttgccgcccagctcgcccaggcgagcaaggttgcttcctccagaaggaacggcccaagtgggcctggttgctatttacacccccatttttactaaatgcaccccctttctatttttttgtaattctttttccgtaacgttacgaaactttacgaattccgtaacgatacttattttccttctgcaaggttatgaatccttacggattatgtatttactctnttttagctntcgaagaagttacggaaacccccggattgcgcaaaaacacctcttttcgacttccgccacattacggaatttcacggatcgcgcaagcct

SEQ ID NO: 195637 - DNA, 424 bp, Glycine max
  unsure (1)..(424): unsure at all n locations
aaagttaactanatgccttgtgttacctggttacccaactggccatgaattaaaaatatgcacctgtcgtcagactctgtagtttatgctcctctaccgaccaccacacagacctttgtccttttgtgcaacaatctgaagcaattgaacagcctaaagcttatgctgcaaacatctacaatagacctcctcaacctcagcagcaaaatcagccaccacagaacaactatgaccttctccgcacacgtacaatccaggggaggaggaatattccaccgtagaagtcgaagccttcctacaaccgccataaaaccacaaccttattttataatgtactgggccagcagacataagatcttcgctatctttnactcacagcggaatcgccctataacgaaatcttgacgctccgcccacctcactg

SEQ ID NO: 195638 - DNA, 352 bp, Glycine max
agcttatggtagttaactctttcactgtggcctcgacatacaagcttttagaaggactacaacaatctgaacaagagggtcagcagagtgcaaacttgttttccaaattctggtgtgcaaaagttccaacgaaagtacttgttttctcttggaaattactccaagataggcttccaacagcacaagcgctctagaggaggggagttattattcaagactacaatttttcatgcaaactgtgtggccttgaggtggaaaccaacaatcatttgttcttactatgtccggtaattaacagattgtgggaaagagttatggcatgggtgggaatggattacaaatcccaatcata

SEQ ID NO: 195639 - DNA, 272 bp, Glycine max
tggatttccttttagtagggaatctatccttcctaagatggagccaaacccagtcacccttattaagaactagctcttttattcctttattgcctttagttgaatacacctttgtttggttctctatttggttcttaaccctctcatgcaacttctttacaaactctgacctagattccccttctttatgtataaaagaagtgtctagtgggaggggaatgtgtctagtgggaggggaatgatggctaactgcgacatcctggacatttcta

SEQ ID NO: 195640 - DNA, 409 bp, Glycine max
  unsure (1)..(409): unsure at all n locations
agctntggcacttgtcttcacactaattttgaattgaaatttccaattatagaaataaatttgagccaaaacaacaagcacctttccctttcaccttttttttctggatactgattttcctgccaacatgtgcgatttttcgtattttttccttttatccaaatcacttgtttctttttttataacttttttccagatgtctagaaaattcagtaaaaatttcagctcanaattcgaggtaaccaattctcagtaattnttacaagtttgtatgtccaagctgccagcaccagcgatttgtttctttaaacatggtatatngattgccttgggcttactttcaaccttcctatgtatgttgaactcactagtattgtttaccacagntttagggtgttcaatattcact

SEQ ID NO: 195641 - DNA, 258 bp, Glycine max
  unsure (1)..(258): unsure at all n locations
tgccacccagctcgcccaggcgagcaaggttgcttcctccagaagcaacagccttctggaggaaggatctggaaggcccaagtgggccagattgttatttgcacccctcctttntactaaatgcaccccccttctatttttttggtaattctttttccgtaacgttacgaaactttacgaatntcgtaatgatacttattntccttccgcaaggttacgaatccttancggatatgtatttactcttttttagctttt

SEQ ID NO: 195642 - DNA, 263 bp, Glycine max
  unsure (1)..(263): unsure at all n locations
tggggccaaacacaccaaatgattataatgatggatggctcaaattctcacaaaggtaaaatcattactttcaaaactatcatgacatgtagagaaaaatcaaggattttcagtcacaaaatgtcaagaacttttatttttcaaacaattacccatttatttcttgaacatattctataattcaaagaanaacatgcaaagtcgtgcgtgcacacgaaattgacccaaaatattaaacttaanatccgacgaaactaacaaca

SEQ ID NO: 195643 - DNA, 356 bp, Glycine max
  unsure (1)..(356): unsure at all n locations
tgtgtcacactttcaattgtcgaagctgaatacatagctgcaagaagttgttgtgctcaaagtctttggatgaagcaacaatgatgtaagctccattggagcttgtaggcctaggatcttcttcatcaatggattcctttgcttcttggaagatgaatggcagcggaatggagaaaggaagagagagaggagacgccacttcaaggagaagatgagtctagaagaagctcaccaccataggaggccatggataagagctnggaggaagaaagagatgaatgaagggagagggagagaagaagcacgaaatttgtgctctaaatgagctttgagatccgaagtntaatattcaaatg

SEQ ID NO: 195644 - DNA, 214 bp, Glycine max
atatccctcaatttatctcattttacatggtatcaccagagaaaatatgaggctaagctgaataaatggaaccacagaaacatttcgatggctgggaggatcactctaatcaatgctgtcctaacagcattgcctttggtctatttggtattcttcagggcccctataacagtgattaatagattaattgccatccaaaggcactttctttggg

SEQ ID NO: 195645 - DNA, 329 bp, Glycine max
  unsure (1)..(329): unsure at all n locations
taccctagatgacactcattgtacaaccaagttcataacttagtcacttttaaagtcctgctgactgagtacaaagtgacttgcaaccgtttggtgagttattaagcactcacttgtatgtcaaattntaaaatcatatacatatctaatatgaatttcatgttaattacaggatgtgccgagtacctgtactcatttatgaaagctgtaagattcacccatatgaacttgaaagagactacgaagtataggataatttataatcattgtaggaagattgcaaacattggaaatggatggaggaatttcataatcacaaaattttctta

SEQ ID NO: 195646 - DNA, 414 bp, Glycine max
  unsure (1)..(414): unsure at all n locations
agcttgttgtcattaaatcttacatgaatggccttttctacagtcaaggttctggagttatgcactctgtatgccttggacaattcaaagtattcaagtaagattctagaatcacactaggagtcaaactttccaagtttatccttggtgtttaagatgaaacgctgacatccaaatgagtggaagtaagagatattgggcttacgtctcttccataattcatagggacttctttaagataggccttatgtaaattttgttctataaataccaggaaacatttacagcttcaacccataaatctttgggagttgagtgatcgttaagcattgttcatgccatttcctgaagagatattnttttcctctcaacaacttcattctgttgtgctgttcttggagtgggaaaaatatg

SEQ ID NO: 195647 - DNA, 311 bp, Glycine max
tgttgtgtcgtccccgtttctgcctaaacccatttctggctcatatccatcccttaacataacccgagccaccatcaaagcgacaccagataagcgtggctgcaccagaagagattccacatatgcaatgctcacaatttccaatgcttggaaggatgtttccaatgactcatctacagcctcaacataaggcgtagaagacagacaacttactagtatgtcttcctctcccgatactatgatcagctgcctttccactacaaactttaatttctggtgcagtgttgacgggaccaccccaaccgaatgga

SEQ ID NO: 195648 - DNA, 337 bp, Glycine max
  unsure (1)..(337): unsure at all n locations
agctnttacaatatccaaacaattcaattttctttgtcatgaaaccaccctaaaccaagaaaaatagagtggaggccgaaaactctacacaaaactcatttcaattccacagtttttcctactcacatacctcaataacagtctctttgtttcgaatcgtcaaccattggatcgccttgaaaatttaactgagagttcctaatatagaaatttagttttgaccgttgggatctgctagaaaatatatagaacaccagatgtactacctttcccgtgactagtgttgcacaaccatttttctgcataattggaaaatctgttgacaacttgaagcttt

SEQ ID NO: 195649 - DNA, 347 bp, Glycine max
  unsure (1)..(347): unsure at all n locations
ntccaagagttttctggttttctaaaccttgaaaacttgtgctattcattcttttcaactcttctccctttgccaaaaagaattcgccaaggactaaccgcctgaattctttttgtgtctctcttctcccttttccaaaagaacaaaggactaaccgcctgaattcttttgtgtctcccttctcccttgtcaaagaattcaaaatgacacagtctgagaattcttttgattcttccctttcccttatacaaaagatttcanaggactaattgccagagaattcttttgtatccccattcacaaagtttcaaaggtttaaccacttgagatctttgtcttaacacatt

SEQ ID NO: 195650 - DNA, 401 bp, Glycine max
  unsure (1)..(401): unsure at all n locations
gaagtgaaataattgattatgaaatgccgaacaaagaaagaattgaatgagttaattgattacccaatttgcttatcgattaaaattggtaaaactattaatacctttgcttattctcactacaagaaaaaatgattttaacgagggttattttttgccttaaggaggggttaaaccccccgaaagtatggtacctattggtggtgttctcattggcaaaacatccacgataaatggtttaccaatggtttttgtgaaccctttaaaacacaagaaatacttgatgtgttgaaacccctggtaaataccaagggttattaacccctattaacaccacaatcattgctggcgatttaaaacccttgttcttatangggtttaaattgccgtatacatttatt

SEQ ID NO: 195651 - DNA, 357 bp, Glycine max
  unsure (1)..(357): unsure at all n locations
tcaataataacatagaattcccaagtatatgtagatagtttctgcattctaccagacaatttttttttagaaataagcaataggatgcttgttttggcttaacacaacaccaactcccctccctgaagcatcagtttctaatacaaaaagtttattgaaattaggaatagccaagacaggtgcagaagtcatggctatcttaagtttttggaaagcctgggcagtagcttgaccccatttgaaagagtccttcttcaatagaacagtcagaggtgttgcaatggtagcataggtcttaacaaatcttctataataacctgtaagtcctaggaagccccttaatntctttagattcat

SEQ ID NO: 195652 - DNA, 403 bp, Glycine max
  unsure (1)..(403): unsure at all n locations
gatcctcttagtcacctgcggcatgcagcttgctgaatacattctncccctctgtctattctaatctntnttatatcatcaaaacctgcatgatttacattctccccctctgtgatgatgacaagcattatccaaggcttgatctntttgacatcatcaaaatcttcatgatttacattctccccctttgtgatgatgataaccacctataagtgatgagcaacaacaaagaaaaaatatctatttgcatatagtttacatcccctttggttttggaatgcttgcttatatgagaccattgaagatttcatattcttcatatataaaaagtgtctcataaagatagacatctttccttctaatttatcttgatattactctcccccttggcccatcaaaacaa

SEQ ID NO: 195653 - DNA, 220 bp, Glycine max
  unsure (1)..(220): unsure at all n locations
tgagatgaggaagtgttgaagggtgaaacttcctgcttttattgtttaccacagagtggnacctggagatatgtcgcgggggtcacgagacccttcggacgtcaagtggggtgctattgcccaaaaccaaacttgaccaatcccgacccaacccgggcatagtctggcagtgagaacctgtgatgtacctaaacacgcgagcttctggcagtcaacagat

SEQ ID NO: 195654 - DNA, 433 bp, Glycine max
ggttaatatactataagtgtcatgaatctctgacataagcttcaaccaattaacattgttcgaatgacaactgtagtagttgcaccgcactcacatacgctggccaccatcggttgctgtacgatcctatcggctatagtaacggcatgctctatgcttcttctgttatagctacggtggcagaaagtctaacttttgaatccacaaaaggaggatctccatatggtgctggagtcttgctcgagatggcagaaaacaagcacaggaaatggaactggagcctgcacagtatcatgcaacgattataaaactagcccataaatcattaaccctctaatcaacatcttattgactaaacaaaccttgtgacctcaaatacactcaagacggttgcttaaacactctaattaaaagcggcagtgaatcatggttt

SEQ ID NO: 195655 - DNA, 423 bp, Glycine max
  unsure (1)..(423): unsure at all n locations
agctntacgatagtttactgaatcattattttatggaactagttaacgtattggtttaatcatgtttcaataggtattacttaagtactattattctaattttaatataatacgcaatatctagtgaaatatatgcatgtctgaacctatttctggtccaactaaagcttaattaatacttcggtaataaaatgtttaatactattatgacttatctttataaaaaagactgacaataatattattttaaaaaactaattatttggtactgcgtcacccaatattgattaaacttattaaacacaactcacgcactttattatatcgtatgatatgagatgtgctacaagacaaaaatatcaaacaatttcctctgatgcttacatatgtaatgattcttcacatgctgtctatgctattgat

SEQ ID NO: 195656 - DNA, 608 bp, Glycine max
  unsure (1)..(608): unsure at all n locations
ggtgagttttacnaaagacngactatcctanaactatcatattaanncccncaccnnnccagggcaggagtggtttgatgcatcctagaacnaccgaacananaatacttagctttgagggtgcgtacccacatccttatatagtacattacctttaatgtgtctaccaacacgaggatagtggtcctttttgcacatggtcatgtaattgcctacctatcacgaaaccatatcaggaatagtactcgatactgcgctaaccgaaagcaaccattaatgtgcttccaaagtatgagactcatgaagagtttcaaagttaagtgtaccaatgtaaccagctactcccagtatagactttccttggaaagaaatgtatnagccaactcctcatcttatgcgtatgcccttatattccgaaantacatttttggatggttattggggcaaagattccccttgacttcgtcaaatccagcaacttgaacttgggatgggtgataatatagtgtactangaacaacatcttctatggtaacacatgcatactctttaccatcttcaaaggccctgaagctgtcctctatcacattattgacataacatgaccg

SEQ ID NO: 195657 - DNA, 307 bp, Glycine max
  unsure (1)..(307): unsure at all n locations
agcttctatgagaagtttctcaagacagctttcttaggaagctacctaatctataggtagaagcatgtgtaacacttgttgtaactctgatgaatgagagtcttgtgagacatattgcaaagttccactgctctacctcttttattccttcaatntcgtgctcccccctctctccttctctccctctttcttttcctccattgaagcatcctctccaagcttcttatcccaggcccactcttgtagagaatcttcatcttccatggcttattccctaggggatggcgcctcctctcacctcttctcc

SEQ ID NO: 195658 - DNA, 405 bp, Glycine max
  unsure (1)..(405): unsure at all n locations
agcttataaatataacaaactaatttatcttttataaanaatacttcaagataaatctgtatttcaacctaacaaaataacttacaaaaaatgtgtgatactacagaaattttgaaaaccacctaacaaaataacttaaaaaaatatgtgatcttccaaaaccacctaacaaaataacttacaaaaataaatgatatcccagaaattatctaacccacgaaagctacaacgaaagcaagtgcagcagccaaaacagctgaaaaatatggtgaaggagggctgtatttaaagatcctaaaacgccaacctcatttgcgccattttctactctaaaacgctaacatgatttgacctccagacccctaagacgccaacattgaaagctgctcctgctttccaaagcta

SEQ ID NO: 195659 - DNA, 419 bp, Glycine max
  unsure (1)..(419): unsure at all n locations
atggacactgaggtatctaaatggatctttgaaagctggattaaggtacaagaagacagcacatgaggcagcaatcacaggctatgtagatgcagattttgcaggaaatgtagacataagaaagtccttaactggatatgtgtttactttgtttggaaaaacaatcagttggaaagcaaataaacaattagttattgctctttcaacaactaaagtagagtacatggccctaattgaaggagtgaatgaagcaatctggctaanaggaatggtaaatgaacttggaatagcacaaccttgtgtacaattcactatgacagttagagtgctattcatttagcanatcaccaaatttaccatgagaggacaaagcacatagatgtngaaatacacttcatcagagatctgattgaatctga

SEQ ID NO: 195660 - DNA, 347 bp, Glycine max
  unsure (1)..(347): unsure at all n locations
agcttgcatgtgcatgctgagcggacatgcatagtacaattggcttaagtgaccacacgctaagcctgcaaatgcgcgcttaacgcacatccacgataaatctgacttccagcttggcttcttgcactaagcatgcactggcgcgctgagtgtgctgctccaattcttcatacatcttccattcttctgttgatgcatctaaaaattctacanaataaaacanaacattgtanangtaccaactntagcattcttaagataagaactcaaagaaaatctaaattcctatcttttttagtcaaaagaagtatcaaaagagaagaaattagataatttctatttgtatt

SEQ ID NO: 195661 - DNA, 397 bp, Glycine max
  unsure (1)..(397): unsure at all n locations
tncatctcttccttccaccagtttccagatgaatcgttgagtgaggcacttgaaagattcagaggtttattgcagacgactcccattcacggtttttcagaaccaatacaactcaacatattcatagatgggttgagaccacaatctaagctgctcttggacgcttcggctgggggtaagatcaaaatgaagacccccgtcgaagcaatggacttaattgaaagcatggtacattntgagagatcgagcccgcattcctaccaagaagagtttattggagctaacctcacaggacactctgttggcacaaaacaagttgatgtccaagcaactagagacactaagagaaacactangtaagttgccaactcagcttcattatgcacaaacttcacat

SEQ ID NO: 195662 - DNA, 389 bp, Glycine max
  unsure (1)..(389): unsure at all n locations
agcttaatanatctatatatgatttanagcaagtctcccatcagtggtaccttaagtttcatgggctaaattcctcatttggttntgatgaaaaccccatggatcaatgcatataccacaaggtaagtgggagtaaaatatattctcttattttatatgtagatgatattttacttacagccaatgatcaagttttgctacataaggtgaaacaatttctctccaagaattttgacgtgaaggatatgggtgatgcatcttatgttatcggcattaagattcatagagattgtagaagcangcttcatgatgatgaatcaagtagttttgatgatgacaaaaagcccacaagaatgatgtcaagattgagtcaacaagttcaagatcaa

SEQ ID NO: 195663 - DNA, 403 bp, Glycine max
  unsure (1)..(403): unsure at all n locations
ggatcttaagcacctgggctgcagctataaaacaaaatgcctnatcattttcaatatgcatgtgaattangaagcatgaacaagaattaagccaaggctattgtgcaagcaatcaatggggcaaaacacaccaaaagattatgatgatggatggctcacattctcacaaaggtaagcttatcactttcaaattgagctttcaaaactatcatgacatgtagaggaaaaacaaggatttcaaatcacacaatgtcaagagacttttattttcagaacaattaccanagcttgatttgtgagttgatnttagccttggtttcacttttgattattagtcaataattcaaggaaactttcanagaaaacgnctgattggattttcttgataaatttatattttttc

SEQ ID NO: 195664 - DNA, 372 bp, Glycine max
  unsure (1)..(372): unsure at all n locations
acattcagaaactgctggtgatcaattaccatatatgtgtaatcgattacacagtgcaaattttgaattcaaattttaatagctgttgtaaatcagttttggccactggtaatcgattacatcctctggtaatcgaataccagagagtaaatttgttgaaaaaaactttttaacttaaatttcttggccaaaccttttgctacttcaattggaattcccttcctatttaatataccctttctaagactctagagactgtcttgatcatccatcttgaatatatntaatttctttgtcttgaataaagctttgagacgcatgtgaagctttggcatcatcaaaacattcagcttgatcatttgtctacaatct

SEQ ID NO: 195665 - DNA, 321 bp, Glycine max
  unsure (1)..(321): unsure at all n locations
gcttatgctgcaatattacaatagacctcctctacctcagcagcaaaatcaaccactgtagaacaattatgatctctccagcaacagatacaaccctggatggaagaatcaccctaatctcagatggtctagccctcaaaagcaacaacaacagcctgctccttccttccaaaatgttgttggcccaagcagaccatacattcctccaccaatccaacaacagcaacagcccctgaaacagccaacagttgaggctcctccgcaaccttccctcgaagaacttgtgaggcanatgaccatgcagaacatgcagtttcaaca

SEQ ID NO: 195666 - DNA, 426 bp, Glycine max
cactttaaagtttgtgtggtagaccatgctaatctaagaattaatctcaatatatgtgttgcataatgcttctcctacaacaaccctcttattaaactgagattccaacatcaaaatacaaaatgaaggattagttacttataacctggtaaactagctcaaatccctgccagctagggaaagtgcatgtatttagtattcttagtgcttcgaacataattgattgcaaaagaagatacctgcaagaaaggaaaaaaaataataacataaaggatcaatctctagccattaaaatgatagtgtgaatttaaaagaagcaattgagtgccatgaaaactaatacccacttcctcaaatgaagaacatgatatgatgatagaaaagtagtttcctcaaaagggtcttcgaacaatatgataacacaac

SEQ ID NO: 195667 - DNA, 395 bp, Glycine max
  unsure (1)..(395): unsure at all n locations
ttgtcagaatatgattattaaacacacaaaatggaagtactaagtatttattacctatacttaacataaagtacttataacactacaaactaaccataaattgtggaagtttgatacaatttacacaggttttacacacaaaagttagtcgtattcctgttgtatggctccgcctcctccaacgaagtgtggaaattcatcatccctcagctgcccttgtctctgtgtgaggaatgaccatcttttgatggcctcgaaacgctattgatgttccacactctgaaatcggtgtttgtcaaagcctgtttcgacttgtggggccacatnggaatcctcttcaatggtgcctgtgacatccctaaataatgactggtgtaatagtaataaattaaata

SEQ ID NO: 195668 - DNA, 388 bp, Glycine max
  unsure (1)..(388): unsure at all n locations
cttcttctactgagacagtgggttatatgaagctgaatattagatctaaaagttattatggaattgntaatgcttgtgattttgacttatagttactgcatatatgtggttatgttattataaaatggttgatattgaagttcatactcaatcacaagtgatacaagctgatagtgaaggtgatgctgatcctacttattcaccttcatatntaagtggggatgacgatatatacttggatgatgagactatagcatcgtttatgtctaanaaaaagcaaaggcaagtgtgcaacctccaagtgatgaagataatgagcagtcagacaaagattcgtggcactcagaggagttgaagagcccaattagtacagatgatgaggatgatg

SEQ ID NO: 195669 - DNA, 445 bp, Glycine max
  unsure (1)..(445): unsure at all n locations
ctgcagcttattctttntactcttgtgccaagtctttgatgccacatggttgaattattgacagcctccgtaattgctaccatatcctcatctacaatcatgtaaagagatcctcacttttttccacgagccccaacgagattgccttttgttaccttccaagctccatctccaaaagtggtgtgatgcccctcatcatcctaccatcctatagatattaaatttttttttaaggcaggaatatgtctaacattgtgcaatgtccatagggatccactagaggtcttgatgttgatatcactntttccaacaatgtcaagagattntccatctgcaagggaaactttcccaaatcttccagaaatatagttagacaataaatctatagagggagtagtgtggaatgaggcacctaagtccattaatcatgaatcaacgggactat

SEQ ID NO: 195670 - DNA, 358 bp, Glycine max
  unsure (1)..(358): unsure at all n locations
ggacagtggaagagctactttgctaaaatctcttataaagcgcctgtataatcctgcatgagtaagataagatcgcacctctcacacgcaagaggggtaatgcaattgtgaaataacaaaaaattttgcaggatctacttcaatgcccttattggaaataatgtggcctaaaactataccttgctcaaccataaaatgacatttttcataatctagaacaaggttagtttcagtgcatctattcaaaaccttttccagactatccagacaaatatcagaagagtatccatatacagtgaaatcatccataaacacctctatgcaattttctcaaaaatcactatnaatactaatcatg

SEQ ID NO: 195671 - DNA, 305 bp, Glycine max
  unsure (1)..(305): unsure at all n locations
agcttgtaccacatttcattacatagagaagacaaatagcaaactacacgttagccacccatgaaaatggagaagcaacataactttcagttaaataccactatttgctagcttggctcacttcctagaatacattgacaaatactttaattataagttgatttattttatatagtaagttagcaaaaatgcttgaaatggtgtaaggttgattaanaggagacaatgtgtcaataaaatttctaaatctagcttatcttccactaaattttggtgtttgccttgttacaatagaaagtcgtaca

SEQ ID NO: 195672 - DNA, 305 bp, Glycine max
  unsure (1)..(305): unsure at all n locations
tatcaacacttgtatatataacaattactggatntggtttatgttgatgaacgtatatggtagcatatacttcagatcatctttcttcaagcgagtttgaaccccaaccgtangaaaggcagtaatgcacatgttgtgagtctagaccactcacaagtattttagtcatgtgatgagcaatttatgtagtaacataataacatgcgagtcttcaactaataagttttcaagctatgactatgaatntgctctcttcctttntgtttaatgctttctaattgaggaagtgagtcataaagtgtttt

SEQ ID NO: 195673 - DNA, 223 bp, Glycine max
  unsure (1)..(223): unsure at all n locations
catttaccgctaagtttctatattgcttcactcaagatctaaggcaacattacattctcnagtgctatgacacctaatcatgcacacaaatggttgatcagaccacacgcatatggaatttagcactgaacgagcattgagcacatcaacacaactgttagatttatagtattacttcagcgttgttagaatcccaacaggggataagcatcctacaganaac

SEQ ID NO: 195674 - DNA, 383 bp, Glycine max
  unsure (1)..(383): unsure at all n locations
agcttccttntaatgcatcacaccacgtgtgccanattactttccaagtgatggacataaatcctgcctacagctgcttattaggttggccttgaattcattcggttggggtgctcccttcaatgctacaccaaaagttgaaatttatggtggaagggcaattgattattgtctctggggaagaagacattcttgtgagttgtccttcttctacgccctatgtggaggccacgaaggagtccttggaaatgtcctttcaagcattagaagtggtgagcaatgcttacatggagtctctctcggtacaaccatgctcatctggtgccatattgatggtagctcgggtgatgttgggtcatggatatgagcctgaaatgggtttc

SEQ ID NO: 195675 - DNA, 463 bp, Glycine max
  unsure (1)..(463): unsure at all n locations
tctggatcttgaatttggtttgccactgggttggatggaaaagtgtcaaacaaacaattttttatttcaggaaaaaattagaggtagggcaggaagttttacttttttattatgtgtggntgaatgaaataaaaaatctttgatttggtttgtgctgaatttgatgagtttggttttctattttttaaaacattttcttgcatttcttagttgtcaaaaatcatttaacacattttaaacaagtcaaacaattatattttaaaaaatcttaacggtcaaaaaattaatcgcaacaaaatgcaataaaagtttaaggattaagattaattaaatntttggttaagaattaaaaatcaaaatataaaaaagttaatggattanaaacgtagttaatcttattntatataatanatacanagaatattttaactattttattgtaataaataatgcatgaaatata

SEQ ID NO: 195676 - DNA, 374 bp, Glycine max
  unsure (1)..(374): unsure at all n locations
agcttgatgtcattcanaagacactatgtcgacctanatgacgactaaacatgcattntttatgtaattgtattcattatgcgatataatttgttgtaaccaattactaaccaattaatattattaagtactcgtttggttaagcaaaaaaattgttggtccaacaaaaatcatttacgcgtgtagcatacatcattgtcataattgacaacacataatgacatgcatgcgtattaaagtttgagttgaggaccaacaaagaactgctgaaggtgttagtacaatctaactactggaaaaaatatggaccaatagaaattntagctgtctttactaaatatgttgtgaaaatcgaaaacgatgtcattgggaca

SEQ ID NO: 195677 - DNA, 390 bp, Glycine max
  unsure (1)..(390): unsure at all n locations
gtgcatgtttggtttggattaatttttgggaaataatcccacaacccacattggatcaggcagcccactttgccggctctttataggcaactaaaactaatttatccaggattagatgtcacaacacttgatatatggtcaaatagttaaacagtttagatacaatctattgagaattgagaaatgctgatttgtgaatgcaacaaagttaatggctagtgagatagtgcatgtttggtttggattaattttcgggaaataatccttaatttttcaaaatttctcatagaaagctaccaaaaataactgattatttctctgaagtaagttgaaccaatcacacattaaatataanaattggaagtggtgtacctctacgagcagaagcac

SEQ ID NO: 195678 - DNA, 409 bp, Glycine max
  unsure (1)..(409): unsure at all n locations
agcttagatttatcaagttntattntgagtgtgggagggggtagaatatcatccacaccactcaatattcaagtgaaaagaccaagagaaaagaanaaggaggcgaaagaacatttgagcctcttaaaattcttcaaattagttagaacatattgattagtgtttgaaggaaaaagttgagaattatgtcagcatcaacataagttgaatgcctnctgatactgcatcaaggatacttgacaacagacttagaaccataccacttaagcttcaactgtttccataacatgagttaataatcaagaaggtaaattaagttgagtggtgaaatgatgaaatagatagatacctctactctatcaaacatgtcatcaagtatcaaagggtctccactgtaatatgcatcacg

SEQ ID NO: 195679 - DNA, 371 bp, Glycine max
  unsure (1)..(371): unsure at all n locations
tgtctctctatgggtgaaagaataaccctcattaattcagntntaacaacattacccatttacttgctgtctttttttagaatccctaanaaagtggtgcaaaagatagttgctattcagagaaattttctatggggaggtgatattgaggccaacaagatcccttgggtgaaatgggacacagtttgtcttcctaagaacaaaggggggttagggattaaagacttgatcaaatttaatgaggttntgcttggcaaatggcgttgggagttgactaataatcagaaccagctataggcaagaattctattgtctaaatatggtgggtggaatgcattgctctctggtagaaatagtagtgatctctccca

SEQ ID NO: 195680 - DNA, 337 bp, Glycine max
  unsure (1)..(337): unsure at all n locations
agctatagaagatgttntggcttttacatgcccaactcctttgagtggcatttgtatcggtggttaactctattgttgtatcttagtacattagatatctattntgcattgtgcaccatcataatgcatgtgtgtgtgaagaaaattttctaagttagaaaaatttcttcaaaggaaaaaactntgttttaatcgattatagaggtgttgtaatcgattacaacaagctatttgaagcttaaagagttaagtctcgtatcggtttaattgattacaatagtactttaatcgattaccactattgttgagacaatgactgattntttcangagtctct

SEQ ID NO: 195681 - DNA, 269 bp, Glycine max
  unsure (1)..(269): unsure at all n locations
agcttgagatgaggaagtgtagaagggtgaaacttcctgcttttattcgttgaccacagagtggtacctggagatatgtcngcggggtcaggagaccttgnggacgtcaggtggggtgctatagcccaaaaccaagcttgaccaatcccgacccaacccgggcatagtcggtcagtgagaacctgtgatgtacctatacaggcgagctcctggcagtcaacagataanaggaacaaagaccacccagcaaggagacttgtgtggtggct

SEQ ID NO: 195682 - DNA, 290 bp, Glycine max
ctagtcaaaaaactcctcaaacatgttctaatagtcatgcatcttttacattcaaaaccggaaacttagattcctacgcatgagtcatcctttcggcactttagtctagcttctacaaactacccatacactcacaatgcgcacaatttgttttgcaagctaagttccacaaaatcatgcgcaaatgccattgaggcatttcaccgaacacttggtgggcgcatgtttaagcatgaaaatcaagggaatggtggcaatgtggcatgccccattatctcagaatgcaccct

SEQ ID NO: 195683 - DNA, 362 bp, Glycine max
agcttatcaaggttgcttaatatctccaacatatttactgcaattaatccataatatttataattagctgacagtcggatcatgctgatatatatcaataagttaaatttgatagtgatactgttgtatatattaaactacattgagatttggcaaaagcaaaaagctattaaacattgtcttgtgttgcattctcattcaggaaacaggtttcaacttctgtacaaaacagaaatttcttacaataaaagaagacggcttctgttcaaaattgcctcatctgatctgtctgtgtctccattagcatgatttacaggtcattcaagtgacacgtgacagttaggaactcatccttcttacat

SEQ ID NO: 195684 - DNA, 441 bp, Glycine max
  unsure (1)..(441): unsure at all n locations
atctctgagtcacctgcggcatgcaagcttgctcgagataatagctcanacttaggaatccagganagccccatctttaaagttctaattaaggttagattaagaattttaaatgcaaattacattattataagtaatattgaatacctaattaaattatattttttaaggaacctaaataatctaattagatttattctatttaattttaattaatattcattagttaaagttgatcttagttgattggataattaaaattagtttcaagtgagaataaggacttacattntttgtttaagttaaaatcattctanattactatgcttggagaacctgaaataactaattaatacatnttttatgaattaaatanaccacacttatanttctattaaatttgagttaactttttttaagagaaatttgagttactaagta

SEQ ID NO: 195685 - DNA, 599 bp, Glycine max
  unsure (1)..(599): unsure at all n locations
cagctcanttcctttgnnttaacatttatactgtnagtcgacccaacaccactaagagcaagcggtttgatcatgctttacgganctataaatctcaagctctgagggtaacaagatgccttggttaacctgtacacccacctggtcttgaaccaaaagtctgcacctgtcaccagactctgtggataatgcttctttggccgaccaccaacacagaaccttttgctccttttatgtcaacaatctggaggcatattgaacaggcctgaagccttatgcttacacaccaatttacaacaagaacctccctcaacgctcaacaagcaaaatcagtcccaacaagaacaggtatgaaccttccagcaataggaacaatcccgggtgaggaatcttccacacttagagggtcaaatccttacaacagcaccaacaacaaccttattttcaaaatgctgctagcccagtaagacacatacgttcctccaccaatccaccaccaacatcagnatcaaccccagatacagagacaggtgaagcccctccgtaacttcccttgagaactgggagcaattgacatgcaacatgcagtttacaagacg

SEQ ID NO: 195686 - DNA, 423 bp, Glycine max
  unsure (1)..(423): unsure at all n locations
cttcggcattacatttaaactcgatccattgtcgataagcacctttgcgacaacatggtccatacactttaccgacacatgaagagccttgttgtgtcctctcccctctacgggaatctcttcttccgcanacgcgatataattgttggtggttatatgattaacgatgccttcaaaaccctccactgagatatcgtgggctacatgggcatcattgaggacttttatcaacagcgtacgatgaggctcgaagtttatgagcagttcaagcaacgagatccttgctggagttntattgagttgctcgactaccttaaactcgctttgttagatgaggcgaangaactcatggngctcttccaaagtcaccgtcttttcttgaagacctttttctttcacccctctaccactggggatctactt

SEQ ID NO: 195687 - DNA, 59 bp, Glycine max
gctttgtttatcggtacatggccgttaaagcctaaaatcacatgtacttaccgctttgc

SEQ ID NO: 195688 - DNA, 381 bp, Glycine max
  unsure (1)..(381): unsure at all n locations
tctaacacctaattattcatacacacccttagcaactattccaattnttattagttaatgtataattaggctggtttgtccatcggattatataacaaattgacaaacgagggataaacattaagttaaataatattttctcagatttttttccaattaatcttggtagagaaatgttaataaatttctcactttccacctagctcctatcctaccatagttntttttttcttttctggagttggtttgctttttactgatatacttgccctaatattagacattgacactcttgtttttcaaagcgataaagtatgtgcatgttacccaactacaagtgaaaaccaatctcantgcaatatgaatgaactaacatttcct

SEQ ID NO: 195689 - DNA, 479 bp, Glycine max
  unsure (1)..(479): unsure at all n locations
aggaagtgtntttgttcatcattactgacctatgatactcagcttgcttggtgatgcctctctaaccattcgctgcaacaaacagaatcaatccggaaagtagtagtattattaatatgtgaaatattgcagtacgtggtggtacaacaataatgtctcaaaacacctaatgttttcgcttttaaagccttcagaacttatgatgggtatttataacaataatagtagtctagtgcagtaagtatggaggntaaggtctattgcacgtatggagaataaaagctttgttgtgaaatgtgctatggaaatgaatccgcggtataaaacttgcttttatacgaatgttctagaatgggagacaaataataattgtgaagattcttctatatttgattctattggagacatatggatcgatgtgactcaacatttataaatgtagattttattgtccttagccgttgtaagttctttcttcg

SEQ ID NO: 195690 - DNA, 285 bp, Glycine max
  unsure (1)..(285): unsure at all n locations
tattatgagcctctcttggtatttattttgattgggtaccataatgggatgtttttacacttcctttgaaaaaactttgaaaatgagatgttgtaaaagttattcttttataaaattgatattgttgttgttaccttagttgaaccccaatcacattggtgtgatcagaaatttanaatgacttctctttgatgtagaccccaaaacaccccttattccctttataatgtngaatgggatttgaccccgaatgttgatactaacctttgtcttgaaatgtatacc

SEQ ID NO: 195691 - DNA, 293 bp, Glycine max
  unsure (1)..(293): unsure at all n locations
tgattacacaagatgatgacggaggagatgacaaatagctctcagattaatcatagaacaactcaagtgaatcaaagataaatcanagaacaactcaattggatcaaagatcaatcaaagaacaactcaagtgaatcaaagatcaatcaaagaaccactcaagtgaatcaagaacagttcatgataagaatcaagaagaattcaagactcaagaagaaagtttagagtcaagaatcaagattcacgattcatgatctcaagaatcaagatcaagattcaagactcaagattca

SEQ ID NO: 195692 - DNA, 404 bp, Glycine max
  unsure (1)..(404): unsure at all n locations
gcttgctaacccatggaagctcctaatatcttccacactntnntgggtgggccattcgtggatggccttgatttcccaaggtccacatggaccccatttctaccaactacaaaacctaagaaaactatattatctacacaaaaggtacacttctctatatttgcatagagggtgtttttcctatggactgaaagaacttacctgagatgtcctaagtgatcatctangctcctattgtacactanaatatcatcaaaataaacaactacaaatctacctatgatatcccttaagacatgatgcataagcctcataaaggtgcttggtgcattagtgagcccaaaaggtggtcttgaaagcgattttcactcatacccttntcatctgatttcggataccacttt

SEQ ID NO: 195693 - DNA, 366 bp, Glycine max
  unsure (1)..(366): unsure at all n locations
agcttatgagcgaattctgatcagaaaggattgttgtgcacaacagaggaagctaattaagaaatcctatgatgcaaaggcccaactcttggaggtatggatttatttttaataattgtggtatactcaccctttttgaggtttatataaaaggagattaggagaatgagagattataatgtgattctacaaacatccatgaacaacgctaccgataattgattgtatatggattggattttcaaacatccatgaacaacgctactgataattgttatatacatactattaatttaattacaaccacctgtaacatgccctccaacattccctgatctatatacaanaataattattcaagcttaa

SEQ ID NO: 195694 - DNA, 537 bp, Glycine max
  unsure (1)..(537): unsure at all n locations
ctctctttcctcnctcttcccctatctatnacccttcacatcctctaatntccaagcagagagantattgcaccttattccctgcacattanaacatcaacattgaatctttcctgtaaaatagtctttgaaggggtatacatatcancaaactaatcataaaaccttactattttctcacgcatctccaatctccatatcctctaagcttgaaaatattactttgccttaaaaaccttggggaaaaagtggcttgggcatcggttaaccaattcgacaagaacattgtcttactaatttgggctgcaacaagaatcatcataatatttcaccacctattatttcagcttccaacttcgtaagttcacataagagttagagacttccaatcattttcattccttatctaatatgtctctccacaccttcatactttccttggccatatattgaacattcgtcctattctaaaagaattcctaccaccctatagtgcacaacaaaatgcttataatttcttgcagaagcaaatctccc

SEQ ID NO: 195695 - DNA, 596 bp, Glycine max
  unsure (1)..(596): unsure at all n locations
cacttccaccctcgattcgtgatcggtgatgatatcgactgtacnctccattccaccactgtttgaccctgtgagcaccgtggatcctcatagacgacctggcagcatgccagctcgangaatatggggaccccccatatgttggnactacagcggcgaacgggcagaaggagcaaatcgacgtttcagcatcacaaagcacgcatggactcaccattcacaaacggcccgacccacgtgggctcacgaactaccacaaacacatttcctcagatctttcaacaccgaggcccgatcgagacctgctagcatccacctcacttctgcactagcatacttcatcaccaagctctatcataaactacaggacagggcagacgcacaaatgtcttgcctgacacaaatcaagaccacgacgttcgtgactctcatacccgaagagcatgcgcttcgcaccaaatctgtcactggtggaccgactcactgctttaacggtgagcccccagtccttatgattacactttgagccgggggatcaggtcggaatgtgcccaaaaccaatatgaactaccgttttccgtgcagatgcatgaacg

SEQ ID NO: 195696 - DNA, 378 bp, Glycine max
cctcatcacattataggcactcttaactgagtattgaccattcgaatctgtcaaccacacccactgatctgtatgttgcaactgaaatctatagctctctacatcttttagaaatgagatcgccatatctaatttattatcaaacaatggtctcctccatctgaacttccattcccaccctgattctttgaaagctcccatgtgatgtatgaactgactttgctgggaagaaatagtatacagcctaagatacttctctattaacttacccactccacccatccagttgtgctcccaaatttaaacttgttccacaaccacctttcatatgtgaattttcagatctgacatatgcggtgtgagctaccacttaaatcc

SEQ ID NO: 195697 - DNA, 434 bp, Glycine max
  unsure (1)..(434): unsure at all n locations
gcttcatgacaatgaatcaagttgattcttttatgtttgatgatgacaaanagttcaagagaatgatttcaagattgagtcaacacattcaagatcaagattaatttcaagtttcatgagaagattcaagattcaagaaaagtttgattttaagattcaagagaagatgaattcacaattcaagggaagaaatcaagaagacttcataagggaattattgataagatttttcaaaaaacaaacatagcacagtttcgtttttcaaaagagttgttctcanaattttctaagttaccagagtttttactctcttggtaatcgatatcaattacctataatcgattaccaatggccaagtttaattttcaaaacttttaactggaatttgcacgtctcacatgttncttaaatgatgtaatcgattacaatatatt

SEQ ID NO: 195698 - DNA, 305 bp, Glycine max
tgattacacaagatgatgacgaaggagatgacaaaaagctccagattaaccctatgacagatcctccgaggtaaagatgtccagactacaactattggctacaaaggtcgaaaatctgaagatgaatgaggaagagtgtattcatgacttccacatgaacattcttgatattgccaatgcttgcactgccttgggagagaagatgacagatgaaaagctggtgagaaagatactcagatccttgccttagagatttgacatgaaagtcactgcaatagaggaggcccatgacatttgcaacatga

SEQ ID NO: 195699 - DNA, 301 bp, Glycine max
gcattatggttcacagccaatgtgtcccacaattgacgaaaggaattgggtggagatgatatgaggtaaacaaaccacagccacaggatattgtataacaaagcaataaataaaaactgctacagaaataaaaatataactttcaagaataagcacagtttatgtgtgttgttgcttaagctacatgtcatatacaagtatggcatatcattagaagatggaaatacataggaaaagggtgatctactgatgaatgctctcctacaacctatggtttgcatcctacgaaaacacatgaatt

SEQ ID NO: 195700 - DNA, 288 bp, Glycine max
gacctataaaactcagctttcataaaagttgcggccatgcgtttaaaatatatcacgctctgactggagggtggtatcctctttaacgcggtatcatgttctgtcaacacaaaatgcatgcacgtatatatagtccttcagctttatattaacactagcatgaattcatcacctgacatgttccaaatgctaaaaaacggagcatcactttaaccactttacttaaagcaactaattggcgatatcacccattatccttttttttttattctggaatatcaccaatta

SEQ ID NO: 195701 - DNA, 444 bp, Glycine max
  unsure (1)..(444): unsure at all n locations
agcttttngaatttnntttttattttactattttanaattcagaataactattattttccgtcttttaattaatttacaagtgaattttcaatactaaagtaatggttcatacttcttaatctaacaactattntgatacattattattttttattttacgaaaattacaaacaacaaagattaattaaaaattagaagacatataaacaagttgcatagaaaaataatacggtagattntacaaaagtttaaactgtttgacacttcttatttactttcacacataaatacaacaaaaatgtgtattatcttgaaaatgattacaagtatgacaacttaacataagttgtctatcacattaatacaaatcggaatacctaagaagtatataagaaatgataaattaattttcacaagagttcctctcagtgtcaccacaagca

SEQ ID NO: 195702 - DNA, 287 bp, Glycine max
tatctcttgtccaacagactcagtcttctcattggacttcttctctggaacatgagaaatgaatgtatcataaattgtattgctataaacagacttttcccgtacaaggtctgtggcagatgagttgaatgcaattggatggtataacaaaaaaagattttggttttgaagaaccaacccaagtttcctctccatcttcagcaagggagactgcatgatcatcaaggtgtgcagggccataagctgaaacagcgatctcaccagccacctgcataacttctttgtat

SEQ ID NO: 195703 - DNA, 426 bp, Glycine max
  unsure (1)..(426): unsure at all n locations
ctggcaagggtttgggcagtgtattttgagctctaccagatgggactcaattagcagtgaagaagttggaaggtattggacaagggaagaaagaattcagggccgaagttagcatcattggaagcattcatcatcttcatttggttaggcttaggggattctgtgctgatggaactcataggctccttgcttatgagtacttgtctaatggctccttggataaatggatattcaagaaaaacaaaggtgagtttctgttggattgcgatactangttcaatatagctctgggaacagcacaaggacttgcttaccttcatgaagattgcgactctaagattgttcattgtgacatcaagcccggaaaacgtgcttctggatgaccacttcatgcgcatggttcggatttcgactggctaactcatg

SEQ ID NO: 195704 - DNA, 234 bp, Glycine max
  unsure (1)..(234): unsure at all n locations
ccgggaggcggggacaattttgtctgataaattcattcagacgtataactcgaggtcaagtaacagaattgttttggaccaacatcactataaacgctttttacttcaggacaattagagtcatgacaatgccatgacngcaacataatgaacactattatgatatgacatgtctttgaactggctgccaccaattaaacaaggatggaactttcatctttcttcatcttatat

SEQ ID NO: 195705 - DNA, 433 bp, Glycine max
  unsure (1)..(433): unsure at all n locations
agcttggagaggatgcttcaatggaggaaaatattgagggagagaaagagagaggngggagcacgaaattgaaggaagaaaaagggagagaagttgaactctgatttgtgtctcacaagactctcattcatcaaagttacaacaagtgttacacatgcttctatttatagactaggtagcttccttgagaagctttattgagaaaacttccttgagaagcttctttgagaaaacttccttgagaagctagagcttagctacacacacccctctcataactaagctcacctccttgagaagcttccttaagaatattccttaagaagctagagcttagctacacatacctctctaatagctaagctcacctncttgagatgagaagctagagcttagctacacancccctataatagctaagctcacccncatg

SEQ ID NO: 195706 - DNA, 457 bp, Glycine max
  unsure (1)..(457): unsure at all n locations
agcttcgggctgctcaattgctccaggttgctgtatggaagggctaaggtctgtatggtggtcagcagaggagcacaaaccgcagacccttgcgacaggtacagatttttggttcaaggccagctgggttaccaagttaaccaatgcgtccagtttgccttcaagcttcttagtttcagatgatgcagctgagtttgtagctacctcatgcactcctctaatgactatcgcatcatttctggcactaaactgctaggagttggaagccatcttctcaattaaatttctggcttcagcaggagtcatgtctccaagggctccaccactggcagcatctatcatacttctctccatattactgagtccttcataaaaatattggagaagacgctgctccgaaatctgatggtgagagcaactggcacatagttntttatatctcttccaatactcatac

SEQ ID NO: 195707 - DNA, 464 bp, Glycine max
  unsure (1)..(464): unsure at all n locations
agaggatgcttcaatggagganaagaaagagggagagaaagatggaggggggagcacgaaattgaaggaagaaaaagggagagaagttgaactttgagttgtgtctcacaagactctcattcatcaaagttacaacaagtgttacacatgcttctatttatagactaggtagcttccttgagaagatttcttgagaaaacttccttgagaagcttctttgagaaaacttccttgagaagctagagcttagctacacacacccctctcataactaagctcacctccttgagaagcttccttaagaagattcctaaagaagctagagcttagctacacatacctctctaatagctaagatcacctccttgagatgagaagctagaacttagctacacaccccttataatagctaagttcacccccatgacagnaaacatgagaatacacaaaaatgttcttactac

SEQ ID NO: 195708 - DNA, 359 bp, Glycine max
  unsure (1)..(359): unsure at all n locations
tgaccaaaagttcaaagatcaagaanaacttcatgataaccaagatgatgatctcaagaatgaaagaatgagttcaagatgttcaagattgaatcaagaacactttcaggctcaagaggaaatttgatttccagaatcaagaatcaagattccaggttcaagcttcccagaatcaagatcaagattccagactcaagattcaagaatcaagataagtatgagcaagtttttcacaaactaagtagcacatggatgtttttcaaacttgttaccaaagagttttactctctggaatcgataccagatgatgtatcgattactatagcaaatgttttgaaagattcactgatttacacgtt

SEQ ID NO: 195709 - DNA, 367 bp, Glycine max
  unsure (1)..(367): unsure at all n locations
ttgtaatggatatgattctctctatttnatatggntaaacattagactttgaatgtatcattcaacgagtgcaaaaaccaacttatttaaaatcaaatgtggactatcgtccaatgctagtaaaacagagttttcaaaaaggtcttcaagtgcagacttgtgcaacaaagtgtatcaaaatcaacacataagaatactaatcaagtagctttagagagaagtagaaacactgggatttataccaattcactcaaacaaagctatgtctagttttcctttgcacatcagtaaagggttctactaatcaaaacttgaatacaacaagcttatgtaccaaaagcgagtattttacagcctctaggcattg

SEQ ID NO: 195710 - DNA, 399 bp, Glycine max
  unsure (1)..(399): unsure at all n locations
agcttctggaggaagcctcttaatgaagcttctatagaaagatacatgaagcttcctcaataaaaacgctgccccgtcttcgttaaccgatggatcttctcgaaatttggtcttcaacttcacaagacacttgtgcatgatctaacggatctttgagaagatgtctggagtgtgctagaagcttccgtttccgagagcatctcttatttaagcatttcagcctttgctttcgtgtagcttaagaaaaacgtcatttcttcttctttctttcttccanagccatttctaaagttccaagaactttctccatcacccacagccaccattagccaccacanatcatcattgttctccattgaanacccacaccgagaggaacccttcaccgaacggaatctt

SEQ ID NO: 195711 - DNA, 519 bp, Glycine max
  unsure (1)..(519): unsure at all n locations
catccactcctcgcctcccagcattcactcttattcacccncnnccnncagcagcacggnnttgttgctgcttactacctgacaacaaacagagcttagtacttacaattacaggtgatttgttatttccatctagttggggtttttatgcgaaattccacctttgaaccaactattatgccatatattcacgtatatatacacaccattggagagcattttccacggtacttacgtgcagagtgccgatcatggggcagcttcaactcttacgaaaagaccctattttatgcttttcttatcctacaaacaaattttgattcctaagcataagcatgttctctgcattgagctacaaaagtttggtttctaagcttggattacatntgggacctatttgactttccatgtgtgttacatactaaacagcccactgatcacggcgtaccgaatcaataaacttgaaatgaggaactcgaagtgacctaagcgtttccaatgacagtgactagcaaatgt

SEQ ID NO: 195712 - DNA, 350 bp, Glycine max
  unsure (1)..(350): unsure at all n locations
agctntgagcaaattcaaacgacaataacttttgaatcggatttccgactttgtctcatagaatatcgagacactcgtaattgaaaacggaagttctgagaaaaatcaaacgacaataagttttaactcggatgtcctattgagccctgtcatatatcgagacgctcgtaattgaagaccgcagctctgacaaaaatcaaacgactataatctgtaactcggatgtgcgatagagacccgtaatatatccggactctcataattgaaaactaaagctcttaacaaatatcaacgactatacaatcttgactcggatgtccgactgtgtcccgcaagatatacagacgctc

SEQ ID NO: 195713 - DNA, 359 bp, Glycine max
gcttctatcagggtatctggggtgaagctctttttctggctattcttaaggaggcgcctctctacctattttctttgcttccgctgcatcccatggtggaaatcaccttaaaggaccccattgaagctcaaaatccagcctccatagaagctccacaagcaagcttccatcaaggggtaatcagagcacaagagcttcaagtaggtgctccttaaacctccattaattatttttctttgccttctcttccattgatgtttcttaatttttgtccatgtatctcctcacatgtcttggtctaaatgttgttaacatgaatctttagagtttccaccgattaaacttgctatagaagttag

SEQ ID NO: 195714 - DNA, 455 bp, Glycine max
  unsure (1)..(455): unsure at all n locations
agcttagtaaagctaggcactaacaagaatatgtgaactcttagaatgtttatataagacaattaatccagggttagagggattcggcaagtaccaatntgtctccacaatggtcaattcctcaattgataaaaatccaaattgagaaagatttaatcctttttcttggaaaattaaaatattttttatgagacaaggatacgaacatagaatcatgtaattgattttctataaagcacctatccccaatcaactaaaaatggctaaatcacttanaaggaagaattatatacgcaaaatatttggttaaatatattgaaaacttcaataaattttcaactacatctctttctttaaccacaaccaacataattgagtggaatatcaaacanaggctgcacaactttcaccaactacatcaactctttttacaacttcttttccacttatattac

SEQ ID NO: 195715 - DNA, 406 bp, Glycine max
  unsure (1)..(406): unsure at all n locations
cttgttgtaatcgattacaatgaggctgtaatctattaaaacaaagagcttttgtctctgaagaatnttttttaacttagaaaattttcttcacacacactatgatgattgttagttctttggcaagtgtaccaaatcgctcgtagtaataatttctcgataagccgagtgtcgtaccacatggattttgttacacttatatgaagtacttttcagtttgcaaattgtaaatttagtgtataaaattaaagggaaatttaaatctaagaaaaactcaagcaatagataaagaataaagtctataaaatattactaaatctaataatcctaaatacctactcctaaataaaataggggatactacnttctagagnacccaacaataaaataaggaataactacttct

SEQ ID NO: 195716 - DNA, 320 bp, Glycine max
  unsure (1)..(320): unsure at all n locations
agcatgcaagcttatagnaatacagcacccttttatttctggatataacaatcctccccgggggaagaacttcatgtatcatataaacacccctttaatataaccgatatcaaaatgagataggtaaccttttctttggtaaattcctatcttttgggcgttgtaggggaagccaaaactccttcctaccacgtacttctaaacaacggagccaacgcttatattaacaaaaaaatactaatatattaatattaaaaaatatgctttttatcttcttgactctgaaggttactagctagtattattcaatcacttacgaa

SEQ ID NO: 195717 - DNA, 568 bp, Glycine max
  unsure (1)..(568): unsure at all n locations
actttcgctttcttgtcctnnntncntactcacactcaattnnnnntccctnnccnnnnnnngcaagcnaagcagggttgatgcatcattgtatcacccgcatataaaacataagcttactttttaaaaaaatcacattatttattagcttattgtatttccccaacgctcaaaatatttaaataattttggtaaatatgaaggcgaagaacaaaaatttgtctgtgcgagatatggaaccaccctgggatcttgcagttgaccaaatatatcaaggactatggtatacacgaagattgctgtgggaatattcttgtggatgataagtaccgtgatgagaattctgattataatgcacttggtggagggaagtcttcatgaataagaaacgtagggacctgtcctttatgcttctaaatttggtttgttattgagtaaaaaagtatacttgatagaacgctaatttcatgaggtttttttctgttggctttctaatcaataatatggtgacttatggaaggatgaagcgtattggtctgataaaattgaatataccttaacggacttt

SEQ ID NO: 195718 - DNA, 451 bp, Glycine max
  unsure (1)..(451): unsure at all n locations
agctntgagccgaaatcctgactcaccataatccttaccctcggaagcaaaaaaaggagaagaaaaatctccaatcacaggaaaaaagactagacagaaaattcccaatcaaagaatgggagaaagaaaaaaagagaaataaaaaagacgatagctcctggtcaaagaaaccagaagaaatgtgtcgggaggtccttggaccagacgatatctgaacaatgcagaattgtcaccaaatgaacaaaagaaagaaaaggaaaccatgacctacaagtggtcttctccctttgattaccaaccaaaatcctgtgcgctagcgactntttcgccccgcactaaacaaaaatagaaaaggaaaaagccaaccataaatcataagccaaaacacacaaaagctcaaaaaacccatcagaagagcgcattctcaagagaagtcctattgatccatgat

SEQ ID NO: 195719 - DNA, 165 bp, Glycine max
atttattagaacagaatgaagagaatttactttagcaagctcaaaaagaagaaaaattaacatccacacttattataatagaattgaaacatatcaagtcttcataagaagaagaagctcttcagcctagtaagttctgcataagttgacttgatgtttaacctc

SEQ ID NO: 195720 - DNA, 349 bp, Glycine max
agcttcattcttgtatacagattagaagctttttatcaatggtctctgcaaataccttatgtgcagaatgaaattctatcaatacacctccaatctttactggagagggctaccactactggataacccgaatgcatatttttattgatgcaatagacttaagtcttcgcgaagccgtagaaaaatggccatatatacccaccacactaataacaactacatcagatggcagctcatctcgtgaaagcataacaatagaacaacctatacatacatgccccgcacatgatataagatcatgtcactccatctaaatcccacataataatcacatctgccctggaatggt

SEQ ID NO: 195721 - DNA, 604 bp, Glycine max
  unsure (1)..(604): unsure at all n locations
cggtacatccatcgtacatgtgtcggtgtgattaatgaatcgaatanaaaaangatcgnnnnncaatggcaaagaganatggaccctgtagnaccangcgacctctnagacgacctgccgcatgcaagcttggatcattattctgacaactaatcttattttattgcgtagaatactaccatacgatatgaatgcatcacagaacttggtcaaaatatgcactatggatgtgactttgcttaaataacaatttgaaaggatatgatatttatttcttaaacaataacgctgaatatccagacgatcttctttttaaaactaaaaaaatagcaaaaatccctccttgacatttcgatgaggcatatntctccatcaaatccataataacaaatcatcaattcaannttgctcatgggcatcatgagtatatntttacaacctgtatattttctgcttgacgatgtgcataacaatattaagactatgacttcgagaatctaattccttaaagacaaccatgtgcgatatctctctaagaatgaccatcacggattacggtgaggaatgattctatatccacaccacccacctaattttcgtaatt

SEQ ID NO: 195722 - DNA, 433 bp, Glycine max
  unsure (1)..(433): unsure at all n locations
tcttttacgattaataagacgggagaagaaagacgcctagctgacagaaatcacgttacacgctcccaatgctaacaacattatagacatcggatatcgtactcggctcgccatcatcgccatggtcaaaaacgccagaggcaaatggccagaatactccgactacactgatctgaacacggcgggccctaaacatgaatacactctgctcaacatccaanaactgtggaacgcatgccttccaagatcactttggtgacgcccaagaatcacgcgcaaacaagctccaacatcaagatcacattcaacattcaggaaagttccagactcagagtacgactcaaagacgactaaccacatcacctcggagagcttcacaacatgaacacaaagagtattcgaaacaaaaccttaccacgagggtacctctggg

SEQ ID NO: 195723 - DNA, 316 bp, Glycine max
  unsure (1)..(316): unsure at all n locations
tcacgcggataaacctttgaatcttttgaccatagaaaacgactgaataaaaagaatggcttatgttctccgtcaacgaacttttcttgaaagagaaagtactgaacatataccttcttacacatgaagagcaatgaatgagagaaatctgttatccatgaaaggaatcaatctttgcaatncgtgccatggtcacatatttataatcatttgatgactcaagttagagtatgtgactgttggcaattctttaaactagccactctaaagttggaccttgcacatctagtcacttaaaagtgtgactttgaaaaat

SEQ ID NO: 195724 - DNA, 559 bp, Glycine max
  unsure (1)..(559): unsure at all n locations
acaactcacaacttcagtccttgtatgacgtgcatcgtatanatnccacccanaaggccgagctttggctcgtgacgcaacttaattaccgcggctgcagccttacacggatgaaacatgacctattatgtccccacaccgactttgctctcagacgtcgctgtacgtccacaaccactacatcgatcataacaggacccctcccttgaatgttagaatacaccgctcatgcgtatataacaacagacgggatagataatgtatcgactacgcacatgtcgaacaatctcgccgagatggggtccatatcaacgtcgagttaacgaaaaccacgccgaggcgaggtactattcaacgccaggtacgtccaacacacctngttggtgggtatccttataacgaacgacgcggcgccaccatcaacgttggttgagaactcgtcacccctgaggtagcacaccgcctgtgtgcttgaagttaaccacagcaccatgctcccatgtcgcagtaaaaaactaaaaccgggtctaaatgaccgagatgtacaatccccctcccc

SEQ ID NO: 195725 - DNA, 316 bp, Glycine max
  unsure (1)..(316): unsure at all n locations
ggctgcagctttactngttttctattaagttcatttatcacattcacaagtgtttagatatattttgtttttatagaaaattgatttaagcttatttggataatctcgcgctaataccttactttactaaacttagagccaaattaagactgtggtagacgacctttaatttgatcaatttcaagcgctttgccttggctgtttttgaataggatccatatttgacaaaaggtctaaagntgtcactaacaacatctattcactcagtcctcttagtatggtctatatattttaggtgactaactatgatgcaagt

SEQ ID NO: 195726 - DNA, 594 bp, Glycine max
  unsure (1)..(594): unsure at all n locations
tgtcttctagccctctcacgctgtcaccttatacacgcttaatangacttatctcactttanancaacnccntacgcccagatgggatgtggacccgattgagcacccggtgatnctctanagacacactgcagggctgcatgcctntatatgagctgaaccatttatctatttacacactctgaagcgctatccacaagactaagattatcccttctatcttactgagagtgattctcctaacttcctgagtgaatcaagaacaccctgcctgatcacatgacttccctacccttgtgtgggccctcgctggaaagaatgatcctttgcttcctatcatctccacccttgttctttcgaaccatcattccagataatccacctccgcccagaattattttgcgaccatactcccactttcacgctcaactaacggattcctgaccgtaatataagtcatcacatgactttcgctcggtcggatcacgtatctggagccctgaacatcggtattgcgtctatattctgccagccacccttacctccccttaccagcccgtcatccatgttnccacaaccacccattagaccacc

SEQ ID NO: 195727 - DNA, 529 bp, Glycine max
  unsure (1)..(529): unsure at all n locations
cgggaagaggggttgatgcatccatgtctgacgcgtacatacgaagcctcaccaaggtgctgacatanactatagatgagcacacctgttctagttaatggngacgctctctccctccggggagacacgctctctacatcctctgtgcgatctatttcacgaccatagcagtactctctcaagaacttctggaacagatccagcctttgtcacgactccagtaatggctacgagaactatcgccgaataaacattctctattagataaatggagagctaaatccgtagcgatgaactgcctgtgggctcaaacagcactactgtttacagaccccttatttctgctacactgcggtaagctctacctagtcactaattacttagaactagtcgcttatagtatatgcatagagagtgctggatgcaccgtcagtgcgcatatgggacggacatgctacaagttatctaagagacgaggggccgtgattgctgacacatgccactgcggactggatctgcacctacacag

SEQ ID NO: 195728 - DNA, 284 bp, Glycine max
agcttgatattaataacctatttggctcagttcgagttctgactatagctgcaaactatctcatgttggtgttcagtgtaccacaccctgtgtataacatctcatattttgcattggattcgattaatgatacacaatttgtttattcgagaaaaaggtcccatccttcaatttcattttgcgatatttgacagcaccgcaatttcgttctgaaacggtaactatcagctccggtaccgtgttgttgcagatgatatttccgttactgaacgatttttataacc

SEQ ID NO: 195729 - DNA, 359 bp, Glycine max
  unsure (1)..(359): unsure at all n locations
ttttactgggacattactcttaaagcaaaaatggcatataacctccttccataaatacaaacatcaatgtaaatttaaagcaagcttatgcgcctattttcttacaaacgttctcttgcacaagacatttaaccgaaaaaatgcacccatatacaatcaaggcagcttcgttacctagattatntacacgtacctccaaggtgtatttgttacttacatcacacacatctccttggctaaattcacatacatgcctatctcaaagcatttggggcaccaaaaattgcacatgtgcacatcttggcatttctaatacctatacatacgcanacttcatgatgaatctggactatctacac

SEQ ID NO: 195730 - DNA, 438 bp, Glycine max
  unsure (1)..(438): unsure at all n locations
agctnttcctaatgttcccacttcatacgtattatctggaatgcagagaaggttggccacatcgacattattgaattcatgttgcctagtcattctctagtaggtgtccctaccatcttctgggagagtagtgggctctcctaaatacttgttgatggtatctctgtcatatttcacttgaactcttctcacctaagaaaccttagtgatctcatgttgctttgttggccaggaatttgcataaaatcctctaactatatcttcattgaattttgtttcaagctctgccagaattttccatcttttctttgtgatgctagcctgaaactcttcatattgccatgtcttaaggtctactttttctcacggattangcttctggactctatttctacatatcttttgtggttggattngtacatgaagcatctccaatcc

SEQ ID NO: 195731 - DNA, 250 bp, Glycine max
taaatggaattgataatgcctatgtaaagcatgcatagcttgcgcatgaaaatatatatgaacattaaagctgagaaaaattttgaacaacacattttcttagtgtgacatgatcttgcacaaatttttgaccttttggagagtataagaccatttacttccaacttaagccaagaatcactagtagaatcttccttccaaaaggtaatctttaatgatcttaatttggcaacaagaaatattatagttt

SEQ ID NO: 195732 - DNA, 178 bp, Glycine max
gttaaacctatctcagaatgaaatctgttacatttgtgcaataccatattgttattacttgagccattctagtttatactcattcttgaatcataatcaaatatgacgatgttagtgaacatcaatcaacttaattatattccttgatcttaagtttgagcattgtgtgagtaagtca

SEQ ID NO: 195733 - DNA, 384 bp, Glycine max
tgagttgatctttatccttcataacaaggttcattttgtctgtagtctcgtggcatctcacttctatctcttttaagtgcttattttttacctgaataatgttagttaaattcgagacaagcttatcttgccttcgagcttcttcttccataagctcagatatggttttgacatcgcccatccttcgcagatgttctccatagatactattgatcttgtagtcatctgcccgggcaacccatgcataaaggccagacttcagcccagaattagtaaaccaatccttttttccatgatgatctaattcatatgctctttcaaatgccaatgcattatgtaagcctggccaagttttattgaattccacaagagcagtttcagagt

SEQ ID NO: 195734 - DNA, 420 bp, Glycine max
  unsure (1)..(420): unsure at all n locations
caagctctgccacatgtccctatttgattggagcaaaagggcccactatctctttntgactgtgacccatactcagtcaccaaagtgagaaaaatctgacctttgaaacgctaaaatcctgcctcggtttgcgtgtcgtttctctgattccagttttctcgcatttctctgcgtccgccggggccagttttcgaaagcaagcaatatatatatcacaacgctcagaatgaaaccccgagcgtggattagagggtggtttcgttaaaatttaagtcgcacgcacaacgatgattttaactaattaattaggaattaacccataacctcccagttatggatttcttctcctaattagcctaacacgcatatcttgcccccgctatcctacttctaccagaacatatangatatacactgata

SEQ ID NO: 195735 - DNA, 391 bp, Glycine max
  unsure (1)..(391): unsure at all n locations
cttacgtgtgcgataatatggcatgcaaaatttttatgttttatttaattaaattcttttagaaatttttttttatcctatccaaaatatcttggttttaatggcacaaaaattgatttggatcaattatagaaaacacaaaaatttttatcttcatcttttaatttatttagaccatttttaatcctcgttatccttaccaaatcatttatgcgtttatttcaaattatgttaccatttttactaatgagtttaattactagtttaattctctgattctttcttcctttttcatgctcctttttcatcctataaataccacccttcaatcattgtttcagatgcaccaaagtcttatcttattcctcttctcanattatttctcttgtat

SEQ ID NO: 195736 - DNA, 346 bp, Glycine max
  unsure (1)..(346): unsure at all n locations
tgtagagaggcattngaggagctgaggaggaggcttaccacctttcccatcatgcaaccattagattgngagcttccatttgaatttatgtgtgatgcctccaattatgcacttggggatgttntgtcgtagagagttgatagactatcacatgtcattgcttacgcctcaccactctggatgcaacccaagtcaactacaccaccaccgaanaagagcttttagctattatttttgcattagataaattcagatcttatttgtttgctcctatattactatttgtactgaccatgcagccttgagatacttgttgaagaaacctaatgctaaacccaaattgatc

SEQ ID NO: 195737 - DNA, 303 bp, Glycine max
  unsure (1)..(303): unsure at all n locations
aaaaacaagtccttaattgaaggggtaggagaccataatagtgaattactaaataaacttggtagtttgcttaaggtcattccacaaactccctaaaccttagaaaatacataaaaagatggtaacaaagaagtacctgccaattagttaatgtcattaatgaagatagtgaccaaaattctgaagatacaactgagacaggctcaatattagaaaagaaaatataaacccaattatttcccaacacttgaaaacactctctanactatattatcaatgtccaattgcccctgaccttctact

SEQ ID NO: 195738 - DNA, 392 bp, Glycine max
  unsure (1)..(392): unsure at all n locations
aactggatgcattggtttacttggaacccagctggccttgaatcagaaatctgtacctgtcgcaagggtttgtggttggtgctcctctgctgaccaccatacagacctttgcccttccatgcagcaacctggagcaattgagcagcctgaagcttatgctgcaaatatttacaatagacctcctcaacctcagcagcaaaatcaaccacagcagagcaattatgacctctccagcaacagatacaaccctggatggaggaatcaccctaacctcagatggtccagccctcagcaacaacaacagcagcctgcttcttccttcaaaatggtgctgggccagcagaccatacatntctccaccaatcaacaacagcaacaaccccagaaacaac

SEQ ID NO: 195739 - DNA, 387 bp, Glycine max
  unsure (1)..(387): unsure at all n locations
agcttcanacagcttgttataataaattacaatgaggttgtaattgattaaaacagagagtgtttgcctctgaagaaanttttctaactntgaaatttttcttcacacatactatgatgatgcataatgcaaaacaaatatcaaatgcactaagatgcaacaaccaagataaaaaccaatacaaatgtcactcaagggagttgggcatgtaaaagccaaaacttcttcaaaacctcttcaagcttttccttgagcttcaagctttacccttaggttgttcactatattgcttatgttgcccccctatctctaacnaacttggcacanagacttggaaaactcatattctttgtgagcatgtcaacaagggaaacaaatcanaacgtc

SEQ ID NO: 195740 - DNA, 494 bp, Glycine max
  unsure (1)..(494): unsure at all n locations
tgaggagggnttgttctgcttcttcacgcacatnaaacccagcctataagttggcttactccatacaatgtcggctttactcttttggccaacttgnctcgcgtaacctgtggtcatttgtaaacacaacaaccgaaaactttagattttttaatggtggcttatagccatacccaacctcaaaaggagtcttcccatcaacctgcttcttgtgggaagtctgcttcaacacaaaaacaacaatattgctgcctcgcccaaattcttgggaattcctctcatgaacagatatctagccctccatatggtctatttttccgctcactgacaccattttgctttggagggtatggtgttgaaggtgatgctcaattccaacctcctcccagaattaataaaatcatttacgctgattccttgccgtatatgacccaaaccttgaatctaaggccctttgatctcaatcacgtcctgaattgaagacacaccgccct

SEQ ID NO: 195741 - DNA, 523 bp, Glycine max
  unsure (1)..(523): unsure at all n locations
gatgtgaccctatctgcccgagatcttaagtcactgcggctgcagcttanagtcctagtgnatgaattgtgtgtgcttgaattctggtgaaaatgccaagtatagcaaaaatgaatggtgcaatcccaattgtgtgattaaagagacaaacacttgattgcactcgtgagtgagtgaaacacttgaataatgaggagtgtggtcttcttgcatcaatgatgaatcgccatgctttgtgctctcctttgattttgagctagtgtatccttgctatggtctcctaaagaggacatccctgtgaataattgaagccttgttccattcattattttttatagaanatacatgtgttggatatcgtaggatggaatcgatctcaactcatgtcaatggtttaatcttagcactaatagctctcatttaacgatgtgtgtacttttgctcgaggacanaacaacgtctaatattgacggagttgatatttgccacaatacttaactgagacatgtgattatgaaattag

SEQ ID NO: 195742 - DNA, 365 bp, Glycine max
  unsure (1)..(365): unsure at all n locations
atatataccccatgcatggcaggttataccccatgcatggcangttgtgtcataggttattaagagtaacttacccaacattctaaaaacttacactcagaaggagattccttttaagtttaaaaaaattaacttaaatccccttaattgtgttgcagtaaatgtgaatatggtagaattaacaatgaaatccactatttaattagttttaaatttttatattaggcgttggaccttataattatttcaagtgatatttgacaaacataagtttgaatgtgaattgatttctttttcatttggntntgntcattagncggatattctttgtatccatctattacgaatatgatgaatatctctga

SEQ ID NO: 195743 - DNA, 427 bp, Glycine max
agcttgcttgagaagcttctatggaggctggatctttgagcttcaatgaggaccttcaatggtgattttcaaccatggagatgcagcggaagataaaggagaagtggtgagaggaggcgctatccactagggaataagccatgggaggaggaacttcaccaccaagagagtgccttggataagaagcttatagaggaagcttcagtggaggaaaaaaatgagagagagagagaagggggggcacgatattgaaggagataaagagggagagaagttgaactttgaagtatgtctcacgagactctcattcatcaaagttatgacaagtgttacacatgtttctatttatagcctaggtcactatataaatgacagcttccttgagaagctggagcttaactatacacaccccctctaatagctaagc

SEQ ID NO: 195744 - DNA, 461 bp, Glycine max
  unsure (1)..(461): unsure at all n locations
tagaagagaaagaaaatgtgattagttgtatgactganaatattagtcagtttgtctgattgattgtgaaagaatgcattaaccgtatcccggtgagagcgcgatccttaaattttgagagaaacgactatcatttagtgttgatttttgcatgaatctttgaagtatggactgaatgcatgaaattgaggatgatgaaggccatgtttgattgtgatagccacttagccaaaaagttgaccacgtgcttgaatgatttatcccttgcacccagttntgagctgaatgattgattcattgattaaaccttgagcctatatagttttatctcctactaccttgtcttaggttgtaggagagcatcatccatagaaaatcttggttcaagacaaattangtccacattttggggagactgggtaagaaatanaatgggtcaaatagagcagcatatacacatt

SEQ ID NO: 195745 - DNA, 301 bp, Glycine max
  unsure (1)..(301): unsure at all n locations
gcttcaccggatgatgccgatcgaacattttctaatcgacatcatccaattgttattcagggattgaatagaataaacaatggccagtgtcggtccttatatggccccgactgatatctttcagccgacattgggcaatttcttttacaaatggtggccgataatgttctttntttacgatagaggaagttttttgttttggtgttgcctaaaaaatttacaacttaggtcggctaggtttttccgtgcgagctcanccgagggttcgttccgacggacactgngcatgtgttcttctcat

SEQ ID NO: 195746 - DNA, 361 bp, Glycine max
agctggttagacttaacattgatttgctaatattgaatgatcgagtgataaattattaaatttatatttgttgaacttatgtgcatgatatcaaaggaaaattatttgaacaagaaacctacaacaattcataaaaaataccatggtttaatttacacttaagttctttggaaaattgtttccatgaggatctcccttaatcttgtagaaaataaagctaaatactttctaatgaacgaagcatctgaaacgtcaaggtggcgtaagtgttccacaccctattgaaagaggtaatattttctcattagagatccaggcacaagcttaattacttttgactcatactatttaataactttct

SEQ ID NO: 195747 - DNA, 405 bp, Glycine max
  unsure (1)..(405): unsure at all n locations
aagctcctaatatctcccacactntnntgggtgggccattcttggatggccttgattntctcagggtccacttggaccccatttctaccaactacaaaacctaagaaaactatattatctacacaaaaggtacacttctctatatttgcatagagggtggttttcctaaggactgaaagaacttgtctgagatgtcctaagtgatcatctaggctcctactatacactaaaatatcatcaaaataaacaactacaattctacctatgaaatcccttaagacatgatgcataagcctcataaaggtgcttggtgcattagtgagcccaaaaggcatcactagccattcatacaaaccanacttggtcttngaaagcagtttacactcatcnacccttttatcctga

SEQ ID NO: 195748 - DNA, 446 bp, Glycine max
tgcaagctttacatttaaagcccagaattttacagctacttcatcgtgctcttgtaaatggctgatttccatgcagtgattgaaaatcggatgaaagattttttttctaatcttatgtttgtaatgtgtgagacaaatattacatagtactgttaacaagaaattaccactagggcattgatgttctacactgtaacagcatcatccatcattacattggaatattggatagatcataccttgataatttaaatctgctagagtgaaggccgaatagttccttgtgatttgcctggtaacttggtatatatagttgcatgcattgtctaacacatgacttgaattcaacagatgttaactgtcttagcgggaacttttcttggactccatattgcttccatttcatatgtacctacaaggaggtcttcataatctcataattttca

SEQ ID NO: 195749 - DNA, 417 bp, Glycine max
  unsure (1)..(417): unsure at all n locations
ctcgatgatgttctttaaacgaaaaatgtagttctctttcacgcatctcagagtacaaatctactcctaacctatgttttaaacgttttgtatctaaaagtacccttgtttctctttcgcagtctcttcacccattgacatttcagatcagaatcacatcgtttaggcccaaaatgacgatgccggattcctaccaccatgtcaaatatggtggtgttgatggtgaaggataaagattcaatatttaaagtggcttggtgatgaagcttcgatatttaaaattgggtttgccttattcatcatcagagatgtctcggtggacttgccagagctgttagcaccaacgattcgaggtgcaaagacaatcttgattaatgggtcacaaaggatttagactcngcctggagaatcaaatcg

SEQ ID NO: 195750 - DNA, 344 bp, Glycine max
tcattggaggtaaagatataaactttagattagacgcattataaacgaaaaacaaagaaggaaagggttcatgatattaataaacctgaggaaaaagcacctggttagtacggataaaaagagtagttgtagaaatgagatataaaaagtgagggaagatcatggtagagtaattaactaaaccggccatcacaaatttagatgagagtggtttgaagaatgcagactgtaacaaattattgggacttaatttgaaagaaggaagaaggagacaatcgtcgtctctttgtccactactccacctcagatttttggacatgtctattttgaaactacttagtaac

SEQ ID NO: 195751 - DNA, 179 bp, Glycine max
  unsure (1)..(179): unsure at all n locations
gatgattacacaagatgatgacgaaggagatgacaaaaagctcacagaataacctcatgacagatcctccgaggtaaagatgtccagactacaactattggctacaaaggtcgaaagtctggagatcatagcgacatacttctctatcataagccatcatccattnttcctttgaaaat

SEQ ID NO: 195752 - DNA, 328 bp, Glycine max
aaatttaaaaaatgctcctcacctttttttttatattcgaaaggttaggactttcattagtgaccaatgcaaggagtgagtttaccgatcaaaaaaatttcaccttggaagaaagtaatcctcctcttctgttgtgtctgaacacagatcttttccaattctttacatagagctactccccctgcacagggaaaagctccatttcggggccttatatcattaccagcaaaaggctgaacttgttgtagaaaacgctacttgtttgcactgtgcccgctaattattacatagatcatccgaatttacctttcagacttgaaaaatttat

SEQ ID NO: 195753 - DNA, 431 bp, Glycine max
  unsure (1)..(431): unsure at all n locations
caggtatctttatcctacctcacgccgcgctctaatgacgatatcattatttctggcgctgaactgctcacatttggaacccatcctttctattatactcctggcttcaccacgattgactgtgtgccaaggctccaccactagtagaatctatcatactaccctacatattactgaatccttcctacatatatgggataaactgctgctataacatctgatggcgactggcaacaggatcttgngtttataatatatgcattattcatacccgctatctccactagttgacattacatatatatctttttgatggttgggtctgaaacccgcaaaatcttctagaatatctatcacgtgtccctatagtatggacctgaacaggtgtacaccgtctttgcgtcttaaagatgagagagcctccaacatcc

SEQ ID NO: 195754 - DNA, 419 bp, Glycine max
  unsure (1)..(419): unsure at all n locations
agcttgtgtattgatcgatattgattggttgatgtgatattgtgtttgatccatgagtatgtgaatgatgtgcaaatgtgagacatgtagtgttgagatatgatgtcacgtgataagtggtggaatgacatgagttatgttaatgtaagttgtatttcatttatatgataggtatatctatgttgtctcatttctctctattagttaggaatgtgataactcactccatgtgtgttatttgtgtttggatcatgtgatgatatcgaactttgtgttcatgggagcagatgattcagtggatggctatggagaacctcatgctagaggacgctagaacacaatgctctgataggatgagacatcggaacatanggttctatctanattacatgaagccctagacatattagnttatcatt

SEQ ID NO: 195755 - DNA, 315 bp, Glycine max
  unsure (1)..(315): unsure at all n locations
atgatgataacaaaagatgatgataaaggtgatgacaaaaagctcaaagatcaatcaaagaacaactcaagtgaatcaaagatcaatcaaagaacaactcaagttaatcaagaagaattcaagacttatgaagaaagtttagagtcaagaatcaagattcaaggttcaagatctcnagaatcaagatcaagattcaagaatcaagagaaggctcaatcaagataagtatgagaagtttttctcaaaaattgaatagcacatgatntttctcanaacatgtttaccaaagaggttttactctctggtaatcgatta

SEQ ID NO: 195756 - DNA, 448 bp, Glycine max
  unsure (1)..(448): unsure at all n locations
gcttgaggcttanacgtagtgtttgtgatgatatagagagagggtggtagggtaaagttttcaaaagatgaaaggttaaatgaagttcatgtggggggcgtaataaaataggggacaagttggtcgagttgaattgaccaaaatggggttcttgcatttcatgtgaaactacgagtttgtagtacgttctctcgtgaagccctcttgctagtggaacaatggaacctaattcatatttgattaccgattttgcccctctctgtcaatatcaaactttggcacatgagattgatagagaagggcaacttgaactctctcttttggtcgtagagcttatgggatgaacatcgttctttaaagcaaggtcatgacgtgggttcataagcgttaaccttgatttacaatagcatgttaataacaataacttatccacagaggatacacatat

SEQ ID NO: 195757 - DNA, 175 bp, Glycine max
atgttggaaactaaacctcaatgctgcgctcatccgctataatagttatcacgcgtacaaccattgttaaagtacgaccacttgcttataaaataccccctccttgcactatacatagctgcgttatatactagcctctgcgcatgaacctacacatcagcttagacctaatccc

SEQ ID NO: 195758 - DNA, 459 bp, Glycine max
  unsure (1)..(459): unsure at all n locations
agctatgattcaattcattcaataacaatccattaatcggaattaataaatttcaccaacattctgttataaactcaagtcaatcagggaggcagccccaagcgcagtccatcagtattcgcacaatagacaaattaagcaaaacagtcaatccccttaacccagacttcctttccctatgtgcaagcttactttccccattttaccccttttttcatcattgaaagttcactaaatcttgccaaacattaactcttatatggaatgaggatgagttaatcttagaacttacaatagatgccccanatcatccaaaccctgaatcaattcttgatgtctcggtatacaaatatgatttgtcattcgcagtacagcattccaatgccccttcctttctgatgcctgaatccacaaccttgctcaccaccattccaattttcattanaacactctacaaca

SEQ ID NO: 195759 - DNA, 348 bp, Glycine max
ctacaagttggatgcctcgctatgtggatgcatctcttagccaatctgcctcgctaagcgagtcattaacaacttttaccttctcttctttggcgtgaaattgagttggattcaacattaggtcacaaaaattgagtttctactctataaaatcacacaatagagaaaatatgtacaatctctacaaaaagaaccataaataggaggcatattgctattttcttgcagatatccaataccaaactaactcatggatgatgcaatcctaccccccaagggtattggatagaagactccaagaggcttatgctagagctactaaagaaggccctatggttctcatgaaca

SEQ ID NO: 195760 - DNA, 398 bp, Glycine max
  unsure (1)..(398): unsure at all n locations
atattacatagaaggaanaaaatagagatggatattcaatatatagatagaagagaagaaaacacaatcattttctactttctagtttttctaccaagctagtaaaatggaattgtttcaatccacatctttcatagaaacaaactaaatttgtcactcagtcaatagtaaagaggatacaaagtataatttaattgatgacattgtcatactgttagtccttcaaatgtattattattggtgatcacgcaaacttgttcatcaagtggttccccaacacctcgactatcatcatggagaatacgccttgagtagtaaacattgtgttaatactctggttgcaataaaataatattgaatagcattaataaaagaaagctcgaatacctatgaagcat

SEQ ID NO: 195761 - DNA, 314 bp, Glycine max
  unsure (1)..(314): unsure at all n locations
aaaaatattttttgtgtgcatatagcaagcatctttcaaggaaataatttgggttgaataagaatggtatgcctataagaatttttattacgagtatttaacccatttatatatttaattaaaacttaaacttaattaataattcacgtgacagaatttcgtgttagtctataagaagttattaaataatctaaaatcactacatantcatggtgtcaacttactaatggtggatacaggaacatttggataggattcgaggcattttaattcgaacaatgttggttgtttggaattggtgatcagaattatta

SEQ ID NO: 195762 - DNA, 397 bp, Glycine max
  unsure (1)..(397): unsure at all n locations
ttatagaataaattttgagccaaaacaacaagcacctttccctttcaccttgtttttctggatactcgatttcctgccaacatgtgcgattattcgtattttttccttttatccaaatcacttgtttctttntttataacttttttccagatgtctagaaaattcagtataaatttcagctcaaaattcgaggtaaccaattctcagtaattcttacaagtttgtatgtccaagctgccagcaccagcgatatgtttctttaaacatggtatattgattgccttgggcttactctcaaccttcctatgtatgttgaactcactagtattgttgaccacaagtnttaggtgttcaatattcacttaggatcaacattttagccagcaattcaatcacc

SEQ ID NO: 195763 - DNA, 342 bp, Glycine max
  unsure (1)..(342): unsure at all n locations
gcaacagccttctggaggaaggatctggaaggcccaactgggccagattgttatttgcacccctcctttatactaaatgcaccccccttctatttttttggtaattctttttccgtaacgttacgaaactttacgaatttcgtaatgatacttattttccttcccgcaggttacgaatccttacggattatgtatttactctttgttagcgtttgaagaagttacggaaactcacggattgcgcanaaacacctcttttcgacttccgccacattacggaatttcacggatcgcgcangcctggcttcttttgatttctgagacgtctcaggacttcattta

SEQ ID NO: 195764 - DNA, 293 bp, Glycine max
  unsure (1)..(293): unsure at all n locations
aacttgtttggatgatgagttagcaaggcattgtggaatggttcctgtcaacttgttgagagataagttgagaatctgaatcgctcttgcattgcaaattgaggaagagaatccatcagtgattgagttaaaactaagatcatggttaccaagttgcttgttccacgacaattggtccaatgattggttcaatcggttatgagagaggtccaattcagataacgatatttcatgcaaccaatttggcactttacctttaagtttgttgttggacanagagagcgattccaaac

SEQ ID NO: 195765 - DNA, 297 bp, Glycine max
  unsure (1)..(297): unsure at all n locations
ttaagttattcctcttncaaaaaaatacaagccgttagttgttattatatgattggagaccgcgaagagtttaattgtgactaacctcggactgacaaattatctcgtaattggcttacaagacaaaaagttgtaacgacattatggggtcccacccaatagcccaagacattattattattactattactaagggctgtttttattatgagaaaactgggaaagaaatcttggttggatgcactgatattggtttggaatgttgcgtgcttgcacgatttttgtcagttggaactg

SEQ ID NO: 195766 - DNA, 402 bp, Glycine max
  unsure (1)..(402): unsure at all n locations
agctttgcttctgttcaatatataatgactgtagctaactatgcgtggntaatccgatccgatcatcgatggtcggcaagtatgatggtcttaatgatgatcctacacgtattttcgtgtgtatctcacaggcggttttaaaaaacctcgccaattaacttgggttacgggtgtagttatggctgtattgactgcatcttntggtgtaaccggttattccttaccttgtgatcaaattggatatagngcagtcaaaattgtaacaggcgtacccgacgctattcctgtaatangatcagctttggtaagctattacgcggaagtaccagtgcaggacaatctaccttaactcgttgttataggttgcatacttgttgcatacctcttctactgctgtattat

SEQ ID NO: 195767 - DNA, 418 bp, Glycine max
  unsure (1)..(418): unsure at all n locations
actcagctcttgcccaattcgcttctgatctcgaaaaagctactcaaaattcattatccagaggtccaccattgcgcgagttgcttaaacaattccaatcagcttctcttacccgggaagaaccgataataactatttatactggaaccaatgggtatcttgattccttagaaattggacaggtaaggaaatttcttggtgagttacgtgcctacttaaacaccaataaacctcaactccaagaaatcatatcttctaccaagacattcactggggaagcagaagtcctttttgaggaagctattcaagaacagatggaactctttttactacaggaacaggtagaaaaaagatgattaatcatttaataactttataattcactctcaattcttataatangnatcttttaatatct

SEQ ID NO: 195768 - DNA, 453 bp, Glycine max
  unsure (1)..(453): unsure at all n locations
atccttaagtcacctgcggctgcagcttttatccaggcaattcttggtggtgatgctccttcttctttggcttattccctagtggatggtgccttccctctcctcttctcctttgccttccactgcatctccatgatgtaaaatcaccattggaggacctcattgaagctcaaagatccagcctccatagaagctccacaagcaagctttcatcaaaaggagactgtaatagtctttataacaatgaaagtagaagaccatgaatgtctctgcatgccaacggactcgcttgtctctggaaggcanagaagactgtaatagtcttgataacaatgaaagtggatgaccactgatgtctcctcatgccaacggactcgcttgtctctagaagggcagggaaactgcaatagtcttgaaaacaacaacaacggaagaccatgattatctccgcat

SEQ ID NO: 195769 - DNA, 287 bp, Glycine max
  unsure (1)..(287): unsure at all n locations
cgaggtacttacccgttgaagatcgaagaacgatgaagaacgaatgaagaacgtcgaagaacggttgaaacctttgcaaaattcttcacggaaaacgttacagaaacgtttcggaagcgcctcgacttagattttcttcacggaaacaatttttccaagcaaatttgaaagagagagaagtgcctaaggggctgaacccttttcttcttcacttcctcccctatntatagcaaaataggggaggtgcttgccgccagctcgcccangcgagcttagctcgcccaggc

SEQ ID NO: 195770 - DNA, 449 bp, Glycine max
  unsure (1)..(449): unsure at all n locations
agcttattntcttatatgtgatgaaattttggtcaatgaatttctctttgttctttgagcacatacttgattatcgnggaattaatctcatcgcttctatgtcatgtactacgaaatcaatgcgaaatattgtgagaagagaatcaaccttgacgtatgaatgtactataaaaatatgtcttcttgaatgggataaggctacacctttaatgaaaaaatgagattttcatgcttcgaaaaactttgtgagtgacacagaatcattagttagatggatcacagttggatacaagttgcatgagccctacgtatgaggaatgcgtggaacactttctgaaatatgccaccgatagaagtcgatcggatgaggatggaacatatttnttgctctgtatacactcgttgaatgggagacaatcactacttgatgacatacgagaacatctact

SEQ ID NO: 195771 - DNA, 471 bp, Glycine max
  unsure (1)..(471): unsure at all n locations
ccttgagctagcgtatactagtgccaaagaatggtatgggaggatagctgcatttagctgatgctgcatagcgctggatttatgctgcattgcttgggaaaacattggtgagattatttggcttgatgtgcttgagggaaataaactgaagctctcattgttattggtactccagtttagattgcttttattaaaactctctaatgtctttccctattttaaaagaaaaaataattcctgatttttaatattactttattagtttatttgtgacatagcctcatagctcgaataattaatggaatttataaatgctcatcttattaaaatacagcctacatattcagatattattaattgttagtaactnttacatgaaccctattggctattatttaaattgacgcttctttttaattttataaagtgatatcatacctccttctttcatgaatgtgtatttttatatat

SEQ ID NO: 195772 - DNA, 348 bp, Glycine max
  unsure (1)..(348): unsure at all n locations
agcttagcagaggatanggttatacccttatcttatgaccggcggtagggcttgttcccgaacacgacccaatctcctacttgataatgcatctctgcgatgtttgtgatctggttgtttcttcatgaggacctgggctctgagcagcttcttgtgaatagcttgaaaggatgcatctctgtcaatcaagaggctctcgacagcttcgatatttgatgtgctggagatatactcacggaaattgaatggttctcggcaaatgtcacctcgtagggagttgtacccgttcccgcgttccacgaggtgttgtgtgaccattctatccatcggatgaacttgccccaccta

SEQ ID NO: 195773 - DNA, 341 bp, Glycine max
  unsure (1)..(341): unsure at all n locations
cagcagccaatccttgaagcttcctgtttctccctgtgaaataaaagaaagagagaaattaaacctaatnttggtcacgtaaggaaaagtangacaaacttacctaatgcaaaatggcaaggtaaaggtgtgccacatctcttcaatgtggtcatttcatcatctgttagtttacgattcacaccatatggaagaaggcaaaagggcttactataaccatgaataacagcaggcagaagatcagcatcaacaggcaaaggatcacactcccaccaatcaatatatcgaggcccaagccctgttagcaaacagtctgtatcttctgcaagctctgcttcatc

SEQ ID NO: 195774 - DNA, 339 bp, Glycine max
  unsure (1)..(339): unsure at all n locations
agctagcaacaaacataatgtcttgtcttgttgctgacagatacaacaaactaccaattatacttctataaacaaaatcatccgctttatcaataccatcgttcattgataacctttcattcacaacaattggagaggccacacgcttgcattgctccatgcaaaacttcaatatcaccaaagcatatttcttttgtgaaatgaagatcccgtcattacattgagaaatctccattctaagaaaatacttaatttcacccaagtcaaccatttcanattcgttgtccatgtcccttatttcacctaagtcagtcattttcccacttcttcacgtaccag

SEQ ID NO: 195775 - DNA, 328 bp, Glycine max
tggttaccccatgttgaatttgcttacaatatagctgttcatagcaccactaattggtctccttttgaagatgtttattggtttaacccactaactcctcttgatcttttgcctaatgtttctgtttttaagcataaagaaggtcaagcaaatgcggactatgtgaagaagcttcatgagagagtcaaagatcaaattgagaggaaaagtataagctatgctaaacaagccaacaaagggagaaagaaggttgtcttcgaacccggagattgcgtgtgggtgcacatgagaaaaaaaaggtttccggaacagaggaaatcatagcttc

SEQ ID NO: 195776 - DNA, 449 bp, Glycine max
  unsure (1)..(449): unsure at all n locations
agctagttggattatggcgcacccgtcatatgtggtactaggtggcgatcgggcgatggcgcanatcaactctcccacttccacaaatcatacatgaacccaccatccgcagttgcccaccttcaactgagctcacgtactcctacgtagcccttatcctcgttcctctcagcaccgggtccccattaaccactccaagcttccacaatatccaagcaattcaattccaattaccatgaactaccctaaaccaagagaacagggcagaggcagagaactctgcccaaacacattacacattacagtttccttactcatatatcccagaacatttcttcgtttcattcgtaaccatgaatcaactgaaatttactggaggtctagtcataagctacatttgaccgttggatctctagaaatgctagaccaatatgtactaccttccatac

SEQ ID NO: 195777 - DNA, 1352 bp, Glycine max
  unsure (1)..(1352): unsure at all n locations
tatcagtgaagccgcgaacaacacanaccgcgagaacacagacctaccaacatcagcacccnaagaagcgccaattgtgagattgcggagatccggctagccacgtcgaccctcgcgcgatagatcatctctagggtacaacanatattccccgccncncnccntncatcancaaccaatacacgcctcatgggacgcacaagacgggatatacagctattcaggaggacggaggcgagcccacccacgctacaaagcggcgcggaaataataattataacgncnaccnaacgaccgcaccccgcccaacacaacacaaataatgcgcaaggggacatgcgcgaaggcatagaagaaaacagacgcgacggccgacacagcaaggccagcgacatatcagaatccgcaccaacaacaaaaggacagcggacgcgacagcacaacccacgcgaaaccgaggccaacaacgacacaccctgaacgccaatgctcacaatacaagaaacaccagcgcaacgcaccccacacgagaacagaaacggcacacagaacaggtgtgccaaggcgacccgcacacgaggcgcgggcacacagaaacgcacagagcgagggcacaacacaaacacacccaccagcacacaactggcgcgcccccgacacgactaacacaacatacaagccactaccgcacaccgcgcgagagatatgcacaccgcgacacacaccagagcacgcgaagcggcaacccgtcaacggcccgcgacagagagagagaaccgcgcaacacggacggacacacggacacagcaacactcccccacgaaagatcaaccagccatcgcacacgacgacaacacggcgaaatcatcaaaacgcagaccaagggaacacacaagcggagcgagcagcacccacacacggcgagcggcagaagcaacaacaacccgccactagaacggagagggcccgagcaacgaacgacgacatacactcaccaccgcctccgaagcaagaacaaaacacaagcaacaccgacggcaaccaagaacgacgccacatgcacacccacgagcgcacaaatatacaagcacacgcgacccgagaggaacgccacccctaacaagcaaggcagggcgcaaccgaacgagggacatccacagcacagagaacaccgccatcgcaaaagaaaacacaaagcacaaggctcacccaccaaaacccaaaccacagaaacaaaacaggaaacggacatcaacgcacctacaaacaaatcacgcaacacgtaccagaaacccgccaagcacaacacgccgacgcaagcaacgtagcaacaacagacaaaccacacaacc

SEQ ID NO: 195778 - DNA, 98 bp, Glycine max
  unsure (1)..(98): unsure at all n locations
ttacccgacactatanaatatctaataccttaaacaatgtatcctcttcttcaccccctggatttaccgctgcccatttagatatattggaatttctt

SEQ ID NO: 195779 - DNA, 1013 bp, Glycine max
  unsure (1)..(1013): unsure at all n locations
tcctccactgtacagggcggaaacacaacacnccaccgaggaaggccncttgaattgaagacgttcgcgcacccggggtaccctgaaaacgtccgcagcccccccacccccactcccagaatgaaaaaataggggcggccaagggcgaacaaaaaaggagggccccccgccgccagtttttcctttttttttaacccaacacccccaacacacaacgccatgcgaacgcaaaaaaaacacacagcccgcgggcccgcaccgcagaaaagataacggcaaccacattcccgggagggaaataatccgcgacaagaagataaaccacaggcctcccaaccaaacatctcattccgcgacctccaaccacataactccggaaccatcgaccgcgggatggaacccccaacacccacagccgcccccagaccccccggaagacaccccacggagccgccaccacaaatgcaaaagaaaccccaccagaccccgccccagctcaccttcacgaaaccccccaacgaaacaaccggcaacccacccagcaataagagccaaccccgcgccgccaccggacaggggtaacaacacacgaaaccgccccccccgacccactcacaacacaacccagcactcaccggcgacaacacaaaagagacccacctcagagagcggcgacacccaccgggtaacacaaaacaaaacccccgcgacctacaaacgggggcgacaaccgcacccgaccgctccgccaccagccacaaccacacgacgcacaacgcgcccgacgggacgcccccaacacccaaccgccaacgctgccgcggggaacaaagcctaagacatagcacccctttcacccggcggcgccccaccagtcgccgcacccacaagccgcccaccctcacgccacacagggcgagccaacgcgaccgcccccaccctaggacaaccatcgcaacagaaaccaaaacctacccaacaacagccaccccgcccggacagagtaccaaccc

SEQ ID NO: 195780 - DNA, 240 bp, Glycine max
tgcagcgacatcggaactcgatgtacgaaaagtctccatgtgggtgttggatcaagtggcctcagaataattaagaaagggggttgaattaattattaatgtaccttgactaattaaaaaatatccttcttaatggtactaaaattaattaagcttttactacttaatttaaaaagttaagaatataaaaagaaactttacccaaagttaaaaccaatatttaagtgcctatcggaaatt

SEQ ID NO: 195781 - DNA, 903 bp, Glycine max
acgcacgcattaacattgcgaaacaagcaactcccacaccccgagacgcatgaaatcgactcctacccggggaccccagagtcagcagaagtccgcaagcctgttaaacgaataaaaatgaggccacgcatatgctgcccccaacaactaaaccagtttggaatgagagggtttctatattttaatggggttcacaaacccaataacaatgcggacgatggggaaaaacaaatgggaaaaaaaagagatgttaacagcaattttgttaaccccccaactataaacggatttccgataaccactcttaaaaacaaaacccaaactaatggccgaaaagatgagaaaacacaatcttttttaactaacgagggcgttaccacacgaaatcgggaaccccaacaaatgaaaagaaaaggacaagaggtaaacgggactcccgaggacccaaaaaaaaatactttaaaaaaacccggaatcccttttaaaaaaccaattcccaatgcacagatacccccacaattcttctctgccacagaaccccaataaacaaatcccccttcaaacattaatcaaaaacacggggccggagaaacaaaaaaacaaccatcgggccctccacgatacaagcacgacacaaacaaacccaccagaatactccagggacaaacaaaactctaacttagaacaccaaaaagcggaacggagtcccctaaaaccagagaaatcacaccccccaccaaagaacctcccccaaagacgagggagccaatgttgcacccgacaagccccgacaagcaggcaccccaacaaggggcaaaaagagggcaaacttctggcaaaacgaaacggggcaccaataacgccaactcgaaaacccgacaaacacccccccaccgaaattcc

SEQ ID NO: 195782 - DNA, 287 bp, Glycine max
tgataatttttcccgagctcatggtctcaggcaaaggggattccctttccccttacctgtttgttcttagcatggagaggttggctttaaagatcaatgagctaagggagaatggtgtctagactcctatttccttatccagcacatatgttctttgaaaataatgttcttttgttctgcaaaagctaaagtggtggattctacttctactcttgctcaatatggtattgcttttggtctgagagttaatctcaaggagtccaaattgattaatttgctctaggggt

SEQ ID NO: 195783 - DNA, 395 bp, Glycine max
gctttgagggtgcgtaacccaccatcttttcatagtagagtatcgataatgtgtctaccatcacgatcatcgtttttcctttccatcattgggggtaccacctgggccgccagatccctccaccttttgggcgtgttctttgaaagatccgtccccctttttgcaaatgttctgtagttgcatcctatccggaaccatatcaaaattgtactgatactgcctaacaaaggcaaccattaggtccttccaagaatggactcgggaagattccaagttagtgtaccaggtaacagctaccccagtaagactttcttggaaggaatgtattagcaattcctcatcttttgcgtattcccccatcttctgacaatacatctttaaatggttcttgggac

SEQ ID NO: 195784 - DNA, 287 bp, Glycine max
tctcccccaattttctataaatatggggagaagtgaagtggaaaagggttcagccccttaggcacttctctctctttcgaatttgcttagaaaaattgttttcgtgaagaaaatccaagccgaggcgtttccgtaacgtttccgggagtgatttcgcgaaggttttcgaccgttcttcgacgttcttcattcgttcttcatcgttcttcggtcttcaacgggtaagtacctcgaaccaagctttccgattcattctatgtacccgtggtggttcacattgtgtttcg

SEQ ID NO: 195785 - DNA, 489 bp, Glycine max
agctttataatgggctttctcttcattgctactagtatcaataatagtagtaggtttctcttccaatatagtaagatcaagatccaaaacaccgagatgaaattggatttgctcattccaataagagaagttaaacccattaaaaatttacacagatgatacatgagaattcagtgaattgggaacaggtactgtataataaaattcaaataagcattttgagatataaaacacatgtcatacatataattcatttagataataattaatgtacattgttgttctcctttgggtgatacaccagcataacatacaaatatgacgatgctaataaaactcttaacattatttgacaattaaatatgtaccaattaatggtacctattacctttgagtatataaataaaactaataatacatagaaatcacctaaaattatattcattaattttaagaacaactaatccacctttgggtgatccataaata

SEQ ID NO: 195786 - DNA, 290 bp, Glycine max
taggaaaaattgcaagagatgatcaaaagttgtcctcaccatggcttttctcaacaaaggttggttgatattttctatggtggaatgtcctcacataataggacaagtttagatgttgcttgttatggcaatctcatgttaaagcccttacatatatcatcaaaatcattgaagacatgtgttctaacccctacaataacttaagggataggacgattacgaagagaggtgtcaactaggtgcagaaagatgaatccataactaaattatgaaagcagatgcaagctcta

SEQ ID NO: 195787 - DNA, 429 bp, Glycine max
agcttccactccagttcccattcgagtacctaacgggtgtgattttcaaacgttaaaaaccagaatatataatacccttaagctaaccgacaaacaatttttggatgaaatttactaacgacagcctttcacgtatgcaggtaatcaatttcggtttaaatgtatgcaactgaaagatgatgctgatgttaacacaatgttaatgtgtaatcatgaatttttgtttgttgatccgattgagtttttatgtagcattgctagaaccccagatggcattttaaatttacttgaatctattatgaaccctactcatgatgccctgctttattacaatgggaggtggaacatgtcacgccaaaatgagtttggtggttactcattcgtaggaaaaaatcccaaaaactttgacattcccactggatgtaccat

SEQ ID NO: 195788 - DNA, 280 bp, Glycine max
ttatgttttccctcccgtggatgtagccttgatcaaaggtgaaccatgtaaatctgtgtgttctttctcttttttcttctctttcaccttgctgcacaattatgtgtgtatgacatttctattctgttgcatctcctgctgctgttcttgtttgttcttcatcacttccacaacaaactggtatcaagagctcaagttgcgatcaagggaattcaagattcttgtctgaatacaaagatcaagctatgggagtcttgtttctggttcttccactgcttca

SEQ ID NO: 195789 - DNA, 587 bp, Glycine max
agcttctcccccaattttctataaatagggggagaagtgaagtgaaaaagggttcagccccttaggcacttctctctctttcgaatttgcttggaaaaatcgtttccgtgaagaaaatccaagccgaggcgcttccgaaacatttccgtaacatttccgtgaggaatttcgcgaaggtttcgacagttcttcgacgttcttcattcgttcttcatcattcttcgatcttcaacgggttagtacctcgaaccaagcttttcgattcattctatgtacccgtggtggtccacattgtgtttcgtgtatttttattctcgtttcatttactttttatacccttttttgacgtgcttaagccattttatttaagtcatttctcgcttaaccttaaaataaaataaatttccaccgatcgtttaaattgtattatccggtaacttcgtttaaaacaaaatctaaccggtcaatcgtgccgtaaccacgttggaaattcaaaaaagaaggtaaataataatataataatcaaaaaaatattttttatttaaataaagcgaaaaatcaatccggccttttctctttgggaattc

SEQ ID NO: 195790 - DNA, 475 bp, Glycine max
  unsure (1)..(475): unsure at all n locations
atcctctaagacacccgcggcatgcaagcttcggctaaattagtctaaacttttgtaagctatttaagctaagtctagtccaacaagagggattcttatagactaagcttagtttaagttagtctaaacctaagagggttgtctaaattaagcctagtccaacaagaaggatatgaggatgaagcttggattgattcattctaactagggatcgaggtttaataatttaggctagaacctagaaaacaaaagcatgattgattagagaaacatctttatatacatcagctggtttgttagaaagacccaacatctttacgtactgttgtcaatcttacttacttgcatttttactgtttttagcgtagacttagtttaattctattctaaatcatcaattatcaatgtttctttcaacaatgccttatttatgaatntaaccctgtctaagactaattccctgagttccatactc

SEQ ID NO: 195791 - DNA, 284 bp, Glycine max
tcttatccaaggctcatcttggtggtgaagttccttcttccatggcttattccctagtggatggcgcctcctctcacctcttctcctttgtcttccactgcatctccatggtggaaaatcaccattaaaggacctcattgaagctcaaagatccagcctccatagaagcttcacaagcaagcttccatcaagtggtaatcagagcacaagagctttaagtaggtgctccttaaacctccattaatcttttactttaccttctcttccattgttgtttcttcatt

SEQ ID NO: 195792 - DNA, 408 bp, Glycine max
agcttgctctaaatttacattgatgtttgtatttatgggaggaggttgtatgccattttttttaattgtgtcccactggtaaaactaactttccaaatgtttgccttcgcaggaaatggccccgaggaagcttgcctcaaagaagtccaggaaagacaaggcagccgaaggaactaattccgctccggagtatgacagtcaccgctttaagagcgctgtacaccagcagcgcttcgaggccatcaagggatggtcgtttctccgggagcgacgcgttcagctcagggacgacaagtatactgatttccaggaggaaatagggcgccgacgggggacatcactggttacttccatggccaagtttgatccagaaaaaatccctgagttttatgccaatgcttggccaac

SEQ ID NO: 195793 - DNA, 283 bp, Glycine max
tttgcaaggtgaaatcatttatcctatctccgacagccaatgggtgagtcccgtccaggtagtcccgaagaagaccggcctcacagtgatcagaaatgagaaggaggagttgattcctactcgggtgcagaacagttggagagtctgcattgactataggaggctgaaccaggttaccaaaaaggaccattttcccctgccattcattgaccagatgcttgaacgcctggcaggtaaatcccactactatttccttgatggtttttttggttatatgcaaatt

SEQ ID NO: 195794 - DNA, 731 bp, Glycine max
  unsure (1)..(731): unsure at all n locations
agctttcttagtacaaaatgcatattctttttgtgattggtatttgaatataattcattgtatacatacctgaattggagtagtatcttagtagttttttgggtgaacattagaagtaaatgtatggataggtcatacacagaggacttaagttctgtttttttttttgtatatgttttgtgttgatgtaattatctctcattgcacaactagtacatgtatatgtatcatttttttctaaatacatatcaatttgctataaaaaggtttgtttttaataagcaaaaatgaaagctatgctctaacccaaatacacaatccacatatttgctactttacaaagtgaaaaatgtattattttggataaattttgtgttttgataaaaacaaattcatggtttagaaaaaaaactattagctcatttatgatccttaaaatatgtattaattattcctttactagagaagggtattcagggcttttgtgcaaatggaaacctcttatcattantttgttgtggaaatggctatgccctcattaatttttgtggaaaaaaaagatatgggaagagttttttattcaagatgaggtttaatggtctatatggttatgcctggactttatgcctaaaaaggtgaaaggaacaattgctttttagtggattcaaaagattgaaaaatttaaaatttattgggcgaatttccccttttgggatttctaaaaatttccc

SEQ ID NO: 195795 - DNA, 287 bp, Glycine max
ttgagccaaaatcctgattcaccataaaccttgacccagggtgagaatgtcaatccttaccctcggaagcaaaaaaagaatagaggggaaatttccaatcaaagaaaaagagaaggaaaatttccaatgaaagcaaaaaaagaaaagaaggaaaattccccaatcaaagagtgggagaaagcaaaaaaagaaaagaaggaaaattccccaatcaaagagtgggagaaagcaaaaagaaaagaaaggaaaattcccaatcaaagaatgggagaaagtaaaaaaggaag

SEQ ID NO: 195796 - DNA, 350 bp, Glycine max
tcaatttcgaccatcacgatatattacccgactcatccggacatccatgtataaagttattgtcaattcaattttctcagagcttcggatcagaattttgagcgtctccatatattacgggactcattcagacattcgaataaaaaggtattgtcgtaagaatttgataccaacttccgttttcaatttggaaaatctctcgataaaatgcaacactctgtcgggcatccgagtaaaaagttattgttgtatgaattttctaagaagtttcgttttcaatttggaacgtctttatatattacgggactcaaccggacatccgtgtataaaggtattggcattacaatttg

SEQ ID NO: 195797 - DNA, 199 bp, Glycine max
aagatatttaattattaggtaattggggtattgcccggatggttggagttagaaaaggatatatataatgattgtatttgggagtgagagagtggagttatgtgaaatgaatttgaagaattgaaagaaggggattattggtaaagatttttggggtgggatagaaggaatgttaatggaagcattttggagggaagga

SEQ ID NO: 195798 - DNA, 354 bp, Glycine max
tttttaaacagaccaaaagattattatggtgttgtgaatctgcatcccaattggcgtaaatatttatataaccaccttgcctgagtactaaaattctaaaactatcctactacaagggactggatcctaacttgaaaatatcaaataccaatctcttgagtaggaagggaaaaaaggcattttttatttatttgccaaatcaatggtgattggtaatttattagatactgtttgggagaaaatttcagacttataacattttcctctctcggtttttctttcaaccaccatgtaaatcttataattactactaaaaagggcatattataagcccccgccttaaaaaaaaaaaac

SEQ ID NO: 195799 - DNA, 282 bp, Glycine max
tacttaagcttggaacatatttactgaattctagctccttttaaggacctagttagaatatctggcgactggtcattggagttaataaactcatgttaatctccttggacaataatttctcaccaatgaaataacaatcaatctttatgtgtttaaatcctcttatgaaaaaccggatttgaggcaatgtgaacagtataaacttaatttgctcaaattcacaaaattccaatttttggagaaattggttaatccacataagttcacatgtagccatagcca

SEQ ID NO: 195800 - DNA, 1226 bp, Glycine max
  unsure (1)..(1226): unsure at all n locations
gtcgacggacctcgancagcccactncacgcccccncctccagcccgcggncantttgaanccgttggtcgaaccaaccgacccgcgaaccagaacaacacggaaaaaaacccccgcgccccaaacttcgggaccatccgctggaccggctcaagcaagcccacagaaggggcgcgaccgccaggggggaatttttggatgcaactcaaacccccccaccagccgaggaagccaaaaatggcgaggcgcgccccacaaaaactgcacaggaaccacaacacaaccacacaccccgcagcaacaaaagcgaaacggcgcgcggcggaaacccggcgaccaaacacaacaccgagaaacccagcggccaagaaagccccacgcacagaagaggagcggcgacgccaacgagtaggagaggcaccgtgacagagaccgacacgccgagagcagggaaaccctccgccaagaagggcgacgacggtccaaacgggacgaagcaacaaagacaacaaggggagggagcccgaacaaagcacacgacgcaggggaccaaggacacaaccgggccccccacacacaggcacacaaaggcaaacagcccgcacactgaggcacgcgccttaacgggacacacaaagccagccacgcaaggagcacgccccagctaaccccggcgaccagagacacacgacgagagacccacacaccgacaagagcgccgaccacccaagacaatacacgacacaaggcgtaccaccagccgcagggtgagagcgcgccctccaaggccgcacaagcccgagaagctcgtacaagggagaagacacggcgcaacgggcccgccacaggcnaaatacgcgggcccgccgagacgcaatactcaaccgacgcaccgagcccgcggcaggacgacacgcagtgaggacgccgcacgcgcgccactgccacccgcgcaacgaaaacgcccaacacagagcgcgacgactcagcacatcgcgccgacctacgtgcggataccgccacagcagtaatcccggcgcgcggccgcacgcgnatacacggctcgcgacggacctagaccacgcatgcgacaacacgagaagaccgcgaacgaacacaagcgcgcgncncngccatacgcgatactgtgatagacaggctctcgcacgctgacagtctancacgtcgacagctcgtacgnatcgcacacgcgatcaacacgccgn

SEQ ID NO: 195801 - DNA, 277 bp, Glycine max
cttacgccctcgtaacggattacagaattaggacggatttactttttcgctttttggttttagaatacccgggtcagcaaaaaatgatatgacacaaaattttgatttataattacctgataatttccgtacaggggaaaccttgtggcccggggcttatccaaattccaaatttgtgggggttttgcattcatctttccgattgtgtctgttggttttttcccgtaggaagcgttcatattatagaaatgtttgtagatttaattattagcgccaa

SEQ ID NO: 195802 - DNA, 408 bp, Glycine max
agcttggtcataattataaaaagatagatgcttgtccaaaacactgcatgttgtatttgggagatgatgaaaaaagtttggatgcttgtaagcattgtggtacatctaaatggaaaccccacaagaagaagaaaatagctgcaaaggttttacgctactttccattgaaaccaagattgcaaagattgttcacatgtcgtaagactacaaaagatatgagatggcatgttttggaagacaataaagatgggttgttaaagcatccaagagatggagagacatggaagacatttgatttaatccatcctgagttttcttcaaatcctcgaaatgttcgtttaagccttgctactgatggttttaatcctgctaggaccttgagttctacctatagcatctggccagttt

SEQ ID NO: 195803 - DNA, 287 bp, Glycine max
ttgtgctaatatgttctattgacactctttgtttctgaacttcttctttcacggcaaagtacttcaattccatatgcttagcacccgtagagtacttgtcgttcttagaaaagaatattgttgcggagttatcacaatacattttcagcggcctagcaatactgtcgacaattccaagccctgaaataaagtttcgcagccaattagcctgaattgtagcctcaaaacatgctacaaattcatcttccatggtggatgcagcaacaactgattgttttgcactcttc

SEQ ID NO: 195804 - DNA, 360 bp, Glycine max
agcttcagcctgatcgctaagcgacaacttatccttggctaagcgtgacctattgtcgccaagcgcaattccttactgccacaattgaggtccatgaagctaagcgctgtcatgacagctaagcgagattcattacggcaatatgagcgctaagcgagtccctctcaactaagcgcatgctcctttgtacttaggatgcatcattttagctaaactgggcaaagcctggcttaacgagagttgcagcttttctaatctacagacctcgctaagcgaacttactctcgtgctaagccaagtctctgttaaaaaaaaacctgattttgaatttgaaacgtcggctaagtgcacgggtccgct

SEQ ID NO: 195805 - DNA, 256 bp, Glycine max
  unsure (1)..(256): unsure at all n locations
ttgcttctacacagtgtacttgatggtgcccatgtttcatatgttggatgttgtgtatgttcgtgggggggggggtgcattgaccttgtcagatgttcctggtgggggaaaatagagtggttaaagagttttaagcatctctagaggggatggcttangatctttaattcatccatggttagtgtacttgatggtgcccacgtttcatacgttgtatgtttatggggggggggtgcattgaccttgtaatatgtcc

SEQ ID NO: 195806 - DNA, 391 bp, Glycine max
agcttctattgaaatgccacaatcatataaggcacttaacttaagcaacaacacacataaactttcttattcttaaaactttttttttttattttagcagtttttactttcttgatacaaaatttatgtggttgttgcatgtcttaccataatcatcattacctaataccttcccccaaatttggaacaaatttgccttgaaccacaatgctctcctacaacctaaagaaaggtagatggagattataattcaacaggtttagggttcaactcaatcaatcagattcaagctcaaaatgggtgcaatggattcatcattcatgaacagggtaagctatttggctaaatggctaattcaatcaatcatggccttcatcatttccaaatcatg

SEQ ID NO: 195807 - DNA, 287 bp, Glycine max
tatcattggctcgttaccccctattaatttggaaaattacccacttggagtcacttattacctttattttcttggcccctagctcctcgactattcacactcctgcaatgcaagcttcatactctgcatggttgttggttgttggaaaggaaaaatttaaggcttgcttgactattaagccatatgaagattccaataagacatagctccacttcttttctcgtgggaagacccgtctacaactatcatccatacttgatctctttttgggtactccaagatcagct

SEQ ID NO: 195808 - DNA, 594 bp, Glycine max
agcttaagccttttatacatgcttagtaaggatcaaagatgttaaaaaaatggattgatctctaagtttctaaaaagcaatgagttcaacacactataattgattacaaagttttgttatcaatcacaaagtgttagaacaaacaacaaatctctcttctacttgaaatttttggcaagttttgacaaattaatcgattacttgtttcaataatcgatcatagaagtcagtttcaaaagaagaaagactttgtagcttaagctaatcgattaccttttattgtaatcgattaaattgtatctagaaataatcaaagttagtttcaaaagaagaaagactttgtagcttaagaagttctctacatgatgaaataatcaattaccacacctgataatcgattattccagaaaatacagaagcatgagaagctctttatttgaaacaagataatagattatcatttcctataatcgaatacaagatttatgaaaatgcataacaaaaaggattttgacgtattaatcgattaccataatctataattagttaaaattggtttacccatcaaaattataaatacccttttatcttatt

SEQ ID NO: 195809 - DNA, 279 bp, Glycine max
taacgcttgtatcatgtattaaaattcagtctgtttatctttctgctttctgggtttaaaaaagccaggggtaggggaaaaaaatgattttgaccccaaaattttgatttataattacctgataatagctgacaagggaaaacatgtggcccgtggctgatcaaaatcaaaattgccaaaggtttggaaacaatcctcccatggtcaagggtgccttttgctgtaaccccccttaattacccccaattggttaaaaaaatttcccattttttttattac

SEQ ID NO: 195810 - DNA, 507 bp, Glycine max
  unsure (1)..(507): unsure at all n locations
agctagtaatacattaattgataaaataaaactttggcatttgagattaggtcatgttagtgaacggggattacatgaaattgagaaataaaatctgttaggtggcgataaactagataaacttgaattttgtgatcattgtgtgcttggtaaatcacatagaataagctttggcactggtattcatgttttatctaggccttttgagtatgtgcattttgatttatagggaccatttagagtgaaaattcatggtggaagctcatactttctcaccatcatagatgatttctcaagaagagtatgtctgtatgttttgaaaaataaatcagaagcttttcaaatattcagagagtggaaaactcttattggaaatcaacttggtacaaaactaaaaattttaaggactgacaatggcctgtagtttgtttcaaagcaattcaatgagttttgcaggaaagtaagtatcanaaggcccaaaacaatcccttacacaccacaacaaaa

SEQ ID NO: 195811 - DNA, 282 bp, Glycine max
tagtcattataattaaagtttctcatttcatttcaagaatgtgttttgtggaaaaattttatttattttataattattgtaattaattgttaaaatactaaaaaaaagtgtttaattatttatatttgttattatttgtttaacaattataattataatttgaatactattataatataatttctttattataaatcattttatttgataattattcattctcattccttcttattggtttcatattgttcaataatatataatatactcttatataaaaaa

SEQ ID NO: 195812 - DNA, 395 bp, Glycine max
agcttaatgcaaactatttctataagaagatgggtttggccccttcatcatttgattcacacttaaattcttcgcttaggattgttacgatttttgttaataaatctctgcttttatgaacaaaaatatataaagttggtttacgagataaagacaaagtttttaatggctttgtataaattatagatgtcgcatgggaattttttaggaaaagggaaattggagctgcaaacctcaactaaccacgatgagtaaagtcgccaccataacaagctagaaccaaatatcaagtgaaaaattgtgaaaaatcaccaaagagaaaatgcgccttgctacaatgaatcctcaatttgagaccaagaacatgatcataaactcactatagtgaatgaatc

SEQ ID NO: 195813 - DNA, 284 bp, Glycine max
tctagccaaatggacttaccttgaattaattcctttgatagcccttttgagccttgtttccctttccttgttttgaagctcactacaagccttaagtgaaaaaccatgatattaccatatccttaaggaattttggagctttggaattgttttgggaataagtgtggggggtttttgtttcattggacaacttgttttgttggctatgcttcatgatgtattttgggccatacttgatgtacattgtatattggttaaatgttggacatgctgaatgaaatgtt

SEQ ID NO: 195814 - DNA, 408 bp, Glycine max
agcttcaccttctggtcctcctcatagttgtggcatgagaaaacatgctctattttcatctcccactttatgtggcctccggatcattctttcctttaaatggaggaatgttgagtttaataccatcaattcggttttgtctaggaacaccatcattccctcttctcctcctttcttcttcattatgatctctattctccatttgatccaacctctcgtggagcgcatcatctcgttgtttcattaacctctccatatgttgcatcaaagcttgcatttggaattgcgaaagccccactccatcattaggattagtacctgacatctcaaacaaacaaatcaaacgtaacacgacaattatagttgctgtttgaatacctcacccactcaagtgtatcacacaattat

SEQ ID NO: 195815 - DNA, 284 bp, Glycine max
tctgttatgaatttcgagtgtctcgatatactacgggacacaatcggacatccgagtaaaaagttattgacatttgaatttgctcatagcattcgttgtcaattacgagcgtctagatatattaaaggattcattcggacatccgagtaaaaagttattatctttttattttgctcagagcttctgttttcaatttcgagcatctcgatatattacaggactcaatcggatatccgagtcaaaagttattgtcgtttggatttgctacgagcttccggtttcaa

SEQ ID NO: 195816 - DNA, 427 bp, Glycine max
agcttgaggcacttgccttttaacctagtgtcccaaaagtggccttacccaaggatcttgttttccatacattatgaaaattggcacattgattttttgacatctaaatggaaaattaacttaaatagtattagttatcattttttgaatttactttcagaaaccaaacttcagactgaaaattcactagcatgttatgtcagagaacacttgttgcatctgatccccacatccttataagaaataacttaagattttcacatcccttacgatatattttgctaagtttcagaacctcacacacaaataaatgtagcagtagattcaagattatagcgtgcccccatagtaatacaaagaaaatcaaataacatataacttgtgtacctgatacaaagattgagtcatttgttttattttatagatg

SEQ ID NO: 195817 - DNA, 283 bp, Glycine max
ttaaaatttgaattaaaacgttcagaaactgctggtaatcgattaccatatatgtgtaatcgattacaccgtgcaaattttgaattcaaattttaatagctgttgtaaaacatttttggccactggttatagattaccaaatagttaataacttgggaagataactttttaacttaaatatcttggacaaacctttagctaaatcaattggaaaacgcttcgaatataatatacccttgctaagactctagagactgtcttgatcatccatattgaatatgct

SEQ ID NO: 195818 - DNA, 438 bp, Glycine max
agcttgcagagttatgtctcgtattagtttaatcgattacagccttatcgtaattgattacacagtttttgtgagataatgactaatttattcaggagtctctgctttaatcgattaccatgtgatataatcgattacttctctttctataagtgtttcaaaagtgaacaagaacacattaatctattactttgagtatctaattgattacattgttcttaagccgtttccagtttttgggaagaatactttaatcgattaaaaagataatacaatcaatcacttcattgaattaatcgattaccttgtagatttaatcgattatagacggttataactgttttctctataaataaccagcttgtgttctctttaacatacaacaaaataagcttcagttagagctaagatcacgtgtggttattaggttaagaaaga

SEQ ID NO: 195819 - DNA, 278 bp, Glycine max
tgtaatcgattacagcatttgtgtaatcaattaccactaaggaattttcaaaaaataactcccaagagtcacatctattcaaaagatttttgaatggccatcaaaggtctataaataggtgacttgggacacgaaatttcttagagttttcctgaacaaattgtcttatcctctcaataccaaattgtcttataactctcaaaaagaattccttggccaaaacacttgcaaattcaataaggaatcttaagtgatcttcaattttaatatctttctct

SEQ ID NO: 195820 - DNA, 413 bp, Glycine max
agcttatttatttgattaatgaatcatattgattattaattaatgctttatttgtttttttaattagcaaaagtgatgatatatattatacacaaagggtaagcaacctatttacaagtattgaaaactgaaaatactatctccataccttggttacaaaatattaacataacaacaatataaatattaagtaaccaaggaatccaaaaagagaaagttcacctccctgcaagtcactgtaatactactaatgacaatcctacccaatcaccaaaaaaacataaataatgccttaccctcccacatgttgttcccaaaatattaatgctttatttgttgttgatgtatgcaatgcaaggcaattgtgaatcccaagaatgaaggatttcatgaatgagagcaagctgaatgat

SEQ ID NO: 195821 - DNA, 275 bp, Glycine max
tgaagtcagttggattcatgtattattattcgtgtaatgtataacttctattaggatattgctatttgcactatccactgggatgcactttaaccatatcccaaaattgttccttgaggaattgcacatgattatttgatttcactccgaataacaatgaaatcatattttttttgttttaaaagacattataatagatataccattctattgtgttatcatccgataatgaaatcatagtttaatgtgttatttttcaaaataataataaaaaa

SEQ ID NO: 195822 - DNA, 878 bp, Glycine max
cgaccaccctccgtacgcatgtatacaacaccccgaaggccgatgactcttatggtcccttccggacccgggactcctaaaaaaccccggccgcaacatgcgagaaatgctctgctaacttaatcaacaacgccctcacggaatggataccccagttttgtgccaccagactaatttattcaggagggtctggcttaatcgattaccatgtgagataatccgcatacctctctttccataaggggtgcaaaagggaacaacaacacgtttcatcgattaccttgaagatctaattgattacattgttcctaaaccgctccccatatttggggaagaataccttaatccattaagaagataataccatcatcactctagtgaattaaacgaagaccgtggggagtaaatcgataactgacggctaaactgggttctctataataaacagcccgggttttctgaacatacaacaaacaaacctcagtagagctaaaacccctgggggtatccttgaagaaggaaaaaaaacaagttttaaaaacaatccgtacctacagtcagacctctggtgggaaaaacatccgtgaaagaccggagtttcacgctcagggcactgcggaagcaccatggcatttcaactaagggttattggagaggctgacccaaatatgcatagtatacccctgggtcatcgccggaagggtctcgcccgcacggtctcgcctcaagggacggtacatcacacagcgatggccagcacagggatatgtctgtgaggagcgagtatgctaccaccgttatctctacgcacctacgtgtcctcatgccgctcccgcaactgagcactcaccgtgacgctatctctactccatgcaccg

SEQ ID NO: 195823 - DNA, 1104 bp, Glycine max
  unsure (1)..(1104): unsure at all n locations
ctcatgcacacccgctaatgaactatgtgcattcattatccaggcggctaacaccgcctagggagttccgaagaccattatattaaaaataacattagttggcatacgaaacacacagttcactgtaattcccaagtgggcatccagcacacttgggcaacaaatgcntacacaataacaatcctgccttccattaaattagaggaagggcccttgctatatataaatcaatatgtgacaacaatacaacgttgactactggaatatacagcatcgtgaggtgaggctgaccatgagtcaccataaatcatacctctataagacgtctcaacccagtgatctgcgattacacgagcggctactaccaacttgagatctgcncgtaaatacaccagaataacactcccctactctgaatcaacatgagcgccccctgtaaatggagaggataaaaaatctctcattatataattaacaccttactataagggaggcttaaccaagacctcgctctataggacaccacaaataaacacaacggtacaactcacaactcatgcgctattctgcccacttctccgcgtctcaatagagattcacgcagaagacgcctctccagaatacctccttcgaatatctctccctgatcaccctcttggtggaatgtcatggcaccggaaccacaacaacatattctgagaccacctcccctcacacagagtaagagtgcgcggtgatcttccatactctaaataccgtaattgaaatacttctggcaaaaatacaattagcatacactgctgcagactctatacanagacatattatcgggcgtcctatcatcacctctcacgagtgtgttctgggtcacatccaagatcattatatagcatgacaaacacatggcggccaccaaactacccttatatgaaccacctctaccgcgagggcgggctattgtcatttatctcacagacatagtactacaattcttatatcgctcagacatacagacaactcacctacgaatcacctccatctaatatcaagcacgctactataccctacgatcatcgcaatgtatactatcatagtacatacacc

SEQ ID NO: 195824 - DNA, 481 bp, Glycine max
agcttctcccccaattttctataaatagggggagaagtgaagtgaaaaagggttcagccccttaggcacttctctctttttcgaatttgcttggaaaaattgtttccgggaagaaaattcaagccgaggcgcttccgaaacgtttccgtgaggaatttcgcaaaagtttcgaccgttcttcgacgttcttcattctttcttcgatcttcaacgggtaagtacctcgaaccaagcttttcgattcattatatgtacccgtggtggtccacattgtgtttcgtgtatttttattctcgttttatttactttttatacccctttttgacgtgcttaagccattttatttaagtcatttatcgcttagactaaaaataaaataaatttccaccgatcgtttgaattattttatccgttaacttccggttaaaaccaattccgaccgtttggtcgtgccctaacccccgttgggaaccaaaaaaga

SEQ ID NO: 195825 - DNA, 287 bp, Glycine max
tctactgatgtggcagggcggggccccttcggcttgttgtcccaatcgcgagccttggcctctgttcttcctttccgagatatttttccttatgtcagcttgcgtaggtttatagcctaacccaaacttcccgcgatttcctctggtgcttaccaggctggttctgccgccgttgttcttgcccaaacccattacgggctcgtagccgtaccccaacatcacccgggccaccatcattgccgtatcatataggcaaggctgcccagagagggaatctacggaggcaa

SEQ ID NO: 195826 - DNA, 376 bp, Glycine max
agctttgagggtgcgtagcccaccatcttttcatagtagagtatcgataatgggtctaccatcacgaacatcgttttcctttccatcattggggggaccacctgggccggcaaaaccctccaccttttgggcgtgttctttgaaaaatccgtccccctttttgcaaatgttctgtagttgcatcctatccggaaccatatcaaaattgtactgatactgcctaacaaaagcaaccattaagtccttccaaaaatggactcgggaagattccaagttagtgtaccaggtaacagctaccccagtaagactttcttggaaggaatgtattagcaattcctcatcttttgcgtattcccccatcttctgacaatacatc

SEQ ID NO: 195827 - DNA, 289 bp, Glycine max
tctcccccaattttctataaatatggggagaagtgaagtggaaaagggttcagccccttaggcacttctctctctttcgaatttgcttagaaaaattgttttcgtgaagaaaatccaagccgaggcgtttccgtaacgtttccgggagtgatttcgcgaaggttttcgaccgttcttcgacgttcttcattcgttcttcatcgttcttcggtcttcaacgggtaagtacctcgaaccaagctttccgattcattctatgtacccgtggtggttcacattgtgtttcgtg

SEQ ID NO: 195828 - DNA, 472 bp, Glycine max
agcttgaaattgcatgtgggtacctattttgaatctcctatgctgtctcataaaatagtcccaccatcccaattttgcaaaaccatattcatatatcgccggggcatttcaccgagcacttggtgggcgcacgtttggacataaattgcaagagaattggggcaatgtggcatgccccattgcttcagaacacaacataggcctaaggccttctcattcaaatcctcaactcaagaaatcaagcataaaaaacaacccaaaactgccccacaaatataagcacgttctcacaatttagagcaccaaaagatgaagaaaatactccaatgggaagcaaaaaactcaaggattgaatacttacttgttggagtgagtagaaacaccaaaaatgaaagcaaaatgccacccaaagtggcttatgggagcaaaaaccgcaagccttcgtgagttttctcttttgaatgaagggggg

SEQ ID NO: 195829 - DNA, 285 bp, Glycine max
ttgattcttttagtgtgagtgaattggtcatttcattactattgttctattctttgttttgacatgcatatccttgaatgaattctaaaatttatgaaaagatgagactctataggctttcttgagacctgtgaattattttgattagtttttcccctagtcgatcactttgaggatgaatgattatttttttttgtccttaaactatattgtgtgatttatagatgcgaggaaaaaagggaagtaatacacattgcaggttgtgtcagtgaataaatcctacat

SEQ ID NO: 195830 - DNA, 581 bp, Glycine max
tttcccgaccgttcaacaattttcatgctttacaacatatatttggatatgtggcatcataccacttttatcacttattccacgacagttcacctctgacatttacagggccctaaatgtgacttataaaattaaattcactacattcttataatcacaatccttgtggatcatctctacctctttgggcgagatgtacgccgctctgaaccgtatgtaagaacctcatttacttaggttacaaatgccacgtcgacattctactaatcactccgcctcatcgaaagcgtgggctatttaccacccgaatgattatgttctaaacatatctactttgggatacatcttaccactatacctctgattccattaacattatcctcatcctatctcttatgtaaattcagtaatctagtttctctttccgcgactcctacttcttactgtcagttaatagttccccaacatgatgtcccacttatttcaccttatcgtcatatcattcttgtcctttctactctctcaaaacgctatggccatccaagcgcgctaatcatatcattgctacgctatcacagacg

SEQ ID NO: 195831 - DNA, 232 bp, Glycine max
gccctatagtgagtcgtattacaattcactggccgtcgttttacaacgtcgtgactgggaaaaccctggcgttacccaacttaatcgccttgcagcacatccccctttcgccagctggcgtaatagcgaagaggcccgcaccgatcgcccttcccaacagttgcgcagcctgaatggcgaatggcgcctgatgcggtattttctccttacgcatctgtgcggtatttcacac

SEQ ID NO: 195832 - DNA, 493 bp, Glycine max
agcttggaagccaaggccttgaggtttgtttttatgttgttggattgattttatatccttcattcatatcatggctctgagttggtatcttccttgtcttgtgtgaatcatttttggctgtaaggtttccaagttgggattcgggtgtatgggcctgaccaaagtgtacaatgatcctgttcctaaagaggttggcatctctttgatcaaatacacattcagtaaagggatcactttctttgttactgtagatttttatcgaccccatgccaacaaagttttggtcgaaaaggttaattaccttaacactttgtaacatatttgtttcactttaacaataacaacccataatataatgtaacataacattttaattaactctgaggtggtcaggggcttgcctcaagatcaaattcagattcccccaaagtttggtattgtcaaaatggataatggtaatgtgatagtgaaccggttcccctgaatatgtctg

SEQ ID NO: 195833 - DNA, 285 bp, Glycine max
tataagatatagttaatttaattgaaagaatttgataaaactaattaataagttaactgatagatattaaatagcaggacatatctaatatttcaaatatttaaaatttatttctaataaatttttttacaggaataagcttatggaatttcattaggaattaaatcatataaacaatacaagagaaagtatgataataaattaaattgaagtcaagaatgggatggtgttaccctaaccacgattatgagcaacaacttatcatcttaaaaaaagtaagataat

SEQ ID NO: 195834 - DNA, 341 bp, Glycine max
agcttgagccgtactttctgaagtcgctcgacaatacttgagaaaaagaatcggctaacagttgcatttattgtaacaatgacaatgtcatcaacaacaacagctataacagtaacaataacaacaatagtaatattagcaaaacgaaggccatgtctcctgagccttatcgggaggagagatcaagacccaaaatgaaagagtcagcgggggtgtaaaaaaaaaaaaacactatatgtagagagtggtcgatcgatgcatgcatacatattatacattatagtttaagactatgaacctaattatgggtagctccgcaactctcaagaacttaataaatg

SEQ ID NO: 195835 - DNA, 277 bp, Glycine max
tgacaccaaaaaggtctaacatactttaaatcacaccatgttgtgcttaacggttgagaatagctcttgttctttgttttatgcagcctctcttttttgtaggtagcataatgcttggccttaactcacactttttcttattgctttcattgctaaatactaccctctgggatccgagatcattaatcctttagctatgagcctatggtcgatcatgttcgtaagctacatcttttctggccctttattatttgtagataacattgttgtgggtgta

SEQ ID NO: 195836 - DNA, 370 bp, Glycine max
agcttgcctgtcttatgctctgacgttgtgactcattaacttagtcatgaaagaattcatattccataatttaagataggaccctatatttcagtaaaagagggtcacgtattgtaattcatggcacgaaatgtctactcgacaatataaccgccatgactcatgtgcaatcatatgcctatctgacatatatacaagatttaagttttgcacacgatggccatatttgtgagacacaagaaagattatattagtagtatatgtgggagaatgttagcatatgaccattatgtatcgacccacctcatgtctacacctccacactctgatagttgataatttcaattcctataaaaagaactcccttaat

SEQ ID NO: 195837 - DNA, 283 bp, Glycine max
tgatgtgcgaaagcgtggaatagtcagtcttcctacttttgattgttgaccacagagtggtacctgtagatatgtccctggggtcatgagaccttggggaccttctgtggggtgctattgcccaaaaccaagcttgactaataccgagccaaccctggcattatctgattatgataacctgtgacctacctagatgagctagccctgtcggtctgcctatctgggagctgagcccactaatcaaggaggcttgtgtggcggctggccagctatgtatcttggg

SEQ ID NO: 195838 - DNA, 389 bp, Glycine max
  unsure (1)..(389): unsure at all n locations
agcttaggtatggcttccaaacacatcttgaaagagctcaacgatttgcagaatgatccttttacgtcatgcagataagcttctcgatccttttttctgttttttttcgtcttttttgttggggtgtatgtaacaaaaactattatttgtgattatatatttatatatttattgcaatgtgttatctaatatatctaatgtaaaggagtagtgtgtggaaatgtccaaaatggacatcttttatcttaaatctagatttcattttttaaattcagacatgagttttgatttagattatgttgtaacagttaattaattcaaaatatgctcttttatgataatttttatttgatnttcattcattttttagattttgttttttttcttta

SEQ ID NO: 195839 - DNA, 281 bp, Glycine max
tcaacgaatttatcttatatttgatgtggattacagttattaagttgtttgcgtcaagtaaactaaattcgttaactttaatagcaaccacgggatcaatgtaatacgctgttaactaacttcaatatgtagtttaccagaatgagtggtaagaatatcaaactaacgaaaatgatagaaaatgacgagagaacttcatcgatccattggtattattatattgtataatttgataatccgatggagctcacagaatgataatttcatcaaagttatttcgt

SEQ ID NO: 195840 - DNA, 478 bp, Glycine max
agctttgataccagttgatacaagtggttcaaaaagagttgagtttattgaagaaaataaagaattttctttatattagaagaattcaaggggttctggtccctcctaacaatccaaactacacactaaaaaatataattctctaccagctaagtttaataaaactcataactttcctaacaatctataacagattcccacccatgataaaaaccttcaaactgtactaaccaacacttctgtttatttgagcctcatcattagctcgcccatccctcctcctaacatagacccttttaattaaggttctagtatcacaaaaaaatacttgtcaatgccaaaaccaaacttattttaagtaaacacttccacattgctttttttctcaatttccagtcattaacagtctatttggatgagaaatttggaaatttaaaaaatttaaaattttaaatttttaattgctttaattaatatc

SEQ ID NO: 195841 - DNA, 279 bp, Glycine max
tcgcggaaggaatgagcaggaaagtttcttccgaagagggggggctttttataattttttattaaagggcaaaattgcccattccaaaaaattgttgggtgcaccagcaatattgctgagtgcacctagcatctccctctaggatttcatggtacaagagaataaaacagcccaatattgagtaggctttgaagtcaatgaagcccaataccatcttgggcattatatatttccctctttgatatttggaaattctgaattcatcacatcaccctattg

SEQ ID NO: 195842 - DNA, 440 bp, Glycine max
agctttagatattagctgaaagactcatggatgactttatctctaaaatgcaccctcatgaaagagcccctctcacttgaagtgtggaattgtaccttatgttgaaatttgactttttacatagaagaaagtggtgacaaggtcaaacttttgaccactggccgttgaagctttgataccaagattaaagaaaatggtttagagaaattgtttgttaggcagcataaatgttttagtatttacaaatcctatttacaaaatcagagtacttctaacttaacacaaatacaataacttgtatagtaatcagtaggcttaattaattatacttttggctcctttgtgatagtcaatgtgtgatttttgtcctcttataattctttgcagcaatcaaatcctccattgtttcccaataaaaatacttttggctcctttatgat

SEQ ID NO: 195843 - DNA, 276 bp, Glycine max
tgcttctacatatgggttctatcgcacagaatggcatgatcactggctgacatattctcaattagctctgttgcttttttggggtcttcagctttatttttccccctgcagaagcatctagcaatttcttggtttgtggtatcagcccatctataaacatattcaattgaattgtcttggaaaacctatgggtgggagttcttctcaataaacctctgaacctctccaatgcttcactcaaagattcatcagggaactgatgaaatgaagagatta

SEQ ID NO: 195844 - DNA, 969 bp, Glycine max
  unsure (1)..(969): unsure at all n locations
attagcacacatcccacctactatacccccccgctcggaccttganttcgtgtgaccccttcccanaccccgaaccgctgacaacaagccgcaaggcgcaagcccaagaaaccagcatgtatacagagggtctttaaggggatgtcgtttagcgcaggaaaaaaagaggatctttttttatacttaaaaccaatccatagggggtcagggtccctactcaacaatcgcacagtgaccacggccgccgatactttccctcccacccaccccgaggttgatgagcaactcaacacctgccctcacaccactctaggcctcttaacacacccgggaacgaaaccgttccgactgaacctaaaaccccgcttcatgcccaacaggagccccaccaaatatacgtccccgatcccccaactgcgagccaacagcccctttccatcagggtacgcgacttcacaaaaaaaatactctgtcgaccgccccacaagccaaacttatttatgagaagacaccatccacaatagcctgccttcgggcctttccaagccaccacaggtctctcacggatgacagcaccccgggacatttaaggaatgcaacactgccctgattaaaagagcgcctctcccgatgccttccctagacacactaccatagctcggagaaacagagacacccgccaaagtgtaaaacaacccacccccaatgggggaaaataccctccgcaccaagactcgtcttaaaacacccccccgctctcatctcatcgggccagcccaccaaggccctctcaacccgcggacacaaactccgttccggtcctcaccaccacaaacgagtacagcccgggcgcatcaagttcaccccaataccctcctcacgaccgctgcccgatgacatgcgatagcatacgcgtagcgaaacacacccctttgttcagcgcaccaagaccaacaacaccgcctcccc

SEQ ID NO: 195845 - DNA, 910 bp, Glycine max
  unsure (1)..(910): unsure at all n locations
tgcgcttctagaatcacgacagttacatatactctccaaccgctacggggnantttgaatttgatagaccnatgctccggcacccggggatacctnanaagaaggacctgcagggctgccaacctttatataagcactcggccacttagactatttgcagtaaaaatgggcacaaaaattattcgcacgagatacgtaacccaattatttaggtatcccaagtatagcaaccaagaagccagtttatgggcaaaggacctaccttgggggcgcaggattaacccaaccattgggcccattgaattcaaacaacgttaagcattcatatgacatatgtaaatgcatctaaagccatgtgcaaaactacaagcatagttcatacacttggggtttaatctaacaccctagggttatcatgcacctaaaataatgggtgagcaagtgtaaagatcttgacccattccagcctcaaaaccgcatagaaaagggactgggacatttattaaacagagggtgtgggcaggtaaaacctggctaactgaaggatcaggagcaattggacctgaaaatcataaaagaatctgggatgggctagagccattcctttaacccccaatccaagcatttggaacgtgggtggcccgacactgtcttccaagctgggcagacgaacatcaagggccaaccttcaagggaacgggaaaaataaacggaaaggaccctcatttgcggggaataaggaatgcaccgatgaaccaaaggggctaaaaactggaattgtggaaacaaggagggcaaaggccctggggggctctcgggagttggaaataaagggggagaggggcccttatctcagtgacactgcggagggcaccaagatatcgcgagtgaagcgcacaccaggcaaacc

SEQ ID NO: 195846 - DNA, 450 bp, Glycine max
agcttatttctttatgttcatcgatccctattctataatatgggtctttctaactaaccctgtaaatttaattttacaatggatgtaaaggccattcgaaatctagtaggctaattttttataatgaactaatggacaattgtactatgatactactacttgataaattcataacccttcacaaacaatgtttctgctgacctaagcattaacagttaaagaggtgattgatatatacatcactgatcaattcaaatttttctccaaaacaaaatctgaatcttatagcaacacataacatgtatataaatttatattcattcttggtgataaaacttgaagaacatttaataaatttactccatgcgacaaataaactcaaacttttgtagcttataaactgcaagcatatcatgctcaatttatggtggcaaaagcatgtctttcaca

SEQ ID NO: 195847 - DNA, 287 bp, Glycine max
tatgaacctcgcgtatttgatattaagctaaaatggaattacggactcttttttatattcgaggctttaggttaatttagtcccttgagttgaattctttttttactttagtcccttataattttctattagatcaaattggttcttcttccgtgaatttatcgcattagtttggacaacttaaactgtagcatacatcacttcatgcaaagtcgatacttttagtgccatagtttaacatggatgctaaaaggacaacgcgaaatttttaacacttaagagatcca

SEQ ID NO: 195848 - DNA, 434 bp, Glycine max
agcttcttgcaacattatggtcaatgagctgcataatgaggggaaaaagcaattttcctgttataaaaaatatattagccaattttgatgatgctttctgagaattgagaagcttgcctcctaaaagggattgggatcatgctatcattttgaagaaggctcaaattcctaatatttgcccccacatgtatatgcattatcaaaaaaatgagatagagaagattgtgaaggatatgctttgtgctgtaaggcccaacactaaccctttcagtagccctgttatacttgtcaagaagtattgtgtgtggagattttgtatagactatcaggccatagacaagtaaacaccggataaatttccaattcccataatagatgaactactagatgtattgggtgatgcagtgatttttgtaagatgaactactcttttg

SEQ ID NO: 195849 - DNA, 285 bp, Glycine max
tggagaggatgcttcaatggaggaaaagaaagagggagagaaagagagaggggggagcacgaaattgaaggaagaaaaagggagagaagttgaactttgagttgtgtctcgcaagactctcattcatcaaagttacaacaagtgttacacatgcttctatttatagactaagtatcttccttgagaagctttcttgagaaaacttccttgagaagcttctttgagaaaacttccttgagaagctagagcttagctacacacacccctctaataactaagctcacc

SEQ ID NO: 195850 - DNA, 1099 bp, Glycine max
  unsure (1)..(1099): unsure at all n locations
gggatacagagccatttgaaacntgtttgataacggtagtaatacagcgagattttggaaagaacctccttttggaacatgtaaaaggcaagaacttattttctaaaacaatgcggtgaagacaagcagacatgtgtagcgcgtgtgtattttcttatatgtgagaaatgggagtttcccctcattagcctatcccccaataagaagagtgtggggtaaaataatggttatgggaggatatactgtttttcttaggggagggaacaaatttgggaataatatggtaagaaaggcgtcgttgcggggaaaattatggaattatatttgtaccgataaagatcgggagagaacaatatcttaattgaaaagaatggttgtgatagtagggatcaaaacaattggatacataatattagctctgggaanaaggagttattgcgactttttctataacaaatcacattttttggagaagaataggcacttatattttggttactattttggtggaagcgagtgaataaaaagtggtgtttttggtgaaagagggttttaaatctttggggaagggcaaaataaaaccctaatgtgatgaaattgtgagccattttgtggggagagcatccaatgggtgaccattttcaaaagggggggaagaaagtttatgatcgtttattttaataaggggggttgccagacgctctattgaaattcttgaataaagatacggagaataagtgggcgcaaaaatcacttgggatgggaaaggaagaaaatgcgttgtttctcgatggtgatgaaactaatgaggggaccactgattggcttataagcgaaacggcgggatggtgatataaaaagaaacgataaatggtaaagaaaggaaaagtaatgggtatggtattaaataaaaaaaaaagaagcaatagttattgttacgttctatcggggggaaaagaacagattgttgttatcctcatattggatggagaagaagagggggaatgaaaatagtattcgtgtggaacnaataaaaacaatgagcatagagacgaggtacgctatgatggtagtggtgtaagtgaaagtgtatactaat

SEQ ID NO: 195851 - DNA, 168 bp, Glycine max
tataatatatcgaggcgctcgaaattgaacaacggaagctcttgagaaattcaaatggtcataacttttaactcggagttcaattcatgcgcatcacatatagagacgcttaaaaatgaacaacggaagctctccaaaagttaaaatggtcataagttttcacactga

SEQ ID NO: 195852 - DNA, 461 bp, Glycine max
agcttatgcgcatacttctttacgaacgttcacttgcacaagacattcttataactaagaaaaatgcacccatatacaatcaaggcaccttcgttacctagattatttatatgtacttccaaggtgtatttgttacctacatcacacgcatttcctttgctaaatttacatacatgcttactcaaagcactttggctatcaaaattgcatacgtgcacattctggtatttctaatacctgtacatacacaaacttcatgatgaatcttgactatctacacaataaggtgctacatttcatgctttttttgaagtgctttcactacctaaagccgcatgcaaattcaagtatattttcttttgccgattaaaattgtattcaaattaaaaggtatttttgtaaggtattttctttacataacatgcaacatatatattttttttgtgaaacattttgactat

SEQ ID NO: 195853 - DNA, 282 bp, Glycine max
tgaaattgaacatcagaagctctcgacaaattccaatggtcataacttgtcacaaggaagtccgattctggcgcatcacatatcgagacgctctaaattgaaaaccggaagctctcgagaaagtcaaaaggtcataacttgtctcacggaagtcagattcgggcgcataatatatcgagacgctcgaaattgaacaacgtatggtctcgagaaattcaaatgttcataacttgtcacacgaaagtccgattcaggcgcataatttattgagaagctggaaat

SEQ ID NO: 195854 - DNA, 468 bp, Glycine max
agcttctttaaagccatcgcctacaaagacacatccaactaaaatttagcataaaaattatttcgcatgagatacataaccatattattttagttatcccaagtatagcaaccaagaagtcaatttatgcgcaatgtacctaccttggtgcaacaagattaaccaaacaattaggccaattcaattcaaacaactttaagcattcatatgacttatgtaattgcatctaaagcaatgtccaaaacttcaagcttagttcatacccttggcatttaatttaacaacctaagtttatcatgcacctaaaataatggttgaacatgtgtaaagatcattacccattcaagcttcaaaatcacatagaatagtcattgtgacatttcattaaacagttggtgtgtgcatgttaaaacatgtataaatgaggggataggagcaatatgacatgaaaattcataaaagaatcat

SEQ ID NO: 195855 - DNA, 285 bp, Glycine max
tatgaaacaacaccttttctgtctagaaattacagataatgccaagtaattatagaaggagcactttcatttctattataaaacttgtggataaagcataatagtacatgaaatgaataacccaccactagtacaaattcatcccatgaatatattgccaacccaaaactttcaacttcttgcttttgtttagggttaacctttccgaagcttacaattgttgtaacaaagacataaaaatgaatgcttctttctaaagcacaagcattttaggaaagaaaggag

SEQ ID NO: 195856 - DNA, 407 bp, Glycine max
agcttaacaattaccttattaaaaattatgatttatttaaaatgacataaaaaataataaaattatcatctagttaagaaaaataacacgaaaaatgaataaatatattaagaataaaagtgaaagaaaatataaaaaattaaaaattattatttaaaaaaactgttatttaatgttttaaaaaacaatagaagttacttaaaaaaacatatgtttaccgaactgttaaacaaatttttcaaataattaaaaaactaaaaattaattaaaatgttttattaaacataacctaataacactcattaataagacactaaatttaggcttttttttacgttaatggtgtaatttttttcaaaaattaccaaaattaataccttttgaattatttatgaaaggaataaatt

SEQ ID NO: 195857 - DNA, 285 bp, Glycine max
tggaccgttggacgtgcattgcatgaaaataattagtataaaaaactaactgatcgctataaacatagtttggaaaaacaaaaaggaagcatcattacggcatgtgcaatgcattatattaaaaataggacaaaaatatatttttgattactatattttcatcaaatcttatttttattctttaaacttttatattctctaatttgatccctaattttttttttaaacaatgtttttagctatttttcacagattttcattaacaatgttaacttgagttgtgtc

SEQ ID NO: 195858 - DNA, 438 bp, Glycine max
agcttttttgtaatggatatgattttcactaacaaatatggttaaacattagactttgaatgtatcatccaacgagtgcaaaaaccaacttatttaaaatcaaatgtggactatcgtccaatgctagtaaaacagagttttcaaaaaagttttcaagtgcagacttgtgcaacaaagtgtatcaaaatcaacacaaaagaatactaatcaagtagctttagagagaagtagaaacacttggatttataccaattcactcaaacaaagctatgtctagttttcctttgcaaatcaataaagggttctactaatcaaaacttgattacaacaagtctatgtaccaaaagcgagtatttttcagcctctatgcattggcgaatatttttccaccaatactcagcttctttcaccaaaatatatgtaccaaaagcaactttt

SEQ ID NO: 195859 - DNA, 195 bp, Glycine max
  unsure (1)..(195): unsure at all n locations
tgaaggtaggagaagatgagtggagggagagggagtgaagaggcacgaaattttatgcctcaaatgaggtctgaactttgaagtgtaattctcaaatgatcaaagttacaacaagtgttacacatgcttccatttatagcctangtagcttccttgagaagcttccttgagaaacttccttgagaagcttttttg

SEQ ID NO: 195860 - DNA, 418 bp, Glycine max
agcttcaaaaggacattagcaacttcactcaaaatgaacaagagaactcttcagaagcctgggaaagattccaagagttactcaggagttgcccacatcatgggtttaaccagtaaaggatagtgtacatttctatagtggagtgtcctctcacaacatgactggccttgatgtatgtcaaggcaatttgatcatgaagccaaccgttaatgccattataatcattgaagatatgtgctcaaatccctatcacaattatggggttaggagaatcatgaagacgctcgatcaaccaggtggaaactgaagcagctacttttggccttggacgatagatttaagcattgtccaagaaattcagagttgaatgaaagctaagtctcaagtgcctatctctacacctcccaatcacacttgt

SEQ ID NO: 195861 - DNA, 281 bp, Glycine max
tcaagttttttttttctgtcagcaaaaattaaagcttcaagttgattaattctccatcgtggcttgtcttttaaattgtttatagctagcgtgctgattatatatcttctttaatcaagaaaaactctggttacttgagatgtactctatagggaaatataacgcgattctggggaaaaataatattaacaatgaatatattatggatctatttcttagtgaccgacatgtctacaaattctataaactcttctcagtaataattaatatgcccctgatcg

SEQ ID NO: 195862 - DNA, 439 bp, Glycine max
agcttctatatgaccaacccatactttcccatgcccttacaaaactctctagtgataaactactttgcatgtgtcatccctgaaaacaaaaagaaaggcatattgataaaggcatcaaagtatgaatgcacaaaccaaccttttcaacatagcaacgagtgagaaggatcacaaaacaaaggcatccgtcgtccaaactatttgagttacacgaaaaggcaaattattgattcaaagggtgtacacaacaatatagagtatttgacgaacatggattctttttaaagtgatagatgcgagtaggttttgaaaggggaaacagttcttttgaaagtatgataaagcgattgaatagctttattactaacaaaagccaaatgcaaccgtagaaggatttgaaaaaaaattaacaatgaaaagaaagtcatttattgttaaa

SEQ ID NO: 195863 - DNA, 276 bp, Glycine max
tacatcgactgccagaaggtgcataacaaactcgttgaaattagttgcaacttgtaactgtttctcggaggaagaaagaaagaaaaaacggttataacaaacttttttttctgctacggctgctgctgttgcaagttggggcgcctccggaaatagcgcgtttgttggaggaaatccggcgagaaaacgacctatgcaagagcgacgtcgtttcttcttccacgtgctttggagccgatcccgagcttgacgagttcatggtccccccttctttct

SEQ ID NO: 195864 - DNA, 419 bp, Glycine max
agctttactagtgttccaagacatgatgtctgctggagaatgtccaaactatgtaaccttcattggggtactttctgcttgtgttcatttagctcttgtacaagaaggattctactattttgatcagataatgaagaaatttgacgttgagcctggactggagcactacacatgtatggttgcacttttgggtagggctggtttacttgatgaggctgaaaactttatgaagacaacaacacaggtcaaatgggatgttgttgcgtggcgtactttgcttaacgcgtgccacattcatcgaaattacaatttagggaaacaaattacagaaactgtgatacagatggaccctcatgatgtgggaacatatacattgctatcaaacatgcatgccaaggcaaagaaatgggatggagtgg

SEQ ID NO: 195865 - DNA, 275 bp, Glycine max
tgtaagttagttgtgtacctattatcactctgcatatgtgaaaattattctttgaaattctgaatgtggtttcaaaaaggtttcaaggccttggtgggtatccaaaatgttgtatctctgatcgattaggaatcagaatcaagaagcaccaaactacaaaggaagcatgggaattgcttcaattggagtttcatgatactgatagaactaggctcaaggcttaaattcaaggaactgagttcgaagatgaaagagagataattttcagagttttc

SEQ ID NO: 195866 - DNA, 950 bp, Glycine max
  unsure (1)..(950): unsure at all n locations
gaacgaggctatcgaaaacacgctattgaatatcctctccctcaacgccaacggccaccattgacaccgtggnaggcaacacactacncgcngacaccggaatagaacagcaagcaaacaccacgcacatcgaactgttaagtaaaccaactttctattcacccatgcgccgaccaaaacacgcgaagggagaataacagccttgttttggtgtcggccgcctgcccaccacaccgcaaagggcccataagataaagggcagaaaccggttaagtacacaaaccaaaccctttaacaaagcaaccatcgagaaagatcactaaacctcggggtacgccgccccaacccatcgtgtgcggaaaaagccaacggctgattcaaaaggcggacacagcaatatacagatgtagaaaaaaacggggtcctgtttaaagggaacaaatgcgagtaggccgggaatggggaaacatcccttttaaaacatgataacagcaagcgcaaagcattataactaagcaagaaacaaaagcaagcgtgacaaggagctgacaaaacaccttacaccggaaacaaagacatcttagggccgcacacgaaccgaaaacggaacaggggttcgtcagtaaaacgagacccaccccacgtctcaatcgcccagacagaccgcacaagacaaacgaaacgtacagagggcgggtacttaaaaaacccacctctgagccgacaagaatcccacccaagcacagaaactccaccacgcgacagttggaatcagaaaagaggccttgaaaacgccaaatgcaacaggcgcattgcaccccgcgctcgcaaaccccagcctacaggagctatcgcaccgtaagacacccattcatatcctttacatcgaacaccgcacggacaccaaagccatccaacacccaagctaccgtgtagccccacgaacgccg

SEQ ID NO: 195867 - DNA, 429 bp, Glycine max
agcttgcttctacatggagatgtacatcaagtccacttagtacaaaatttggcttatcatcacaaatgatgatattcccatcctaaattaaaagcacaatgggcagatgctgatctggccactatggaactaaacacaagagctagatatacactagtatgtgctctatataaaaatgagtacaaaaagatctgttggcttaaaacaagcaaagagatttgagactcattaagcacaaactacaaaggtacaaaatatgtcagacttagaaaggctgcaactctaactagacattacgagaagttctccataaaagaaggagaatttgtggatgacatgtttgagagactgcaagttatcctaaacaatctataagctttgggacaagcctataccaaggctcaaataaacttgaaagttctagacaac

SEQ ID NO: 195868 - DNA, 285 bp, Glycine max
tgccacccagctcgcccaggcaagccaggttgcatcttccaaaagcaactgccttctggaggaacatcctggaaagcctattgggcctggtttctatttttacccttttttagtaaatacacccccatttgctttttttggtgattatttttctgtaatgttacaaaactttacgaatttcgtaacgatacttgttttattttcgtaaagttacggaacctttcgggtcatgtaattactccttttttagctttcggaatgttacggaaactcacggattgcgta

SEQ ID NO: 195869 - DNA, 440 bp, Glycine max
agcttgcagtgattcactctgatgtgtgtggcccatttgaaatcaaatctcatggaggtaacttgtattttgtctcttttatagatgactttacaaagaaaatgtgagtttacctattacaaagaaagagtgaagtatttgtaacatttaaatcattcaagttactagttgaaaaagcaatctggttgttcaatcaagatgcttagaactgatggtggaggagagtacacttcacttgaatttgagaatttctacaaggaagaaggaataattcatgaagtaatggctccatacactcctcaacacaatggaactgctgagagaaagaatagaatagtgcaaaatatggttagatgcatgctgagaaagaagcatcttccatatgatttttgggcaaaggcagtatccacaacttctcacatcttgaatagatgtcctac

SEQ ID NO: 195870 - DNA, 288 bp, Glycine max
tgtcgaaaaggcaaagccgttttacaaactgctcaagaaaactgagcccttcctgtgggacgagacatgtgaacgagccttcctggctttcaagaaaaccataactacaccaccgatcctgagtcggcctaggctaggagtacccatactcctatacctttcaataactaacaaagctgttaactcgacccttctgcaagaggaagggaagcattaactccctatctatttcaccaaccgcatacttcatgaggccgagaagtgctaccaaatgatagaaaatatggt

SEQ ID NO: 195871 - DNA, 441 bp, Glycine max
  unsure (1)..(441): unsure at all n locations
agcttgaatntgagaataaaaatcataagacattaagtttctcttggcctagaagtcagatgcaaattcagtagaacagataaatatatgatgctctaatttacaaaacgaaataaaaaaaataaattggctttcatgttgattgtaaaccttttgagtttggacacttacacattctggtgaagctgacaaatgcagtatatgtagccgaagacaaggcaggcaaaagaaacattggcaaaactcggattgccctcattttccaattcatatccattgatcttgttgtcataatagcataacctacagcaatgacctgaaagttgaaaccattttaagcaaaatccatttataaaaacaccctcaataatcaataagaatatattaatttgtcagagaaaaaatttaaaatttcagttaaccctccattgtcactcaata

SEQ ID NO: 195872 - DNA, 289 bp, Glycine max
tcatttgtagctaactgtagaactcacttttcctaacaaatcggaagttttcattaatattacctatattgttagtgctagcaaacaaaataataatatttcacttaaaaaatgaattaattatttgaacaaattaaattttttaatttaattaatcattaaatattaaataatttctttaacaaaaattaaaatatttatttgtgtatgatctcataagttcaatttaagccgataatatattaattaaattaatatattaatcgagatagacatctagtaacatttt

SEQ ID NO: 195873 - DNA, 479 bp, Glycine max
agcttgccctgtcctatcaggttctaaggatcaaaccatttcccaatgttgagtgatcctaactaagcatgcaagtgcttgatcaaggcaaaggcacactagaattaagtactgatagcacagtgaacacataaaacatcattagatagatatgaaagtatttaaatcaagtaccccataggaagaaccaactgaggctttagctctccatagcagggaagcttcctttacaacaatgagaagagaagatgaaagatagaagaaatacaagtagtggggatgtctcctccacctctagaaacctcacaatctcatccaaagctcccttagatggcttcctcttcaagctcagctctctcttagtctctccacaaccaaaaactctaaaaaaactcaactccaccaccgatttcagcttaaataggcaatcctatcgggggatgcgcgcttagcaaaaaattagcttgcttaccgcatgt

SEQ ID NO: 195874 - DNA, 289 bp, Glycine max
tatcagaacaacattttttttcaaaatgcaacaatgagaaaagaaagcacaaagaggaaattcacagaaccaaatgagattaacatcaattcacattttgtttctaaagaatataagagaaaacacccgattcactcaggcagaggaaaacctctcaaaggtgcataattctcatgcaggcaattgttccatcacaattccaatcactgatatgtcataaatcaatttttgcaagtcatttcccatcaaatcaaagataaattgcataatcatcatggatcattagggc

SEQ ID NO: 195875 - DNA, 1207 bp, Glycine max
  unsure (1)..(1207): unsure at all n locations
cgtctgactacctaatactcctaaacactatcttctctacnctctccactagcncccgagcgcnntttgagnactgttggaaccacgcggaacccgcggacactctacagtcaagcctgcccggcatgccaaaccatcaatgtgtgacattaacacacatttttctctaatggcactaacatcgaagcctatggctctcgcgtggtggaaatacattttgctcgtatagcaacgcccattatcgcaagggagaagatgacccccctcgcgtctcgtctcatgaaggctagaatacgatattcttaggggctgaagtaatagggtgattgcctacagcaaaaccaacacaggttcgcgtcttgcaaaaggagtacacatacacttcatttacatctttgggctcgcacaactatatcttggagaagtcctgcggcaacccacctccccactgggaagataatcttgttaaagagcgtcctcatagacaaaacgcctcagtatagaatagaaatttcacctgtggtacttaagagtaactttaatggcgacccagcacttatttacaaaaaatgtttacgcactcaataatcgcgggaatttagaaccgcacattatttctctcccaacagaaatactatatagaaatgaaaggggtacaaatactaaacgttgggcgacgccgtaatatagattcctttttacaaagagacacgtgaaattaatgagtcctcttgacttttaaacaaaaaaacaagattctacaccctcacaaatctttctccagcacaaatagaatagaacggttgtatacactcataaaaaaaacaaaatcgccggtgtgtgggtcacccaaaacaacgacattctcgcaactctaagatatcgataaggcgtggggagctctagaaatacgactgccccgccaacaaaaagctaggcaccactttaaatccattaaggggctgtattttactccgatctacggaatcagtggcaaaaccaccttntagcaggcgccagcgcagaaaaaacttaaacgtcatgggacccacaatggcaatagaccacgctcccgctaacgcctcgactacaagaaaacccactgtggacgcgcaacttggccctcgttaaaaaagatacagacgcctagttctaggctaccagatacctcgccgcgtttattatatgccaaccctgacagaaaccg

SEQ ID NO: 195876 - DNA, 282 bp, Glycine max
ttcttgtgaagtgttaatgcttagattaatttagtttccactaatcaggggaagggcattatggtgggtcaaggggacagttctctagactcttatcaattggcataagcaagaggtagaaaatgggttatgaaagtagaaattcatgccagcattctccatgttagtgtatttgatcttctacattgtttggttttgtatgctttcaatttgttttgaacttttaaacaagttagtagtggcatgaatttgtgcgcacaaaatcagggtgtattgcgaatc

SEQ ID NO: 195877 - DNA, 440 bp, Glycine max
agctttacgctttccaagaatcccagcgccaacttcgcgaccagcacctcttcctcctttcgaaattgaaggagaaagacgatctcatcgaacgcgctaaaatttgtattccttttcttttgcttccatgacaattattcatttggtccttatacctctacaattacgttgaaactactcatgttttagtccctagacatataatttttaactcgttttagttcttacaccaacgcgctagtttccaagtgtgtgaactattagtaagaattgtgtatgtacaaggatcaaatgattaattaaaccgtgattaattggtggatttctttttatgttatgtttattatgggggatgggttttgagtagtgtgaggcgaacatgaacccccaagccgtgaaaaagttcgttgaggagaatcaaaagttggcagcggagtgtg

SEQ ID NO: 195878 - DNA, 283 bp, Glycine max
ctgtttttggtccaataaatttaaaattgatctttttagtctatttaatttgaaaagtgtatgttttaatccttctgtctaaaagttttctattcaaatgttgtcaaaacgaatcctttaaaagaaaaacactcttgtcataggttgtttgataataagaatgcaagaacagagtgacttaccatctaagctaatttgttagtcagacaaccaaatatttaaggacatttaaacaaaggtaccaaacacaaaagcttttttcatattacaagaacaagaacta

SEQ ID NO: 195879 - DNA, 345 bp, Glycine max
agcttgttccatgagcaaaaaccagtgttattatatttgatatctaggagggaatggcactagcagatattgccatataagcacaccaacatttcaccttttttataacagacacaatgtcaagcttgtactaagagcctaccctttcttctagggtggaattaaaaaaaggaatttctatatgtgtgtgtgcatacttatttatttgattgcatacctacaaccatccattcccttattcatgttccctttcatggttgctgcataaattcttgattctgtgtggtcctttttttacggaatgcaagatagattcctccactacttatgtcacctaatcttttt

SEQ ID NO: 195880 - DNA, 282 bp, Glycine max
tgatcaaaacaattatctaataattccaatccactcaaatcatacaattgctcattcaaatcattctcaaacactcatttcatacaaaataatccactacatatcattttcaatcaattcactgctcaaacaagctttttggtacaagcaaacaactcaaagtgttgaaatttaaataactaaaatttaaagaactaaaacgtaaaaactgaaattaaaatgactgaacataaatcataaaatagctgaaaataaactaaaatgttcaaaatgcacaaattt

SEQ ID NO: 195881 - DNA, 407 bp, Glycine max
agctttctccactaagttgcctaatgcctgaaatgtcttttctgatggtagtggtcctagatgcaagaaagaatttctccaagaacaccctcttaaggtcatccctgctgaaaatggacttgggagcaaggtagtgtagccaatcttttgccactccctccaaagaatgaggaaaagcctttagaaagatatgaccttcttggacattagggggtttcatggtggaacaaacaatatggaactccttaagatgcttataaggatcttcacctgcaagaccatgaaacttgggcagcaaatgtattagtccagtcttgagaacatatggaacaccctcatcaggatattgaatgcacaagctctcataagtgaaatcaggtgcaaccatctccctaagagtcctctca

SEQ ID NO: 195882 - DNA, 284 bp, Glycine max
tcttatccaaggcaattcttggtggtgaagctccttcttccttggcttattccctagtggatggtgcctcccctatcctcttctcctttgccttccgctgcatctccatggtgaaaaatcaccattgaaggacctcattgaagctcaaagatccagcctccatagaagctccacaagcaagcttccatcaagtggtaatcagagcacaagagcttcaagtaggtgctccttaaacctccattaattttttttctttaccttctcttccattgttgtttcttcat

SEQ ID NO: 195883 - DNA, 375 bp, Glycine max
agctttgcatgtctagtgattctagagagagaaaggtccaagttctagagagttttgagaaattttgctatgtgaagatctgcagagaccagagcttgaagcgaaagccgttatgagagcttgagatgagtttgtgagtggttgtgagatcctagaggtgaaggagacatcctcaccacttgtatttttgcaatctttcatcttgttcttttctttgttgtaaaggaggcttcctagttatggaaagttaaaatcctctgttggatcttccttgtaggtacttgatgtaaatatctttctatctatttaatgatgttttgtgtgttctttgtgctctcagtttttcattctagtatgcctttaccttgatcacat

SEQ ID NO: 195884 - DNA, 281 bp, Glycine max
ttgtgaggtaactatggtgtcagtcaggagatgcagtcagcatgtaatagtgctgaaactactatgcatttggaataaggaagcatttaaagtagagaagaagctgaggggaagtggtgtcatttacctggaagggacaagggcaacaaatggtgcaaaagtgataattaaaacatttactcgccttgtgatacagttctgaaaagaaatctgtgggaacaaatcagacaactgaaaactgcaaatagggggtgggggtggctatggctatggtgtgtatt

SEQ ID NO: 195885 - DNA, 442 bp, Glycine max
agcttttagaaaaaaggttatagtttagagaataggatatagcaaaacctctgcaacccaatgtcttgtcctttacgtagtgaattaggcttttgaaccgtcatccccctaacctaggtccaacgagggttaaaaaacattaaaattccatggaaccgtatttttccgtctaaaccaagaaaagcttaaaacagattagcagttcttaaactcatttgtagaatttaagacaattaagaaaatattgtagacaacttttatcgtgcttcgtgcattaaaaaaaaaacgagttactgtatattttcttgattttctcgacttcccccttttattttattaagttgattccacactttatagtactttcaattttattttatccatctgtaattaatatctatacatctgcagaattatgttttcattttgcttttatctttat

SEQ ID NO: 195886 - DNA, 303 bp, Glycine max
ttagtgaactatagacactcaagcttgtaatatccttgattgtcagcaatagaccttacatgaccatcaactatgattttgaccccctccactcccatgccatttccatcaactacacggcctccaacagaaaatccagttacctgtaagaattgacaatgatagcagataattgagaaaaataacatacacataaccacaataatagacaggtatcagtaatattacaatatcttagaatgtgggtttgggcctaactcaaccccaaaagctagcttgtaaggtgagggttgcctcccactt

SEQ ID NO: 195887 - DNA, 439 bp, Glycine max
  unsure (1)..(439): unsure at all n locations
agcttctggtgggacatcttgacttgctttccaatctgacattcaccacagattctgccttcttctattttcagattgggaatgcctctaacagcaccttggtcaatgattttcttcatgcctcttaagtgcagatgtccaaatctttgatgccatattttgacttcatcttctttggaggatagacatgtggaggagtaactggtttcttgaggtgtccataggtaacagttgtcctttgatctgctgcccttcattagaacttcactcttctcatttgttaccaagcattctgactttgtgaagtttacattgaatccttcatcacaacaactgactgatgctgatcaagtttgcagtcagtcccttcaccagcaatactttgttcagactangaagtccatcatggactagccttcccatccaataatcttttctt

SEQ ID NO: 195888 - DNA, 246 bp, Glycine max
tgaactgccacatcactctctgattcataccgtgttttattgtttacttctagaccctttattaagccaccggacaccgcgcaaatagatgaactggcaccaagggcagatgataatcaaccatctcccatacccttggctattatgtgccacaaaagactgtacaccgaccatgggccacagcaactggggataaagcaatggcacggactacatcttgacaaaacgtcacgggaagagtgaaca

SEQ ID NO: 195889 - DNA, 995 bp, Glycine max
aggacacgtataaacggacgataataacagccagggccttgaacctgtgaacccttccatacccgaaccatggaagcaaacccccgcatgctagaatcaaagaaaaacagtttttaccatacaaaatgggaagcaccctcaccgcgagcgacccaaagaaaatggccctcacacgagcgaacaacaggcgaaggacgcggctgccccctaacccaaggtgcaaacaaggaggaaaaaaatagcaacaaactctataggaaagcgtatcttcgccgcccaaaccaagaaacaagcttacgaacccattaaccagaccatcaaacccgatatggcctaaccggagaaaactccaaaaaaaaattgcatgacaagctttgatacgggactctcgccgcaataaaagaagaaagcgaagtgactggcgtaaagaaaccggaggttacccgacccccccacccgaccattcgaataaaaggaaggagccccacttgtagcagtacgaaaggaatcgtaggtacacaccaacaaggaacgaaacaacccaaccttacgcccaacatcaggaacaccatacccagcgcggaccattaagaccacacccccagtggcggagagcataaagaaaaacatactgctgggagaaaccacaagaaacggttaaacaccaaacgcaagagaataaaaccccgctgcgagtgtaaaaacgcgcgacctcttaacgaagaaaaaccgcgctaactcttatctcccccaaagacaaacgcaccggggcgctgaaccaaaaccctgcaaacaaaaatgagcgaaatcacaaagggcacaagcacaacacgccgcgacccaagcgcagaaacacaatgcgcagaaacggatacccttaagaccactatacaacgatggacggcgacgactaatagcacaagtcaacacgagggaaaagaaaggcttccacacctaacacatacataacacaagcgcgaagaagcgtctcaccc

SEQ ID NO: 195890 - DNA, 436 bp, Glycine max
  unsure (1)..(436): unsure at all n locations
agcttgaagtgagaaagtgtnggaagagtcagtcttcctacttttattcgttgaccacagagtggtacctggagatatgtcgcgggagttaagagaccttggggacgtcaagtggggtgctattgcccaaaaccaagcttgacaaatcccgacccaacccgggcatagtcagtcagtgagaacctgtgatgtacctaaacaggcgagctcctggtagtcaaccgataaaagaacaaagaccacaaagcaaggaggcttgtgtggtggctggccagctattgattctgagtgatatctggaatatggcctctggtaatcgattaccaagggtgtgtaatcgattacaaggcttaaaaatgaagacaagaaattaagatggtctctggtaattaatttccaagagtgtgtaatctattaccaggccttaaaatggggt

SEQ ID NO: 195891 - DNA, 288 bp, Glycine max
tcggaagaaagtgatgaggtacaagccctaaaggcagagcttgaaagagcctgggtagtcgaaaaaaagttcaagtccatagccatcaaagtctgaaaaaagtatgatgaactaagggatgtcaatatggccaccgatgaaaccttggaatgaaaaaccaaaaaggcccgaaaggaagaacacgaccaaagcaaagttttgaggggctttatatggcagcaatagtgagcttaagctccgaagaggtgaaaggaatcatcacgggtcaaatgcatgatcttgaaggac

SEQ ID NO: 195892 - DNA, 362 bp, Glycine max
agcttgacttaagaagctaaaagtagcattgattaatacttgtaacttgttgaagttagtgaaactttgtggtttatccaaaactagacgtagtctcgatggttgaaatgaaccaatataaattctttgggtcttattttgattattttctcttctatttttgaactaacctaaggtttgaatttgatctttgatttttaaaaactatgtttgtttttcaacaatatgaaactatcttctgatttctcctgtaaaaacctattgtttgttttttttttaagtctcattagacaataacttcgttgttttaaaaaaaggttttaaatttagtaaaaatcacaacttactcccccccccccccc

SEQ ID NO: 195893 - DNA, 120 bp, Glycine max
tttcttaacaactttataggactacccatttttaacttgatacgaagatttggtagaccagatgtgtttagtgaattgagaaattcagttgtgattgattggaaatgccaactgtcaatg

SEQ ID NO: 195894 - DNA, 459 bp, Glycine max
agcttgaaggtgtgtaacccaccattttccatagtaaaatactggtaatgtgtctactatcattgtcatcatttttttcgtcattgaggtgccacttgagctgccaggttctccacctttgggtgtattctttgaaagatccgtgccccctttttgcacatgttttgtagttgcatcctatcagaagccattataccgacactgcctaacgaaggcaaccattaggtcctccctggaatggactcgggaaggttccaagttagtgtaccagggaacaactaccccaataagactttcttggaaagaatgtatcaacaattcctcatcttttgcgtatgcccccatcttccgacaatacatctttagatggttcttggggcaagtagtccccttgtacttgtcaaagtccagcaccttgaacttgggaggggtgatgatattggggactaagaacaactc

SEQ ID NO: 195895 - DNA, 289 bp, Glycine max
ttgatggtgtcaagaagaaatcacatgtttgtcatcatcaaaaagggggagaatgtgaatgtatgtatacatgattttgatgatgtcaaagaagaatctaacaaggctgcttcaaatgataagcatttgcttcaagaataattcaagattgcttcaacaaacaaagccttgtttcaagattcactaaagaccaagccttgccttaaaacaatgtgctttcaagacatgcaaggctctggtaatcgattaccaggaagtgtaatcgattaccagaagacagggttgagaa

SEQ ID NO: 195896 - DNA, 402 bp, Glycine max
agctttcaatatattgagacgctcgaaattaaacatcggaagctgtcgagaaattcaaatggtcataacttttttcacggatgtccgattcaagcgtatcacatatacagacactcgaaattgaacaacggaacctctcgagaaattcaaatggttataacttttcacacagatgtctaattaaggtgcatcacatatagagacactcgaaaatgaacaacggaagctttcgagaaattcaaatggtcataacttttcacactgaggtccgattcacgcttataacatatcggggcgcctaaaattgaacaacagaagctcttgtgaaattcaaatggtcataacttttaactcggatgtccgattcaggcgccttacatatagagacgctcaaaaatgaac

SEQ ID NO: 195897 - DNA, 304 bp, Glycine max
attacgagtgcctgtatattgatgcgcctgagtcagacattcgagtgaaaagttatgaccatttgaatttctcgagagcttcctatggttaattttgagcgtgtcgatatattatacgcctgaatcgaacctcatggtgaaaagttatgaccatttgaatttcttgagagcatccgttgctcattatcgagcgtctctatatgtgatgcacctgaatcggacctccgagtgaaaagttatgaccatttgaatttctcgagagcttccgttgttcaatttcgagcgtctcgacatattatgcgcc

SEQ ID NO: 195898 - DNA, 418 bp, Glycine max
agcttaaacattcaacttcgagcgtcttgatatattacgagtctcaatcaaacatccgagaaaaaagttattgtcgtttgaatttgctcacaagttcaacattcaattttgagcgtctcgatatatgacgggactcaatcagacatccgagtaaaaagttattgtcgtttgaattaactcagagcttcaacattcaatttcgagcgtctcgatatgtgacgggactgaatcaaacatcccagtacaaagttattgtccgttgaatttgctcaaaggtttcacattcaatttcgaacgtctcgttttattacgggactcaatcagaccatccgagtataaagatattgccgtttgaatttgctcagaacctcaacattcaattttgagcgtctcgatatatgacggggactcaatccta

SEQ ID NO: 195899 - DNA, 276 bp, Glycine max
tagagccaattcaaacgacaataactttttactcggatgtctgattgagtcccgtcatatatcgagacgctcgaaattgaatgttgaagctcttagccaattcaaacgacaataactttttactcgaatgtctgattgagtcctgtaatataacgagacgctcgaaattgaatgttgaagctctgagccaattcaaacgacaataactttttactcggatgtctgattgagtcccgtcatatatcgagacgctcgaaattgaatggggaatctctg

SEQ ID NO: 195900 - DNA, 268 bp, Glycine max
agcttgagatgaggaagtgttgaagggtgaaacttcctgcttttattgttgaccacagagtggtacctgtagatatgtcgcgggggtcaagaaaccttggggacgtcaggtggggtgctattgcccaaaaccaagcttgaccaatcccgacccaacccgggcatattcggtcagtgagaacctgtgatgtacctaaccaggcgagctcctggccgtctacagataaaaggaaatcaagaccacaaagctaggaggctcgtggtggctg

SEQ ID NO: 195901 - DNA, 280 bp, Glycine max
tgttgaaattgccatgtttggatgagttaaacatacccattctgttttagggtttttatgaggatgcttgtgatgttcatgtactgaaattgcttatggaaaactgttagagatgaaaggtagagttaacctagggttagaaagtgagaatgtggtgttatgagtggaaaaaaagtgaggctttgagagttgaaaggctaaatctggattctgtagtaaatggaggttaaaatgagttaatcctagcttgaaatgccatttaggacttatgagaaaggtt

SEQ ID NO: 195902 - DNA, 563 bp, Glycine max
  unsure (1)..(563): unsure at all n locations
agcttctaaaagaacaagtgcagctcctactaacttgcatgcgcacgtgaatgattatgcaactaatacttaatccttcaaatgactaggagtgtggctttgcctcttgggccttgctgtttgcaactccttgctgttactcacattgggctttgctgcttgtaactctttgttgttactcatcagttggttaattgttttcgttctgatcaagagagtcatgcacatattttgtttacacaaaatgcacttgagatagagtcatcacaagtttgatattagagcaatcgaaactcgagttcaattcaaattacccttgtgttgtaagatccgcaaaacccacacttgtggtatagccaatgaaatggtgcagtacccttctcatggcagtcattgcanaatatatcctgtgatataaaaaatcaggtttcacaattaaagtttaaatcttcaaattgtcccaagaaaaatgaatcttttcatttggttctcctcatctttctgaattgaataaatccaacattctgaaatgaaaatgcactaaaactttttttttttttaaa

SEQ ID NO: 195903 - DNA, 284 bp, Glycine max
tcttgagcgatcacgtgtcccttctgaagtatgcctcgcatcctaatttaagccagataacttcctagcttttatttattttaatgatgttttgttgggtgtagtatgccacaaatttgactggaggttcatttgatgaagctcgaatgcttcaaaatgtagaagcatgtgaatggttgaccagtgccttgcatggtcttggttttgcctaatctagatcctagttatgcaaacatgagagctttatgttcctttctttacttttctcttaaaaatcatctggt

SEQ ID NO: 195904 - DNA, 464 bp, Glycine max
agcttgaccagtgggtaaggggagagactgtctgacttcatgtccgacttcggtctcggcgacgatgccgtgatgggcgatgtgcaaatccgagaccggcagatgttgcggttgctgctccccattgtgatctgcgccgtcgacggccattgtgctaggacgaccgttgcatgattccgtttccggcacaaatgactcgttatcccctataccctagttggtgaaagatgagctgtcgaggaagctgtcatcggagttaagctcctccgatgacccacgcgcgtttctccctctccgacaacgatcttggcatccaccgcagcactcctcagcaatctggaccatgaactgctcttctccaatctgcaccttcaccgtatgttgaattaaaggcctccttgtagtcttaacgaggacccttgctctgtccaatctcctctttttctccactgagtcattccaat

SEQ ID NO: 195905 - DNA, 284 bp, Glycine max
tgaacttgttattgtcaaattcaaaacaaatatcatttatagaagttgtagacataatcttcttgagaatatactaattatcagtctatgcatgactaagatgctatctcaatacagcctatttcaacatgtgattataatttgctaatgcagctggcatttctgatgaacattgctgcataatctgatgtgtatttattttatgctttgcagttcaaagtgtttttgagactaaagtacaaattttcttgttcttttgtgccggtgctgctgaagcatctttt

SEQ ID NO: 195906 - DNA, 378 bp, Glycine max
agcttctggtgggacatcttgacttgctttccaatctgacattcaccacagattctgccttcttctattttcagattgggaatgcctctaatagcacctttgtcaatgatattcttcatgcctcttaagtgcagatatccaaatctttgatgccatattctgacttcatcttctttggaggatagacatgtggaggagtaactggtttcttgaggtgtccataggtagcagttgtcctttgatctgctgcccttcattagaacttcacacttctcatttgtcactaagcattctgactttgtgaaagttacattgaatccttcatcacacagctgactgatgctgatcaagtttgcagtcagtcccttcaccagcagt

SEQ ID NO: 195907 - DNA, 283 bp, Glycine max
tttcgattcattctatgtacccgtggtggtccacattgtgtttcgcgtatttttattctcgtttcatttactttttatacccccttttgacgtgcttaagccatcttatttaagtcatttctcgcttaaactaaaaataaaataaatttccaccgatcgtttgaattgtattatccgttaacttcggttaaaatgaattccgaccgttcggttgtgccgtaaccacgttggaaattaaaaaaaaaaaagaggtaaaaaataatataataataaaaaaacatct

SEQ ID NO: 195908 - DNA, 442 bp, Glycine max
agctttacagcagattttagtaatgacccactaacctagaattaaaataacttaatgccattaacctatggaattaaaaaaaaaaaaacttaatggctgagtgtaactgaaattgtggcaaccaaaagtcacccccaacagccaacaagtcagccaccatttggtctcccaaaaggctgatgcctaggttgccaattgggcccttattacaacttgaactaaacctaactaaagcccttttagttgattcacccaaaacatatttttggtcagccaactttacaaggattgggccattatttagacaaactaaacactctaaaattgagacaaagtggtgtcatttagtcctcctccatttaggccatgatacaactcacaacctttgacttttctccttgaaacttgggcttgtattcaaatagtattgacaacacttgtt

SEQ ID NO: 195909 - DNA, 276 bp, Glycine max
ttgagcaaattcaaacgacaataacttattagtcggatgtctgattgagacccgtcatatatcgagacgctcgaaattgaatgttgatgctccgagcaaattcaaacgacaataacttttaactcggatgtttgattgagtcccgtaatatatcgagacgctcggaattgaataccgaagctctaagcaaattcaaacaacaataactatttactcggatgtccgattgagttccagaatatatcgaaacactcgaaattgaatgttgaagctctc

SEQ ID NO: 195910 - DNA, 478 bp, Glycine max
  unsure (1)..(478): unsure at all n locations
agcttaacaaaaggcatgcgaagtgggtggaattcctagagcaattcccttatgttatcaaacataaaaagggaaaaggtaatattgtagccgatgctctttctcggcgtcatgcattactttctatgcttgaaacaaaattgattggtcttgaatgtttgaaaagcatgtatgaaaatgatgaaacttttggagaaatttttaaaaattgtgaaaatttttcagaaaatggtttctttagacatgaaggctttcttttcaaagaaaacaaattgtgtgtgcctaaatgttctactaaaaaattgcttgtttgtgaagcacatgaaggaggtttaatggggcattttggggtccaaaagactctagaaacattacaagaacatttttattggcctcatatgaaaaaagatgtgcagaaatnttgtgaacattgcattgtatgtaaaaaagcaaagtctaatgtaaagcctcatggatt

SEQ ID NO: 195911 - DNA, 278 bp, Glycine max
  unsure (1)..(278): unsure at all n locations
tctatataagctgaaccattttatcaataaacacaagttgagttttattcagaaaattagagtttatctcttttatcttagtgagagtgattctcctaaattcttgagtgattcaagaacaccctggctgtatcaaaggactttcacaacctttgtgtgttgccctcgctgganagagtgattctttccttcctatcatctccacccttgttctttcaaaccacaattccagaaaatccacctctgcccaaaattatctcgtgaccataactcccatt

SEQ ID NO: 195912 - DNA, 927 bp, Glycine max
  unsure (1)..(927): unsure at all n locations
ctatccaacctataacgtatatctcctagaatgactccatctcgcgcacccacggcnnaattgaaaccgtcgtttatgcggcgatcctnaaaagacgaccagccagcaagcaagccccccaaaaaaacctcgaagaagcatcttgaggaaaccccttaacgaagccatataaagaggccacgcgaattctgtttttggtaaaaaagctacccaacgttttggcacacgtngagaccaactcgaattccggcgctggggctccacaaaacaccactagtaagaactgaccgtggggacccaatgagaagacagcctggggtgggaaccaagccctctttcccgggaacacagcccacacgagcacgcccagccttgaaccacccaaaacctttgagaagtgcccacaactttcctgtttgggccccaaaccataggcaacagacacagctcaatccccacgacccatagcccacaagcacccccacaaacaggcttgatctacctcaaaaccctacacacctaggacacagacaagggcgggccccaataaaataacacgaaactgccctaacaaagaagtgaacctaggtcggtttccacccagccatgacaagcccaatggccatcaaaagcatccccaacccacaaacgtaaccaaggggggggggggaaaccactattggaaaatgaaacgacgaacttttcggaattaaaacaatcggaacaaaccaagggctttcccgcgaagcaaaacaagcccacgactcgaccggaaggaattgaacatattcgcgcctatcaccaacggaagccaaaggtaattactcgccgaattcaaaacgccggtattggacagatagcaaagtaagccaatgcgaggtaaaccaacgcacacggcagcgactgaacgcggacactcacccaccc

SEQ ID NO: 195913 - DNA, 488 bp, Glycine max
  unsure (1)..(488): unsure at all n locations
agatctgtatatactcgattgtatcataaanttctcctcttaatctataattgtatatgatgtcatggtattgaaaatactgttatttacatccggagggganatttgaatccattctattgaggagcctctatagaatactcnagcttgtgcttgttttatttaatatgccttacgatcatgtagaaacttatgtgtgttcctactatgaacttgagaatacaaaagttgatgcaaataacaaagctgagatttaaaagggaactaagtatgccttacctaatatcgccttttttaactggctttgagttggaacacgtcgatgactttgtctgttcacctgaacctattaactaatgcttcacaatttgtgcttatgagaccttggaccgatcttattggttcaatccatggtgttcattatgctaacgtctcttaacactttttgtgtgatgatactgatagtgatacttcttataatgttgtgg

SEQ ID NO: 195914 - DNA, 834 bp, Glycine max
cgcaaatgaatcgacccacccggaccccaagtcaccgacagccgcagcttcgagccatcaaagggcacacggaacccccgagccccagaaagcgcataaggacacggggccctctggaagaacaaaggccccaacccaccccaggccaagcggggaacaagtaaaaacgaaaggcccagggaggcacaaatcaatccgaaaggcaccacatggccccacagaacccggagagaaattcaaaagggcataacgcataacacagaaggcagggcccggcgcacaaacagtctgcacgaccgggaaagaacaacggaagctgcacagacagtccaaaggaaacaacgcgacacagggggaaaagggcaagaccacaggatagcaagacgctcagaaagcaacaaacgcagtctccaaaacccccaaagggcagaacgggcccacggagggccaaccaaggccccccccaaaccagaggcccggaaggaacaaccaagacagccccaaaaacaaaagccatggccgggaccccgagggcacaaccaaaccccccaagaaccggacccccccgaagggcccaacggaaccccgggacaatcaaaaggccaaacactccacccgaaggcggcaccgggcccaaaaagaacgaacccaccaaaagaacacaaggaaacccgagccgcgaaagcgcgcaacgcaccccgcggagcccaaaagagcccacacccgcaagcggcgccgaaaacgaccgacagccccgcgaacacaacgcgccacaggaacccacggggacgacaagcgcaccccaacacgcacgaacgcacagcgaacgcaccg

SEQ ID NO: 195915 - DNA, 240 bp, Glycine max
tctatgaggaggtcaacttggagaacgatgctatctgaagaggcttttcacgacgaagtatcttgtagaaaacatctttcaagtcctgtgataaggggtgaacgctatgagaaccttatcatggttgctgatgaaaatgatcactctgtctctttatcgtattacttttttccacaggtggctcattgttatttttcatataccggagtggagcctcactattttcttttccttgggctt

SEQ ID NO: 195916 - DNA, 912 bp, Glycine max
  unsure (1)..(912): unsure at all n locations
gctgatagagtagataatcatctacaaatacagcacaggacattgatgattcttcaggcccnnccttggtaaaatccgccccccgaaatataaattggacgaaaaaaacagggtttaaaatagcccaaagcggtacccgcggggagaggttgtttattaacaaaaccccacaacccacccaagtcgaaggataataaggtaaaaccggggtggccgcatagatgcgccttgcatcaactaattgggcttgggccgaccggccggataataaaggaggaaaaccggaagggccccagcaacaaaagaaatcggcaaagcacatggcacacgggataagccaaacatataatgtcaaataaaagaagacgagcatcaaaaacaacacccacatagaacaggcccacgattaggcagaaaaatagaggaacgttcatcagacgcgctattgacgacaataaggactgccgaaaaaatagtgaggaacattcattgatagttttccacaaggaagcccaggaaagaaggtgggacagaacggtattaacaaaggacagtgtcaaggtgacgacaaaagaacggacgcagcaaatcaaagaaaggaaacaacgacggctgagcaatgcaggacaccatcgaaagcacggaacaaaaaaaaagagacgcaaccaagaaaaagaaaggaagcacacgaatcaaaactaaggataattagaataaggaaagaaactcacgccacgcccacaaatgtaacgcagagtcacaagacttggaaaaacctatagaatggaaagagactggatagtagagagagcgcccgcgtacgcacaccaaaggtaagaagaatgagtaaactgagcgtatcgtaaacgcacagtgaagaaaaagaatgaagctagagcaacgcaaacagcg

SEQ ID NO: 195917 - DNA, 235 bp, Glycine max
gccctatagtgagtcgtattacaattcactggccgtcgttttacaacgtcgtgactgggaaaaccctggcgttacccaacttaatcgccttgcagcacatccccctttcgccagctggcgtaatagcgaagaagcccgcaccgatcgccctttccaacagttgcccagcctgaatggcgaatggcgcctgatgcggtatttttgcttacacatctgtgcggttttaacccccgtc

SEQ ID NO: 195918 - DNA, 292 bp, Glycine max
ctataccgcctcatttctctccccctttggtaacatcaaaaagccaaagttcgtggcaatcaacacaagatgatataactaaagttcacataatcaattagaagtcaaaaccaaatataatccaatcatccataagtcaaaaaccaaatataattgatcgaagccgtacccgaatcaaataaacatgaaaatgccgtaactaggaagtgatcctaggtcgtttcccaacgagcagtgacaagccaaatgttcataatatacttgcagtaacagtaacgatgggggggggggg

SEQ ID NO: 195919 - DNA, 290 bp, Glycine max
tctcggctcctgctgggaacgcctctagctcaacacccgtgcagcctaaggcacccacccagagggaagctccccaagttccaactccgaacgcgactcgaccggccggtaattccaacacgacaaggaacttccctcagagaccgttgccggaattcaccccgctcccaatgacgtacgaagatcttctaccatccctcatcgccaatcatttggccgtggtaactcccggaagggtcttcgaaccccctttcccgaagtggtatgaccctaatgcaacttgcaaatac

SEQ ID NO: 195920 - DNA, 290 bp, Glycine max
agcttatgagaattccaagctttataagcaaaaagtaaaaatctatcatgacaaaaagctatcaaaaaggaatttttagtctggtcaataggtattgttatttaattgtcaattaagattgtttctaggtaagcataaatccaagtggtctggaccattcatcatcaaagaagttatgccacatggagcaatgatattggaagacccaaccaccaaaaggacatggaccgtgaatggtagcaagaggataatcactgttgtccagctgcaagaggcttgaaccataaaaa

SEQ ID NO: 195921 - DNA, 289 bp, Glycine max
tctcggctcatactgggaacgcctctagttcaacacccgtgcagcctaaggcacccacccagagggaagctccccaagttccaactccgaacacgactcgaccggccagtaattccaacacgacaaggaacttccctccgaggccatttccggagttcaccccactcccaatgacgtacgaagatcttttgccatccctcatcgccaatcatttggccgtggtaactcccggaagggtcctcgaaccccctttcccgaagtggtatgaccctaacgcgacctgcaagta

SEQ ID NO: 195922 - DNA, 450 bp, Glycine max
agctttacatcagattttagtaatgacccactaacctagaattaaaataacttaatgccattaacctattgaattaaaagaacttaatggttgagtgtaactgaaattgtggcaaccaaaagtctgatgcctgggttgccaattgggcccttattacaacttgaactaaacctaactaaagcctttttagttgattaacccaaaacatatttttggtcagccaactttacaaggattaggccattatttagacaaactgaacactctaaaattgagacaaagtggtgccatttagtcctcctccatttgggccatgatacaactcacaaccttggacttttctccttgaaacttgggcttgtattcaaatagtatggtcaacacttgttgagacgctcgaaattgaacaacggatgcccctcaaaaattaaaatggtcataacctttcac

SEQ ID NO: 195923 - DNA, 283 bp, Glycine max
tgtaggattatggggtacccatcacatgtggtactaggtggcggtcgggcgatggtgcacaacaagttttccacatccacaatgcgcgcataagcccaccatcccctgttgcccacctccatctgagctcacgtactcccacgtagcccatatcctcgtttctctcaacaccgggtccccatcaatcctcccaagcttccacaacatccaagcaaaacagcattcaaaccgcacaagctatcacagccaagcaaaacagagcaaaggcagaaaactctgccaa

SEQ ID NO: 195924 - DNA, 434 bp, Glycine max
gcaagcttctttgtggggaagcataagatcccagtgaacatcctccaatttgctgatgaaactagcgttatggagaagcttctatggataatgtcaaagctgtgaaggccattcttagaagctacgagatggttttaggcttgaaaattaactttgccaaaagccactttggagcaattggacaatctgaagaatggtgttgttctgctgctggctatcttaattgtgccatgctccaattccccttttgctaccttgggttgcctataggcattaatccgagaagaaagatggtatgggagcctatcataaaaaagtttgaggctaggttgaacaagtggaatcaaaggagcatctctatggctggaagaatcacccttatcaatgctgttttaacagcattacccttgttttacttggccttttacagggct

SEQ ID NO: 195925 - DNA, 237 bp, Glycine max
gcctcaccattgtcacgtgtggatgcatcaatcgtctgctgaggctataccagacatcttgcgccacgacttcaagcttaccataacttgcctgcgctccttcttgcctgccgtatgtaacggagtcgttcatacttgcatgttcgacgacttgcatgctatgtcatactatactgtgccactgtgagatagattttacccctgctctctttcacatgatcactcacttgattgcgc

SEQ ID NO: 195926 - DNA, 427 bp, Glycine max
agcttcatcaaatgaaacaaagaaagacttattaagtcacataattctactaaccaccatgatgtggttgtttatcaattctcactcacatcctactcatttccatttctaattttgtaatcagttatcattggtcagctgtcattggaacttccaaaattcagtggtcatacaacattttagtcaggatgacttttgggagtacccctcaccatagtacaatggcaggctctcaccaacatggttatgcctcacatttgtcgggattttcaagttagcattatggaaaacacaaccacaaatgcaccaccacattcccaagaaagaacaagtcagccagcaaacctcagtaccaatctgtgtggtcacccaaaaactctgaggactaattcctcaatgactttccccatggggattcgtcttttat

SEQ ID NO: 195927 - DNA, 284 bp, Glycine max
ttgcaaaagccttgttgattaagggcaagaggtcaaaacaccttccaaaccatgtcaaggacaaggtctctgatccaggtttcaaatccaatgctaattggtcaattgatttggacacataggatttaaacgcaagaagtgaagatgataactcctctggttgaggatgtgtaatggcatggtggcgattctccagcttgaagttgaagtaacgttttgcaagtttctctgtcaaaagtaccattagttattggaagctaactagaacacagcgatgatgatgc

SEQ ID NO: 195928 - DNA, 439 bp, Glycine max
agcttccacaatatccaagcaactcaattccaactatcatgaactaccctaaaccaagaaaatagggcatagcagaaaactctgcccaaaacacattcacatattacagctttccttactcaaatacccttgtaacgttcccttcgttccgattcgttaaccgttggatcgacttgaaaattttactggaggttcctagtacataagtctacattttgaccgttgggattcgctagaaaatgtccagaacccaatatgtactacctttcccataaccagcaatgcacaagcatttttctgcacatttagaaaattctgctgcacaaatttgacagctttttgctgcacaatttggcagatttcgaaatccatcttacccacatccaatttttctcaaattggatcctacaagtcctaaatcatgtataaatcatattta

SEQ ID NO: 195929 - DNA, 284 bp, Glycine max
tgaactccttccatatagggacctagatgagctagtccaactttgtataagagtggagcaacaacttaaaagaaagccttcttcaaaatcttatggctttcactcttatccaaggaaagacaaagcccaaggaattttgggggcttcaccttcaaaacccaaggaagataagggtaagaccataaagaaatccacccctaagactagttcccaagaaaggactagcaacattaaatgcttcaaatgtcttgggagaggtcacattgtctcccaatgccccacaa

SEQ ID NO: 195930 - DNA, 551 bp, Glycine max
  unsure (1)..(551): unsure at all n locations
agcttattgttaaacaatcaataaatttagggttaatgaacctattacattatanatgaaggttatggttgaaaacttgacaatgtctcctattgtgggaaagtctttttgaccgttagatataatgattttaaaattaacggaagacttaactatgtctcctatcaacttctcaaaaaaaaatgtctcttatcaatttctcaaaaaaaaaaaaaagtttcctatcatgcttataaaaaaatgtctcctattgggagaaaatcgtttttgaccactagatatgttggttttaaagtcaatggttgacattttttttttccttttattttttcatttttcttaatctttcttaatttacccctttttcctttatgtattcctttttctctttttgctagatttctctcaacatactttttagtaggtaacccaatattactctaaattgaatttactcttaaaaatatattttgagggatccatccaaaaattaaattccctcttagaaaaaccaattgaagaatggaagtggcatttttctaaattttttt

SEQ ID NO: 195931 - DNA, 160 bp, Glycine max
tagtgacactatatactctcagcttcacttatttataatgtcagaaaaaagaattaggatttaagccacacaatgcaataaattgatatattatataagagcttacacaacacatgtattgagttgtagctcaaaacttgattgctttaagattattttt

SEQ ID NO: 195932 - DNA, 500 bp, Glycine max
agctttttattgtaatcttgaaattcaggacaacactctgatttctgaaatttttgggatatttatggtcattgaccagtcccttttccatgacttaaccaaattacccagtgacggtgtaccatttgaaagcacactaaatgacgactggaaatttgatttctctgcccatgatgcccgccagttggtttgcaccaacaatgcagatatgaccggacgtcttcttgtcgggtcattggcttttgaaagccgcatccttcactatttaattgtgcgtattctgcttccacggtcttccaaccttgcccaggtttctgaggaagatctaattatcatgtgggcccttcatacagggcgtcaacttgactgggcacacttagtcagatatcccatgcataaggcattgcgaataaatgctccactaccatatcccacacttgtcactctctttttccgccatttcaaaatccctcttgatctgaacccttatgttccaatca

SEQ ID NO: 195933 - DNA, 280 bp, Glycine max
tcggaagaaagtgatgaggtacaagccctaaaggcaaagcttgaaagagcccgggtagtcaaagagaagttcaagtccatagccatcaaagtctgaagagagtatgatgaactaagggacgtcaatatggccaccgatgaagccttggaatgagaaaccaagaaggcccgaaaggaagaacacgaccaaaacaagttttgaggggctttatagggcagcaatagtgagctcaagctccaaagaggtgaaaggaatcatcacgggtcaaaggcatgatctt

SEQ ID NO: 195934 - DNA, 353 bp, Glycine max
agcttcaccggatgatgccgatcgaacatttcctaatcgacatcatccaattgttattcagggattgaatagaataaacaatggccagtgtcggtccttatatggccccgactgatatctttcagccgacattgggcaatttcttttacaaatggtggccgataatgttctttttttacgataaaggaagttttttgttttggtgttgcctaaaaaatttacaacttatgtcggctaggtttttccgtgcgagctcagccgagggttcgttccgacggacactggcatgttgttcttctcatttaagagggcaagaaaacgttggcccatcccgaccaaaacaaaaaaaaaaa

SEQ ID NO: 195935 - DNA, 276 bp, Glycine max
tccatcaagttatgaccatttgaatttctcgagatcttccgtggttcaatttcgggcgtctccatatgtcatgtgcctgaatcggacctccgtaagaaaatttatgaccatttgaacttctctagagcttccgttgtttaatttcgagcttctcgatatctgatgtgcctgaatcggacatccgagtgaaaagttgggacaatttcaatttctccagagcttccgttgttcaattttgagcgtctcgatatgtgatgttcctgaatcggacctccg

SEQ ID NO: 195936 - DNA, 894 bp, Glycine max
  unsure (1)..(894): unsure at all n locations
naacacggaaaggaactctacataaccaccagacaagaaanatgaatcatgacgaccgcggaccttagagacgacccgcagcatgcaagccgagcgttatcatgcatgctaaggcaacagagaagccgaactcactcacgaatgaacgccaaggggaaatacaagataaatcccccccacccgaacaaaagtgaacactcggtgaagacacctcgcaccgtaaagaagctgggacgagcccaaacgggaaaaagaattgaaccgcaagaaaacacccgatctgggtgggaacaaaaaaaaacggggccaaaccaaccaccgagagcaagcatctggaataaaaagggcatcagcccacccccacatggaacacacaaggcgcccaaacagaaaaaacccaaccgaaaactaatatcaaaccatcaaaaacccaaagcgcccccacaagaacgatccaagccccgcaaaggcacgggtacttcacaaccaccccatgcgaagcaagaggaacccacatgcagacagaaaccccaacatcacccctaaataagaacaatgcaagccaattccggaaaggacaacgaaaccaaaggggggcaacacacacgggtccggcccaacaaccaaaaaaggggggcaaacagacagccagcgtcaggggggggcccagcaaaaaaaaaccgaccgcaaaggagcaaacccgagagggaaaagggaacaccaacagcgacaggtcgaggataaaaaaaatatccctctaacacaaagacaaatcccgtcataggaaccggcgaaaaaaacacacttgcaaacactcggagggcagaagaaagaaaaacacaacacacccacacactcacccctcccctatcaggggggggggacccaaacacc

SEQ ID NO: 195937 - DNA, 926 bp, Glycine max
  unsure (1)..(926): unsure at all n locations
taccctccgaattcgtactctaacttgaatacacnctccccacgtcgcccnttganttgattaccttccaagacctctanaattgacctgacagcccgccagcttcaaaaaaagaggccctccccaattccttattttcataacggaattctctcaatagacccgcgatcttttatggagaaggttacccccccccgcaaacccgaatgcaaatttttattggggccatagatctaaatatctgggaagccatagaaattaggccttatttacccaccccaataaaaaaagtttcaataaatggtcattcctccagtgaaagcataactttaaaaaaaccctcacataaatggtctggaaaagatataaaaccagttcaattccacttaaaagccaaaaacattattacctctgccctgggaatggaataatatttcagggtttccaattgtaagagtgctcagaaaatgtgggacacctcttgattaacccatgaaagaactgcacatgtttaaagatctacgataaatgccctaactcatgagtatgaattattttaaatgaatgcacaaggaaattttcaaacccgccaaagaaaattacccctatagtaaatcattttacaggctcttgccaagaatttcaaaatgaagatcccatatacacaggtgtaaaatttttaattgagaatggccaccccaagttaacggccttacttgaccaaaaaattgtctatatatccctccccacctttctttggaacttggaggaccccaaaatggactcttgagattcctctcacctaagcaaatggcccgcacaaaaaagggtatgccctttaagactcatacctcattccaaaagaaaagtatccggaatgtgactcaaacaagaaaatgtacctctacttatctcaaaaaataccg

SEQ ID NO: 195938 - DNA, 279 bp, Glycine max
tgggtgatgttgcgcgtactgatgggtaccatgaggtgtttgctggggtttgacccacgcgggtgttgaaaagacagcatgggcatctcctttcttcctttttgcccctgttgccccgattcttttggcattcgcgtttgtggaggaaacgtaatccaactttcctcttttcaatccaacctcgattcttttcccagcaaacaccagatccgcaaagctggacggcatgtaacccactagcttctcatagtagaacactggcagagtgtctaccatcat

SEQ ID NO: 195939 - DNA, 517 bp, Glycine max
agcttcttcttgtttcttcccccattttaaaacaacatttttcttaattacctcattcaaaggtgcttgcaaggtactaaaattcttcacaaatcgtctatgaaaacttttcacctcagtcacacttctaggtgcaggccactcttggatagccttgaccttttctttatcaacttgaacccctttggaacttactacaaaaccaagaaacacaacatggtctttgcaaaaaaatacatttttcaaggttagcatacaattgttccttcctaagcacacacaacaccgattttaagtgtgcaacatgcaaatcaagggttgtgctataaacaaggatatcatcaaagttcaccaccacaaatttaccaatgaattctctcaagacatggttcattaatctcatgaaaatgcttggagcattagtcaaactgaaaagcataaccaaccattcatataatccatatttagttttgaaagcgggttttcatttctctccttctttaatccttatttgatt

SEQ ID NO: 195940 - DNA, 286 bp, Glycine max
tcccagctatggagagctaaatcctcagttggttcttcctatggggtacttgatgtaaatactttcatatctatttaatgatgtttcatgtgttcactgtgttatcagtacttaattctaatgtgcctttgccttgatcacataactgcaaccgtagttagggtcactcaacattgggaaatggtttgatccttaaaacctgataggacagagctagcttatcgtattttcatgagacatcagggtacgataacctagtgtttgatatgttatgtcttaatgcggt

SEQ ID NO: 195941 - DNA, 461 bp, Glycine max
gcttaaggactatgattattcaacatcacagaggtttgtgactactggtggtgatttcggcaacccctgttcgcaaaccgtggcgaattggtctccccattgagaagtatgaggatgcttacaagttggtctactgtccaagtgtgtgcaacgattgcagttatccatgcggtgatattggaatataccaagatgaatatggcaagcgtcttgctctaagttctgaaccatacaaagtgaagttccagcgggcttaattattgaattgataacaaaactaattaaagaataatgaataagtgtaatgaactactttatgcttttgctgcatatatggtaattctcatgttgagttccttgccacggacttgataataaataaacaagttactttctatttttagtctttccaaaatttcttgtttctgttcgtctttgtcattgtttgcatttgggatgca

SEQ ID NO: 195942 - DNA, 291 bp, Glycine max
tttattggattctacatttcaagagaaaaaaacagctgaaactcttgtgagtaaagggtctccaaagaaaaccaaaaacaactgaacaagcaacaattgcagaaacacaaaggaatatttgcattcattcatcatcatttcatctctaattcctcgttccaacaaatcatgaaacaacgtgtctctgttagcatcttcagaaacttggcaatgttccataaatggataagataactcgaaaataaaagctcaaaactttctgaaacaaatgagaaaaatggtccattgatt

SEQ ID NO: 195943 - DNA, 326 bp, Glycine max
agcttgtttcagaggcgtggagtttactatcagataaggtcaaaagactagcatataaccagaacaggagattggaaggatttcacgataatgctcccaacaagaatggttatataaaacttaacaagaatgcaacttccagcatgagaacaggaaataatgatgctcgggcacatccacatccgcatacaccctccattcctcctccacatacaaatgctggtaccttttggactatctgtaataagtgcaagacacattatgaatatctcaggacatatttgaatcaaacccttttatgtcccaattgtaaacaagcttttgtg

SEQ ID NO: 195944 - DNA, 271 bp, Glycine max
tggacaatggtagggcaatcttgcaaaaatcctagatgaatttcctataaaaacctacatgtccaagaaaagaacgtacttcctgcatggaagcggggtaaggaagagaagtaataacatatatcttggccttattgacctcaatacttctactagagaccaaatgccctaagactataccttcatggatcataaaatgacatttttcaaagttaagaacaagattagtctcaatgcatcggtcaagaactctagagaggctatccaaaca

SEQ ID NO: 195945 - DNA, 387 bp, Glycine max
agcttgagatgaggaagtgtagaagggtgaaacttcctgcttttattcgttgaccacagagtggtacctggagatatgtcgcgggggtcaagagaccttggggacgtcaggtggggtgctattgcccaaaaccaagcttgaccaatcccgacccaacccgggcatagtcagtcagtgagaacctgtgatgtacctaagcaggcgagctcctggcagtcaacagataaaaggaacaaagaccacaaagtaaggaggcttgtgtggtggctggctagctgtgaatattgtgtgatatatgggttatggcctctggtaatcgattaacaagggtgggtaatcgattacaaagcttaaaaatgaaaacaggaggctaagatggtctctggt

SEQ ID NO: 195946 - DNA, 283 bp, Glycine max
tcaggctgctcaattgctccaggttgctgcatggaagggcaaaggtctgtatggtggtcagcagaggagcccaaaccacaaacccttgcgacaggtacagatttctgattcaaggccagctgggttaccaagttgatcaacgcatccagtttgccttcaagcttcttagtttcagatgatgcaaatgggtttgtagctacctgtcgcaacctacccttcagcgggagggcgacgcgtgactcgcgggatgcgtgttccacgaaaggaatactcgcggagtcgc

SEQ ID NO: 195947 - DNA, 716 bp, Glycine max
  unsure (1)..(716): unsure at all n locations
agctntgatgcaacatttggagaggttaatgaaacaacgagatgatgcgctccatgagaggttggatcaaatggagaatagagatcatcctgaagaagaaaggaggaaaagaaggaatgatggtgttcctaaacaaaaccgaattgatggtattaaactcaacattcctccatttaaaggaaagaatgatccggaagcctacttggagtgggagatgaaaatagagcatgttttctcatgcaacaactatgaggaggaccaaaaggtgaagcttgccgccacggagttttccgactatgctcttgtgtggtggaagtgattatgcaagttgaagtggacgtttccattgggaaatacaatgataaggtactttgtgatgttgttcctatggaggccagtcacttacttttggggagaccatggcaatttgataaaagagcccatcatgacggttacaccaaccagatctctttcattactttggtgttgcataaaaaatgtacacatgtagtcggctaggttttttgtcccaaccttacccactttttgtttctagccaaattggcttgttccattattttgcccggaaaaatttaccccctttgcaaaaaaatattgctttcaacttatgccttttttttagggatgaactgaacctttttcccgcattgtcggtaaataccccaattaatctttcgcccccttgccaatttttt

SEQ ID NO: 195948 - DNA, 280 bp, Glycine max
tcaaaaaatttgaatggtcataacttttcacacgaatgttccattttgggacataagatatcaagacgcttcaaattgaacaaccgaaactcctgaaaaattccaatggtcataacatttcacacgaatgttccattgggggacataacttatgtatacgctcgaaattgaacaaccttagttctccagaaattcgtaatgtcataacattttactccgatgttccattcgtgggcctattatatggagacgctcgaaattgaacagcgtgatgttaatt

SEQ ID NO: 195949 - DNA, 444 bp, Glycine max
agcttataatatatcgataggctcgaaattaaacatcggaaactctcgcgaaattcaaatgggcataaattttcacacggatgtccgacccgggcgcataatatgtcaagagtctcgaaattgaacaacggaagctcttgagaaattcaaatggttataaaatttcacacggatgaccgattcaggcaaatcacatatcgagacgatcagaattgaacaacggaagctcttgagaaattcaaatggtcataacatttatctcgaatgtccaatttaggcgcatcacatatagtgatattcgaaattgaacaacagaagctctcgagaaattcaaatggtcataacttttcacactgaagtccgattcacggttataatatatcgatacgctcgaaattaaacatcggaaactctcgagaaattcaaatggtcatgaacttttca

SEQ ID NO: 195950 - DNA, 286 bp, Glycine max
tggccgtataggaatggcagtcacagcatgggtatatgcctctatctcaccctcttcatttgccccagttttgtcaatcgtcctactaggatgatcaaatttgcctcttttcggatccacttggatctttttgctagcgaagaccaaatctgtaaaacttgaaggtgcgcagcccaccatcttttcatagtatagtaccgattatgtgtctaccatcacgagtatcgactccctttccattattgggggtaccacctgtgccgccagatccctccaccttttgggg

SEQ ID NO: 195951 - DNA, 608 bp, Glycine max
agcttggttcgaggtacttacccgttgaagatcgaagaacgatgaagaacgactgaagaacgtcgaagaacggttgaaacctttgcgaaattcctcacggaaaacgttacggaaacgtttcggaagcgcctcggcttaaattttcttcacggaaacgatttttccaagcaaattcgaaagagagagaagtgccaaaggggctgaacccttttcttcttcacttcctcccctatttatagcaaaataggggaggtgcttgccgcccagctcgcccaggcgagccaagttgcttcctccagaagcaacagccttctggaggaatattctggagggcccaagtgggcctgggtgctatttgcacccccatttttactaagtacacccccctctgcttttttttggtgattctttttttgtaaagttacggaaacttaccaatttcgtaacgacacttgttttctttccggaatggtaccgaaccctgcggattacataatcattcccctttttgacttacggaaggtacgggaccttccttaattatgccacgaagcttccatttgatttccggggggcaccgaaattaccggttggggcataatattttt

SEQ ID NO: 195952 - DNA, 286 bp, Glycine max
tgacatgaggaagcgtggaagggtgagacttccttcttttattgttgaccacagagtggtacctgaagatatgtctcgggggtcaagaaaccttggggacgtcaagtggggtgctattgcccaaaaccaagcttgaccagtccctacccaacccgggcatattcactcagtgagaacctgtgatgtacctaaacaagcgagctcctggcagtctacagattaaaaaactaagaccacaaagcaagggggcttgtatggtggctggccaactgtgaatcttgtgtga

SEQ ID NO: 195953 - DNA, 376 bp, Glycine max
agcttcaggctgttcaattgcttcagattgttgcacaaaagggcaaaggtctgtgtggtggtcgacagaggagcataaaccacagagtctggcgacaggtgtagattttttattcatggccagttggattaccacgttaaccaaggcatctagtttaccttcaagcttcttagtctcgcctgatgaagatgaatttgtggctacttcatgcactcatctaattgcaataacatcacttctggcactaaattgctgggagttggaagccatcttctcaattaaatttttggcttcagcaggggtcatgtctccaaaggctccaccactggcaacatctatcatacttctctccatgttgctcagtccttcataaaaa

SEQ ID NO: 195954 - DNA, 279 bp, Glycine max
tgtctcagcgtttatgcgagacagagaccaacatgttagctatcgtcgccaagtaccaagaagagttaggtctagccacggcccacgagcatagaatcgcggatgagtatgcccaagtgtatgcggaaaaagaggctagaggaagggtgatcgactctttacaccaagaggcaaccatgtggatggatcggtttgctcttaccttgaacgggaggcaagaacttccccgattgttagccaaggccaaggcgatggcagacacctactccgcccccgaag

SEQ ID NO: 195955 - DNA, 856 bp, Glycine max
tttgaattgatatccatctcgaccccgggatccttatagtcgaccctgcagcattcaagcttcttgtggtaccgctcttggggctcaaaaatacccaaaacaaaatcctcttattactatctattttgaattctttacctcccgaacggacaacctttaaattggtgcttgttcccctctttgagaatgaggaggatcttcataggacttcatccaattgatgtttttcgcccagtttatatatccaccccccctttttttttgtgactaacaatgtacatgttgtctaacgcaacatctatgatgatgacctcaaggtgatggttttctcacaccgtgtatccagtttagtttttttgtggtggacgatgatcctctattattaccgcgacggttccctatgcggtgccccttgaacagttacgcatttatgtctattctatggaggctattatactctattatactgaaactatgtacttatttacaaaagccattcttaccggttcgacccactgatcgatttatagatctgtatggtcacttaaaagttgctaagttcggtttgtatggatctacagtggccaattatagatatgatctaatgccataaagagtggatctatgttttgcaaacattgaaacgtatacttactagactacgattcctaatttccctacatactgcttccatcccactcgccttgtgtatctattgcaactctacagttttcattccattcgatctgttcattttatctgaactgactcggtacggttcgatgccactctacaggttatacctagatactagacactaaacgttcgagctaaaattacttaccatcaatatacc

SEQ ID NO: 195956 - DNA, 280 bp, Glycine max
tgtaggattatggggtacccatcacatgtggtactaagtggcggacgggcgatggtgcacaacaagttttccacatccacaaagcgcgcataaacccaccatcccctgttgcccacctccatctgagctcacgtactcccacgtagcccatatcctcgtttctctcaacaccgggtccccatcaatcctctcaagctttcacaacatccaagcaaaacaacattcaaaccgcacaagctatcacagcccagcaaaacagagcaaaggcagaaaactctgc

SEQ ID NO: 195957 - DNA, 417 bp, Glycine max
agcttggttatctccttcttcactacatcaataatcaccgggttgagtcttctctgttgctggcttactggtttagctccatcctctccatttattcgatgcatacatgtggatgggctaataccacgaatgtccgccagggtccagcctatagccttcttatgcttcttgagaactaacaacaacttctcctcttgctcatcagcaagggaggcagatataatcactggaaaactcttgctatcatccaagtaagcgtattttaaattttatggcagaggcttcaattctggtgtggtcaactggacagtggtagaaagagatggtttcttagcctttacctcataaagaaaagcagatgtatgtgtactttttgaaactggttagtcctatctgactctataaaatcaatctcaa

SEQ ID NO: 195958 - DNA, 280 bp, Glycine max
tgtctcagcgtttatgcgagacggagaccaacatgctagctatcatcgccaagtaccaagtagagttaggtctagccacggcccacgagcataagatcgcggacgagtatgcccaagtatacacggaaaaagaggctataagaaaggtgatcgactctttacaccaagaggcaaccatgtggatggatcggtttgcccttaccttgaacgggagtcaagaacttccccgattgttagccaaggcccaggcgatggcggacacctactccgcccccgaaaa

SEQ ID NO: 195959 - DNA, 490 bp, Glycine max
atatagggggagtaaacgcacatttttatctatatacaattgtttggtgcttgcttgaatcttgatttcaggtattgtattgtcatcatcaaaaagggggagattgtagatgcaattgcttttgatgttttgatgatgatcatgatgatatgatgcaattgatgaaaatgggcttttcaagattaaattcaagacaatacttcaagattacaagtcacaacatcaagatgatcactagtatattaggaagggaattcctaattgaattagcaaaaggtttggccaagtaatttaaattaaaaaatgttttacaaaggttttactctcttgtaatcgattaccagaagatgtaatcgattaccagtggccaaatatattttataacagctactaacatttgaattcggaaatttagactgtgtaatcgattacacaattttggtaatcgattaccagtacgtagtaaacgttttaatttaaattttaaaag

SEQ ID NO: 195960 - DNA, 572 bp, Glycine max
  unsure (1)..(572): unsure at all n locations
gtgaaattaaacggatctttgttggtggagtattaatttttaaaagattaaattctaattttgatctctagttttataaatctacaattttggtcttctatattttaattgatacatttgattccctggattcttaaacttgtgattttggttgtttagttatctggcatccattgacggttgaccagaaattgcttgactaaagagtttaaaatatattaaacagatttaggcggttttcaactgccggaaattgcttctcaccctttccccgctaagacaaatcagatcctaatcttcaatggcacagacaaaaccaaatccaccaatgaaccaattttttccgacactagcaacataattaactcaaaatttgtaagcctctgcgctgccgttagtaaatttatatgattttaaatcaattntatttnaaatatcaaattcaaataaagtattaaaataaaaaaatatttaaacttattttaatttatagaaactaatatgtaataataacgcgtcttttaattttttatatattatccaatcacaaacattataaagttattaatttt

SEQ ID NO: 195961 - DNA, 462 bp, Glycine max
agcttgctaacccatggaagcttgataacccattcttctttccttaagacatgatgcataagcctcataaaggtgcttggtgcattaatgagcccaaaaagcatcactagccattcatacaaaccaaacttggtcttgaaagcggttttccactcatcaccctttttcatcctgatttggtgataaccacttttaagatcaatttttgaaaaggtattggcaccatgcaactcatcaagaaaatcatcaagtctaggaatggggtgcctatactttacagtgatgttgttgatggccctgcaatctgtacacattctccatgtaccatcctttttgggcaccaacaacactggcacaacacatgggcttaggctctcttggacccaacccttctccaacaattctttaacctgagactctatctctttagtctcccgagggttagtcctattggctggccta

SEQ ID NO: 195962 - DNA, 373 bp, Glycine max
aatcagagcacaagagcttcaagtaggtgctccttaaacctccattaattttttttctttaccttctcttccattgttggttcttcatttttctccatgtatctcctcacatgtcttgttctaaatgttgttaacatgattctttaaagtttccacctattaaacttgctatagaagctagatttgattttctatggctcaaatttcttgttcttgttcttgaaccatgaattgtgatgagtttaagttcctttgagttttgccttgctattttttttgtggctgaaacctaaaccatataattcttacaaaaatattaaagtagaagaaaacctcaaaaatctatagagacttgttcacctattgtagtttt

SEQ ID NO: 195963 - DNA, 536 bp, Glycine max
  unsure (1)..(536): unsure at all n locations
agcttgcctgtccgatgtagcagtaatgatggcccgagttatgttggggaacggttacgaacccggaatgggtttaagcaaagacaacggcggcataactagcctgataaatgccaaaggaaatcgtgggaagtagggtttaggctataagcccactcaggcggatatgaagagaagcaccgcgggaaggaaaagcagtggccaaagctcgcagttgagacaagaaagtgaaggaagcccgccctgccacataagcagaagctttataagcgcaggtttgggagacgaaggtcaagtggtcgcgatatacgaagatgatgttccgagtacattggatttggtacgaccatgccctcctgatttccagctgggaaattggcgagtggangaacgccccancatttacgcaacgagcataatgtaaacctttacggttttaaaagctctatagttgggcctacgctttagaagttttccttttgttaaggctttgtgtcttttgtttttgaattataatacaaggatctttcttcatc

SEQ ID NO: 195964 - DNA, 463 bp, Glycine max
tcagaccaaagcaactcaaaatctaggcatctaaaacccctcaatttagtggattttcaaggtttgagaagtgaaaatgagaatggggtaaatttagagtaaactctcacctcacacaagtctataacatcaatctaaactttctcaaactgattttacgcctcaaattcccccgaatcaaaatttgactcctcaacacccaattttaccctaggaatggctcttgccttcactttggtcatttgtttttctctcttgcacagtccaagctttctcataagtcctaaatgacatttcaaactaggatttactcactttaacctccatttaccactgaatcccgttttagccttccaactctcaaagcctcactctttttctactcataacactacattctcactttctaaccctaggttaactctacccttcatccctagcaatattccatcagcaatttcag

SEQ ID NO: 195965 - DNA, 574 bp, Glycine max
  unsure (1)..(574): unsure at all n locations
agcttattactatgccaaggaggaaaagcttcttgtctatgattatctctccaatggaagcttgcatgctcttcttcacggttagttaattaatcactcttcttaattactctcttaggtaccttttgacagaggaaaaagaaatggaattgagaacaaatatttaaattaaaatggtatatgaaagtatgaaactctaccgaattttangaaatttctactcatttctctttctttcctcacaaatcaaacggacccttagtccgtgtttagattcatgttaaatgatttaaaattattatgttaaactaccaacttacgttaaacgtttatttggatatgtatgttgaaacaaacattctgcattctgtgttttgaaacaaaaattgtgcatttggacacaagaataaataagtgacttttgcattgaatagaanaacaaacattggattntgcttaccttttttttttattattaatcgaacctaacatatatttaaaggattttgcgtaccctaaaatcactcttaanacctaaataaagtcattcaaaatcaactctgatgttgaaaca

SEQ ID NO: 195966 - DNA, 464 bp, Glycine max
aaggcgaaaatgcacttgcacgtcaacccaacctgaccggagctatgtagttggaagaaatcaatggtggagtctgcacaaatggagacgaagaggaagacctaatgacagagcatacaccaatgaagtacaagaacgggtgggactccctcgtggagtagcatgctgaggaagagaaaagatataatatgaagtgggtagtttgagaatgtttaaaaattgagaggtgtatgattcacatgttttgcccagggttttattcaggtttctactttatgacatctccccattatattacaagtcattgctttctacacatctcatgttgttttctacagtttgatcttcttgtctaatgtccattatgaaatgtgaagttacattttggaatgcactctcttttttcttccaatttggaaagtaatatacattccgaaaagagtgcacgaagcaaaatgggagtg

SEQ ID NO: 195967 - DNA, 551 bp, Glycine max
  unsure (1)..(551): unsure at all n locations
agcttcacaatatgatatttactngttgacgcatatacatcgtatttttctttgattggcaggaagacacttaatgagcttggagctattgtctccacggtgcatccaaagatgaaattccccaccctgagggggagattatgactatcaaggtagatgaaaagcaagcacaatagtgctacgcacaaagcctaaagatggcaccttatcctcccaccagggagcttgctaagcctcaccccacaatggttgaaggtactccaagtcatgagcatgaaggaaagacctctaatctgagccctaaccatataccaagccatcttagatgatgaattcgatatagatccatgcaacaacacttctaacaaaggcccaaagcccattgaagagctcgtcaagctgcagttgggactcaaacccgggcaatgtacatagctcaagccatgagcacagatgcatcgctgataccctacatcagaatgtggacctattcgcttggcagccatttggtatgtcgggaatccacccccacatcatctgccacaagctca

SEQ ID NO: 195968 - DNA, 552 bp, Glycine max
tcatgatgatgattcaagtatgaatcaagtagttttgatgatgaaaaaaagcccaaaagaatgatttcaagattcagtcaacaagttcaagatcaagattaatttcatgtttcatgagaagaaatcaagaagattcaagtttcaagagaagtttgatttcaagattcaagagaaggtgaattcaagattcaagagaagaaatcaagaagacttcacaagggaagtattgaaaagatgtttcaagaaacaaacatagcacaattttgtttttcaaaagagtttttctcaaaattttctaagttaccagagtgtttactctctggtaatcgattaccagtttcctgtaattgattaccagtgacaaagtttgatttgaaaagcttttaactgaatttgcaacgttccaattgatttttaaatggtgtgatcgattacaatatattggtaatcaattaccagtgtatcattgaaattcaaattatattgtgaagagtcacatcttttcataaaatgctttgtgtaatcgattacatggttatggtaatcgattat

SEQ ID NO: 195969 - DNA, 365 bp, Glycine max
gtatgggttggatgttgaattccacgtgatcctggtgccgaaatgatgggacagcgggtgaaccaaacgcggaaggtttttttggtgaggtagccatggaaaagcagagcgtttggaatgatttcgtaaatctcacaatgctattgggaaatgctggtaaaaacacgaatgccaagcagatataaatttgaatgaagaatgtataggggcgtgtgaggcaacggtcgaattcgttttggcttaatattgaacgtgctattaatgttaagtgattcgtttgggcacgttcagattgctgtagctgctataattcctctagcaaacaaatgcccagcttgcccctcagtttttcaaactgatttgca

SEQ ID NO: 195970 - DNA, 447 bp, Glycine max
  unsure (1)..(447): unsure at all n locations
ntgcggatatggtcttcgccggcgaaatgatcgaagtgggtctaaaaagaggaaaatctgatcatcttgctttgataaatgcaaaaaaaaaaaaaaaaaaaaactggggcaagtgaagaggatgataaggagggagaaacctatgctgtgactgccattcttatacgaccaagtttcccaccaacccaacaatgtcattactcagccaataacaacccttgtcattacccaccacccagtcatccacaaaggccatccctaaaatcaaccacaaagcctacctaccgcacttccaatgacaaacaccacctttagcataaaccaaaacaccaaccaagaaatgaattttgcagcgagaaagccagtagaattcaccccaattccagtgtcctatgctgacttgctcccatatctacttgataattcaatggtagccataaccctaac

SEQ ID NO: 195971 - DNA, 501 bp, Glycine max
agcttctagtatacgatttatctgaagaaattcattttctatcgcacaacttccaccaccaccaagagcagctaagtactgcaatgcaattttagctgtttctgttttcccagatccactctcgccactgcgaacaaatttctaacaatgattattaacaagcacaccagtgaatgtatcttattactactatgaaaatccaatgatattggtttaggaacatatattaagtgtcatgcacaaaatgtagcccataaatgcagtaaggagctgaccttatgataatggactgatttacttcatctgtaagatacaaaaagaaaaagaaaacctttataaatgtctcattcaagtagaatgcaaagattgcaaagaagggaagagaaagggagaatttcattcacctcttatcaccttgttataaagccgatctgccacagcataaacatgaggactatcaataattctctgcctataagctgagacagaatcatttccata

SEQ ID NO: 195972 - DNA, 496 bp, Glycine max
  unsure (1)..(496): unsure at all n locations
tgcataactttgaatggggtattggtagagtttatacgtgtaaagccatttaatgccataactaaggaataaattttttagagtataataatgattacaattactattgtagttgtggttgtaacttatgagtaatcaaccatttcagcatgatgtctctgtttttcaaatgccttgattgggaattggttgaggattgactttggcataattggttgtttgtgtgaggagtgattttaaggaaatagtactttctagcaacaatggaagcatcacctttttattangtgcttgataagttgatttttgaaagttctaattgtgctaaacatttgtgatatctagtaatccctttagacattcatggtggtcagttggtattggacatatcagatgtattcattctacagacttgttttatttgcttgattttgtgaaagtgcccatataggtaaaaaatgctataatgtttcaacaggcactataattgacagta

SEQ ID NO: 195973 - DNA, 406 bp, Glycine max
agcttggagtgagagaaaagagaaagcttggctgagaatgcgtaaaaacagagaaaagaggcgcataatatagcaagggagtaaaaaccttagattttaggtggattctaggtttttgagtgatttttaagatcctagaggtggaggagacatccccactactttgtatctgtcaattgctctcaaatccctcttcctgattgtaaaaagcgcttccttgtgatggaaagctaaacccatatgttgaggaattctgctgagtatttgatgtaaactcttatcctatctatttaaagttgttttatgtgttcattgtttctatttgtgctttattatcgcatgcttgtggcttgatcactcatttgtatgtgctgctaggagctttagcattggaaaatgtactgca

SEQ ID NO: 195974 - DNA, 435 bp, Glycine max
tgcttctacaattgacatatactttgacaatgttgggggagacatacttgaggcagcccttcttaacatgagaaggcatggacgaattgcagtggccagaatgatctcacagtaagatcttgatgagcctcaaggcataaagaacttagtgaatatcatatacaagcagatcaaagtagaagccttcacagtttatgattactatcacctctatcctaaattcttggatactgttttgccttacattagggaagggaagataacatatgttgaagacataactgagggtcttgagaacggtccaattgcactagaagcaatgttccaaggtcgtagtgctggtaaacaagtcattatacttgctcgtgaataatttagtacaaccttactgtttgatctttcaattcattttgggtgtgttgtaactctcatttg

SEQ ID NO: 195975 - DNA, 332 bp, Glycine max
agcttagctacacacacacccctctaataactaagctcacctccttgagaagcttccttgagaagattcctaaagaatcaagagcttagctacacaccccctataatagctaagctcacccccatgaaaaaatacatgaaaatacaaaaaatttcctactacaaagactactcaaaatgcctcgaaatacaaggctaaaaccctataatactataatggccaaaagacaaggcccaaccggaggaaaaaccttttttaatattaacaaagataagcgggctcatacttagcccatgggctcgaaatcgaccctgaggctcatgagaacccta

SEQ ID NO: 195976 - DNA, 369 bp, Glycine max
  unsure (1)..(369): unsure at all n locations
tgtttgaaggatagattctcattatacaaagcttgcatgaactagctcagcaaaggccaattatgagcgtagagcagttcattgagaaggttgcctggcctgnggctcgaccttcttttatggggcataatgaaagttttacagcccagacacctcaacagcatgagccacaaccagaaaatgatcactcatctgaagccatcatctctggagctgttgattgtaaaaaaagaagattagagacgagatccaatgaggctgctcatcatgaaccaatgccagcgtcagttgatgcaccatttccaggagtggattcatctccacctcagcatgtagtagactcttccattcctgtcttagagatacatg

SEQ ID NO: 195977 - DNA, 391 bp, Glycine max
agctttcactcggaggtccgattcaggcgcataatatatcgagacgctcgaaattgaacaatggaagctcttgagcaattcaaatggtcataacttttcactctgaggtcggattcaggcgcattgtatattgagaagctcgaaattgaacaatggaacctcttgagcaatttaaatggtcataacttttcactaggaggtccgattcaggcgcataatatatcgagacgctcgaaattgaacaatggaacctcttgagcaatttaaatggtcataacttttcactcggaggtccgatccaggcgcataatatatcgagacactcgaaattgacaatggaagctcttgacaattcaaatgtcataacttttcactctgaggtccgatttag

SEQ ID NO: 195978 - DNA, 470 bp, Glycine max
ctgatggtgtcgagaagaaatcacatgtttggcatcatcaaaaagggggagaatgtgaatgtatgtatacatgattttgatgatgccaaagaaaaatcaaacaaggttgcttcaaatgataagcatttgcttcaagaataattcaagagtgcttcaacaaacaaagccttgtttcaagattcactaaagaccaagccttgccttaaaacaaagtgctttcaagacatgcaaagctctggtaatcaattaccacgaagtgtaatcgattaccacaagacatggttgagaaatagctgttgaaaaaggttttgaatttgaattttcaacatgtaatcgattaccatatgtctgtaatcgattaccagcaacgaaactttggaaattcaaattccaaagtcataacccttcaaattataactgtgtaatcgattacacaaacattgtaattgattaccagtggaaagttttca

SEQ ID NO: 195979 - DNA, 513 bp, Glycine max
agcttgtgctaaaggaagtaagacatgtgtttgagatgcgtttaaaccttacctcaacatgaaagctagatgaagatgggatgataaaccagttcgatacagatagatggaagcttactagaggaagcatggttgttgcttaaggtaagaaggaaggctcattatacatcatgcagggaaagatatgcaaagggaagacaaatgttgctcaagatgcaaccaaagaattgtggcacaagatattgggtcacttgagtgagaaaggtttgaagtttctagcaaatgatcactttccaaacataaagaggcaaccacttgaatccttgaagattgtcttgcaggtaaataatgcagagtgtctttccaaagattgaatgaactagaaggagaaagcaaatccttgatcttgtccacttagatatttgctcaatgtctaaaaagtcccttggtggtgcccaataccttggtaccttctttaatgattactccaacaagctgtgggtggattcgttg

SEQ ID NO: 195980 - DNA, 389 bp, Glycine max
tcaacatcagaccacttccagggtgctggaactacttcacatggatttgatggggcctatgcaagttgaaagccttggaggaaagaggtatgcctatgttgttgtggatgatttctccagatttacctgggtaaactttatcagagagaaatcagaaacctttgaagtattcaaagagttgagtctaagacttcaaagagagaaagactgtgtcatcaagagaatcaggagtgaccatggcagagaatttgaaaacagcaggttcactgaattctgcacatctgaaggcatcactcatgagttctctgcagccattacaccacaacagaatgggatagttgagaggaaaaacaggaccttgcaagaggctgctcgggtcatgcttcatg

SEQ ID NO: 195981 - DNA, 533 bp, Glycine max
aacccgctgagtttttttgtttcacccaaactctatgaggagggccagaaactactgtgtaagattttctttttttccttgttagtgttcttgatttgtgaatctcacttaaattttgagcttaatatgtggcatgcattgtgaatcacatttttaatctttatcagctaagttgagttgtttatgtatgttgtaaggcctttcaaggagaaacgaagcaatgagcttaaattctaatagctcaaaatcacatataattttcacatttgtcattgagtctttgtgtaaggtactgtcaaattttgtaattctacctaacattaccagcagttgtgtatggaaattgttgttttcctaagattcaagccacggttatattttctctgttagttctattgctaaacatgatttttttaaactgatgttgcacggaacccacaaagggtttcaatatctcaaacactagcagaatcacccttattgatcctgctggattggataacgatgaaattgatgatggagagccaatgtct

SEQ ID NO: 195982 - DNA, 525 bp, Glycine max
  unsure (1)..(525): unsure at all n locations
tgtggtggtcattctctacgccattttcatcgctgccgcatgtaaaatgacggtcaaggctcttaagacagcaatgtaaagatgtagggtatgataatagcaaggcaaattgaaatagaatatgtatattgttatttcattgatcctttgcatgatatatataatacatgtacaagaatgttctataccaattctaaggcatgacagacgtgatccataatcagtggcatctgatttattctatgcattataaggtaaataaatatagaatcaaggtaacatangaaagtaaatatatacacagcatatttgcaatcatgtagaagatatttcctaatactccccctcaagttggtgagtgaatatcgtgaagtcccaacttgttgcgcaatgtcacaaattgatctttttccaaagcttttgtaaacacatctgctagctagaattttgttggcacataagaaaagattgatcatcccagcttgtagttttttcccgactatatgacaatcatttccatatgtt

SEQ ID NO: 195983 - DNA, 584 bp, Glycine max
agcttgaggggctacaaaatcgtgcctcaccgtgaactccttcattttgaatgaggcgatgaagttttgggtgaagaaaactcaccctccccctcttttaacctatctcgtgcagagggtgctcgcccaggcgagctagctatgcatttcttttttgcaagacttctctgaaaaattttaactattctacgggcttgcgcttgtttattttaaatcccaagattaagaataaactagacatattcaactatgactttagacaaatggacaaacaagcagaaacttaaaagatactaggcagcctcctagtagtgcttctttaacatcttgagccggacgcaggataatgatttattgatcatgggcctagcatctgctcgtacccgtccctaagtcttctaaaaacaggaaatggaaccacgcagtaaaacatgactacgctaccacttaccttggtttatcttttccttgaattccgcgttgtattgaccatcattcgaaacaaatcttctcttgtcgttcgatgcataggatgataaatatgcatatgcatgcatgctcatgatcaggcagttcaagtgtaa

SEQ ID NO: 195984 - DNA, 553 bp, Glycine max
  unsure (1)..(553): unsure at all n locations
aaataatttttttaatttccatgatatagggtgttttgccttttcttctttatcttttttattttcatttttgtctccctaaaaaaataatttgattctaatcttgttattagttttgttcgtgaaatctaatagaaaaaattacaaggaccacaatagaaataaaaaaaattataagaacaaaaaattaagtgaagaaccaaaatgaaaaaaccttatatatatatatatatatatatatatatatatatatattaagaataacaacctaaacaactattttgggtaaaaaaaattatgtttaaattgtgaatcttgaggcaaaaaaattaatcaattcattttttttttggaaattttagattntgaatagagaagatataaaaatatatatatttacttaattgttaaataacaagatataattaacttaataaaaagtttgagacttaattgcaattttagtcccttaaatattgagattatacaaattatggctccttaagtttcaattatgcgaattaaancttctaactttatttttatttacaat

SEQ ID NO: 195985 - DNA, 478 bp, Glycine max
agcttcttttggaccttgaacagacaactaactcctctttcaaaaccatgctatgtgctcgcgactggtccctctcttcccttcgcagcttgagttcattgttgctaccccacagagctccgcgaaatttgttccggccatactcttccttgcaagctctcttggcctcttgttcaagggctctcgcggtagttgcattctcttcccgtaatccggcacactccttccggatgtgtgtagcggccaacttgaacttctccttggcaagtttcgcctttcctaactcgcttttgagagcttggacttcttcgtcctcttccggtgcttcaaaactctcttcgctgacgacttttaacttggcgagccaatctaaacctcgtacatgaactttcagccattcatggtaaccaccaatgatgccattacgaatgcccctaagttcttgatctttccttaacggggtttcccatgccttatg

SEQ ID NO: 195986 - DNA, 476 bp, Glycine max
  unsure (1)..(476): unsure at all n locations
aagttgatgctaagaccctcaatgcattcttggagaccccggtggttctggagccagggaagcgatactcagcctactctaggttctgccgcatgcacccaaaccttcaagagctcgccgccagaatatgtatcccaaggcacagttttgttctgaatgctgaaagagcgcccttgaagctcctaaggaaggatctcactacattggcgcagacctggagcatcttgtnctactccaacctcgcccccacctctcatacgtctgctcttaatatggacagggcgaggttagtgtatggattggtgatgaagatggacatgaacttgggctccatcatctcaggccagatttctcagatgacccattccaactcctccaggcttgacttccctgcactgattaccgccttatgcatcgacagaggagtagtcccagattcattgactttcgagtccctgagccctactattaatttg

SEQ ID NO: 195987 - DNA, 550 bp, Glycine max
  unsure (1)..(550): unsure at all n locations
agcttatatcaaaaaattgaggccaaaaaggttattgaatgaaaaacatcaactaattagacagcaaaggctacattaccaaaactgggagcagcaggacaaacaattgtagaagcaaagcttcatgatgaatcaagattgattcaaagatgttttgataataacaaagatgatgacaaaggtgatgacaaaaagctcaaaggtcaatcaaagaataagttcaagatgttcaagatagaatcaagaacacttcaagattcaagaggaaagttgaagaacacttcaagattcaaggatcaagcttccaagaatcaagactcaagattcaagaatcaagagaagacttaatcaagataagtatgaaaaggttttttcaaaaactgagtagcacatggatatttctcacaacatgtntaccaaagattttttactctctggtaatcgattaccagtagcaaaatggatttgaaaaagttttcaactgaatttaaaacgttccaattgatttcaaaaactgtaatcgattacaatattttggtaatcgattact

SEQ ID NO: 195988 - DNA, 624 bp, Glycine max
  unsure (1)..(624): unsure at all n locations
tggtgtagagcttgagttatggagccaaaaaagacaatgatttatacttgtaacttgttagaattagtggaacttagtggttggtcaagaattagacatagtcttggttgttgagacgaaccaatatatatttcttatgtcttattctttcttctattatttgaactgacttanggtttaaatttgatctttgcttttgaaaaactttggttgttttatgaagatttgaaactatcgtttaatgtgtcctacgaaaatttgatatctggtttcttatattttacttcatcagatgatatctttgttgtattcgaaaaaggttttaagtttagtaaaaatcaaaattcaacccccttgtgatatatgcctttacaaattctaagtgggcgatcttgtatatagaatgagaagagaagcaaggaagcatcatgttgatggaaaactttctctgaactagaaagaacccttcataaatactgtaacacaacaaaatggggcttcccaccttgaacaactttattgaatggtatttttaggacttgaatgcaacacatttgaagccctcttcattaaaaataagggggggacccctttttcccttcaaccttttttccaaataaaaaa

SEQ ID NO: 195989 - DNA, 861 bp, Glycine max
  unsure (1)..(861): unsure at all n locations
acaaacaaacgcacgcataacgaacgcacctccgcgacaatatgatgtatccannnnncnnncacccccnagggatgatgcatcatgncgcaccgggaacnnanaagccaccgcaggaagcaaccaacccccgacgagagggaagattcttttaccacccccccaaggaggaaaaggcagttttgaaaaggcttccgacccgcctcaacagcagaatatggacaaaaaagagggggaaaccctcaaaaaacatacacccacacagaggggttcacgcggcccaaaggccctcaacccagggtgagaaagagaagaacaccacgatggagagaccaccctgcccccggactactattagaaacaaaatngatataatcaccaacaacctaaccgatcaggtggcagacggggaaaaaaataacntcgcaaatcaaaaacaaaaaataataatcctcccccccccaacacaaactcccaaagaaaaacggcaccaggggccaaaaagaaggagggaaagccccataaccgacagaccaaccacccggggggaacacacggaaaaaacactggggcgcccaacgcgccccaaaaaaccccacctccacaggggagcaggggaaagcccaacgcaaacaacccgccgaccgaaaatgcccccccaaaggaagcactcacaaaccaaacggcaggcgcacccaaaaggggtaacaccaccaaaagaaaagaagcccccccagcagaccccggaaaacaaccactccctccgaaggagaaaaagagctaaccccccacatcgcgccggaacagacggggacaacaatcagagagggcctacgaccaccctaccgcacaacagacacg

SEQ ID NO: 195990 - DNA, 914 bp, Glycine max
  unsure (1)..(914): unsure at all n locations
acgcacttccatctgattctactccatgtatccgtacatcaaatcgtactccccccccctcccaccccccggantttgtgcatcctttcggccttatatactaacttggcattcatatcccgatgaggatgatccataagttctcaagactggactaataacattgctggccaaatttcatgggctttgcagctgaaaaaccctcataagccattcttaacggagttcccatattgttcttgttccacccttgaagacccccttgatggtccacggaagaagaataatattttctaacaagcctttatactcaatttctctggaacggagatggcaaaaacaatgggttggtactacccctgtacaatccaagcttccttgatgaactaacgaatgatttcacagatgttttcgatgataacacaacgggattaacaaaaagcctccaaaggcaatttcttgataattcaagaaagagtccccaatgttaaaaaagctcctgattgaattaagaatcaagaatcaaggtccagccttcccgattcatgatccataattctgaactctgaattttagaatcaaagaagaacttttctgatactatcaaaaggatttttccaaattgattaccccatggtttctttctaaactttttttcccaaaaatttttttctcctgctatccatttccccatttatgttttttctttcccaattttcaaaaatgtttctaaaacccttcttaccgctataacaccccttccatatgtattacaaaaagtgttatgtaattaccacatttggtggaaacaatcccctgcgcttgccacctcttaccttatctttacaaggtcaagaacatatccttttcataaaaacctcttcatacgtatcaccgcaatttcactgaatccg

SEQ ID NO: 195991 - DNA, 865 bp, Glycine max
  unsure (1)..(865): unsure at all n locations
ntgatttcatgcagtcccgggccncttagagtcgaccccccgcctgccagctttgggtgttgaagcttaatggaggcttgggggccactattggttggactggccccaaagtattgctgaaatcctaatttttttatatttaatttttaaccttaaagactctgggatgaattggagaacttttccgtcttggggtggtgaaattctttgctttggatggcttaaacttggaaaagaaatccacacttttcttaanaattttacacgcgtggaaagaaatcaagaccacctatttattttgatcaaattntctttgaannaaaacctttttccattgccccttgtagaattgtttctttccagcaacgaacttattttagggaattttcaggctaggttccctaaacattaatttggctcccttgattgagttcctaaagttttgaaaccgccataaattgtcaacatatcaaaaatagaaattatggcgaacataaaattaatccaatgacatggatttggaggggggggggggnncctccccatttatcttctccccctactcatccctttccgccccccaaactcttcagttcacccacctgtttactctctaaccttcatcctcccacatcccctcttctctctttttacaccccctcagttattccccactctatccctctctctttctctccactccttattctctctaccctccgcccaacttgttggcatcccccctctatacttctctcccctttcactttcttccactctccctcatttatttttgtcctctctataattccttccccttccccccatcctttctaatatccctcctcctatccccccttctccg

SEQ ID NO: 195992 - DNA, 457 bp, Glycine max
tgccattatgaatgggtcatccttgtaaccaacttttttaaggtctactaaagtgaatcccattttgtctttacgcacacctatgttttcattcacccacttacatttgaaaagaggtactctaaattcaccgtaatcaacctcctaaatctcttcaataacaccatagtaaggcatgcaagcttcaatgggattattgttagcagcactgcaaaagtgattcgattgaccatcaacactgaccccgctattctgcacactacttttatcatcctgggactttgtgtagaaagaacattgattgatatcatatcccttccaagtgggaacattcatatttggacccacagctagcaatcttaatgtgtttgaagcactgtcatcggtgaagattgtttgtccaaaccaaggtatgaaacgtatattgtgctcttgcaacaacctcatcatgttcatt

SEQ ID NO: 195993 - DNA, 385 bp, Glycine max
ttcctcgagcacgttcatcatccacactgcttgacaagcaccaagtgatgctgccacatactcaacttcagaggtagacaaggccaccacatcctgcttccttgaactccaagccactggtgcatcatagtacatgaacaaataccctccagtactcttcttctgttctggatctcttttccaatcagaatttgtgtaaccaaacagatctgattcatatgattcaacttcaaaagggaacaacacaccattgtcaattgtccctttaacaaacctaagtattcttttggctgcttgcatgtgtgaaagtctaggtttttgcatgaacctgctaataaacttacttgcaagcagatatcatgtatgctgctgcataagtacctca

SEQ ID NO: 195994 - DNA, 311 bp, Glycine max
taaaatattatttagttctactgggcctacaggattacatgtgaagaaaattgcagtgaaaccctttttcggccaaaggaacttcacatgatcacgggggtgccaacccttttagaaggaaaataaaagagtccatgatagatgaagatgatgaggaggtttcaagctttaagctgtcattttcactggtaccaaatagagatatcaggctgtttctgaagagcatccatccctactactcctccttgcatatcctccttgaaatcaaaggatgccaaatcacaaggggaaccaaacatcaaatggaagtt

SEQ ID NO: 195995 - DNA, 522 bp, Glycine max
  unsure (1)..(522): unsure at all n locations
agcttctaaaaaaagatttttaaaggtgcaaactattgcaacccgtaacaatttggaaatatcccaaaaatgtgcttaaaatgacatttttagttttcaattatcatgaaataaatactcaaggtagggagatcaaaaacccaacttttttcaaacattaaaacaacatttaaggcacttaaagtcaccaaagctcctatttttcgtagcaacccgaaactatgataaaatagaaccgaaaatggcttataatgctataaacattatgaatttaattccaaatggtttttaaatccaaatccaacataccttgaatttagccctatatttttaaccatagggaatccattttttagataaaaaatactaaattntgtaccaaacactgtcagtacgtcgaagtagagccaaacttacttaaaatgcttcaaaacattaagaatttgtttcccaatgattcccanatccaaattaaataaattatacatgtaacataattctatattttgaccccaatgaatc

SEQ ID NO: 195996 - DNA, 477 bp, Glycine max
tattttgatgattgctttgaaacaattttaaaggtatgtcaattgagtatgggaagaaaatgggctgcaaataggcaaagcttatggaatgaattcaacgatccaaccaaaacaagagatgaaatcataaaaaaatgtgtggataggcatagataaagatcaatgggctcgttttgttaattatagtcgtaaaccatcaacattggtacaattagactgttttaattattgaattgtttttatagctcattatatgattactattacaagttgtaaacttgaaattgctttgcatataggaactttgtaagagaaataaagaaatttgaagcaagcaagttattccacacactggtggatccaaagctaatcctataagaagaaatgagttggtgatgacactaaatgttaactttactaattaaagaggttcaaagtttacttactctttatttattttaccctgttaaaaaatgg

SEQ ID NO: 195997 - DNA, 505 bp, Glycine max
agcttcccgtatccgtacttggaaggatctgattaccgccttcctaaggcagtatcagtacaattctgatatggctccggaccgtactcaactgcaaaatatgttcaaaaaagagggtgaaacctttaaagaatatgcgcaccgatggagggatttggcggcacaagtagctcctcccatggttgagagagagatgatcaccatgatggtagacactctgccagtgttctactatgaaaagctagtgggttacatgccgtccagctttgcggatctggtgtttgccggggaaagaatcgacgtgggattgaagagaggaaagtttgattcgtttcctccacaaacgtgaacgccaagagaatcggggcaacacgggcgaaaacgaaggaaagagatgcccatgccgtctctttaacacccgcatgggtcaaaccccctcaaacacctcatggtgcccatcaatacgcgccaaatcacccaacctttttggttatgttggaatgcc

SEQ ID NO: 195998 - DNA, 379 bp, Glycine max
gacactatgaaactaagcttgataaattactcggaagtggtaactacattttttaagctgaaagttctactgaattttgtagacatttggaccaaaattataaaaaaagaaccaagcgatttggattaaagaaaaaaattagaaaaatcacacaagttggatgaaaaatcagtgtccagcaaaataaaagtgaaaaggaagtgtgcttgttgttttagctcaaaattgtttctataataggtgcctactttataccactcctagttctgaaacttcaattgaaaataattatgaaaacacgtgccaaaaatagaggtttcttgagtctttttttcgattttcttttttagattttctactctactctatagcctttata

SEQ ID NO: 195999 - DNA, 427 bp, Glycine max
agcttgctagcggatttttgcatttccaattcatggtagaaatccagcagttaaaaggctatttttccatcttccaagtcaacaaccaatctacttcaatgatgatgcaaatgttcaagatctgctctctaaaccaagtgtcagtcaattatgtttacttcatggatggaagcaaacaaagtttaccttgaggctagtgatctcacttatagccaattcgtaactagatttttttatgtgaaaaaaaagttgttggacatgtgtcgcaaccttcccttcggagggagggcgacccgtgactcgctggtgcatcttcccagaaaggaatatgcgcggagtccccaccaacgtttatttgaggaaaacctcagaaaaaccaaaaaagacgtggtctaacaactttaagtgaaaagttccgggagttgtt

SEQ ID NO: 196000 - DNA, 376 bp, Glycine max
ttgcatcagacaaagatgatagcaaatccattttaggatatgtttacactttaaatggtggtgcaataagttggaaaagttccaagcaagctatggtagcagattcaactactgaagcagaatatatagcgacaagtgaacccgctaaagaagctgataggataaaaatgttcatagttgaacttggtgtggttacttcaatagaagagacgggcccattaacgtgcgacaataatggggctattgctcaagcaaaggaaccaagatcacaccaaaagttcaaacatattgtgcgaagggatcacttgattagagagataatacaacgaggtgacgttaagattgaaaatgtttatggaaaggagaatgcaacaga

SEQ ID NO: 196001 - DNA, 219 bp, Glycine max
agctttaacaaatgtcttcacgaataatcattacacaggagaaaactaagcccactacccctcatatctaccaaaaccccatacccacgaatatgaagagggaaagaagtccaccccaacctgaaatttcgaaggcccactcgtaaccacgcacttcacgactccaaaaatgctctcctttcacgatttggggcataaatggtggccaaaggttgaaac

SEQ ID NO: 196002 - DNA, 464 bp, Glycine max
acactatacaatacctcagcttcactgaatagcttgtgttattgaagaatattcttcttgaatagaacacgttacccaaaaatcagtacgaggcaaataagatattatgtcttgcacatatggagtaccaaaaaatacatgcatgccctaataattacattttgtatagaaatcagtttgtcgaaacacacaaataccccacaagtgggtatcacagtacaaattgaaggataacacatgtggtgatgatgcaacgaaaaacaacaactatttatcaaaggtgtgctaatatctttcaattattccaaggttgcagtgattgttttctaatggacatgataccaaaaaacttaacatggcatgcagctggtagaaaaagtgatggattgctccaacatccccgtgattatccctaatagaagacaattgatcatttgtatcctaaaattgcataggacctatga

SEQ ID NO: 196003 - DNA, 98 bp, Glycine max
ttacccatatcgttttagggtttttatgatgatgctcgcgatgtttatgtgctggcatcgattatggtcaactggccgttatgaatggtccagtgggc

SEQ ID NO: 196004 - DNA, 341 bp, Glycine max
tgaaggcgtgtcacccaccatcttctcatagtttaacaccgataacatgtctactatgattgttatcatctccctcttcatcattgggggcgttacttgagctgccagatgccttcacctttgggcatattctttgaaagattcatgctcctttttacacatgttctgtagctgcattctatcaggaaccatattagaattgtactgatgctacctaatgaaagaaaccattaggtccttccaagaatggactctggaaggttccagattactatactatgtgacagctgccccagtaagactttcctagtgtcataccctaaattcgtctggggatgatc

SEQ ID NO: 196005 - DNA, 265 bp, Glycine max
  unsure (1)..(265): unsure at all n locations
agcttgggcatttttctttttctctgttatacaaatatatgtcgngtattgagaaacaaaattttactctccattcgacgcacatgtgggtttttagttgttgattttcacatttaaatttgagaataacaaatgtttgaataaaatgaggtcgacatgagtttttacatacattttaataccctgctgatctcacttttggaaacaacaaaataaaagctttgtattttaattttttggaacttgtgtgggtcagatgctttcc

SEQ ID NO: 196006 - DNA, 530 bp, Glycine max
ttgacaaatgaataaggttccatggagatgatagacataactaagagggatggaagtgtccatttgtttgttttgcatccagttctaaagcaagctaaaaatgtccaagtgccaaataacctggtaggtaaacaaaatgtgacattaattcgtacttttgcttcattggaaatagacttatgtttgattttacaaagagggatggaagtgtccattttgtagttttttttatgacattgtggcacaggacaacaatggggcagcccaacataatggacctataccacttaatagtccacttcaagtcaatggaccaatagtatatgatggagcatgtaaatgtattgcgtctattgaagttaatgtgtaacattcctgcttctaggatcaatgactaacttcacaaaacacaaaaaagctttcaaacgggtttagtccttattcacggttttctggggaaactttcccaaaaggcacccctttcccttaactaacctaataccaaaatcccttaactattaagatcttaa

SEQ ID NO: 196007 - DNA, 550 bp, Glycine max
agcttgtcagcataagcattgccttcatggtagatatgtaaaattctaaaactaaactttttagttggatctatacaattcacctagcagttgtaaaaagtccagggggctgaaaaaggatgattatataatgcacaatattgaaaatattgttgtatgattgtgctaatcctaattgtattgagaatattgctacatgattgtgctgatcttaattgattctatttgtattaattctgattgtatgtattaattcttattggattttaattttattttgtatcttgatctcttgattattgggatcacttatttttaggatagatagttgtatcagatatgtcaggaaaagctataagagaaatcttagttaggtggttggatgaccttgtatatatatctatcaattgtttttaatagaggcagaacaacaaggaggaggtgaagcaaaagctaaggagaatgaaactcgagatgtcattgaagatcaaggaggaggtgaaaaagcagttcgacgtcgatttcttggcggtggcttgataccccgaat

SEQ ID NO: 196008 - DNA, 452 bp, Glycine max
tccatcaagtttgaatccttgtttgttcggattccccatataattcacttcctatgcagcatcatcaaggggtatacaacaactagattcatatgctcctccacatatactacaacctccaacctgtattactactgaatgggaaggttgaactacttgcagttgggttggcagcttactaagtgtctctgtcaatgattccagttgtttagctaacaacttgttcagtgccaacagtgcatcttgtgaagaaatctctagtaagcttctctttgtgggtacatgagttctatcacacagaatagcatgatcactagtagccatattctcaataagttccatttcttcttcaggagtctttaatttaatttttcctcaagaagaagcatccaataactgcttggactgcagtctcaaaccatcaatgaaaatgttcagctgaatcggtttgg

SEQ ID NO: 196009 - DNA, 527 bp, Glycine max
agcttggataatcctcaccttacaattcagttttctggggttgaattaggtcctaagcctaaattctaacagtaagttaacaaggcttgccagacttccaacaaaatttgtccatcctctacaactttcaagaacacattttctctcaaaatatcaagctgacacatgccacattgttattcaaagtagatttttcattcacaggaatttcaggcacattattgcataaaaagttatagacaccttgatcagttaataaagacattagaagctgctttactgccaaaattaaacgaaagattttcttttttattggtttgaattacagatagtttaacagcttgtggataatatcaaccacaggtttctttttcctgtcatcatggcatagcaaaggccaagtatgagaactgaaatatggaaaacatgttggtaatcaataccttaatacattgatgtattccgaagcaattccttcccacattatttgttggaaaaagaggatcatctatgtgaattggatcaat

SEQ ID NO: 196010 - DNA, 515 bp, Glycine max
  unsure (1)..(515): unsure at all n locations
tccttaaccagaacactctaagtggatccaagtagagccaagttcataagagtgtctataaacaactttctatgaggaccctcgatagaaggcatcttgaaaggtgtagtattcatccccttatgagaaatgtgagtgatggaagcaattcaagtacaaaggtgataatgagttgaaatatgtaattgatgttgtaattgattatagaaatattaatttaattcaaaggattaggttcttcaatgaaatggatgattaataaattaattcattaaggattcatatgaaaatgattacttttcatatcaatcaatcacaaacagatgatcaatgacatgttcatgatcataattaactgcacaaatctcgaccttttttattgattatgtatctcaaccctttaaaatattttatgttaaatanagcatacagcatatataaaattgaatcgaaaaaagactacattntatgcaattcattattgaactactgtggcatctataaaattacacttc

SEQ ID NO: 196011 - DNA, 523 bp, Glycine max
agcttgcccagagaaggagtccacagaggaaatgcttaccacctcaaaagactggaaagcggtttctaatgactcctctgcggcctccacataaggcatagaagatgggcagctcaccaagatgtcttcctcgcctgacacgatgaccaaatgcccctccactacgaatttcaacttttggtggagtgtagagggcacaactcccattgagtggatccacggacgccccaacagacagctgtagggggggttaatatccattatttggaaggtgacttgacaggtgtgagggcctatttgtactgggagatcgatctctcccctaacctctcggcgagtgccgtcgaaggcacgaaccaccattgaactcggctttaagtgggaagcattgaatggtaatttctccaaagtgctctttggcatcacgtttaaactggaaccattatcgatgagcactttggctacgatatggtccatacacttgactgataccgtgaaagcctttgtattgccctctccccct

SEQ ID NO: 196012 - DNA, 436 bp, Glycine max
tttggtacaaagaagaagaagaagttcatagagatctcaggcttggtaaggattgtaagagatttttcaaaatgcataacaaagccttgcttttatagactcttgatgtctggtcaagaagaccattcagaagagttatgacttttagaaaaacttaaaacccatttgacaaagtcaaaacctttgtgaagagttacatctttagatttttcagagacaaacactggtaatcgattaccaaataagtgtaatcgattacactaagcttttgagtgaaaggatgtgactcttcacattgaaatttgaatttcaacgttcaagggcactggtaatcgattaccagaacattgtaatcgattacagccttttgaatatatttggaacggtgtaaagtcagtttgaaagtcttttcaaacttatttttgctactagtaat

SEQ ID NO: 196013 - DNA, 516 bp, Glycine max
agcttatccttctatcaattcaatctgactaaagcctcattggaactcgttcagttaattaatcatcccattactcaacctgaaaaatattacttttaatttcttcttctatagctacataacagcctaacatatatctcttcaaccttttttcataattcaacatcagagtttaaacaatcacgcaaacgaaaatcaaagaaataataaaatggaaacaatacaacaaattgccccaaaaaaaaatgaagccacacgtcacacacaagcaaacagtacatctaaaatgtaagcagccacaacacacggttattcataataggttggtgatcttaattcaaggtttggatcagaattacaagagacaaaccaacatcccaatgatagaaattagaaacctaccattcctaccacactatcatccattaaacaaagtagacatttaggacaatttcaatttcaagggacaaagctagaaagcagatcacttttcaaaaaaactagctgccaacaaca

SEQ ID NO: 196014 - DNA, 436 bp, Glycine max
tgatcaaccccattttccatgcaaaacatgttgattaatcattcaaacaatcaaaacaaatattcccaaactgaatgcaatgaacataaaattaaaaaggactgggttgcctctcagcaaacgctcgtttaacgtcattagcttgatgcatcttactttatggatcaaggtcaaacttggttccaaccttcagaaccttctccttctccacttcatctatctcaaaatagacattttggtcctgcaaatgcttttcttcctcaaataagtcgaagttgatcttctgattatcaacacccatctccagcttcttctttcccatatctaccacatagctggcagttaacatgaaaggacatcccaagatcaaagggatttcagagtcctcttcgatgtccattacaacaaaatcagttgggaaaatgaaatgctttac

SEQ ID NO: 196015 - DNA, 453 bp, Glycine max
agcttacatgcaaacctataacacaaggatgcataacctttattttttatgtgaaggatgcataaccttattcaggtataatatgagataaaatccctatcttgttttaagaattgcaccaacagtaccataggtactgtgtctcaacacattttaagtttttcccattgtttaatgcatttaagggatccaaccaagacagtatagctaaattgattgaatatgatgcgtgagcgattataaacctctcagtacatgtcttcgattcctacagacaaaaaaaaaaagaatccaaggtgcaagtttgaaaatatgttcatcctttaaactttttttgtgcctccaatccgttgactatgagtttgtgtattggcagcaaaatatatttttaaaaatgtcatgatgaattactgaaggattagcattttaacaagcagcacaaaccataatcat

SEQ ID NO: 196016 - DNA, 479 bp, Glycine max
tattgcactgcaaggtcaacggatattggagataataatgaacgccattttactctctatgttgatcatacattaagaagagaaaagaggcttagtgtttcttgtctgctcaatttgtatccactaaaaaagttaacaccatttttttacttgaaaattatattgtcttatttttcatcatcaatttaagacatttttccaaattaatcaccgaaaaaacatttactagtttgggatagtttttgtcatatgatgactgaatactattttattttgctatttttataacatgcgaaacatgccaaaaattaaaaacactgcaacaagcaaaatgtattaaatactaaacaagttttgtcccttacatatgtgagagtcatttacataaatggaaacaatggaagaaaacactataacttctctttgtacgtaccacatgtttattaatgttctgcaacctaccttcaccacaagccatg

SEQ ID NO: 196017 - DNA, 333 bp, Glycine max
agcttgacgtcttaaaaatcaatggtttttattagtgattgactacatatgtctctcaacataaattattagtactatcattactatgatctgtagctgagcagtcacatctggataaacacgcggagctgaagtgtgttaaattaatatcttgagttgccatacttacaaacaaatgtgattaggctagcattaatttgtaatgcccaggtgtcttaactactatcatattacatgcgtgttaacatataagctccgacctaaactcgaatataaaaatacgtatggtgagttattattaacaatatgatctgctgaatatgttaagtcaaa

SEQ ID NO: 196018 - DNA, 515 bp, Glycine max
  unsure (1)..(515): unsure at all n locations
tgattagagttctgtcaaggttaaactacttagtttcacgctttagtgttttggaaatcagttagaaactccgtttcatgctttccaaagcattttttcacttttctaggcagcaaaacgtgattgacaaaaattgtcacttcgaacaccaccgatggtaatgttgcgtttatttgtttaaacttattaaaaaagttttttctaaataaaataagcagttgtgttttttaatgtttgcttaaagtacttttgctttttaaaaaaaatgttttttcaagaagcaaatttttatctgcttgaaaaacactcttttcacaaatgttttttttttcaagtttaaataaacaagcccaataattcttgaagtatagacataagctaggattgaagcctttacaaagtccttaattttatttattttttatagattntgttcattgttctaaaaatatatnaataaatttgacttttttgttataatatcctgaatggtatgttgcatctatcactctttg

SEQ ID NO: 196019 - DNA, 266 bp, Glycine max
ttcggcgttaacaccagagttccttacgtatataaatcacccctcgagaaaacggcggcgacaaaaatctccatatagaccatctttaactcaaaacctgttaaaccctccctctgtttgcttctaaaaaaaacttttttttctaatcttttagggaaataacttggttttcctttagccgcgtcctatctttatttttatataaacgttgacaaatcctcccgactctatcaaaaaaatcaacaactccctcttgtgcacttgag

SEQ ID NO: 196020 - DNA, 211 bp, Glycine max
tcttattgattatgtatctcaaacccctaaaaaattttatgttaaatataacataaaccctatataaaattccattccaataaagcactcccttttatcccattcattatttaactactgcggcctctataaaatcacccttttcttttcactttttttacttggacccggcattctcttctcgctttctttttttttttttctctttttc

SEQ ID NO: 196021 - DNA, 402 bp, Glycine max
agcttgaaggtgtgtagcccaccatcttttcatagtagaatactggtaatgtgtctactatcattgacatcatttttttctttgtcattgagggaaacacttgggctaccagatccctccacctttgggcgtattctttgaaagatctgtgccccccctttttttgcacatgttttgtagttgcatcctatccaaagccattatactgacactgcctaacgaaggcgaccattatgtccttccaagaatagactcgggaaggttccaagttagtgtaccaggtaacagctaccccagtaagactttcttggaaggaatgtatcaacaattcctcatcttttgcgtatgcccccatctttccgacaatacatctttagatggtttttggggcaagtagtcccc

SEQ ID NO: 196022 - DNA, 448 bp, Glycine max
tttcgcaaagcttacggtaaaatctgggacttagccatggtagaagtctccacagtggccattacctgcctcgcccaatattatgatcagccgatgaggtgcttcacctttggggacttccaactatcacctatggtagaagaatttgaagagatcctatgatgccctccagggggaaggaaaccatacctcttctcagggttctatccctcattagctagaatttccaagatagtcaaaatctcggcgcaggaattagaccacaggaagcaagtcgaaaatggggtgattggaataccgagaaaatatttggaggcaaaagcaagaatcttggcaggtaaagggcaatggaccccgttcatatacatgtgaaatgagcaatacaaggattggttgctggactccagctctttatgtatgggtaggttcacacctttttcgccaaaag

SEQ ID NO: 196023 - DNA, 226 bp, Glycine max
ccatgcaaaatttctgtcttccaccttaattcataatgattcatatgggttttatcgaactcgcttacttaagaaaaccaaatgatggtgatgggagcttgccttcaatggctgcaaaaaaaaatgagagacacacgtcctcacaggcatttcggacttctaaaatgtttgcgtgcgctacacacggctattgctaaaaggatggtgatctgcattcaacgtctgg

SEQ ID NO: 196024 - DNA, 430 bp, Glycine max
tttgcaagctggaatcatttatcctatctccgatagccaatgggtgagtcccgtccaggtagtcccgaagaagactggcctcacagtgatcagaaatgagaaggaggagttgattcctactcgggtgcagaacagttggagagtctgcattgactataggaggctgaaccatgttaccaaaaaggaccattttcccctgccattcattgaccagatgcttgaacgcctggcaggtaaatcccactactgtttccttgatgatttttctggttatatgcaaattactattgctcctgaggatcaggaaaagaccacattcacctgccccttcggcacttttgcttataagaagatgccttttggcctgtgcaatgcccctggtaccttctagcggtgcatgattaatattttcagtgattttttagaaaat

SEQ ID NO: 196025 - DNA, 874 bp, Glycine max
  unsure (1)..(874): unsure at all n locations
ttgaatgcatgcattgcccgngatnctntagagtcgacccgcggcatgcaagcctaacatagcgatgtgtatatggcacacgatgttttatacactgatgatttcttcatcgccgaaaggtacgccttgagcccttgtaaacattgtttaacatatataccataaataatcaccctattccttgacttaatataatagatgactacagctccaataagatcctgtggtttaaacactatttataagcaccatcctcttgtaataatgccatttgtatggtatccaccctatgacacgtagaagctataattgatttgaatatgatacgggtgcgactatgaaactctgattccaagactacgattcctccatccaaaatataaaagataatctctatgaggcgaggaaagaaggtaatgctcttcctctttaacattttatttgagcctaccgatccgacgacatataagtcgagtattggactcaaaaaatatttttatatattgtaacataaactcctgaatgatttggttaatagcatcccccaacaagcatattcatcgataactgtcacactgtctctcccacacaggggcatgcagataggattataagtctcaccgcgtgtctttcggggaaaatattcctatccacaaaagattttgaacagggctatgagaccgcttccgtatttctgtaacgaaaataatgaaatccttctagctgagccttggcgagacccggagaaaacattcagagtttatacaccgtctcttagaacaagcgcacttaagactcctctccattcgctgagacctcaaaatttttttttcaataatagacgctctatataaaggggttcccctattaaacc

SEQ ID NO: 196026 - DNA, 824 bp, Glycine max
  unsure (1)..(824): unsure at all n locations
atagccctgtggagtcacctgagattgagacattatgatcccctttacctatctatgccgatcattgatttagagcagaatagaagcctattgtgaaatggccgctcaattccgcttccctcaaggagttgacgcgctttgtgtatcttggaaaggaattaagctcgtagaataatcagtagtgtagtgtgggagagtggtgtccaaattaagtaaccggaaaatacactttactaactttggcgataagttttttgtcataatgatgacttgcatgactaattttatttttgatagtctcttataaacattgcgaatacattgcccaaaaattaaaaaccactgcaccaagcctaatgtattcacatactacaacaaagtatttggtcccctcaccatattgtagaggaggtcattttacattaaaattgtgataacattggacagatgaaccactattatctttcttcttttgaccgtaccacattgtttattaatggtctggaaccctaccttttccaccaaccattgtattaatataattgttaggggacaattgggggacctaaacgttggcatttaacgtggaaaaaaatgcctggggggggatacaccttgtctgaactctcgtttgccctacttaaccttcttggcttgcacttattatacaatatacaccttggttttttccatgttcaccaacttcccctttgttccacgagccaaactttttctataattatttattacccaatggtacctattctatacacctctttttttggggatntatctctgtgcnagactaaaaaaatacacatacg

SEQ ID NO: 196027 - DNA, 595 bp, Glycine max
  unsure (1)..(595): unsure at all n locations
tcttgagaagcttccttgagaagattcctaaagaagctagagcttagctacacacaccccctataatagctaagctcacccccatgccaaaatacatgaaaatataaaaaaagtccctattacaaagactactcaaaatgccctgaaatacaaggctaaaaccctatactactagaatggccaaaatacaaggcccaaaagaaggaaaaaccaattctaacatttataaagaagaatggatccaaccttgacccatgggctcaaaaatctagcctaaagttcatgagaaccctagggccttctttagtagctctagcccaagcctcttggagtcttctatccaatacccttggnggtaggattgcatcataatgtaatcgattaaatactcaaagtaattgattaaagtgttcttgttcacttctgaacaactaagtgagagagaagtaatcgattaaaccactacgtaaatgattaaagtatagactcttgaataatcagtcatttgctcaaacaacagtgtaatctgttagaagatatggagtagcaacatgaacaacttaaccctaaaacttgaagcccaaggctaaagttt

SEQ ID NO: 196028 - DNA, 462 bp, Glycine max
tttgagaagtattataagctcggaattcatagcctctgcacttggattttgggataccaaattgggctttgctctgtgcaatcaacttaactagattaattatatgggcctaatcaaagtgttgaacaaatggcctcaataacttaagaagggggtgaattaagtttaaaatttttcctcttacaacttttaaccccattctaaatgataagctcaaaatgcacaagaagaagcaacaatcaatttaataatgttcttttaacatgcaagaaaaaattgattgcaataacatatatgagattagggaagagagaaatgccaacttgatttatactggttcgaccatttttcgtgcctacatctaatcgtcaagcaacttcacttgagaattttcaatatcttttgtaaaatcctttttacaacttttaacacctaaagaatccctttccctttgttcacaaa

SEQ ID NO: 196029 - DNA, 924 bp, Glycine max
  unsure (1)..(924): unsure at all n locations
tacgtacctaacatccccgcgcacacatnancgtntcaaactcacttcctgatcattnactgtttcttctacgtatccatnaanacaannccaacacacnnaaggnnntttgattgcttggcagtcncctgngatnctctaggatacactagaggcgagctgaacgcatgccacctttacaaccttagaaatcgagtgatcatacgtgccgcaatatctggggagacaacaccgatcattatctctatactatggctggcagcctgctccaaccatgattttacgaattgtgatattttcacaaacaaggggagatactaactaccttgctgttgatgttttccccacgtaaatgatgatatcaggcaattgtagaatatgctcttttttatattcgtgaaaactactctactaaaagaacacacgacactaatttcaaaataccactcattttttatgaacggaaatacgtataggcatatcgaaatgtatagccctataaacaaaaatatataaagatccacaaagggtttattttctggcgagtggacaacccgaaaagatgacctgttaccaccgctcaaatgtaaataatgacaacctcctgacaattgaatttcacatcttagaccgcgcattcaaaaacccaattgcgggaatattctccactggttaccaaaccgtttaaaaataaacttaaaaaacgggaaccgctactcggttttttaaaaaaaggatatggacgcgattccataaccttttcatacagaatccccccntatacaaaggctccactcatagaacaacaatgaccgtgtaaaaacttaacgcttaacaaacattcttcctatttataaaaaaaaaccaccctcgttcttcaaaaaagaacaaagactttcattcttaactaaactttgtggaaag

SEQ ID NO: 196030 - DNA, 102 bp, Glycine max
ctttgtttggtggagtattgatttttaaacgacttaagcctagtcttgacccctagaattacaagtctaccatatggggcttctatatattaattgatacac

SEQ ID NO: 196031 - DNA, 569 bp, Glycine max
agcttccttgagaagcttccttgagaagattcctaaagaagctagagcttagctacacacaccccctataatagctaagctcacccccatgccaaaatacatgaaaatataaaaaaagtccctattacaaagactactcaaaatgccctgaaatacaaggctaaaaccctatactactagaatggccaaaatacaaggcccaaaagaaggaaaaaccaattctaacatttataaagaagaatggatccaaccttgacccatgggctcaaaaatctagcctaaggttcatgagaaccctagggccttctttagtagctctagcccaagcctcttggagtcttctatccaatacccttgggggtaggattgcatcataatgtaatcgattaaatactcaaagtaattgattaaagtgttcttgttcacttctgaacaactaagtgagagagaagtaatcgattaaaccactaggtaaatgattaaagtatagactcttgaataaatcagtcattgtctcaagcaacagtgtaatctgttagagataagggagtagcaacatgaacaactta

SEQ ID NO: 196032 - DNA, 453 bp, Glycine max
  unsure (1)..(453): unsure at all n locations
taggccaatgcttccattttgagagtcattttaggcttggaattcagagcctctgcacttggattttgggatccgaaattgggctttgctttgtgcaattagcttaattagataaattagatgggcctaatcaaggtgttgaacaagtggcctcaataacttaagaggggggtgaattaagtttcaaaatttttcctctaacaaacttttaaccccattctaaatgataggctcagaatgcagaagaagaagcaacaatcaatttaataatgttctttaaacatgcaagaaaaaattgattgcaataacataaatgagataagggaagagagaaatgcaaacttgatttatactggttcgaccatttctcgtgcctacatctaatcgtcaagcaactcacttgagatttttcactatctttgtaaaaatcctttntacaacttctgaacacct

SEQ ID NO: 196033 - DNA, 477 bp, Glycine max
agcttgtcagcataagcattgccttcatggtagatatgtaaaattctaaaactaaactttttagttggatctatacaattcacctagcagttgtaaaaagtccagggggctgaaaaaggatgattatataatgcacaatattgaaaatattgttgtatgattgtgctaatcctaattgtattgagaatattgctacatgattgtgctgatcttaattgattctatttgtattaattctgattgtatgtattaattcttattgtattttaattttattttgtatcttgatctcttgattattgggatcacttatttttaggatagatagttgtatcagatatgtcaggaaaagctataagagaaatcttagttaggtggttggatgaccttgtatatatatctatcaattggttttaatagaggcagaacaacaaggaggaggtgaagcaaaagctaacgagaatgaaactcgagatg

SEQ ID NO: 196034 - DNA, 536 bp, Glycine max
tccatcaagtttgaatccttgtttgttcggattccccatataattcacttcctatgcagcatcatcaaggggtatacaacaactagattcatatgctcctccacatatactacaacctccaacctgtattactactgaatgggaaggttgaactacttgcagttgggttggcagcttactaagtgtctctgtcaatgattccagttgtttagctaacaacttgttcagtgccaacagtgcatcttgtgaagaaatctctagtaggcttctctttgtgggtacatgagttctatcacacagaatagcatgatcactagtagccatattctcaataagttccatttcttcttcaggagtctttaatttaatttttcctcaagaagaagcatccaataactgcttggactgcagtctcaaaccatcaatgaaaatgttcagctgaatcggtttggagaatccatgagttggtgtttttcgcagcaagctacagaatctctcaagtgcttcactcaaggactcatcttgaaactgatgga

SEQ ID NO: 196035 - DNA, 738 bp, Glycine max
  unsure (1)..(738): unsure at all n locations
ttcaatacaagttatcaggaaaaaatatgagttataatattcatgtaacgaatttttacaatatttttataatttgtttgttatacatttccccccattattatgccaatcatgatattttaacaaatcattgatctatacttcttacttttataatttagttttctccgtattatctatcgcattagtcatttatattatatactttttttttatttgttgaaaattttgtacaaaattgacatacaattataatttcaatataaaaaacattatatatatatatatatatatatatatatatatatatatatatatatatatatatatatatatatatatcccctccgagatgtataacccgcaaggacagtaagataactntacctgtcacatacacttggctttttctaagtcaattccaggactagttaagtaggtttttttattctttctttcacgaactttttctcacaatgatgcatgttccatcccataactatggaagaagaatctaagataccatgcccggggagtaatctttttataattncttattctttggagcacccctctataataattatatatccaaattaattataccccgtctcttatctcatgtattttgaatattgtggttggaaaatattaaacctcagctcttacaaaaaaaaaatacctaccctactttatggaaaccttctggtggggatttccttatcttattggggggaa

SEQ ID NO: 196036 - DNA, 466 bp, Glycine max
tgctcactttgatactttgtgcttgctttgtcatttttgttcccatagctcataggctagttaagattgtgtataatcaactacttttgcattgactttgccatataattccatgtcaggtttatgctatattgaaataaattttcattgactatgggtgtctctgggaagtggattaaagcattggttggtctaaagaaatcagaaaagccagagaaggatggaaatgtgagtctctctctcataacacttcatactcatattcctgagtttcagtatttattttcatgttatgttggcaaaaataatcatcacctatggcgcttttaactaaggttctgtatcatcatgtagttatttctacccacactaccccaaaagaaaaacaaaagagttttgttgcttgtgtttcaactcaagagggaaaagattaatggttttcttgtgcatttgcgagtgtcatact

SEQ ID NO: 196037 - DNA, 358 bp, Glycine max
agcttatatatatcgattcgctcaaaattaaacatcagaaactctcaagaaattcaaatagtcataactattcacacggatgtccgattcgggcgcataatatgtcgagaggctcgaaattgaacaacggaagctgttgagaaattcaactggtataactttttacaccgatgtcccattcgggcgcataatatgtcgagaagctcgatattgaacaacgaaagttctttagaaattcaaatggtcataacttttcacacggatgtccgattcaggcttataatatatcgatacgctccaaattaagcatccgaaactctcgcgaaaatcaaatggtcataacttttcacacggatgt

SEQ ID NO: 196038 - DNA, 237 bp, Glycine max
tgaatcggacatccgtgtgaaaagttataaccatttgaatttctctagagcttccgttgttcaatttcgaacttctcgatatgtgatttgcctgaatcggacatccgtgtgaaaagttataccagttgaatttctcaagagcttccgttgttcaattttgagcgtctcgatatgtgatttgcctgaatccgacatccgtgtgaaaaggtatgccccctgaatttttcacgagctttc

SEQ ID NO: 196039 - DNA, 533 bp, Glycine max
agcttgctcgtcttgctgatatttatcatgcagacttttctgatgatgaccgaggaacaattagggatcaacttgaaacttatgtgcttcaagtgagaagaaatgcttctttttccacttgtgaagatgttcaaagtttggctatgaagatgggtcaaactgagaaacatttggtatttccattggtttataaacttattgagctagctttgatattgcggtgtcgacagcatccgttgaaagagctttttcagcaatgaagattatcaagtctaaattgcgcaataagatcaacgatgtgtggttcaatgacttgatggtatgttacaccgagcgggagatatttaagtcgcttgatgatattgatattattcgaacatttacccgcaaaaagtctcggaaaggacacttgcctcgtaattttatttaacccgctattgaagagtatgtttatctcttttattttaaactatatctttgttgacaaaatgacgagtctcttttattttgaatgattactatctacatattat

SEQ ID NO: 196040 - DNA, 508 bp, Glycine max
  unsure (1)..(508): unsure at all n locations
taggtaaacatcataatcctctaggactaacacgattaaagtagggaatcttaaaaaaaagtaacaacaagtagtttatgcaatgactacacagattcatcacacatcagtgcaattatctcaatatttgttctttgtttccttggtttgcgcagaagggcaaggatttcatctggagaacacccaaaggttgcatttaactcaatcggacccttgatactaaattacgaatagatgaaaaatatttttcctacatcatcgtcgtgtttgagctccatacagtcatatgcaacacaaccatcacctatatagattggttaacagtaaaaaaagatttattaaaattctacaaccttcattgtgtcaaaaattattttccttaaggcagcaaacaagatgtcctcacttattgtgatgactttangatcactanggctttcaaacactattcctttatctgatggaaataatgtcacatcataatgcacaaaagcggatacactcttca

SEQ ID NO: 196041 - DNA, 349 bp, Glycine max
agcttataatatatcgatacgctcgaaattaaacatcgggaactctcgagaaattcaatttgtcatcatttttcacacggatgtccgattcgggcgcataatatgtcgagaggctctaaattgaacaacggaagctcttgagaaattcaactggtataacttttcacaccgatgtccgaattaggcaaatcacatatcgagacgctcaaaattgaacaacggaagctcctaaaaaattgaaatggtcataacttttcactctaaagtccaattcatgcgtatcacctatagggacactcggaattgaacaacggaagctctcccgaaattcaaatggtcataacttttc

SEQ ID NO: 196042 - DNA, 286 bp, Glycine max
cgaatcagacatccgtgtgaaaagttatgaccatatgaatatctccagagctaccgttgttcaatttccagcgtctcgatatgtgatttgcctgattcggacctccttgtgaagagatctgagcatttacatttgacgagagctttcgttgttgaactttcagcgtctcgatatgagattggcttgaatcggacatccgtttgaaaacttacgaccatttgaatttctccagaactatctggtgagaatttccagcgtctggacatattatgtgcccgaatcggat

SEQ ID NO: 196043 - DNA, 1044 bp, Glycine max
  unsure (1)..(1044): unsure at all n locations
aaaataacgtgattactcacaacttgcaccacaacttcctcctcaactattctccgctagtatatgtaatgtctaatatctccancacanaacctccaaccaaccaagatgaaaattgattgcatcgcattccactccgaaactcaccgagacacctcttgaagcgatctcgcacgcatgacaaaataaatgagtctatgagatatattatctcataaatctctaaaacaacacccaggggtaggggtactgtattctaattaaacactacaacagttaatctttaactaaaatctgcaagaattctcaatccaatactgtatctatattgcacacacaaagcgggggttgaacttcttataactccggaaaaaagattctcctctcgaataattcaaactagcttggtgtcttctaacgttaaatgaattacttctaaaaagcgtgtacaaaattcaattaacttaatcgcaattcgaaactacaacatacacgcggccctggtacttagacgtaatcggcgccaaacccaactacctacgcatggcttacaacgcaatcttacattagaagcaaactatttaaaatacctccctaataagcgttaagcaatttagaaatttctccactatatatttaatacctttcatatatcaccctaaaaacaaaacaactctgtcactaacaaaaaattttataagccatacacatgcaaaattttcttttataaaaaacacaaggccaccgcaacaataagttacataacaaacttgatatcttaagtggacctgtacatcctctatggggtggactacccttataaccacccccctcccctgtgccatagaccattgacaaaccagatatcaacaaacggtacttcccttttctttcggcacagaaaataaattcaccccactcatacaaacatcgggagtacctgtacaacaaaatcatatatactaaatgcgcttcaatatatgcgctaatatcatcaacgacacatatccaccaatataacagagcgcgtgaaaatatctatcg

SEQ ID NO: 196044 - DNA, 934 bp, Glycine max
  unsure (1)..(934): unsure at all n locations
tatagggaacgtcaacaatcctaccctcaatttctatcacctctcgagcgggatctacanaacattctactaccatcncaaaagtcccgggacncnattgattggcctcgcctttgcgngacacttgctacaaagttgaccttataaatatacgagcttgccggcggtctcgcccctgccagcttatctcaacccaacgaaaccggttgcttgcggcaaatgccaacaacctttggaggaatcctcgcgaaggcccacgggcccgatgcttttacacccattttaactaaatgcacccccctctcccatttggttggaaaatcaattttcgcaaccttacaaacccttagaatcaccctccaacctgcttaatcccaactaccgctctctggtaaaaatccccactcagcttatacttgtgggaacctgcactctaaacctcctcaaaaaactcgaacactcaagctcaacatcctcacaactatcccccaccccctacaataaatacttgaacataatcttcccttttccacaatccacaccaccacccgactcgatctgtttcttcctcccctcccctctcataacccatcccaactccttcctgccaatccacccactatctgctttttccccacnnccctcttaaacttttccacccctttcctccccccacccttttcccatcctctctaacttngatctctcttcctccccccctcctcctnttttcttttccctactaacctccctccacatcccttctcacacccaattccgtctatctctgcacaatataccacacgtctcattggtaaccccaagacattttctacgtactaatgttcctagcacgactctgtacaccccaaaaatatctaacattctcactaacacctctaacgataccttttatcaacacaacaaaactacg

SEQ ID NO: 196045 - DNA, 197 bp, Glycine max
agcttcaccggatgatgccgatcgaacatttcctaatcgacatcatccaattgttattcagggattgaataaaataaacaatggccggggtccgtcgttatatggccccgactgatatctttcagccgacattgcgcaatttcttttacaaacgctggccgataatgtttttttatttacggtagaggaagtttttt

SEQ ID NO: 196046 - DNA, 345 bp, Glycine max
agcatctcaatatgtgatgtgcctgaatcggacctctgtgagaaaagatatgaccattagaatatgtggacatcttctgaagttcaagtgatagagtgtctcaatatgagatgtgcctaaatccgacctccgagtgaaaatctatgacaatttgaatttctcagaatcttacgctggtcaataaagagcgtccccatatgtgatgtgcctgaatccgactaccctgtgaaaacttatgaccattttgaatttctccaaaagaatttgtccggccatatggagcatccatgatatattagtgcgactgattcccacattcgatggaaaagttatgaacttttaaat

SEQ ID NO: 196047 - DNA, 443 bp, Glycine max
agcttctggtgggacatcttgacttgctttccaatctgacattcaccacagattctgccttcttctattttcagattgggaatgcctctaatagcacctttgtcaatgattttcttcatgcctcttaagtgcagatatccaaatctttgatgccatattctgacttcatcttctttggaggatagacatgtggaggagtaactggtttcttgaggtgtccataggtagcagttgtcctttgatctgctgcccttcattagaacttcacacttctcatttgtcactaagcattctgactttgtgaagtttacattgaatccttcatcacacagctgactgatgctgatcaaagttgcagtcagtcccttcaccaacaggactttgtccagactaagaaagtcatcatggactatacttcccattccagagatcttttctttaaa

SEQ ID NO: 196048 - DNA, 466 bp, Glycine max
tttcgattcattctatgtacccgtggtggtccacattgtgtttcgcgtatttttattctcgtttcatttactttttatacccccttttgacgtgcttaagccatcttatttaagtcatttctcgcttaaactaaaaataaaataaatttccaccgatcgtttgaattgtattatccgttaacttcggttaaaatgaattccgaccgttcggttgtgccgtaaccacgttggaaattaaaaaaaaaaaagaggtaaaaaataatataataataaaaaaacatctttttagtaaaataaagcggaaaatcaatcggacgttttctctttgggatttctcattcttaaccgaattgactaataactaaagtgaaactaaggctaaaatcaactctcctagtcaagctcgtccataaaaatagggtttttgaagtttgtcatttcaatttcttacctaataaaatggatc

SEQ ID NO: 196049 - DNA, 477 bp, Glycine max
agctttcaacaaatgtcttcacaaataatcatcacacagcagaaaactaacaaaactacccctcatatctcccaaaaccccatacccacgaaaatcaagagggaaagaagtccacccaaacctgaaatttcgaagtcccactcgtagccacgcactttacgactccaaaaatgctctcctttcacgatttggggcagaaatggtggccaaaggttgaagctttgcttgaagcttcaatggagaatgaagaagaagaaagctacgtgagagagggagagaaaaggcttctgaatttctgctttggctgagtgaggagagagaaaagctttttggttttaaaaaaaaataagaaggggtttcccttttttttccattattttattcaagctctgccacatgtcccttattgattggagcaaaaaggcccactttctctttttgactgtgacccatactcaagcacaaaagtgagaaaaa

SEQ ID NO: 196050 - DNA, 521 bp, Glycine max
  unsure (1)..(521): unsure at all n locations
tcactgaatagcttgtgttattgaagaatattcttcttgaatagaacacgttacccaaaaatcagtacgaggcaaataagatattatgtcttgcacatatggagtaccaaaaaatacatgcatgccctaataattacattttgtatagaaatcagtttgtcgaaacacacaaataccccacaagtgggtatcacagtacaaattgaaggataacacatgtagtgatgatgcaacgaaaaacaacaactatttagcaaaggtgtgctaatatctttcaattattccaaggttgcagtgattgttttctaatggacatgatacaaaaaaacttaacatggcatgcagctggtagaaaaagtgatggattgctccaacatcccgttgattatccctaatagaagacaattgatcatttgtatcctanatttgcataggacctatganacctaaggcttggtcttgcttcagctggaatgaatcatgttggtaacttaagcaccaaccataattcatggcatgtt

SEQ ID NO: 196051 - DNA, 798 bp, Glycine max
  unsure (1)..(798): unsure at all n locations
gaaanatganaccatgtcgtacccgngatcctctgagatcctctgcaggcatgctaccgcgtgcgccctatctgaatgagtggcattataacgcgctaactgccatcatcacgaggggaccgcatctgttgcagttaaaccaacaatgtttttgaaaatcaacagtgcatgaaatgttgtacactacgaacataactattgcacgacagatggaggtgttgggtcatcttgaaaaggatgtgtaccacctgcaacattaacaggtcgggtttgggtttataaagtgagctataagagaagagacattctctcccttatgttagtgcaatcacccttaatatcctagcgaaatgatgtatagtatcaaccattttcgttgcgagttttactgtattctgcatagatgaagcttataaaatcgccgtatttcgtgaagaatatgtgaattttactataaatttaagactatcaatcatccccttataagaatactcttttttgaaaaatgtcccattataagacattagatgtcttattcatgaaagacttagttcattgaacataagaaaccaatntatttgttgtgtagttgacctgtccaattatgcggtatttattttaaacttcctgccaccgtgctggaaaattaacaaagaagagcttttttggatacattttccgttgggggagaactttaaaccacatcagggggggggtcggtttttacatggaagctacattaaaagtgttgtaattgtataccaccaaaatgcggctttgggggcccgttattttttg

SEQ ID NO: 196052 - DNA, 278 bp, Glycine max
tgccgcccagctcgcccatgcgagctcatattacccaggcgagccacgttgcttactacacatgccaccaccctctggaggaatcttctggaaagcccatgtgggcctcgattgctatttacacccctatttactaaatgcaccccccttttctattcctttgcgatcctttttccgacacgttaccaacttaatttttgtcactgaataaaattttgactaattctccacagtgggaattttatgccccttaaaaaaaataacaccatctcccattt

SEQ ID NO: 196053 - DNA, 475 bp, Glycine max
catgggttaagcacaaggaagactctttaagaagatgagttgtacaggctcgcttaacacactgcttcatcccactaagcgcatcgcttcagttcattagctaagcgagaaaggcacgcgcttagctcaaattcactaatatgcgctacacgatccataagtgcgttaagcgcacgagcacgaacaaggccacctatttacacctgaaataagattttacagagagagtttggactgcgattcacagctttgcatgtagagggtttctagagagagaacaatccatgttctataaagttttgagagaattgtgtgtgcgataatctgcagagaccatatcttgaagcacgagccacgtttagagctcgagatgagtttttgagtgattgggagatcctagagatgaaggggacatcctccccacttgttttctgcaatttttcatcttgccctctctttcttggaagaacgcttc

SEQ ID NO: 196054 - DNA, 487 bp, Glycine max
cccgagagcatctgtatttaagcacttcagccttagcttttctgtagcttatgaaaaacgtcaattcttcttctttctttctttcaaagccatttctaaagttccaagcactttctccatcacccacagccaccattagcaaccacaaaccatcattgttctccattgaaaacccacaccgagaggaacccttcaaccgaagcggaatcttccaacttggcttgcggttccggtagagaacgaaaaccctaatctgacctttcaaggtaaccatgggtctatgcttatttcttgttaggtccatattgtctttgcatcttttctgcctttggaaccgccattgcatgtcttatgcttcctttgaaaaaccttagagaaatagactttggtaacgttatactttcatgaaatgcatgttattttcgtaaacaacactgaacccccggcaaattggcgtggggcggaatttcaaatgacgttcctttgt

SEQ ID NO: 196055 - DNA, 566 bp, Glycine max
  unsure (1)..(566): unsure at all n locations
agcttgtgtgcctcatcaataggagttgcatttttaggtgctaacggacaaaatcacaaaatacccacatttgttgcggttaagccaataaggtttttgaattaaagctgtgaaaagaaggttgtacacttgaacaaactatgtatgtttaatggattgtttggtctcttgaaaaggatgtgtaccactgaaaaacatttgaagggtcagtgtagtgggtttataatgtgagctatttgagaagtgtcgttctctcccttatttttgtgcagtcacccttaatattataacgaaatttgtttaaatataaaccatttttgttaaggatatgtacttttttctgtaaaaaaaatgcttaaattatgttagtatttcctgaaatatatttgaattttattattattttttgataaattttttctttattttttgcttcctaatatttgaaaaaggtcccattantagccattaaatgtctaatacatgaatgtctttattaataaattaaaaaaanattttttatattttttcttctttttccgatcatccttcattttttttctttc

SEQ ID NO: 196056 - DNA, 481 bp, Glycine max
  unsure (1)..(481): unsure at all n locations
tgagcaagatttgttgaacggggaagcaagatatgacacaaaatatagtgcatgatacgacattcaaaagtgaatgaaccaacaagcaattgaccagacatataagcattttcagtgcaaaccattttgtgggcatcatgatttgaataaatatgcttccagtcatcaaccaaagcgccctcaaaaggtacaccttgactactcaattttgtcaatgaataaaataaggactaatcaaccacaatgggaattttatgcacctcagaaaagataacaccatctcgaatttcagattattataaaaaacatagactaattcagaatagtatgacattttgagagtcataaaatcgattaattcagaattttgaaagacttgatggtaatcaaaagtctctccttcaaagaattntaagtctaaatatttgggatcaagaatgactcgattgganaatgaggaatagtacctttgacgttgatc

SEQ ID NO: 196057 - DNA, 488 bp, Glycine max
agcttctatataagctgaaccattttatcaataaagacaagttgagttttattcagaaaattagagtttatctcttttatcttagtgagagtgattctcctaaattcttgagtgattcaagaacaccttggctgtatcaaaggactttcacaacctttgtgtgttgcccttgctggaaagagtgaatctttccttcctttcatcatcacccttgttctttcaaaccacaattccagaaaatccacctctgcccagaattatctcgtggccataactcccattttacgcactcaaattaagtgattcttgagcctaaattgaatttcaaaacgagacctttcacctcgttttggaatcacctcatttggagccctgtagcttcagttattgccatttctatatttctgtccagccaccacttaacctacgttttaccatcccattcatccattttatgccaagaaccaccttattaagacccacgaaat

SEQ ID NO: 196058 - DNA, 427 bp, Glycine max
  unsure (1)..(427): unsure at all n locations
ntntggagtagaaacatgggaccaactcattttatttcaaaaagtcgtatctagtcaaggtctgagagaccgtacaagtttcctagcgatttctaattatgtgggtcattaagtctatcatatgctgacaatagctgagaagcccgtgaatttcttcgggggcggagtaggtgtctgccatcgccttggccttggctaacaatcggggaagttcttgactcctgttcaaggtaagagcaaaccgatccatccacatggttgcctcttggtgtaaagagtcgatcacccttcctctagcctctttttccgcgtatacttgggcatactcgtccgcgaccctatgctcgtgggccgtggctagacctaactcttcttggtacttggcgatgatagctagcatgttggtctctgtctcgcataaacgctg

SEQ ID NO: 196059 - DNA, 544 bp, Glycine max
  unsure (1)..(544): unsure at all n locations
agctttgaaaagtgttgtttttcaccttctcgctaagccaatctgctggcttagcgagcgtctgctaagcgcaacactcatgggttaagcacaaggaagactctagaagaagatgagttgtacaggttcgctaagcacactgcttcatcccactaagcgcatcgcttcagttcattagctaagcgagaaaggcacgcgcttagccgaaattcactaatatgcgctaagcgatccataagtgcgttaagcgcacgagcacgaacaaggccacctatttaaacctgaaataagattttagagagagagtttggactgggattcaaagctttgcatgtagagggtttctagagagagaacagtccatgttctagagagttttgagagaaatggctgtgtgataatctgcaaagaccatagcttgaagcaggagccagttntagagcttgagatgagtttatgagtgattgtgagatcctanagatgagggagacatnctcaccacttgtatttttgcaatctttcatcttggtcttctctttcttga

SEQ ID NO: 196060 - DNA, 457 bp, Glycine max
tccgttcccgagagcatctcttatttaagcacttcagccttagctttcctgtagcttaggaaaaacgtcatttcttcttctttctttcttccaaagccatttctaaagttccaagcactttctccatcacccacagccaccattagcaaccacaaaccatcattgttctccattgaaaacccacaccgagaggaacccttcaaccgaagcggaatcttccaacttggcttgcggttccggtagagaacgaaaaccctaatctgacctttcaaggtaaccatggttctatgcttatttcttgttagtttcatattgtctttgcatcttttctgcctttggaaccgccattgcatgtcttatgcttcctttgaaaaaccttagagaaatagactttgtaaacgttatcctttcatgaaatgcatgttattttcgtaacctacactgaaccccggtcaca

SEQ ID NO: 196061 - DNA, 536 bp, Glycine max
  unsure (1)..(536): unsure at all n locations
agcttttatcttgcgaaaaatcataaaacccaaaaaaagtgggacaccagagaaggctgaggttcacaaaaaaatttaagcttttgtattgggagaaataaagaaacaaacaaaatgtagtcagagaatcaaagaaaacaaacttgtttgagataaaaatcgaagctttttgtagattagtgtcttgttccaccttctctgcatacaatagcaaaggtattgtgagaagtcagaaaataaaataaaaaaaattaaactttttgtagtgcgagaacttagaaaacaaaataaaggaagaacacctaaaaaattaaagcttttgtcttgtgaaaaatcataaaaccccaaaaaaatgggtataagaaagaatgaacacatttgagaaggctgacgaaaacganaaaatttaaccctaaaccaaaaaaacaaagaaaatgaacccatactcgtggagttttcaaataaaaactgcagttgtagtctgctctccacctcctctgcatgcaatagaggttgactaaaaaaatgtaagcttt

SEQ ID NO: 196062 - DNA, 489 bp, Glycine max
tgaactttaaaataaagaaggaagcaaattgaacctttaatggcagagctgtgcaatgtttcttaatcgtttgtgatttgttttgaggtgtaaggttttttaaaattggaatgttttgtaaaaaaaaaattataagcaaatgttaattgttagttttttttgttagcacgagggattgaatcgcaaggcggcgacctttccctccttcccttctttcttaaacacccaaccaaccttatatctccctggtttgttagtttgttagtttttttaaaaaaaattggaatgttttgtaattgttgggataatggtttcctgtggtttgttatctctggtattgactttaaaattgtgtgtgtgtgtgtgtgtgtgtgtttgccacgtgacgtcgcctcatgcgaacatgtatcactttggagatcatgtggattctggtaattttgcatttaccgcatctgagtcttgtgactactcaacttgcttttgggt

SEQ ID NO: 196063 - DNA, 463 bp, Glycine max
ctaactgcacgcgtgcgagcttgaatttggaattgggaaagccccactccatcattatgattaggacctgacatctcataccaaccaattatacgtaacaagacaattatagttgctgtttgaatacctcacccactccagtgtttcacacaattatggcttttctataatgaaacactcttgccttttaccactctaatttcccttgagttcttaagcaattcaagagattatgggcacaacaaagaacaattcaccaatatgtgtaaggtaaggctagacaaggaaaaggttgaccaaaaaaaaggctgacaatgtgtttaggctcaaatgaaggaaataaaattcataatttatgaaattaagtaacaatgctttatgccaccaatatattaccttaaagagagttttttttttaagtccttcaagcatgaaccattcagccccatttttttttttttta

SEQ ID NO: 196064 - DNA, 221 bp, Glycine max
gtgtgaaaagaattgaccatttgaatttttcgatagggggcgaaggtgaatgtttagcctcatgactatattatgcgcccgaatgagacatccgagggcgatgttatagatacgcgatttcttctagaacttttgagagtgctttccagcctaagcacatgttttccacccgcttgggacccacccttgccattgaacgacaagttttgtagagatgcagc

SEQ ID NO: 196065 - DNA, 805 bp, Glycine max
  unsure (1)..(805): unsure at all n locations
tgcnccgtgaanattggtgcgtctagacccgcgaccctatcattgaaccgccggcggcatgcaatctagtaagccctcgtgccctgactttgttgtcttggctgttgttgctaaaatattgagggtggacctgcttttgggttgagaagcaaagtctatactgtttgggggaggaaagaatctccatttttccactctaggactttctgaacctttgagaggtcactttacacagcatagttgctcttgcctatcacccaagagtcctgcctttccttttaatggaggggcagtttatttgcgatccacatcacttctaatttgtgcactcctccccttaaaacccttcgatttagtgcctttcgttccgagatcctctttcttaatcattccttttctctaaggtagtcattccttgaacatgagctccttccttcacatattgccattggactacgtgggagcaaattcctagggttccattcagcacccccctcatggatcaagagggcccttttaatgcgctgtcctctcatcacaaaatattcccttctgttgcttcaaccgttgaatcctttcctcctgaaggttgcatgctggccataatttgaggagatgaatcatttccttcaatcctaagcgggggaggacgaatcccttaactaattttgttccctactcctttcacaaggttccttctttgacagtatgtggaactatacgttccatggatcccgcaccatgttcttcctgctgggcgaaacttttattcctttgttggaagaactcggcgttttctctctct

SEQ ID NO: 196066 - DNA, 414 bp, Glycine max
tgaagaggatgctctaatggaggaaaagaaagagagaagggggggagcacgaaagtgaaggaataaaagagggaaataagtggaactttgaagtgtatctcataagactttcattcatcaaagttacaacaattgttacacatgcttctatttatagactaggtagcttgcttgagaagctctcttgagaaaacttcattgagaagcttctttgagaaaacttccttgagaagctagagcttagctacacacacccctctcataactaagctcacctccttgagaagcttccttaagaagattcctaaagaagctagagcttatctacacatacctctttaatagctaagctcacctccttgagatgagaagcttgaacttagctacacaccccctataagctaaactcacccc

SEQ ID NO: 196067 - DNA, 457 bp, Glycine max
cgtactgtgcgctactttttctcatgctagccagcacatgcatttgtttgtgcaaatcatacagtttgttgcacctattatggcagcacaatcctgcgtttaatggcaccaataacagtactcttactttcatgccctcttgcgccaatcatttgatacctgttccaaatcatgtatcaatcatgtctaaagcaaaccttgctttaccgctgataacacagaatttaggtggccacagcccttaatcaatgggttaatagtttccaagtgaaatagagggagaaatttgatcttagctcccttaaggagtcttggaaaaataaaaggggtggctggattacactatattccccgccctaagtgatggtcagccccaatttgcctaaaagggtttgaatatttggcatttgtttatttagcgaactaccctttacatgatctaaaggcttcagctaag

SEQ ID NO: 196068 - DNA, 819 bp, Glycine max
  unsure (1)..(819): unsure at all n locations
ntgattgagaaccatgttatnacctacactatacaatactctatcttgcatgccagctgggcgactctataggaaacccgggtacctttctctaattcacgccatagagaatcggataaccattcacaggggcgttgaataccacgtacgagactgggccaatcctgacgatagccactcttaacgcccaaggattacatgcccctctcaacaggtggccgtcttcctaataggcccggaccgaactatctttccgacttgtgttcagccctaatggataaaggcacctgacgcggggttttgtccttactcgtggaaggagttgttgacaccgtcctctagccccttcttagtacaatactattgtgatgcccgatatgcaaatcgattctcgacaaccgccaataccgcttacgcaaattgcatttgggcataataaagtacatattgggctctaattcgcaataccccctcttttactattttataaacaattttcatgttgggacaccatttttttaacccattttttacaattataaggcccccctccattcctttagcggctaacaagaacttttaattcccccccatcttccgaaaaacattttaaaataaaacattttcttttcaccaccatttgtttccaacaaaggaaggttgccctcggaccaggggaaatcacactttctcccacaccctttggcggaaacggaataaattcatataaacaatatggttggggggataccgttaaccaatattcttttttaaatatgaataaacttttctcaataaaacccgaaactctctctttcg

SEQ ID NO: 196069 - DNA, 395 bp, Glycine max
agctctaacttgttttctattaagctcattttaacacatccacaagttttgaggtagattttttttttatagaaaattgtgttaagcttatttggataatctcgggctaaaaccttactttactaaacttagagccaatttaagactgtgttagacgatctttaatttgatcaatttcaagcgctatgccttggctgttcttgaaaaggtgtcttatttgacaaaaggtttaaagttttcactaacaacattattcaactcaggccttctagtatgtcctatatattgtagatcactaactatgatgcaggtactaaagcctacaaattatatacatttaacaatgggaagattgctgtgaatgaaaatgttttagttggggaagaaagcctaca

SEQ ID NO: 196070 - DNA, 360 bp, Glycine max
tattacaagaatatccgatcatatttaacaagctgtggcttattaacaagcctggtgccttaagtcctacattggcttcttcctctcttattaaacatgggcggtcacaaatcccctacctggtaacagattttggcttttatctgtcgtggattcacctttttactgccaagggaggcatactaatacaaattctacattctcttttacctcctagaaaacacggaacaactcggatccgcctctgtacaagtacgtgttacaatctgcagggtgaaggataaaagataaataggctggtttcatcttactggttccccatcatacccacttttggttcaatattttttagatctaaaa

SEQ ID NO: 196071 - DNA, 370 bp, Glycine max
agcttatatgacaagcaatagtgtagatgttatatgacattactcatgttaatgaatttattctagtatttaagcttgtattgtaattttttttattaatattgttttattattgaacttaaacaaaatttgatatttacaagcataggtgtttgagcatctgcccaatgttggttacatggagggagaggattacatgggtggggaccttctataaactaaatggaagctattaagaggtaccgggcgtgccctttcgatcaaggagaaattgaatgagttatagatgaatgttgtcatctaatatgcatataaggagcataagaatgtaaggcctttactaaagcaaacactttatattggctttact

SEQ ID NO: 196072 - DNA, 486 bp, Glycine max
  unsure (1)..(486): unsure at all n locations
tcttagaatcagtcattcatttggcttgaagctagtcatggcaatgacaaaatcaaataggagatttagaacctacaattctgatttaggaaagataacaatcgactacgacacatttgtgagcttcgactcaaaagatatcaacaaagagaaaaacatgactatgctaaggattaacgaaaggagcaaagtgatggatgattgatcagaagcactactggatccagataaccccaaatatacggctgcacttcaactgcataaagtatacaaaagctttcgtacaagaacaaagctagcagattatacaattcttattgaacaaagctggtactttatttattgtaatgagaacctctgtccttctttactaaactctccatgagttntaattttatcttttggttttaatacatatgtagaagctcttacattntgccgaactcaagcacaactctatatctttctttcacattgagaaacatg

SEQ ID NO: 196073 - DNA, 234 bp, Glycine max
tgacatttaatctatgaatcgaagacaatcatacatctaaaattatggttggacatgcgtaaagctcattacttattcaaacttcaaaacaacacatgggataaccattgtggcatttcatcaaacagttggtgtgcgcatgttaaaacacgtttaaatgacggatgatgagccatttgacatgcaaatttacaaaaaaaacaaggataggtctacagccacccatttgggcca

SEQ ID NO: 196074 - DNA, 451 bp, Glycine max
tggaacatataaactgaatcctaggcccccttaaggacttaatcaaaatatttgctggctgatcattagaattaatgaactcagtgataatttctttggacagtagcttccccgaataaagtgacagtcaatctctatgtgcttgagcctctcatggaagactgggtttgaagcaatgtgaagagcagcctgattatcgtagtataacttcatttgcaccactctgcagaatttcaactcttcaagaatttgtttacccacataagttcgcatgtaaccatacccatagatctgtattcagcctttgcactagatcgagcaacaacaattcgcttcttgcttttgcaagaaataatatttcctcgaatggagacagacacaatatcctgatgtggatctcctatccatgggatatccaacccagtgtgcatcacagtacccacatatttgt

SEQ ID NO: 196075 - DNA, 459 bp, Glycine max
agcttccacaacatccaagcaaaacaacattcagacagcacaagctatcacagccaagccaaacagagcaaaggccgaaaactctgccacaacaccaaccaaatcacagcttttctcacttaaagaccccagtaacaattcctacgatccaattcgttaaccgttggatcgactccaaaattttactggaagtatatagtacatgagcctacattgtgaccgctgggatctactatcaaacatccacaactcattctgcactactctttccacagccaaccacacacaagcatttttctgcacaaagccaaaattctgctgcacctattgtgacagcaaaattctgcgtaagtgcagatttcgaaaatcacactttctctcatccaatcttgcccaaatcaattcctacaagtcccaaatcatgtatcaatcatgtctaaaccaaagtcaagctttaca

SEQ ID NO: 196076 - DNA, 419 bp, Glycine max
  unsure (1)..(419): unsure at all n locations
tgcttcattttctcctcaagtctagttctttcgttcttagtgtccgccttcaatttggttaagccaatttcactggcatggaatttcttttatgatgtatgcccattcgagaagattgaattaaatgcgtccaaggtttatttgtcattctcaagcatataccatcttcatatttgtctaattcctcacatatctctttgatttgttttcgaacatcaggaatagaaagaactgacttgaggtcttgattgtcttggaggaaggtagtgtgaaattgttcccaaaccttttgatattcagaaagattgtcaagttgatttgcacttggttttgaagcaactccattttcttcttcatgactnttccattggtgcataatagtgttatcatcgtcatcaaattcgaacatgctactctct

SEQ ID NO: 196077 - DNA, 521 bp, Glycine max
  unsure (1)..(521): unsure at all n locations
agcttgcccagagaaggagtccacggaggaaatgcttaccacctcaaaagactggaaagcggtttctaatgactcctctacggcttccacataaggcatagaggatgggcagctcaccaagatgtcttcctcgcctgatacgatgaccagatgcccttccactacgaatttcaacttttggtcgagtgttgagggaacaactcctactgagtggatccacgggcgccccaacagacagctgtagggggggttaatatccattatttggaaggtaacttgacaggtgtgagggcctatctgtactgggagatcgatctctcccctaacctcttggcgggtgtcgtcgaaggcacgaaccaccattgaactcggctttaagtgggaagcattgaatggtaatttctccaaagtgctcttatgcatcacgtttaaactggaaccattatcgatgagcacttttgctacgatatggtccatacacttgatngatacgtgcaaagctttattatgccctctcccct

SEQ ID NO: 196078 - DNA, 483 bp, Glycine max
  unsure (1)..(483): unsure at all n locations
tgcttctatgtccttttcattgctttaattgttgagtaatccttgaaaaattgtcttgttaaaattccattggtttagctttcatttcattttatttggtctttggttattacttgtctctttgtttccttgtttgttggttgccatatagggaattggaaggaggattggtgccatcccttgaagaatttgagttaagaagaaaggggccaaccaccttaagagctattggactaagaagcactccaaattgagtgaatcaccaaagagagaacaaccaccaaaattgaggactgttctgtaattttgtaatttgcaatttacttaccttcattgctttcaagttttgtaacaaaaaggcgtttcattggaagtgtgttgggagcctccaattggttaccaaacttccatttgtgtgtaataattttaggcaatntttccttangatagtgagtgttttgttgggaaccttgaatgtggtca

SEQ ID NO: 196079 - DNA, 586 bp, Glycine max
agcttgcataagacccatatatagtttataatttgtcctattgtcttattgaacatgagcaaaaattgcatcccattttgatacaattaatctttctttaatcactttggtttgttgttgtagtctttcattatgaaaaaaatctgaactacatagataacaattagaaaaagtggtgattgtggcaatgatcactttaaaatagtcaataaaaaaaaatcccttaaactcccacatctaattctcttggaccatgaaaaaacatgacagttaaaaataaaacaatttgaatatgtgatccctggactatattaatgatctaatgattaaattaatgttatgattttcttttatgtgtagaaatcaaatataatattaaaaatttataataactcacacactctactcaatcaaactaataagattttttaaaagattaaatattaatgatgataagagaaaattatgtatttctttttatttattctccatgaagataagggatttgataacagacgaaatccccttaatcatacataacatcaacattatatcaaggaaaaaaaaactatatgaatttcaataa

SEQ ID NO: 196080 - DNA, 564 bp, Glycine max
tcccctgtagtaattaaagctaatagattgccaatcttatcctcaccctttttcttttaggcaaatattattcaatgcacttaggacttataaggatattgatttaaaaatttaaagtaaaaatatttttattagaaaataaaaaattatattatttataatttttttctttcctattatttatacaataaatatatatatatttttattttaatttcttaaccaatgctgcaaaggtattagttaggataaaacttgcttaaattacaggcatacccactctctcactcaagttaaacctgcttaaattataggataaaacttctagagaagggtataaaatataatatattcattcaagatttaaattaagtatattaatttttttggttcagattttttttatattctaaatgaaataaaacatttcactttttttatataattctaaactatctatgataataaatcatcaatattttaactagaataatacatgtgatataattggaaatacatcttatctccttaatatgtggttagaaattgattcctaatatgaat

SEQ ID NO: 196081 - DNA, 464 bp, Glycine max
  unsure (1)..(464): unsure at all n locations
agctngggtttgattggttggtatttttatattttgtttttattgtgcgacaactgtttatttttaaaagattagaattctgatcttttttatatctttatattttcttcaaattatattccttgagatgttatattatttttattttatccaaaatgaaattcatgttttcaacggaaaataaaatgaaattcatgtttttcttaccaccacattttcattttatccaaaatgaggtttgtgatttcaattgaaaatacttcccgtctttggttcatctggacaaaatatttttaccgaaaatgttttcaaaaattccaaccaaacgcatttttatcaccattttctatttatagtgaaaataaaaataagaaacaatcaaaccaaacatgctaacacgttacattatcctccatgaaaaatttaatatttttgttgttgttacaatgagaagtttaattttt

SEQ ID NO: 196082 - DNA, 453 bp, Glycine max
tgtgaaaagaaaaaggttcttacggaagaaagtggcattacaagttaatattctacagaattacagaaatcaaaacatagtggttggatgacagagcatcctgcagaattctctcctttttgaagtccaaaaaggaacagttggagggctctggtaacacccatctattgaaatttgaaagtactaaagttcattcttttaccagtggaagttatactacaagttttaagacgaggttcacaatggaacccctaattcaggaggatcagccaaggcttttcatcataggttcacaacatctagatttgacaactctggtagggatggattggggaagttataactggtggtagctttcttgattatactatatctgtaaaccaatataatcaccttcattttgaagttcttaaatttatattcattctcttcttttcttttattctttctata

SEQ ID NO: 196083 - DNA, 510 bp, Glycine max
  unsure (1)..(510): unsure at all n locations
agctntgagggatcaaagaagaaatagcaatatggtgctgattattttctctgtccttttcgctctatccacaaaagaaacagtgctgtttgaatttgatcattgtattgctagatttttgtagttatatgaattttctttttgaattggttcaatgagtgcatgcatacattttgttagatttttatgggactagacttacgctcatgagacttataattttctgacttttttatttgcttttggtcttttgccttttgccttttgatttcgttacttattaaaacattgctgttggttgccattggagtttgtgagaagacttcgtactagtatttttttgagtgctgttattttactttattattgctaatgaataacagcttttgaatgtattaaggagtaataatacattagtattatctgatacactattgataatctttaaaccaaaataaattaagagcaattggttagtttattaaattataaactgaaaaaatggtttac

SEQ ID NO: 196084 - DNA, 431 bp, Glycine max
tcttgcacttcaagaaggcctatttgtaagttctaaatctctagaaatagccattattgagcctattcctccaataactagatatctattgtcctttctccctctctccctctctgtgttaatgtcaaaaccagtacatcatgataaatactaattcatcaaatacaaatagttatagcacacaaaatttattcagtgccctctaggttgacttatcttgtatgaatgaatattcagtgccaagagcctagtcaccccaaatattcaaactttaatctttcgtaatagaagttagaaacagggttattgtccttcgtaattctcatcatgggttacttttttcacctcaacggttattttttttgtctcaattttaagtgctggtgcgagtacatcaactgcaaacccgagtaagttaataatgaccaata

SEQ ID NO: 196085 - DNA, 517 bp, Glycine max
agcttataagaacaaaattgccttaatcattaccaaatatgcatgtgaattaggacgcatcaacaagaatcaaaccaaggctattgtgcaagcaatcaatggggcaaaacacaccaaatgattataatgatggatggctcaaattctcacaaaggtaaaatcatcactttcaaattgagctttcaaaactatcatgacatgtagaaaagaatcaaggatttcaagtcacaaaatgtcaagaacttttattttcaaaacaattacccatttcttgaacatatcctataattcaaagaaaaacatgcaaagtcgtacgtgcacatgatattgacccaaaatattaaactgaaaatccgacgaaactaacaacattaacaaattaacacaactaacaaattaacaaaaccaacaaaactagcaaaaccaaagaacactccccccccatacttaaacaacacattgtcctcaatgtagcacaattaaaagattaaaaacaattaaatcatcaaagagaatc

SEQ ID NO: 196086 - DNA, 478 bp, Glycine max
ctaagcttctatgaaggttcgttcctaatttctctacaattgcatcacctctcaatgagctggtgaagaaaaatgtggcatttacctagggtgaaaaacaagagcaagcctttgcttttctcaaagaaaagcttactaaggcacttgttctagctctttctgacttttctaaaacttttgagctagaatgtgaagcctctggagtgggagttggagctgtattgttacaaggtgggcaccctattgcttattttagtgaaaaaattcatagtgccaccctcaactaccccacctatgataaagagctttatgccttaataagagccctccaaacttgggaacattacctttgttccaaggaatacgtcatccatagtgatcatcaatcacttaagtacattagagggccaagcaagttaaacaaaaggcatgcaaaatgggtagagtacctagagcaatttccatatgttatcaaata

SEQ ID NO: 196087 - DNA, 476 bp, Glycine max
agcttcttgctacattatggtcaatgagctgcagaatgaggggaaaaagcaattttcctgttataaaaaatatattagccaattttgatgatgctttctgagaattgagaggcttgcctcctaaaagggattgggatcatgctatcattttgaagagggctcaaattcctaatatttgcccccacatgtatatgcattatcaaaagaatgagatagagaaaattgtgaatgatatgctttgtgctgtaaggcccaacactaaccctttcagtagccctgttatacttgtcaagaagtattgtgtgtggagattttgtatagactatcaggccatagacaagtaagcaccggataaatttcctattcccataatttatgaactactaaatgtattgcgtgatgcactgatttttgtaagatgaactactcttttgctaacataaatacactcttaatggtcttgaacagtataagac

SEQ ID NO: 196088 - DNA, 492 bp, Glycine max
  unsure (1)..(492): unsure at all n locations
tggagaggatgcttcaatggaggaaaagaaagagggagagatagagagaggggggagcaccaaattgaaggaagaaaaagggagagaagttgaactttgagttgtgtctcgcaagactctcattcatcgaagttacaacaagtgttacacatgcttctatttatagactacgtatcttccttgagaagctgtcttgagaaaacttccttgagaggcttctttgagaaaactttcttgagaagctagagcttaactacacacacgcctgtaataactaagctcacctccttgagaagcttccttgggaagattcctgaagaagctagagcttacctacacacaccccctataatagctaagctcacccgcatgccccaatacatgaaaatatataaaaaagtgcctattacagagactactcataatgccttgaaatacaacgctaaaaccctatactactagaatggccnaaataccaggccccaaagaagg

SEQ ID NO: 196089 - DNA, 444 bp, Glycine max
agcttccacaaatccctcatgtaagactatgtctaaactaaacaacattattgtaacaatataattaaaaccaaaacttaacctacaaatccctcatgtaaggctaagtttcaatcctgcttcaatcaagttctaaggcaataatacatttcctaatgctaaagtcacctaattgtgcacacaaatgggtgatcagaccaaaagcatacaaacattaagcattgaagggagcattgaacacagaaaacataatcaattagatattaggtatttacatcagctgttcattaaaaatccccaaatagggtgtttagccaaccattaaaaagaaaccctaacaatgaatgagattaaaagcagagaatgatagttccttacacaagaagggggattcctcctcctcttctcagtatctcacactcactctctactcaataatctctc

SEQ ID NO: 196090 - DNA, 477 bp, Glycine max
ttgagccaaaatcctgactcaccataaaccttgacccagggtgagaatgtcaatccttaccctcggaagcaaaaaagaatagaagggaaatttccaatcaaagaaaagagaaggaaaatttccaatgaaagaggaaaaagaaaagaaaggaaattcccaatcaaagagtgggagaaggaaaaaagaaaaggaagaaaattcccaaccaaagaatgggagaaagtaaaaaaggaaggaagctcctggtcaaagaaaccagaagaaatgtgcagagaggtctttggaccagacgatatctgaacagtacagaattgtcactaaatgaacaaaaaggaaggaaaggaaaccacgacctaaaatggtcttctccctttaattaccaaccaaaatcccgtgcgctagcgacccttttttctcgccccgcactaaaaaaaaaaacagaaaaaggaaaagcccaggaaaatcaaaagccaaaaa

SEQ ID NO: 196091 - DNA, 806 bp, Glycine max
  unsure (1)..(806): unsure at all n locations
ccccctgatgagtctcttgagaaccctctnaaatcgtnagcttgtgaaaagaaaaagggtgctttctgcataaggtggcattccacattttttgtttgacacctggccgacaaattcaaacatagtggttggattactgaggagcctgcagaattattttctttctgaagaaccaaaaagaacagttggagggcgcgtggtacacccatctattgaaattttaaagtactaaagttgatacattaccaggggggagttattcttcaaattaccatataacgttcacaatggaacccctaattcacgatgatgaaccgaagaaattaataaaatgcacacttcctcttacaggtgcttgggcctgtggggatagattgttgaaaaaattacaggagctattttccctgattatacaacgttcgccctacaaaataaaaaccccccattttgacacttccttaaacaaaaataaaataaaataggctgagtttatatactttttactgcgcacgcgccaattttaaaccgctctcaatctttaaatccctcccaaagcgcaagcggggctctctttataatcctttcaattaatctcccctcttactcccttcaanaatccactcaccccttttttaaccttctctttgagaaatcaatgttctacaaaataatcggcctgacatgatcgaaaaactcctaacgtgtaactcttggtgtcattctcgccataaaacgcctatacataccttgtttaacatccttccaattggtactaccacggactcgaaatcacaaaggatatttcc

SEQ ID NO: 196092 - DNA, 372 bp, Glycine max
  unsure (1)..(372): unsure at all n locations
gctttgaaanataataacttgaattttaaaatacccattttctctccccctttggcaacatcaaaaaggccaaagtgcgtgaaacatgaataatttaatcatacacaaagcataatttgtaaaacaaacatataagattctaaaaacatacataaagcataattttaataaaaccaaattgagatgcaaaccacttagtcatatatcacaaaataaccaagtctaagtataaaacataagcatctaagtgccaaataaagacaccaagatcagtcataattaactaagtaccaaatacctaaaacataactaatgttcacagaataaataaataacataatggtgtaaatcattcacaaaacataataaaag

SEQ ID NO: 196093 - DNA, 514 bp, Glycine max
ctcagcttgcattcctctcttcccttaaacttcttttatttattgctatttatcttttgctttaaagaagtttattttgaattgtcttttgagtaattcatgttaagggtgcattgttaatccaaaaagaaagagtgatagttcaattggggaatagtctttgcatcttaattcaacccccctttttcttaaggtaactgaggccatttgtcccacatcctattcttgataactcacttctctctaaaaagacaaaatgaggtcacatgaacgtctatatttttacttgaaaacacagtcaatcaaatgcctttttatttttttattttgaaacttattttgaaacttatttgctttgaactttactcgctgttttacgacacccccaccaacgtgcaagacgagtaatctctgattgaacagtcttagaagtcaacactcaagaacgcaagtcgcttgagccaacagaaccatggctttgccccacattccagtgaaagttgaataaccaaca

SEQ ID NO: 196094 - DNA, 414 bp, Glycine max
agctttcttagtacaaaatgcatattctttttgtgattggtatttgaatataattcattgtatacatacctgaattggagtagtatcttagtagttttttgggtgaacattagaagtaaatgtatggataggtcatacacagaggacttaggttctgtttttttttttgtatatgttttgtgttgatgtaattatctctcattgcacaactagtacatgtatatgtatcatttttttctaaatacatatcaatttgctataaaaaggtttgtttttaataagcaaaaatgaaagctatgctctaacccaaatacacaatccacatatttgctactttacaaagtgaaaaatgtattattttggataaattttgtgttttgataaaaacaaattcatggtttaaaaaaaaaacta

SEQ ID NO: 196095 - DNA, 455 bp, Glycine max
ttgagccaaaatcctgattcaccataaaccttgacccagggtgagaatgtcaatccttaccctcggaagcaaaaaaagaatagaggggaaatttccaatcaaagaaaaagagaaggaaaatttccaatgaaagcaaaaaaagaaaagaaggaaaattccccaatcaaagagtgggagaaagcaaaaaaagaaaagaaggaaaattccccaatcaaagagtgggagaaagcaaaaagaaaagaaaggaaaattcccaatcaaagaatgggagaaagtaaaaaaggaagaagaagaaggaaagaaagctcctgatcagggatcgaaggaaaaacagaagatatgtgcagagaggtctttggaccggacaatatctgaacaatacagaattgtcaccaaatgaacaaaaaagaaggaaaggaaaccacgacctaaaatggtcttctccctttgattac

SEQ ID NO: 196096 - DNA, 323 bp, Glycine max
agcttgatgtgagaaagcgtggaagagtcagtcttcctacttttgtttgttgaccacagagtggtacctggagatatgtcgcgggggtcaggagaccttggggacgtcaggtggggtgctattgcccaaaaccaagcttgaccaatcccgacccaacccgggcatagtcagtcagtgagaacctgtgacgtacctaagcaggcgagctcctggcagtcaaccaataaaagaataaagtccacaaagcaaggaggcttgtgtggcggctggcccactatgaatcttgagtggtatctggaaaatggcctctggtaatcgattac

SEQ ID NO: 196097 - DNA, 505 bp, Glycine max
ttgcaatcactaagagactcttttaacaacgatagactaagacttagctttcttattgatctttggtttcttggtcttgatttggacttaaaataaaacttgtgtttcttttgtcttggcatcatcaagaccatcatacacatacattcacaaacatcgctatattgtcgtaacaacccattgtcttttgaaccatggatccctcccactcaagttttggtgttatgcattgtaaatcgcaacgtgtctcatcaatcggatgccctctctcacactaaacgaaaagtctccattagaagtcttgtttcatcgtccatcaaattatagtaaactaaaagcttttggttatctttgttttccttggttcactccatatacaactaacaaacttcagaccaagtccgtaccatgtgtttcttaggttacaatcttactcaaagtgcatatcttttgttatgatctttcagagtctaagttgtcacctcccgcatgttgaatcattgaa

SEQ ID NO: 196098 - DNA, 440 bp, Glycine max
agctatagatattagctgaaagactcatggatgactttatctctaaaatgcaccctgatgaaagagcccctctcacttgaagcgtggaattgtaccttatgttgaaatttgactttttacatagagtaaagtggggacgaggtcaaacttttgaccagtggccggcgaagctttgataccaaaattaaagaaaatggtttacagaaattgtttgttaggcagcataaatgttttagtatttacaaatcctatttacaaaatcagagtacttctaacttaacacaaatacaataacttgtatagtaatcagtaggcttaattaattatacttttggctcctttgtgatagtcaatgtgtgatttttgtcctcttataattctttgcagcaatcaaatcctccattgtttccaattaaaaatacttttggctcctttatgat

SEQ ID NO: 196099 - DNA, 481 bp, Glycine max
tgcttctacatatgggttctatcgcacagaatggcatgatcactggctgacatattctcaattagctctgttgcttttttggggtcttcagctttatttttccccctgcagaagcatctagcaatttcttggtttgtggtatcagcccatctataaacatattcaattgaattgtcttggaaaacctatgggtgggagttcttctcaataaacctctgaacctctccaatgcttcactcatagattcatcacggaactgatgaaatgaagagattacagctttcccttccgcagtcttggactctgggaagtatttctttagaaacttttcaacaactttttcccaagttttcagactgttacccttaaataagtgaagccacctcatttgctctcctgccaatgagaatgagaatatgctgagtctaatagccttatctggcacaccggcaatcttaacactgttgcatattttaatgaa

SEQ ID NO: 196100 - DNA, 571 bp, Glycine max
agcttgactatatacctcttccattgtgctaagcatgctatttacaacatcttttcgtgaagaaagactgaaccaccaaggaaacaattcgaaacacctgaaagcaaaactcgataaaggaaatcatgttaccaagcaatacataaattggctacatagtgtataaacatgtatctattaggaatggatgctcccatgttaaaattccatattatcttgccatgtaaaagttttgtctcaatgtctccatagacatttgtgtgagctctattaaaatttgtgaatattttcaaagagactataaataagtaaaagatttcttagaaattgggcttaaggccttagtgtcaccacaatgaagacagttgagggtttgtgaaagcatagtctcccaagtcaagaggcttttataccaactataaataaagtgacaactatattggttctcccaccaatttctgcccagggagaatacaaatgtatataggctgcctaataattctaatctaataataccagcaaaaagaaacctgtttgcattcctaatataataaaaccaggcaactaattt

SEQ ID NO: 196101 - DNA, 358 bp, Glycine max
tattgtggcttgataacctgcgaaaaaatgataaaatggtatcattatattactcagaacaactcttctactttatgctaatactaaagacattaattgcattaaggaaattatcccctctaatttggcacgtgtatgaaagaataattacaatgtacgtaatggaaacatgcataaaatgggttaaagaattcatacaaccttgggtttgtttcaattgataattacaaattcagagacgtccttacaaattcagatgataattacaatgtgccgtaataaagccgtcgtaagttcataagctgatcctggctggtcaacctgcatgagatcgtactagatgttatcatcgattaca

SEQ ID NO: 196102 - DNA, 369 bp, Glycine max
aaaataataccccctcgcctgacactaatcgcagctctgttgcatttaataaacattttgccgacatgcaagccttcctaacgagatgacgaacctttatgactttcggatgaccaccttgtcccttgcctataaataagccatggcggaaatgggggaaaaaaattttccataattcccacttttaaccaaaaatgctgaacatccccaaggatttgttgcaaaaaaacatagttctattactcgctttgtaaaagcgctttttttccctaacaacacatattttctcattttatggtttaaaacaggaggaattacgctctggtattcctcctaacggacaatacgtcttagttaaccatggaaaac

SEQ ID NO: 196103 - DNA, 158 bp, Glycine max
tattgaatataactttttctaatgtctcgctcacgaaattataatcgtcaacccgtatttcttttgtttttccccccggccatctcttcacaacgggaaaattttacagtcacaatcccccattcctcacccggccatcttttttttctccctccctt

SEQ ID NO: 196104 - DNA, 637 bp, Glycine max
gcttgtcttaagttctgagagacaaaaggagtcatgtacttatgaagatctcttaccaagtttatgtagtattttgctaccttttgtcctgtctcatacctatctgctttgtattggatcatccacaggttcccggctctatgagggaaagcagtttctgttgatggattctcagccattcttccaccataagggttgaaatacattactgctttctctaattcaatcatcttcttccaaatccctcccaaccctccttgggtattggtctcttcacatagtcagatttccttttcaagtacttgagagaccaaggttgtctctctagcaaaatctcaactggggttgcaatgtccatgttgtaccaaaacagcacggattgaagccagcttgtttcgatgcattcagattgcttcaaccccaattaaggagacctctcctccatgacagaaaacagagttttggagtcgctgaggaagagagctatgaaggtagcccctcactgtctttatgatcttctgttggagataattctgttcgagacattgttgatcaactaatatggacacttcttcaaatttaagtcttgattcatcacgttgctggagactattaaccccttttgttggtctcaact

SEQ ID NO: 196105 - DNA, 483 bp, Glycine max
tctatccatggtggttaagcattgatgtcaagcttctaccatggatggttaaacattggtgtgttgcttctgcctttatggtggttaagcattcaaatattgtgttttgcttctgtcttgagtggttaagcaccatgtttagcttctgctcttgatggttaagctttgttgattctgcctataaggtggttaagcacttgttgttggttcgcttctgtcttgagtggttaagcatcatgtttggcttatgctctggatggttaggctttgttgcttctacctatatgatggttaagtacttgttgttggcttgcttctatcttgagtggttaagcatcatgcgtagcttctgctcttgatgattaagtttggtttgcttctaccttttatgtgggtaaatggttaagcattgtgttgtggcttctgcttaatgggtaagcatattccaaatgtctttgaatgttttcagtcattgtcaatctg

SEQ ID NO: 196106 - DNA, 543 bp, Glycine max
agcttcttttatatatatatatatatatatatatatatatatatatatatatcgaatgttaattagtatccttagagtattaattaaggaactaaaggagaaagattttcttaaaaaatatacaaaattattttatttatgactttttttacttttattatttctattataaatattttttcatttagtgtcctaaggttagcaagaccatatatatatatattcctttggcggatcgaaataaataaaaaatcttttgagccttgtggacgagattctagagggtaatttgaagaaaaagatcattgtaaacagttgtagcatttgttgctagagaaatgattatttggactcaccaggttcactagagcagacttggctttaactttttcagacagcttcaaattaattccatttttcattatcaaattgaataaagcacatgatcaaatctttcacagtttttatttttattagatatatgtttcacagttttaattaaaaaaatcaacatgtcattatttattagaagactctgatgac

SEQ ID NO: 196107 - DNA, 585 bp, Glycine max
  unsure (1)..(585): unsure at all n locations
tgaagtttgcatcttgcttgattctattattgaagaagctaattaagaactctattcaaaatggcttttgttactgtcaactatttgaggttcaaatgaatcaggttccacagatcttttgtcatttgtttcaatagttcatttcatttgtatataacttccgtgtgatttaatcatgatgtgatacatgtgcatttgaataaattcttataagcttgttcaactcatttgaagtttttgtttgtttgaagtccgtgaatcataaaattcatgtttataatactattgtctggctcaatgcagtgcatacagaggactatacattctcaactggatctatcgctactttactgagccccactttgtccattggataagtatgattctctcttattgtgttttatgggtactattttttttgcttctacgcttattataattattaagtaactacactctgcattattcactactatgtcttgtggaaccttttcatcgcatatttttaagttcatacttntaaaattcttcatacctgagatgcatttgtgacgttgttcaaaatgtttttcccttatcatacaa

SEQ ID NO: 196108 - DNA, 441 bp, Glycine max
  unsure (1)..(441): unsure at all n locations
gagcttgaatttgggttagacatgattgatacatgatttgggacttgtaagatttgatttgggcaagattggatgaagggaaaggtggttttctaaatctgcatattgtgcagatttttgctgtgaaattgagcagcacgattttgcacaactgcataaaaatactangcatttgctggttgcggaaagagcattgcagaatgagttctggatgtttgctagtagatcccaacggtcaatatgtatgcttatgtactagagacttccactcaaaatttggagtcgatccaacggttaacgaattggaacgaaggaatcgttactggggtctttaagtgagaaaagctgtgattttggttggtgttttggcagagatttctgcctttgctctggtttcttggctgagatagtttgcgctgctcgaatgttgcattactttga

SEQ ID NO: 196109 - DNA, 460 bp, Glycine max
tgtgcgaatcaaatcactcctgcatttcatctctaccatgcatttttctttctttacccactcctcacgtttggttttttagggaaaaacaccataactaaacgcgccacaagacatccctatcgcaccagatccaaatctagaacgatgggtgatcaagaggagacacaggaacagatgaaagccgacatgtcggctctgaaagaacaaatggcttccatgatggaagccatgttagggatgaggcagctcatggaaaagaatgtggccaccgctgccgctgtcagttcggctgccgaagcagacccaactctcttagcaactgcgcaccatcctccctcaaacatagtaggacgcggaagggacacactggggcacgatggcagccctcacctgggatacaaccgagcggcttacccttatggattgccgcccaactactcaccacccgtcttgcaag

SEQ ID NO: 196110 - DNA, 457 bp, Glycine max
  unsure (1)..(457): unsure at all n locations
agcttcacaaggatgtgttatggtacactttttaagaaagagtatattagcaagttatactttgagtatgtagcttttaagataatcggaattataactttctaacttattaaaaaatgaggatactttaataaatctttgattagaatttataataagcaaatattttttaatatacatatatatatatatatatatatatatgaagaattttaattatgatataagattctctaactattgataatttgttttaaagaatattaagatgtaatctacatataaagataaatatagaaggtcgaaagaggtaaactattaagtatattaaatatgtaaataaagataaaaagagaatagtttgaaatagttgatagaaaaaatagttgactagttttagaaataggctgtgaaatgtatgtgtgaaatgcntctccnacgatgagaagagagagag

SEQ ID NO: 196111 - DNA, 464 bp, Glycine max
tctagccaaatggacttaccttgaattaattcctttgatagcccctttgagcctattttcccctttctttgttttgaagctcattacaagccttaagtgaaaaaaccatgatatcaccttacccttaaggaattatggagctttggaattgttttgggaataagctgggaataagtgtgtgtggggggggggggggccatggatccctcccactcaagttttggtgttatgcattgtaaatcgcaacgtgtctcatcaatcggatgccctctctcacactaaacgaaaagtcttcattagaagtcttgtttcatcgtccatcaaattataggtaactaaaagcctttgggtatctttgttttccttgggtcactccatatacaactaacaaacttcagaccaagtccgtaccatgtgtttttaagttacatcttactcaaaggcatatcttttgttatgatctt

SEQ ID NO: 196112 - DNA, 472 bp, Glycine max
  unsure (1)..(472): unsure at all n locations
agcttaaagtatgcccgagtcattcatccctatgagatgttgntgaagtattggcgatcagaattgccattccttggattataaggttgaaccaagctcatgctcttacaaaaaggttcatcaagtcaagttgaaatatggaagtaaccgtctttcaaaattggggcaaaagatgaatcgagtcacatcactgcttcgtctactgccaaacatatttaggattattgatgtccttgttacttccagtttcaccttgacaaagatgtcatggaccatgttgaaaatctaaattgattcaaccccatatcttgcgtaaaaatgccattccttggattatagggttgaaccaagctcatgctcttacaaaaaggttcatcaagtcaagttgaaatatggaagtaaccgtcttgcaaaattggggcaaaagatgaatcgagtcacatcactgcttcgtctactggcaaacatattt

SEQ ID NO: 196113 - DNA, 407 bp, Glycine max
ttgagccaattcaaacgacaataactttttactcggatgtctgattgagtcccgtaatataacgacacgctcgaaattgaatgttgaagctctgagctaattcaaacgacaataactttttactcggatgtctgattgagtcccgtcatatatcgagacgctcgaaattgaatgttgaagctctgagccaattcaaacgacaataactttttactcggatgtctgattgagtcccgtcatatatcgagacgctcgaaattgaatgttgaagctctgagccaattcaaacgacaataactttttactcggatgtctgattgagtcccgtaatatatcgagacgctcgaaattgaatgttgaagctctgagccaattcaaacgacaataactttttactcggatgtctg

SEQ ID NO: 196114 - DNA, 438 bp, Glycine max
agcttccactccagttcccattcgagtacctaacgggtgtgattttcaaacgttaaaaaccagaatacacaatacccttaagctaaccgacaaacaatttttggatgaaatttactaacgacagcctttcacgtatgcaggtaatcaatttcggtttaaatgtatgcaactgaaagatgatgctgatgttaacacaatgttaatgtgtaatcatgaatttttgtttgttgatccgattgagtttttatgtagcattgctagaaccccagatggcattttaaatttacttgaatctattatgaaccctactcatgatgccctgctatattacaatgggaggtggaacatgtcacgccaaaatgagtttgttggttactcattcgtaggaaaaaatccccaaaactttgacattcccactggatgtaccatggatgaact

SEQ ID NO: 196115 - DNA, 425 bp, Glycine max
ttatgttttccctcccgtggatgtagccttgatcaaaggtgaaccatgtaaatctgtgtgttctttctcttttttcttctctttcaccttgctgcacaattatgtgtgtatgacatttctattctgttgcatctcctgctgctgttcttgtttgttcttcatcacttccacaacaaactggtatcaagagctcaagttgcgatcaagggaattcaagattcttgtctgaatacaaagatcaagctatgggagtcttgtttctggttcttccactgcttcattgtgatcaataacactcaagaaatcatgtgaaacacaatcaggattgaaaaattcaatggaaagaacagcttcaatctgtggcgcatcaaaaagcatgctttgttgaaggaacaacgtgtttgggctcctgttgcgttttcatc

SEQ ID NO: 196116 - DNA, 372 bp, Glycine max
  unsure (1)..(372): unsure at all n locations
agctttatttaaacaaattttcattaaattaattaattagtaataaataatgtagatatgttttaatttttaaatgacatttctaatttactaaggcaataataatataacatttctgtggaagcaaagctaccatgatgattcaccaaaatgttttgatgatgccaaagctcaaagagttgtttcaagattaaagaatcaagcattcaagattccactcaaagattcaagaatcaaatgaagaaatcaagaagcatcaagccaagtcaaagtaggtggtaaaaagtatttttcaaaaaacatcaaatagcacactttttgttttaaaaaggattttctgaaatcttctaagttaccagagtntttactctc

SEQ ID NO: 196117 - DNA, 423 bp, Glycine max
ttgcagatttggccttcgccagtgaaaggatcaatgtgggtccgaaaagaggcaaatttgatcatcctactaggacgactgaaaaaactggggcaaataaagagggtgaagatgaaggagaaacccatgctgtgattgccattcctgtacggccaagtttgccaccaaacccaacaatgtcattactcagtcaataacaaacttcctccttacccaccacccaattatccacaaaggccatccctaaatcaaccacaaagcctgtctatcgcacttccaatgacgaacaccacctttagcacaaaccaaaaacaccaaccaagaagtgaattttgcagcgagaaagcctgtagaattcaccccaattccagtatcctatgctgacttgctcccatatctacttgataattcaatggtagccat

SEQ ID NO: 196118 - DNA, 1160 bp, Glycine max
  unsure (1)..(1160): unsure at all n locations
acctctcctcccantttgtactncatactctctcttacctctgttcctcanttnacttcctcttnacaactatttcattnccccacccgacgggagaatgattacttgatttcccttggacacccccatagactcgaagcatgcccgcctcgaattttggttgagaacaaccattcgatgctattttattactgcacattgtaaagacatctgatctcctgtcttagaatgcggattgaacggagatagaagtaggcttgttctacacctctgacaatctatgaagcaagagtcttctgctcgcgcatattagaggcgctgccgattttttgcaacaaactgtcttagaactattacataaagcggtttccgcatgtttatgccgngatagcgaggcatattgcccgcaatgcgaatcccgggattgttctgcatgcgctcgagctcccacgagactatagatgtatgggatctatccaccttatgaggacatatctccacccatgttctccctgggttttcatcacggcccagcgatacaaacaaaagaaacgcgccttgggagccggataaacccgcgcttctggaggtgtatcaaacaacccgccaatgtacttctttcgcgtgtggtatgaagcataaacaaacatattggccctttgcgtcctcggttataacccccccttctagactacgtttctggcgccgtcgccaccacaatagtttctacttggccctcgtggcaatcgcgagaacgcctcttcaccatgaatagaatgtgctctcccccactagtacggcctatacattccttttagtgaaccgcgttcaacaatgaaacaaccatccatccccctcagtttggcgcggtccgatcctccttcggttgcttctctgggttaacagctctagcaatatcttttttttcttgctgcacatcgactgaacaccctaacacctctcccttgggaaggcttaccacacaaccaagtggtagcgtcctcctctatttattattagaccgccggtatacacctcgtctccacgctaaaaaaacaaacctacactcccttgcctgngtcatttatcctttccccccggatgccgcataactccatcctccggtagagaagtttccacatacttactggacacctgcc

SEQ ID NO: 196119 - DNA, 355 bp, Glycine max
agatgaaataaatcatccaaatcaaaatgtccgagctatttattgattattgcctatggaatcaattgtgttaaaaaaaatattaatcctatgtgtatctcacctcttttgataaaaactgatcgctaattctgattaatatcatggtcagaaaaaaaagttaatcttgtattttattatgacaggaaataggaatgtttttataccatagaagcattaatatgccttttcatttgtgtatgaccatattgtttcattaattcattgccatattccatgtactattaattaccgatccaaacatttatgtcttaagacctatacaatatttaatgacaatcaatttgcaaacatg

SEQ ID NO: 196120 - DNA, 375 bp, Glycine max
catgcaagcttggttaagaagattcctaaaaaagttagagcttaactacacacacctctctaatagctaagctcaccttcttgagatgagaagctagagcttagctacacacccctataataactaagctcacccctatgccagaaaaaacatgaaaatacaaaaaaagtccttactacaaagactactcaaaaggccccgaaatacaaggctaaaaccttatactactataatggccaaaatacaaggcctaaacgaagaaaaaacctattctaatatttacaaagataagcgggctcatacttagcccatgggctcgaaatctaccctaaggctcatgataaccctaaggcctttccttggattatctggccc

SEQ ID NO: 196121 - DNA, 394 bp, Glycine max
ttctaaagttttctggtttccaaaccttgaaaacaaaagtgtgctatatcttttcattctcttctgcctttgccaaaaagaattcgccaaggactaatcgcctaaattctttttgtgtctatcttctaccttctgcaaaagaacaaaggactaaccgcctgagatatcttttgtttccccttcacaaagtttcaatggactaaccgcctgagaactttgtcttaacacattggagggtacatcctttgtggtacaagttgagggtacatctactcgggttgttatgactgagaacacaagagggtgcatctcttgtggatcaattcaagtgaagggtacatccacttggttgttcaaagagaacaagggacggtacattccttgtggatctttg

SEQ ID NO: 196122 - DNA, 308 bp, Glycine max
aactcgaggcgagcggcaggcatgcaagctttttgttgccattgaaaaatctaaaccggagctatgatcaactttaatttatggctgattcaagaccgactatctgacctatcacttgctgggacgatccctaatcctacggatgatttttacgaccacataaaaggaggttgtcgtattatacctcctgatttcagacgcaacggatgttgccacaaagacaacagtgatattttttttattgcgataaagacaccaatgatttttatggacattttcaaagaaacccatgtggcatccttaatata

SEQ ID NO: 196123 - DNA, 396 bp, Glycine max
ctgaaggtgcgtagcccaccattttccctagtagaatactggtaatgtgtctactatcattgtcatcgtttttttcgtcattgaggtgccacttgagctgccaagttctccacctttgggcgtattctttgaaagatccgtgcccccttttttgcacatattttgtagttgcatcctatccgaagccattataccgacactgcctaacgaaggcaaccattaggtcctcccaggaataaactcgggaaggttccaagttagtgtatcaggtaacaactaccccagtaagactttcttggaaggaatgtatcaacaattcctcatcttttgcgtatgcccccatctttcgacaatacatctttagatggttcttggggcaagtaatccccttgtact

SEQ ID NO: 196124 - DNA, 383 bp, Glycine max
agcttgcttaagaagattcctaaagaagctagagcttagctacacatacctctctaatagctaagctcacctccttgagatgagaagctagagcttagctacacaccccctataatagctaagctcacccccatgacgaaaaacatgaaaataacaaagaaaagtccttattacaaagacaactcaaaattccccgaaatacaaggctaaaaccctatactactagaatggccaaaatacatggcctagacgaaggaaaaacctattctaatatttacaaagataagcgggctcatacttagcccatgggctcgaaatctaccctaaggctcatgagaaccctagggcctttccttggatctctagccaatctaattggagtc

SEQ ID NO: 196125 - DNA, 371 bp, Glycine max
tgaatgggattcagacgtgttgtgatgataacagtgatgacaataaagcatgatgacaactgtgagtggcccagcccgctcagcgatctgggatctagctccgagttcatgagcctagcacgatgctagatctcacgactcgagatcaagatttcagactccagattgccgaatgaagaacagactcactcatgataacgcctaacttttttctcccaacattgaataccacatgagtttctgacgaaatctttacccatgagcttttactctctactaatcgatcaccatactggtgtagtgggctacccggaacgagatgacgcttgaaaaagttttcaaactgaatttacaatgctccactcattttc

SEQ ID NO: 196126 - DNA, 467 bp, Glycine max
agctttatacaattaattaagatcaatggccaatatacaattaattaattacatatatacttatatagtgggagaatagtgtctatcagagttttaattttttgtactgttttaattacaaagacttcatttatttttttttaaaaaaaagttgattcatggattattttaaaattcaaaagtaaatgatttccactcataataccaaggaataatagtaaatgaaggaaatatttattctctatttctataattaactttagaaaaaatttattaattaaactagctatacctgttattattgttttgaccccctttttttgatagactagtttcttttttgtgtgtcagcaaaatcaaagatatattaagcaaggtaccagagatgtaccaagatagaatacaagtttaagtccatccctggttactctatatttatcacatataataaatataaattaatcaat

SEQ ID NO: 196127 - DNA, 510 bp, Glycine max
tgtgcggtgaactaacctcctttaacatggaattgtggtgcaattgtgatttgatacaaattgatttaactaagaagggcaggaaaaataagggaaagatcatatttgatgtggacatccccacagatagtgttttcagattatagcttacacagaatgttagcataaatatagttcaaatggctgaaatattttacttcttagaattcattcattatattattactaatttaaggatcctggtgacaaatatgattgttttaaatgacatcaaaagtggatgaatttgaggtgtaaatctatattgtatgtttgacttgaaattggtgagaacgacaagaggggtcatgtgataaattattggcttttcaactattgatagattagttttgcgaattcctgcataagtagattattatattgacgtggtgatttgtttagcagacatttgtcatggaacctgcatttcttccttcacttattattgatatatttaaaagagtttggaaa

SEQ ID NO: 196128 - DNA, 490 bp, Glycine max
  unsure (1)..(490): unsure at all n locations
atttcgttcattttcgaattcttttcttccgtctttaacgcgcttttaccgtttatttaagccgttttctcacctaataaatgataaaatgaatttcaaccgatcatttgtgttgtaatctcatttaatcactcttaaaatgaaatctaaccgatcgttcacgctataacctcggttaaacaaaaaaagtaaaataataataaaataatcaaaatatcttgaaaaataataataaaataaacaaaatatctttgaataaaataaaacaaaaaaatcaatcggacgttttttctttggaagtttccttgaatgaattgattaataaccaaagtgaaactaagactaaaatagactcacaaatcaagttttgtccgaaaatcactaaaaaccgttttaaggtccaacgccttanacggtcctctttgcttttatcggttaacatggaccgttcaaaagcataaaatcaacatgtaactttaccgcttttgaa

SEQ ID NO: 196129 - DNA, 381 bp, Glycine max
tgttaaagaacttcgaaaaaatcaagaacaagcttgttcgcacatcgttcgcgtgtatgacatccactccacaaagtttgaaattgaagagaccttcaatcctattacacaacgtggccgacaaaagtgggcagttaacttgaatggtcattattgtcaatgcagaaggtattctgcgcttcactatccatgttcacatattattgcagctttgggttacgtgagcctgaactactaccaatatatagatgttgtttatacaaatgagcacatcgtaaaagcttactccgcacaatggtggcctcttgggaatgaagcgactattcctccttctaatgacgcatggacacttatccctgacccaacagcaattcgtgcgaa

SEQ ID NO: 196130 - DNA, 582 bp, Glycine max
  unsure (1)..(582): unsure at all n locations
cttggatcttcttcatcaatggagtcctatgcttcttgaattttaatcacaggggaatggaaaagaagaagagttgagaggagacaccacttcaaggagaagatgagtcaagaagaagctcaccaccatagaaagccatggataagagcttgaaggtagaagaagatgaatggagggagagggagagaaggagcacgaaattttatgcctcaaaagaggtctgaactttgaagtttaattctcaaatgatcaaagttgaaaaaattcacacacatggcctctatttatagcctaagtgtcacacaaaattggagggaaatttgaatttctattcaaatttcacttgaatttgaaattgaatttgtgaagccaaattttggagccaaaatttcactaattatgattagtgaattttagctatggttcagcccactaatccaagatcaagtccaagattctccactaagtgtgcttaggtgtcatgaggcatgntaagcatgaaagacatgcacaaagtgtgactatatgatgtggcaatggggtgtagcaagcaaatgctcacctcccctctcaaatttaatt

SEQ ID NO: 196131 - DNA, 485 bp, Glycine max
  unsure (1)..(485): unsure at all n locations
tgatggtacgctaagcctcacatctcaggctaagtgcatattgcagaaaagtttgcgttgcagaaagtgctaagcacagcttattgtgctaagccccagatgctcactggactttacaacttcaagttgggcttagcgcgaggttaggctaagcacttgggtttttaaactcaaacgtcacatgggcacgctaagcacagctgtgcactaagcgcgccatacaaatttcaatttttattaaaaccaaaggctaaggcacttgggtgttaccccaaatacctttagcttctccctttgttaaccttgagcaagtgtgtatttctgctgcgtgtgtgtactgcttgtcagcatcttctttggttcatttcaatcacaatccaagtaagtgggtacatttccattnttatttttcatccttcaaaccttaggataaatgacttctccgtttcttagttgtatgttggtaagttaagttttttagtttt

SEQ ID NO: 196132 - DNA, 925 bp, Glycine max
  unsure (1)..(925): unsure at all n locations
aaagtagagcaacacacacaaataaatcccatactgagcgaaatataacaacactcatcccaaaanncagcccggantttgatcatgatagcaanccngnanaataaaccaaccgaggatgcaacatncaacataagtgatgatgatttattgaaaccaaaaaccacatgcgaggggaggggagtaataccattaatacaaggatcctttattatggataggaaattaaaacggaaaattgattgaagtggtgggaaaaaataactcagaaggacacccaagaaaaggccctatctaaaggacaatctaccttataaaaacaacggcaataatagggtaaatacgcctaaacgaaaaaaggaaaactgttggtttggaacaaaatgcaaaaaacaaggtggggcgaattgtaacacaaaggtaaaggggggttaaaaaccctaaaacaatgggggtaatcaaaaataaatccaaactcaaaataacatccacaatggggatatactatggcctaaccacgcacaacggggaattaacaatggcaaaacctacaacaagaagatataaagggcgcacagaaataaaaaaaaccaatagaaatagcgaaaaaaaaacagagcgcattaaataggattgtaccaaaccaactgataataataccacttataaaatagataaacaaacattaatatgtaaaaaatacaccggaacacaaacactgcttaaaaaagagagtttaaaattagaaagggtggtaacatcgagacacaccgccttaaaagtgcgaaaaaagaaaaagaagtgggctactctgaggacatataagggaagggactagaacaaagtgtatatagcggaatatcatcttgacaaaagcgtggacacaccacaagacgacacatcttcgaataatagggagatgacg

SEQ ID NO: 196133 - DNA, 311 bp, Glycine max
agcttctgaaggaaactgcctagtctataaatagaagcatgtgtgacacttgttgggactttgatgaatgaaagtcttatgagacacacttcaaagcttcacttctctccctctttaaatccttcaatttcatgctcctccattgtctctttcttttactccattgaagcatcctctgcaagtcacattcttgggggtgaagctacttcttcgatggcttattcccttgtggacggggccttttctcacctattattctttggctttcgctgcatcttcatggcggaaaattaccgttgaaagacctgatt

SEQ ID NO: 196134 - DNA, 497 bp, Glycine max
  unsure (1)..(497): unsure at all n locations
tctaggtcaatttattagcatgcaaaaatataagctaaagcaagaaaagggatgtgctttcgcgctagttgctcatccgtagcttggtctttacgcatgctaaaaaagctattctttgggacgtagaaaggaaatatcctaattcagtagagaacgtagctggtgcacaagacaaaggaggacaggaggggttcgggggaggagctctcggcacatagtcagtcggcatggtctttcatgacccatangctttgggcttcgatggctgcttgaaagacacatattgggaagttggctatggtccgtcgtgcattgtgcagacgactgatggcttacattgccaagagggcattgtgagacaaaggaaagggctgaaaaggatggtgcccaggatctcactattacctatgcatgtgccagaatgcgataccgtaaaggtcgatgtgtcattgcgacacttaccatgtataccgggctagagtgttgttccaccgaaa

SEQ ID NO: 196135 - DNA, 470 bp, Glycine max
agcttgggacattcttgcaaatacctatgctagttctgataagttgaaaagagtcaagatgcatactttgaagcagcaattcgagctattacagacgaatgagaaggaaggtatagccgaatacctaaatcgtgtgcaaaatctgtcgaatcaagtgatggcttgtggtgaaaccttgaacgatcaagatcttgtagaaaaggttttaagaaccttaagttcaagatttgattatgtggttgctgcaatagaagaatctaaggattttgcataaatgaaattggatgagcttcaatgctctcttgaagcacacaagctaagaataaaagagagggaaacagataggtcatctgaacaggctttacttgctcagagtggaaaaatattccacaatggctcacgcagtagtaaagggaaggctaaacccaaataccctaaattgaaaaaacaagagatgatggtactgttga

SEQ ID NO: 196136 - DNA, 426 bp, Glycine max
  unsure (1)..(426): unsure at all n locations
tgcaaaccaaatgctcaccactattagaggagaaatctttaagttgtttcatataaacctcctcctctaaatcaccattaagaaaagttgttttcacatccatctgttgcaactcaaggtcaaaatgagaaactaatgccaagataatacgaagagaatctttcttagatactggagaaaatgtctttgtgtaatctattccttccttttgagtaaatccctcaacaacaagtcttgccttgtatctctcaatgttgcctaatgaatcccttttggtcttaaatacccatttacatctaatggcctttgccccattangcatctttacaaggttccaaactttgttactctgcatggaattcatctcatccttcatggcatcataccataaatttgactctttacaactcgtggcttgatccaaag

SEQ ID NO: 196137 - DNA, 115 bp, Glycine max
aacactgcctgatgcatcgaccaacaagtttgcacctttgatatccctaaagaaccatatacaacaatggtaatcacgttttattaactaaaaagcaaaaagggggggggggggg

SEQ ID NO: 196138 - DNA, 436 bp, Glycine max
tcgacacatgagggaagatattgaatcagtgagtgcttgtagagttcaagtttggagcataatttgctttgcaatttactttgtggtatttatagcagtgtttactggaaccctagttcattaagtttattttttagttcattggctaaagcaaagtactgcatttgcattagtctttttttaatagtccaacttctgtttttctttttctccctgttatggcattgtaactcaaaacagttatttatttgttatgttatattaatagcttatattatctatttatttatttttctttcctaaatcaatacaaagagtgatgtgaaaatgaaagagataagtacaatgagaagctggcttctatttggtgcacaactagtggtcttttttctgggggtttctcttataaacacgctgagagactgggtagctttgc

SEQ ID NO: 196139 - DNA, 339 bp, Glycine max
agcttctcactttttttttcatttgaatttattgacagccaaaagccacatgcatgttgagtggagtcatcccattagtccaaggttcctttttaattgataggatattaaacggtaaaatttgattgaaattgttggcaaatactagctttagttggacgtccaagtaaaggcctttttaatggttaatttgcttttaaaaataatgcctataattggctaaagtatgcttaagcataaatggaaattttgtttttaccaaatgaaataaatttgagctaattaacataagtaatggtgttaattacctaaatcattgtgtaattaaattaatccaac

SEQ ID NO: 196140 - DNA, 473 bp, Glycine max
tgcttgtggagcttctatggaggctggatctttgagcttcaatgaggtcctttaatggtgattttccaccatagagatgcagcggaagacaaaggagaaaaggtaagaggcggcgccatccactaaggaagaagccatggaagaaggagcttcgccaccaagatgagccttggataagaagcttggagaggatgcttcaatggaggaaaagaaagagggagagaaagagagagggggaagcacgaaattgaaggaagaaaaagggagagaagttgaactttgagttgtgtctcacaagactctcattcatcaaagttacaacaagtgttacacatgcttctatttatagactaggtagcttccttgagaagctttcttgagaaaacttccttgagaagcttctttgagaaaactttgttgagaagctagagcttagctacacacacccctctcataactaaactcacctcctt

SEQ ID NO: 196141 - DNA, 321 bp, Glycine max
gcctctttgaatacacaacaactaacaagtattaaaattggaaatatatattgggtttagggtttacacacgaatggataaaaataattggttgtgttttacaaatgcaaggttaagtttgcacattgggccttaaagagactacttccgaatagccttggagacctatgtagtgtttgaaagccatgaacaatatgatcactctacaacatattgaaattaaagcattctttgaaacaactacacatgtggttgggcatgtttttaaagttaccttatacaagaaactatttggcatggtatcaaagtatgtgtttaacc

SEQ ID NO: 196142 - DNA, 880 bp, Glycine max
  unsure (1)..(880): unsure at all n locations
cactgaatcctcaactttcccctaaattcttacattcttcataccccctgtctccnncctcccacaagccccggnaanatgatgcctgcangtgcancctgacacttagagactcagcctacatccatcgtgtattacgaagcacaacgactgattctacgaggatggagtaggatcaatctggatacggtaattgcactaaaccatgcgatgcatatgtgacgagatcgaaaatggataccagaagaatagcacaagactttttgaccccactaagagggacaatgacatcacatttctcatagttaaaaaagacattgttgattaatataacattctaatcgtgtgatcttcatataatgaaatcataaggaaactagtgatgatgcccaatcttaagaagaccttgcacatcatgaatgagattggaatagtgattggggtgagaatcttcatggaaacgatcctatgttgagaattgtacagccaccttgaaaacacacgagctgttttaattcttaaccgccctacaaaataacacctttgctttgtgtccacccggacgacaaaaccacaaaaaaacccttccacctatttgggatagaatgaacaaacaagcacgaaatcgaaaaaaaaaaaatttgtaggaaagggaggtggtgaaaaaaatgggaaaatatctggggggggggggcaccactctctctcatacctctcctccctctccttcatgtacattattcaccatttctactcccccncgtcccgctacattcctccacaccatacaactcacattccataccaacaacaaccaaatttcttacccccaccaacacaacacaagctacacacactacacccataccgactacagcca

SEQ ID NO: 196143 - DNA, 418 bp, Glycine max
agcttttgatactaacaagtgtatgtataccttaatttctcttaacaacaaccatattgcttattgtaggcatggacttaaacaatatcgtaatggttgggcggatggaccaacttatattacacagtgcccaatacagacaggaggcagttatacttatgatttcaatgttactgagcagagaagaacactatggtggcatgcacacattctttggctgaaggccactgtgtatggtgcaataataattatgcctaaagctggaacaccatttcctttcccacagccagctagagaatttgaaattctcctacgtcagattgaatttcaagcgtataatcttaatattggaaggataaaagggtaagaaatatgctataagtaattttttgtgcatgcaatacgtgaatggtggaac

SEQ ID NO: 196144 - DNA, 313 bp, Glycine max
aacgccattttactccctctgttgatcatacattacaaagagaaattatgcttgatgtcacgagtcagctcgattccgctacaataccaaagttcacaccatgtacatactggaaaattatactgacccatgttccaatgtacaattatgagaattaattctgactatcatcctggacacataaactacttgggaattaccactccctagcaggacagaatactagtacattgagctatgtgcatccttgcgaaacatgccaaacctgcaaatcactgatacatgccctctgtaactccttctcgaggaattt

SEQ ID NO: 196145 - DNA, 395 bp, Glycine max
agcttcatatttgtatgtcagttggcattaaaaaatttatttgactaacattttgatataaatcattatcgaataacaaaatttcacattggttctggtcttttgtgaagtagattcttctaatttctgaaatttttttcttttgggaaaagggtggaaactaaggagcttaagaaaagttaattcctaatagccaacagttcatggctaggaattgggaaacctgctgggcgttaggctgatttaatgtgtttggtttaagccgtatcaaattccaatgcacgttgaatgcaatttcactcaaaagaagctttggcgttcaacgtgctaaacgtcaatacaagcagtcttactttctgcaattcaacatactgtcttactgctgcctcctcaat

SEQ ID NO: 196146 - DNA, 240 bp, Glycine max
tccttgagaagtaaggaaggtagcttccttgggaagttagaggggggctattcacacccctccaatagctaagctctccctcatgccaaaatacatgaaaatacaatgggaaacttccttgagaagcaaggaaagtaacttccttgggaagcaaggaagaaaacttccttgagaagctagagaggggggggggggccctttgaacgggttttggctttactactgtcatacgttattttc

SEQ ID NO: 196147 - DNA, 490 bp, Glycine max
  unsure (1)..(490): unsure at all n locations
agcttatttatttgattaatgaatcatattgattattaattaatgctttatttgtttttttaataagcaaaagtgatgatatatattatacacaaagggtaagcaacctatttacaagtattgaaaactgaaaatactatctccataccttggttacaaaatattaacataacaacaatataaatattaagtaaccaaggaatccaaaaagagaaagttcacctccctgcaagtcactgtaatactactagtgacaatcctacccaatcaccaaaaaaacataaataatgccttaccctcccacatgttgttcccaaaatattaatgctttatttgttgttgatgtatgcaatgcaaggcaattgtgaatcccaatgaatgaatgatttcatgaatgagagcaagctgaatgatcctctgaacagctctgattatgtcccaacctatgaggacaangatggtgactggatgcttgccgcgaatgcccatg

SEQ ID NO: 196148 - DNA, 941 bp, Glycine max
  unsure (1)..(941): unsure at all n locations
aactgtccaggagtttgttataactctcactaacatttacctctattcatcgctctccacacgccacctaanacctcccccctnctcntgctaccgcncnctttgattgcctgccattacgagacactatacaatactcaagcctcatgaagatgatccccgatgaaacacgcagctttgatgattataaaaagcccgataaaatgaattcaggattcaggcattgcagctacgactcggattaactttatgcgtcttgcaaaaaggatccccaaggtactagccccgagaatagtgtggtctctcgaatcacgagaaagtgactttctcattgttgtaaaaaaacttagaatacatctcccggcagtagtgtaatcatctcttaaaaaacacacatatcacaaaggttgtttttcaaaatagatatactcaaaattctccaagtcaccgggaggtgttattatcttggggttgataatcaacattccagaaattgatttcctgtggcctcgttctgccttcgaaaaactttaaccgcatgtgcaaagctccaaaccagttctaaaagggtgcacctctgtccgggattccggaatcgactaaccaagcatgatagaattttcactctacttcgggaaagcacatctcttcctaaaaatggccagggaaactaataacattttatgggaatgcgatgtcgttcgacacatacggcaaaataattggggaggagggaggtcctacccccggcctaccccacctatatcttctcggaaaaaaccatctctaatgggcttctctcctccctttacattctttcttatacacctacaccccccatccgctatccaataccactttcgaccccacgctcttgattactctacgacacactttcatcaatcacatgaaaccatcacggtgtcctctccgtcttatct

SEQ ID NO: 196149 - DNA, 445 bp, Glycine max
  unsure (1)..(445): unsure at all n locations
atcctctgagtcacctgcggcatggcaagctttcgattcattctatgtacccgtagtggtccttattgtgtttcgtgcatttttattctcgttntgtttactttttataccccctcttgacgtgcttaagccgttttacttaagtcatttctcgcttaacttaaaaataaaataaatttccaccgaacgtttgaattgtattatccattaacttcggttaaaataaattccgaccgttcggtcgtgccgtaaccacgttggaaatcaaaaagaggtaaaaaaaataataatataataatcaaaagatatctttttagtaaaataaagcggaaaatcaatcggacgttttctctttgggatttctcattcttaatcgaattgattaataactaaagtgaagctaaggctaanatcaactcgcctagtcaagctcgtccacaaaaat

SEQ ID NO: 196150 - DNA, 479 bp, Glycine max
  unsure (1)..(479): unsure at all n locations
tccatcaagtgataatcaaagcataagagcttcacgttctccttcttaaatatccattaattgtcagctttactttttcctacattgttgtttcttcatttttctccatgtatctctgatcgaggccgtacccgaatcaaataaacattaaaaatgaagtatctatgaagtgatcctatgtcgtctcccaacgagcaatgatcaaccaaacgttcataacatatagtaataaaacagtaacgaattatggagggttgttgtttttgtaatttaaacaacgagcaaattttaattagaaaataacaaaattaaaacatgttgtttccccttgattcacaagcaagtctcttatcctaggttacaagaatttatcttaatcagttcaaccacttaatccaaccttaaattanattactaagcgaanattaacataaggctgtcattatgtgaataagcaacacatacaccaattaatcatg

SEQ ID NO: 196151 - DNA, 434 bp, Glycine max
  unsure (1)..(434): unsure at all n locations
gcacctgagctgcagctatgaacaaaatccaggatttatttnnataactttaacaacaaccacacaaaattgattcaaaagtgtgatttctccttcacagatcttgtattatcaatcaattagtaactattcctaaggcattttaatccactgttagattaaatcttttgaagtatatatagttatacaataaatattattctaagaggatattttactttgaaacacaatagtacaaccgaacaagcatttaaactgtaaagtttaaacttcaatgacaaacattgcactctcatgaatggctaaaacttcttgttggtcagacttactatcgacatacatgacaaaaagtagtacatgaaccctcttgaatgttcagagaagataactcatgacatctatgtgatattagtattggtactagcctctcactt

SEQ ID NO: 196152 - DNA, 326 bp, Glycine max
  unsure (1)..(326): unsure at all n locations
agagtaaggagtaatcactccatgatggccttgtttcttgtctngaaccgtgggagtgcgatcttcgtggtcaagaatatcttctccgtgcaccttggtgagttggatggagatggatcttatgtatcaggtgaagtgtctgaattatggtccggttgaagacctaaagcacgattctgtgatcggaaatttgggggaagggaagaaaactgaacgtgatcttgttcagggcatggtaccattatgtcggtatacggatcaatttgtgatggtctgatgtgatttgtttgaaatgatatatgtcctcttggaagctaacatctcat

SEQ ID NO: 196153 - DNA, 506 bp, Glycine max
  unsure (1)..(506): unsure at all n locations
cacctgangcatcaagcttgcaaccaaatgctcaccactattttatgagataccctcatgttganncatataaacctcctcctctaaatcaccattaagaaaagttgttttcacatccatttgttgcaactcatggtcaaaatgagcaacttatgcctagattatacgaagagaatctttcttaaatattggagaaaaagtctctttgtaatctattccttccttttgagtaaatcccttattaacaagtcttgccttgcatctctcaatgttgcctaataaattcctgttggtcttaaagacccatatacatccaatggcatttaccccattaggcaactctacaaggttccaaactatgttactctgcatggaattcatctcatccttcatggcatcataccatacaattgactcgntacaactcatggcttgatcaaaagtttcaagataatttcagctccatattatagcagatcttgcaaaatattaaataatactatgat

SEQ ID NO: 196154 - DNA, 409 bp, Glycine max
  unsure (1)..(409): unsure at all n locations
aactcaagctgctactatactgaaatcatagagaaatagagatttttgcttttcaataaanaangtggcttagcaatccgtaaaaccactggtacttccaactatcaatataaagtatccgtgcaggtcaaaaaaaaaagttgaaacagaacagtaccacaggtactgaaaatataagatacaagacacaaaagtgccgccttccaaaaagcaaaacaaacccaacaataacccagcacaaggaccccaatacatataatcagaaatttaaccaaaggccatcataagcaccttttgaggttcaaaaggaatgccatgaaacagcaaggaatgcccaagcaatcactagacctttctatatctatgttttacacgtgttaaactcaaacatattaaataataactatgt

SEQ ID NO: 196155 - DNA, 217 bp, Glycine max
gacaaaaaagaacccgccacaaaaaacgggcaacacaaagaaaccaaacccaaacgaccccagccgaggtaaccaacccggaaaaatccagatccggcccgaaccacagaaaccacacgcacccaaagacaagaacaccaaacccgcaaaaacgcgaagaacgagaagcacagcaccaacaaaaacacaagaaacccccaaacaaaaaacccacaaa

SEQ ID NO: 196156 - DNA, 463 bp, Glycine max
  unsure (1)..(463): unsure at all n locations
acctgatgcatgcaagctntaccatatagttaagaagacccgtttatgaatgagtttgttgaatcccacgaagcatgatattagccgcaaccatcgaatcagtctcaatccaaagctcctttaaattaagctcccacgcatgctccaaagcagttatgagcccccaaatctctactatcataagagaacaacaacccaatttcctggttaactcgtttatccaatggccattaccatcacgcatcactccaccacagctagccttctcgccaacatctataacagaagcatcaacattgtacttaaaatagcccactgaggcaaccaaacataaagcctatccgcagaacaaagtagcccatgcacaaagatatccatggctcgattagcttccaagctatgaaagatggctctattaatgacatcatgggtactccagaaagcatcatcataaataagctca

SEQ ID NO: 196157 - DNA, 419 bp, Glycine max
  unsure (1)..(419): unsure at all n locations
gaaaatgtggtgcatgcacaaaataatatctagatgatactttttttattgtgtttacaatataactcttaaccggggttatgttaaaactagataggataagaaactaccaccttgtgacctatacactaccatcacgagccactccccacagccaccatcatcaccatttatagatgtactacttagtacttactactaaaaccattttcacctccacccactactcttccttgaaaagatgacacttgtatctaagtggatatttgtctataccattagatattatggngacatagcgcagttgcaataaacttaacaagaanttattcagtttatatactacctnctagcctgatcccttgtcttgaccatntattatcatgctcaccttacacatccttagtttgatgttcctt

SEQ ID NO: 196158 - DNA, 436 bp, Glycine max
tttacaatctccatgcatgtgaaacaaataattgtgtctatttgctggggccctacaatcatcattgcacatgaacagaacaaaaatcctgaagaggataatggggtggtggctatgcaatcccaagtttgatcccctcgtaaaatattcatgtactagttaattaaacaggcttcataaagtttttctagttctcaataataattctatgcactcatataattgagtgaggaacaaaatatatttatatgcgtctgtttactattcatgtagcgattaataaaaaggcaaggacagcaaactaatatacaaattggtgattatgatcataatgattgaactgataatgacggtgttcatgaagctatataatatatagccttatcaatagacttgttctgggtgacagataatttgcgaatagctttgataaagt

SEQ ID NO: 196159 - DNA, 424 bp, Glycine max
  unsure (1)..(424): unsure at all n locations
agcttgaggaatgcaatggcttgtgntatttttgttgactgaagaccaagaattgtgtatatatatagtttgtaagattctgtggaaacccaattcccagagaaagtgactgtcaatggatggagggcatacgcatgagatatcacatggtgttgtcttccgtccaactatgaaggataaattgtgaagacttgcgtaaccccaccttatcatacattaattggccagcataaagcctccacatgtaaccaaatgagacgtgcctcagtgaaacgtaacgtctattcaagcattatttggtattccatattnttgtaaacatgctctgggcatgttctggaaagaatttctggctgatgaattataaggcagcggatagcgagaggtcatatatcatcttaattatntttgatgcctgacatct

SEQ ID NO: 196160 - DNA, 388 bp, Glycine max
tcaattgtgcaagagcgtgtcatcctatggggccttatttgtgcctacgccagctcagaacaacaaaatattttctcaatgcttagaccgacatagaatggtgaagcacatatgagaaaaccttcgatgcatttagtgattgatctcatgcaagtcattataaagaaaggcatgcttttctgttactaaatactgtctgtgtatcaaatatctaagcctttatgcttgtttactttacatgcttctttaattattggggtggtagtaagacagctcgacactggttaacatctagggtgtccgataaacatcttgacttgtaatatgtgctcacacttcattttgagagcaatattctcacattgcatgaacatctaatgtttgtgga

SEQ ID NO: 196161 - DNA, 491 bp, Glycine max
  unsure (1)..(491): unsure at all n locations
agcttctccttccatgggttattctctatttaatgacacctctcacctcttctcttttatcttccgctgtaacttcatgactgaaaatcaccattgaaggaccttaatgaagctcaaagatntagccttcatagaagcttctcaagcaaatttccatcatcctctataaatcagctcgtagatatctacaccaaagctctcatgcctggtcctttctagttgttgtattccaagctaggaatgtctgacatccattcttagcttgaggggtgctcttatcatacattagcttgaggtggttagttcctaatctgatcatataacttgagttagaattagttagttaattacacgttaactattctagcaactaactatataaccaatcgtagtgactaatcattgtaagctaatctcattcaataataattcatcaatgacacatgatagttcttcgagtattgtagcatgtatacatgtactactatata

SEQ ID NO: 196162 - DNA, 405 bp, Glycine max
gaagctcctaatatctcccactctgtttttggtgggccattcttggatgaccttgattttctcaaggtccactttgaccccatttctaccaactacaaaatctaataaaactatattatctacacaaaaggtacacttctctatatttgcatatagggtatttttcctaaagactgaaagaacttgccggagatgtactaagtgatcatctatgctcctactgtacactaatatatcatcataataaacaactacaaatctacctatgaaatcccttaagacatgatgcataagcctcatataggtgcttggtgcattattgagcccaaatagcatcaactaccattcatacaaaccaaacatggtcttgaaagcggtttccactcataccctttgtatcctgat

SEQ ID NO: 196163 - DNA, 485 bp, Glycine max
  unsure (1)..(485): unsure at all n locations
accttaaatcacctgcggcatgcaagcttcccatgagtctccttaccatcaaatgatctctctctncnggaggaagaaaaccatcatcctccacttcactagaggaactatgagaacttttagatgactcactatccacctctctattctccaacataatcatagtccttttgttaggacattgtgatgcaatatgaccctttcccaaacacttaaagcatttaatggaactagttttattgggagggggttgagtaggagaagtacgattacctcttgaagacttcctttcaagatgttgtgaagaagaaccctccttctatgaagtgccgttattcttccaagatgaataagtatatgaaatcttattgtaggtgtgtttcctcttcaggtgttactccactttcacaaccctatgtataagttcatccatgttgttgtagctttgaagctctacaacatcttgaatagccctattcaagcca

SEQ ID NO: 196164 - DNA, 510 bp, Glycine max
tcgacccggatccttaagcaccgcggctgcagcttctaaggaagttttcttatgatatcttctcaaggaagctacctagtctataaatagaagcatgtgtaacacttgttgtaactttgatgaatgagagtcttgtgagacatacttcaaagttccacttctctccctcttttattccttcaatttcgtgatcccccctctctctttctctccctctttcttttcctccattgaagcattcttccaagcttcttatccaaggctcatcttggtggtgaaactccttcttccatggcttattccctagtggatggcgcctcctctcacctcttctcctttgtcttccgctgcatctggaaaatcaccattaaaggacctcattgaagctcaaatatccagcctccatagaagccccacaagcaagcttccatcataatggcaggggaaaataggtccttttggtaacctggttcagcctgctatagtcaatgcagactcttcaactgttct

SEQ ID NO: 196165 - DNA, 384 bp, Glycine max
tcttagtttcagatgatgcagatgggtttgtttctacctcatgcactcctctaatgactatggcatcatttctggcgctaaactgctgggagttggaagccatcttctcaattaaatttctggctttagcaagagtcatgtctccaagggctccaccactggcagcatctatcatacttctctccatattactgagtccttcataaaaatattggagaagaagctgttctgaaatctgatggtgggggcaactggcacatattttcttaaatctctcccaatactcatacatgctctctccactgagttgtctaatacctgagatatccttcctgatggctgtggtcctggaagcaaggaaaaatttctctatgaatactctct

SEQ ID NO: 196166 - DNA, 449 bp, Glycine max
  unsure (1)..(449): unsure at all n locations
agcgtttaactcatctttcaagatcatgctttanacctgcgactgatccctttcatctcttcagagcttaagctcattgatgctgccccacaaagctcctcagaacttggtttggccgtgttcttctttttgggccttcttggtttctcgctccaaggcttcggcggaggcgatattgatgtcctttaattcatcatactcctttcagactttgatggccgctgacttgaacttctatttgactgctcgggcttgttcaaactctgcttttatggcttgaacctccttactttcttctagagcttcagcctcttcctttctcacagcccttagctgtgagagccaatccaacccttgtgtccggactctcagccacttatgataagccgcgatgatccattactgcttgcctaagctctttgctttctgtgaccacattctatgccttg

SEQ ID NO: 196167 - DNA, 386 bp, Glycine max
tctcaaggaagccacctagtctataaatttaatcatgcttaacacttgttgtaactttgatgaatgggagtcttgtgagacaaaactcaaagttcaactgttctccctttttcttccttcagtttcgtgcttgcccctctctctttctctccctctttcttttactccattgaagcatcctctccaagcttcttatccaaggttcatcttggtggtgaagctccttcttccatggcttattccctagtggatggcgcctcctctcacctcttctcctttgtcttccgctgcatctccatggtggaaaatcaccattataggacctcattgaagctcaaagatccagcctccatagaagccccacaagcaagcgtccatcaactacg

SEQ ID NO: 196168 - DNA, 432 bp, Glycine max
  unsure (1)..(432): unsure at all n locations
agctngagatgaggaagtgtagatggatgaaacttcctgcttttattcgttgaccacggagtggtacctggagatatgtcgcggnggtcaggagaccttgnggacgtcaggtggggtgctatttcccaaaaccaagcttgacaaatcccgacccaaccagggcatagtcagtcagtgagaacctgtgatgtacctaaacaggcgagctcctgacagtcaacagataaaaggaactaagaccacaaagcaaggaggcttgtatggtggctggccagctgtgaatcttgtgtgatatatgggttatggcctctggtaatcgattaccaagggtgggtaatcgattacaaggcttataaatgaagacaagaggctaagatggtctctcggtaatcgataccaagggggtgtaatcgattaccaggcttanaaatg

SEQ ID NO: 196169 - DNA, 474 bp, Glycine max
  unsure (1)..(474): unsure at all n locations
gtgtgaaatcgattacactgatttggtattctattactattgattgtttctgaataaatcaaaagatgcaactcttcaaatggtttttgactttttcaaatttgttttaagtttttctaaaagtcataactcttctaaatggttctcttgaccagacatgaagagtctataaaagcaagactctgttttgcattttctatccatccaaaattcaatctatcttttctatcaatccaatacaatcctttacaagccttgaatctctttgaacttcttcttctttgtgccaaaagctttccaaagttttctggttttctaaaccttgaaaacttgtgctattcattcttttcatctcttctccctttgcataatagaattcgtcaaggactaaccgcctgaattcnttttatgtctttcttctccctttctaaagaacaaaagactaaccgctgattctttgtgtctccttctcct

SEQ ID NO: 196170 - DNA, 426 bp, Glycine max
  unsure (1)..(426): unsure at all n locations
agctngagatgaggaagtgttgaagggtgttacttcctgctnttattgttgaccacagagtggtacctggagatatgtcgcgggggtcaggagaccttgtggacgtcaggtggggtgctattgcccaaaaccaagcttgaccaatcccgacccaacccgggcatagtcggtcagtgagaacctgtgatgtacctaagcaggcgagctcctggcagtcaacagataaaaggaacaaagaccacaaagcaaggaggcttgtggtggctggctagctgtgaactttgattgatatgtgggttatggcctctggtaatcgattaccaagggtgggtaatcgattacaaggctaataaaatgaagacaggaggctaagatggtctctggtaatcgattaccacggggtgtaatcgattaccatgcttgaaa

SEQ ID NO: 196171 - DNA, 448 bp, Glycine max
tatggtaagatctgtgacctaaccatggcggaggtctcctctgttgccattgcctccctcgccaaatattatgaccagcctttgatgtgcttcacctttggggacttccagttaacacccatagtggaagagtttgaagagatcctgtgatgccctctatgaggaaggaaaccgtatcttttctcaagattctatccctccttagctagaatttcttaaatagtcaaaatctcgacacaagaattagaccgcgggaagcaagtcgaaaatggggtggttggggtatcaaggaaatgtttgaaagcaaaggcgagagtcttggcaagtcaagacgaatgggccccgttcatggacatcctggcactcctgatcttcgaggtggtcctctttccaaatgtggatgggttggtggaccgggcagcaattgatgcttttctcgccttttatg

SEQ ID NO: 196172 - DNA, 487 bp, Glycine max
  unsure (1)..(487): unsure at all n locations
aagtcacctgaggcattgcagcttcaatcttctaccaccaccgacacctttcattttttatttatattnnaatatcattattactactatgattttcagccttgtattttggctatattattatggtatttgaacaatttactatttccttatttgcatggtatgtttggaccaatattaagtatgttacttgactatctggagtttataattaatctattcatggttgtttgcttcatggttttcatggttcttgcttcttgcttcatgattatggtgatatttttttatgaacattgtatggatgtttaaattaaattattttgatacgcactttggctttttgttgatgccaaacggggagagaaatgggattaaatcaagaactcacatgagtaattacattaattttaagataagcataaattctaaaacatatggggagaatctatgagagtgatcgactagaataagagtgtgtgtgtgt

SEQ ID NO: 196173 - DNA, 490 bp, Glycine max
  unsure (1)..(490): unsure at all n locations
tcggctattattatgcccactggagttgctccttgttttatcttttagagtacatttgactctattaagtgttatccttggaaggaagatttagttgagggtcattatgcctgatttatttgatggttaagcttcaattntgccaccagaaattgtagaagatgttggatcgagtggcctcagaataattaagaaggggggtgtaattaattattcctaaacctttactaattaaaaaattacttttctaaggctnttactatgttgctaagtgaataaagagtagaagagaaacttaaccaaaagtaaaagaggaaattatatgcaccgcggatattaaaagagtatggaagaaggagacaaacacacattattttgtatactggtttgtgaacaacccgtgcctacatccattcccactatggcccttgagatttcttttcaaccttgtaaaaatccttgtacaagccatgatccacattggatgtct

SEQ ID NO: 196174 - DNA, 437 bp, Glycine max
  unsure (1)..(437): unsure at all n locations
agctngtagaatggctagacatgatacatgtctnggtttggtttggntcaaggataaaagggatgccccacattatttccatgacacaaatgcaaaaatgatgatttggaaactttatgcaaaactggtcatgcatgcacctatgcggacactcaagtgtcaaaattttatggtcatgtgatgctagggctcaagattcatttcctctattttaatcaacccaatgtttccaaaatatgttcttttatcaatttgtgcattcatccgagtccatttcgggcgtccggngaaatttcacagcattcacccttcacgtgtagacacattntccaaaaattggttatgatcaatgaattgttttcacagaaaagttgggaatcgtctcttttcacaagcatgtcgttgttttagctagacaacctatatntatttctacc

SEQ ID NO: 196175 - DNA, 499 bp, Glycine max
aaaaaattgatcttgaattacggaccttaaatctcagcttgcatataccctatcataattgatgacctgtccactcttctttcaagaattatggaactactatggctggtctaagggtatgtttcctaatcatttcctgtgaaattggttcccattattaaattcttaaaacactaacagcctataattgttttttgtttcattttctattcaggcaattggatatgactttgactatgatgaatatcatatgtaccttgcttttttcttttaccccatcactttcaaactgttaaaaagtgtttttttatttttaattattgcgtttattatgaaatggtgacattggttttttaattactgcttgcagctctgttcatgggagattaccttatgagaacctaataccagacccagttctgatgaacctgttgctgagcctaccctatatgaaacttgtagttgtttatgacaatatgaacaatagaatggtcacatg

SEQ ID NO: 196176 - DNA, 451 bp, Glycine max
  unsure (1)..(451): unsure at all n locations
acctgatgcatgcaagcttncttaagaagatgtccaaagaagttatagcttatctattcatacctctctaatagctaagctcacctccttgagatgagaagctagaacttagctacacaccccctataatagctaagcttacccccatgacaaaaaacatgaaaatacaaaaaaaaagtccttactacaaagactactcaaaatgccccgaaatacaaggctaaaaccctatactactagaattgccaaaatacaaggcccaaacgaaggaaaaacctattctaatatttacaaagataagcgggctcatacttagcccatgggctcgaaatctaccctaaggctcatgagaaccctatggcctttccttggatctctagcccaatctatctggagtctgctacccaatgccctcgcgggatatgattgcataaaaaagtcaatagtgagt

SEQ ID NO: 196177 - DNA, 407 bp, Glycine max
gcacgtgtcagtcaagtgtatggaccatatcgtttctcttttgctcatcgataatggttccaggttaaacgtgatgcctatgagcactttggagaaattaccattcaacgcttgccacctaaagccgagttcaatggtggttcgtgccttctacggcacccgccgagaggttaggggggagatcgatctcccggtacagatatgccctcacacctgtcaagttaccttccaaataatggttattaacccccctacatctgtctgttggggcggccgtggatccactcaatgggagttgttccctctacactccaccaaaagatgaaattctgattggaagggcatctggtcatcgtattatgcgaggaagacatcttggtgagctgcccatcctctatgccttatgt

SEQ ID NO: 196178 - DNA, 132 bp, Glycine max
gaaaaaaaaagagggaggggggagagagagaagagaaaaagggggaggaaagaggagaggaaggggaggaagggaaggaggagaggagaaaggagagaagaggggagagagagaaagggaaggagaaagagg

SEQ ID NO: 196179 - DNA, 416 bp, Glycine max
  unsure (1)..(416): unsure at all n locations
tgaagaagatattgacactgataatgttggaaatttcttttatgcccgatgaggcattgttgagcttaccgaagacctgttatcatatagtacttatcttatatatgtttacagcattttatgttgagttttagaaatgtttaataaattggtaaaagtactatccagttcacagtaaacggattttattgtgataaaactgttcactatactagtaaacatgtgttattcgcagtgaaattactacaaaaccattttaaatttctattgttcttgtatgtccattgagcatgacaaaattcacaatagattccaatcaacaattacacaaagatgaaattttgacacacatgctacactggagatgaattttgtttgtggcaanattataatttatgagagatgatcaaagacag

SEQ ID NO: 196180 - DNA, 490 bp, Glycine max
  unsure (1)..(490): unsure at all n locations
agcttccacaacatacaagctttacaacatttttcagcataagctatcacaaccaagcgaaacagagcaaaggcagaaaactctgctcaacacatcaaccaaaatcacagctgttctcacgtaaagaccacagttacaattccttcgatccaattcgttaaccgttggatcgactccaaaattttactggaagactatagtgcataagcctacattttgaccgttgggatctactatcagacatccagaactcattctgcactagactntccacagtcgaccacacacaagcatttttctgcacttgtgcaaaattctgctgcacaatttcacagcaaaaattctgcataagtgcagatttcggatatacactttctctcatccaatcttgcccaaatcaattcctacaagtcccatatcatgtatcaatcatgtctaaaccatattcaagcgttaaagcacagcaacacagaatctatgtgtccaacac

SEQ ID NO: 196181 - DNA, 358 bp, Glycine max
attggataatacaaaacatctacaacagaaaacatgaagatgtgagatgtttggttttctaccattgaacaagtcttatggggtgttcttgaaaatggggcgtattaaagccttattcatgatataacatgtagtattaacggcttcagcccaaaaatatttgggaagatgagaatcatttaataaggttctagcaatttctcccaaagacctattgttaacttcaacaactccatttcgttgaagggtgctatgtgcataacagttatgttcaatgccatgctgttcacaaaataaatcaaattgcttattgtataactcacccgcatgatcaactcctatagatatgattgtgata

SEQ ID NO: 196182 - DNA, 474 bp, Glycine max
  unsure (1)..(474): unsure at all n locations
agcttgtgcattcaatatcctgatgaggtgttttctatatgttctcaagactggactaatacatttgctgtccaagtttcaaggtcttgcaggtgaagatcctcataagcatcttaaggagttccatattgtttgtttcaccatgaagccccctgatgtccaggaagatcatatattnttaaaggcttttcctcattctctaaagggagtggcaaaagattggttgtactaccttgctcccatgtccattttcagtcgggatgaccttaagaggttcttggagaaattcttccctgcatctatgaccactaccatcataaaagacattttatgcatcaggcaacttagtggagagagcttgtatgagtactgtgatagattcaagaaatngtgtgcaagctgtcctcaccaccatatttctgagcaactccttcttctatatttctatganggacttagcaacatggagaggag

SEQ ID NO: 196183 - DNA, 388 bp, Glycine max
tagtcgaagtcattatttcgacccattgtatgttctattgtttgacaaataagagaaagaagagtattgcttgaaggatacgtacaacaataaatgataattgaacaattaaatactaaattgttcaacggcttgttttataacggctagttccattacgactaattttataacggcttgtttcagaaattgtaaaaattgaacaaattataatacgattaaaataaaataaaaaaaatcaaacattattcctaaaatacaaattataagacgattataacacattataactacctaactaattataactagattcctaacttactccacattattttacaaaaggctcataatctttgagttgagtctcagacattgtagaagtgac

SEQ ID NO: 196184 - DNA, 473 bp, Glycine max
agcttattactcaaccacaatcttcatcctctatctatgcatctccacaacacaccgtctccacataccattattgtatcaataaccttgaccttaatggttcattatcatcatacaacaaccttgaaacacaagacgcctttgacatttatacttcatacacacaactattatcccaaaatgattctttttttttttgtgcccaacaaacctccttacaccaacaaaactatcatccatcacaatattttatagcatcaccctatcacaacaaccacaaacacaaacatcttacccataaaacacaatatatttgagcaatcaaagaatacaacatcataaatatatttgaccagaaaagactatacttcgtgtgtaaattacatgaaaatggtcttacatggagcttatgtgcatgcaactcaaagacgcattagatatatatcatcagaagtatcagaagtcaacatact

SEQ ID NO: 196185 - DNA, 408 bp, Glycine max
  unsure (1)..(408): unsure at all n locations
agctnttaccaaagatgtagtgctctactatataatncaaataagatagntagttacaaccatattcaggttgttagaaccattatcagtttgttactagttgttagaaatatgttagaaatgtagcatcaaggcagtgtatgaaaggaatattaatgaatgaatgaagcaagtagaatttgcgtatcttagtttatacaggagggtccttgtcctcgaattcaaagaatcacaaatccacctatcctcttaacaattgtccgacctgccatggccgaccatgcgacccgttgtaccaccaccgattgtgtatcttagattatacaaggtcttngtcctcaaattcaaagaatcacgaatccacctttgctcttaacaattgtgcgaccttccatggccgaccatgcg

SEQ ID NO: 196186 - DNA, 401 bp, Glycine max
  unsure (1)..(401): unsure at all n locations
gacactattatactcagcttgagggtaaagtctacgattgcacgtgctcttgctacaatagttagccgnggctatacgagacatctttccaaacaaagtcaggttagcgataactcgcctgtgctttttcttccatgctatatgtagcaaagtcattgatccagtcaagtttgatgagttggaaaatgaggccgcaattatactgtgccagctggagatgtattttcaccctgctttctgtgacatcatgattcacttgattgtgcatctggtcagagaaatcaaatgttgtggtcctgtgtatctacggtggatgtacccggttgagcgatacatgaagatcttaaaagggtatacaaagaatctatatagtccggaagcatctattgttgagatgtaca

SEQ ID NO: 196187 - DNA, 471 bp, Glycine max
  unsure (1)..(471): unsure at all n locations
agcttcctcggagccattcctgctaatgtttatattnggaaaganagntttaccagtgggacattactcttaaaacaaaaatggcatataacctccttccacaaatactaacatcaatgttaatttagagcaagctcatgcgcatatttccctacaatcgttctcttgcccaagacattctattaaccgaaaaaaaatgcacccatatacaatcaaggcagctttgttacctagattatttacacgtactttcaaggtgtatttgttacttacatcacacacatctcctaggctaaattcacatacatgcatagctccaagcatttgtggtaccaaaaaatgcacatgtgcacatcttggtatntctaatacctatacatacacacacttcatgatgaatcttgactatctacacaataaggagctacatttcatgctctttttcaagttgttgctacctaaagcagatgc

SEQ ID NO: 196188 - DNA, 463 bp, Glycine max
  unsure (1)..(463): unsure at all n locations
gcttggcaaattcttcattttgagggcaatttgagctctgnttttanaaacnccgaacttaaataattgggctgcgagtttgggctatgttctgtgtaattagtttaaccaggtagattagatggtcctaatcaaggctcatccattccttctgagtaatcactctatatattagtgttaattagatagttactttatcttttttacaaaataaaattaattacttgttgtacaagctttctcttttctctcttcttctctcaactggtcttcattcttattcctctgttcacatttgttctaccatattcttgcacaaaaatttgtggtctttccattggtgatgatcaataagggctaaacaattaatcaattcatggatccactccaagcaaggctgaatttggagtctattttaatatgtataatcttatgacgggtatcgttctctcaatcatatttt

SEQ ID NO: 196189 - DNA, 483 bp, Glycine max
  unsure (1)..(483): unsure at all n locations
agcttcctggatacgtaccaacacaagggcatgggtatgcttactgaacaagcacaattctctcttgttgcccaggctcatgcttcttctttgttctccttccgtgtacaagttgacaagggaatctccagcatttttccatgtttacatattacttactaacaataaccttattaaaaataagagtaattntaagggtgaagtctcattaatttaaaagttaatacaaataagttacttagaagtgaatacaaataaaatgggtcgagcctgcttagttacctcgaacctatcaaataaaatgtataagaatttttatttataaaaataaaaaataatgtaagaaaatttagaataatttattcaatcctgcattcaatactagcttttatttggcttgattctattaactccatgtcatacatcgtgctngagttangctacanttgctggacttaggttaatgctttatctctagtattt

SEQ ID NO: 196190 - DNA, 497 bp, Glycine max
  unsure (1)..(497): unsure at all n locations
actaagctttataactgttgtgtataaaatcgtgatttcatttactccttattcttaaatgagtattttttcaaaatttatctttattttgataattgttttaaaaaaataccccttttagtaaatatccttaccatcctttttctcataaattcctttcatatgagaaagagagttgtgtttgtttctcgggaagatcatggaggaaagctaaagaaaataaaatgagaaaagtgtggtgactaaggggagaaaagtgtgctagaaagaaagaaaagacaccgcacctacgacaaagattttggagtactgtatgtgctagaaagacaaagccatccccggctaactatatgcctattctttatatatttaanaaatgtagctgtttagtattattttttatactaattttttatttgattaattattttatgtcttcactatatttttgtgtctctgtctttattggaaaaatttatacaaaatatagtacgtat

SEQ ID NO: 196191 - DNA, 160 bp, Glycine max
ggacggataggcaagtaataaaaaaaaaaaaaaggaatggctctgccaccaaaaaaagaagaggcaaaaaggaaaaactgctggacaagaaaagaggcgggcaaacccacacaaggaaccgacaccacaaacgggaaacaaacgagcgggccaagagcaa

SEQ ID NO: 196192 - DNA, 369 bp, Glycine max
  unsure (1)..(369): unsure at all n locations
caagttgagatatataggatgtgggtaagatgaatttctaaatctgccaaattgtgcaccacaaaactgtcatatttgtgcagcagaattgctcaacatgtgcataaaatgcttgtgcattgctggttatgggaaaggtattacatactgggttctggacattttatagtagatcccaacggtcaaaatgtataattattaactaggaacctncataataattctcaagtcgatccaacggtttacgaatctgaacgaagagaatgttactggggtatttgagtaatgaaagttgtatatgtgaatgtctntngggcagattactctgcctctactatgatctctcggctgaggggtagttcataatag

SEQ ID NO: 196193 - DNA, 416 bp, Glycine max
  unsure (1)..(416): unsure at all n locations
gcagcatgcaagcgngcganagggactatgaacaagaatttagcatcttttaaanngccacngaacccggactctggcacgtagccctgactctcattntcatttttgcatccgttacattatggcaatacgacctgacaatttgatgctgcatgcaagaagccttcatgtcagaggaggatatacatggactgatgtgcttgggcaagaaaacacccaagccatcctagatgggtgcttactatgtgaagctgacagaaatattatggatatcgtcaagtcatctgtatcatgcatatacctgggtcaagctcattttattacgaaaaagcatcaataacaaactgagtcaaatgatccgcatcgattgcttcatctgcgtccagctgactctcaagctactcatgacaaccccg

SEQ ID NO: 196194 - DNA, 348 bp, Glycine max
  unsure (1)..(348): unsure at all n locations
tttatacncttatagggataacaatttatgaaaagatgatgttgaatgtcttagatatgctcttcaacatgtgcctaacttggaggagctggacatcagtggctattcaattgaagatgatggaatcaggtcaattgtatctccatttctaagtatagtttgaagatatgaaattagagtagtctctaattgtgtgtcatcaatcttacaagatattaattccctattttgttggagcatctgatacgtgtcctcacataacgttgtttgaaattaaagaactgtgatctcgtctgtgttggaatgaataatctcctacatattcatctctaattcaaatgaccattt

SEQ ID NO: 196195 - DNA, 502 bp, Glycine max
  unsure (1)..(502): unsure at all n locations
gatccttagagncacctgcggcatcaagctttagagcagctggacatctactggtgtcatgaatgaaacatgcagagccattctaaggttcccatttcgaggaacctttctgatgggcattttgaagagtcatcaaaataatcattttgatttatgttgggagtgaatccatatttgatgaattcagttgatgaagtttggattgatatccaatgttgagtagcatagctntatcactcttaacacttcttcatagcttaaagcattctgaagtcgattacttcagaaagactcagtagaacttcagttgttggtgtgctagtgctttttccaaggtgagattgagtgacattcttcagtgtttcattcttatgtagttagtctcacattctgatgtgccatcaatgtatgtggcaacatatggaaagtgaagactctatcnattcagtctttatgtgtctctgctatgggatctatggatacaatgtgtcatggacgtttt

SEQ ID NO: 196196 - DNA, 417 bp, Glycine max
ttctacagtcctaatgacattccaaactaagattacttctctcttctcttcaattaccactaaatccagatttgtgctttcaaatcctcaaagcatcacacttttccactcatatcactacattatcactttgtaaccctatgttaactctacccttcatctctatcatttctccataagccatttcatctcacaatcatcacaagcatcatcataaaaaccctaaaacataatgggtaaacgtgactcataccaaacatgacaagtttaacatactttcatcataattcttcacaaataactatcatatggcataaacctattaaaactacccatcatatctcccaaagcccaatacccacaataatttatgtgagataaaatctacccaaacctgatatgtgatagtccacaatg

SEQ ID NO: 196197 - DNA, 412 bp, Glycine max
gcacttaccatgacatgctgactgatcataaaaccatctagatccattccattggtggaaggtgttggcaaaagattgatcttactcatccagcttcctttgactctcttgcattggaacctgatcagatacatgccattatagattgattgaatcggtttttgcgacggatggagctctacaagaaggtggggaagccttgtaaacgtggctacctcctttatgggcctcccgggacaggaaaatctatccttatggctgctttatccaactacttgaaatctgatgtgtatgacttggagctaagctctatgttttctaactcggaactcatgcgagtcatgatggatacatccaaccgctccatcattctcatctatgacatatactgcaacatatacgtgcattgctc

SEQ ID NO: 196198 - DNA, 460 bp, Glycine max
  unsure (1)..(460): unsure at all n locations
ttaagtcacctgcggcatgcaagctnggtatggagatggaatattcagtcttatttctccgaaaggcggcgagggtggccgatcaactggaagcatctcaagcatcanattcaataatagaagctgaactaagaaggttgaagatacagtctgatcaatggagaaaggctgcataggcagctgctgcaatgctctcatcagggaacaatgggaaacttactgagagatcaatgtctctggacaacaactataactctataatgaacaagtactcacctttgtgtgaagagcttgatgatgatgtatttcagaccaagataaatggcaacatgctcaagaagatnggggtcttgtggaggaaacctaataatatagcaatgttggctgattacgagttatgacccgcctctaatgttatgattactgtaactgctatggttatgttatgcaattntgtctg

SEQ ID NO: 196199 - DNA, 388 bp, Glycine max
ctctatcttatagaaacaatgtttaacttaagtgcatactgtatataatctgactgacagtatatcattttattcaatgctgaacgtatttattaaatgaagggctatatctgtcttttgggggtgtaagttaaatgctagtcatgttgaattgaggtaaacattaatgttagtacttggtatgttagtgcgtttccacaatcaagaaaaaaggaagtagagtatggaagagaagtgttagaaaacccatttttttacacacatccttcttaattggttgtgaaaagtactagttacaataaataagaaaagagattatttgatatgatctgaaattcataaaaaatccatcttcaatcaatttaatcagtaaaagatatgtgcttaa

SEQ ID NO: 196200 - DNA, 416 bp, Glycine max
ccggatcctttagtcacctgcggcatgcaagcttacattccgccattctgttatcacttatatgatgtcgcctccgctatgagaggtcttgttggctacaatctcttcatcatccccacatatccatccatccactatgatcttctgcggcgtcgaggttgtgtcgagagaagcctcgggcggggcactcgttggaagcaaacgagtgagtcctatcaatggatctccgcttcctaataatgggatctgagtcacagcgagcagactcggcggcatgactcaggcgaagctgtattcctgagttgcgaatgaggggtatgatatctattgagagtgcggtgtatgagtgaaaactattgatctgtggcacgcttatctgtggggtatgcgggttgacgtgtagtgatctctacgag

SEQ ID NO: 196201 - DNA, 312 bp, Glycine max
ttcgctacaagagatcgtcatgggctggatcgctctttctgttcatatcctagctgacgaaggacaaaggttggggtcttctgccatgcgtaccggtttaaacttcccttgcgtgcctatttcacacattgtttgaatggcctttattgtcatatactctcgctataatgtatatcaccttttgttcctgcaataagaagtttggtctcctctcatgggaattcgacttatgttttatctcggatccctcctagcttattacctattaatgaagttgtgtctcactttctggagcattaagtagatatcttg

SEQ ID NO: 196202 - DNA, 489 bp, Glycine max
atcctctgagtcacctgctgcatgcaagcttgagatccatcaactattatcatcttttatagctcctccaaacacaggggcagaactaggatattttcttaagggggccaaaatagaaaataatacactctaaaactatgttccccaaccattgtcctacaactctatttaagacatcactaatagaatcaaagtaatgatcacctttcataagtgttgtccttgaaaatcctggtatttattagggatcaaaaaatattttaaccagacttaaaatatattattatcctacttggtttatgcactaacatccacttaggcatataaaccatttgaattcaaatataaacaatttttttttgagtgtgtagtcgcttatcaactaactgttgtataaaaactttgcaaatatgtatagtttcccaattatagtctttgtggaatgtaataactctgtgtgtctgacctatcattaggctatttatggat

SEQ ID NO: 196203 - DNA, 356 bp, Glycine max
cgttgcacaggaagatgaagaagaagaagaagtttatgttcttatagatccaaaggttgtaaaagaatatatggaaaagttgttcgtaaaggctgtaagtattgtaagttgacttcaaacgcaaatcaaggtattgcttttatagactcttcaagtctggtcaagaaaaccagtggaagagttataacctttataaaaacctgaaaaccatcgaaagagttacatcttttgatctttcttcaaaacttgtcactggttatcgattaccaaatccttgtaatcaattaaacaaagcattttttgaaaggatgtgactctcacaaattaatttgaatttgcaaagtcaaacacactga

SEQ ID NO: 196204 - DNA, 439 bp, Glycine max
agctcgtgctattacaaggacttttaccttacctttaagccagatagcttccttcactccttcagctatggccatgtattctgctttagtagttgaaagagcaacaactgattgatgatttgctttccaactaattgttataccaaacaaagttaatacatatccggttaaggactttcttgacctacattttctacaaaatctgcatctacataacctgtgattgctgcctcatgtgttgtcttcttgtaccttaatccagcattcaaagatacatttagataccttagtgtccactttacagcttcccaatgtgcactgccaagatctcccatgaatctgcttataatacttacagcatgagccaagtcaagtctgctgctaaccatctcatacattatgctatcaacaccactgacatagggtgtgtgattcattt

SEQ ID NO: 196205 - DNA, 434 bp, Glycine max
  unsure (1)..(434): unsure at all n locations
tatctgtgtgttatgtacttgtggcactacaattcggttgatctttacaatatatagagaccattgaggactatgaaagcaacacatgcttacaatttatgtatataagcaaatgttaaatggaggattaacccaacaaagagctcaatcaccattctacgcctgttcttggtgggtcctttcattaatttcttcttgattacactaatgacatgattgtgttcctaccagtttcgatacagaattaaagaatggtgggaatattaatggtaccatatgtgaatcaaaatagaatatggtactctggatctaaaatagataaatacgtaggtacaatatctgaattttacttaattagatatatggatttaccaattatataaaactggattgaaccngaataataatggatctttattttttatgttgaacat

SEQ ID NO: 196206 - DNA, 465 bp, Glycine max
agcttgtcagctcctcaacccataccctatccatagcagacattttctcagcacttagaaactaatgaggcaataattaaaactctctgttctcttgtttttgcttgaaggttggagctgaagtgagtgtggtttatataggaatagtagaaaggctaatgaaaggggcttagtagtgttgtgtctgaaaactatgagcttttggcgcaccttggatgcggtggcacacaggaccgagtcaattcaattggatatactctaaagtttgggatattcggtgggagaatactattggcttactattaatacttttctagaattgtggccccagtggtatggaatatgattgtgatagcaccatggtttgaaatttattgagggcaacgataagatgagtgtcaacattcaattattgctgttcttttttcttatattgtaccattcttccccaactttactgatttc
